United States Patent Application Publication US 2008/0008996 A1 - sequence listing, part 11

SEQ ID NO: 68323 - DNA, 365 bp, Zea mays
  unsure (1)..(365): unsure at all n locations
tggacgtgataagtgccttcctcaacggtcctatcaatgaagaggtctatgttgagcaacctcccggctgtgaatatagtgagtaccctaaccatgtgtataaactctctatggcgctntatgggctcaagcaagccccatgagcatggtatgaatgccttacagatttccttattgcatatggattcaaagtcggaaaagccaatcctacactctttaccaaaacacttgaaaatgatttgtttgtatgccaaatctatgttgatgatatcatatttgggtctactaacgaatctacatgtgaagagtttagtatgatcatgacacacaaattcgagatgtctatgatgggggagtggaagtac

SEQ ID NO: 68324 - DNA, 481 bp, Zea mays
  unsure (1)..(481): unsure at all n locations
agcttctaaagggagagcacattttaggattatttatatgttcatttgagaaagacaggatttgtagcgcatgctatgcggngaagcaagttggagtccatcacccacacaagaacatcatgacgaccgacaggccgcttgagctactccacatggatctattcggcccgattgcttacataagcatcggcgggagtaagtattgtcttgttattgtggatgattattctcgcttcacttgggtattctttntacaggaaaaatctcaaacccaagagaccttaaagggattcttgagacgagctcaaaatgagttcggcttaaggatcaagaaaataagaagcgacaacgggacggagttcaagaactctcaaattgaaggcttccttgaggaggagggcatcaagcatgagttctcctctccctacacgccacaacanaatggtgtagtggagaggaagaatcgaactctattggacat

SEQ ID NO: 68325 - DNA, 356 bp, Zea mays
acgggactcactgatctattgcagattgctcccgtggcggcggctcgctaggattgtaacgggcgttaacggcgtggaataataggagatacgctaaagatacatcgagtcgagtgggcctgcagatacaaggggagttattaacgaaacacggaaggcgtaacccaaacgtgtgtggagcaccttccatcaagtcgactcgacccgctccgagaataatatcgacacaataaagttgagatgaaacatatatttgtgggccacagtcctttcaatcatatcctgagcttcgagggcacaccgctaggtcgtggttacactctctcgtgcgaaaaatcacccagctcagactcagt

SEQ ID NO: 68326 - DNA, 440 bp, Zea mays
  unsure (1)..(440): unsure at all n locations
aacacatcaaacctatagagctatgaaaggagaacaattcttattaagtggccaagcactaatgctatgtaaaaattggagaaaagcaagcccaaagttgggatgtcagtcagcctcaagtctcaaactctggttaacagtgtgtaggatcaactttggaaccatgtagcgctcgattcggtggttgtttaaccaaaacctctgtggcaaacttgaagctagtttattgaactacaagtttgatgtagagtgttggtctggtcactatataaaagttggcacaatttgccctcaaaagagctctatcaggccaactgaataaggtttgcgatggtacagtgcgctgatcagattgccagctcagtccctcgccgccaatgagccgcgcgcggatttgtgctttcgccgccgtgattcgcgctcggatcggntggatagca

SEQ ID NO: 68327 - DNA, 452 bp, Zea mays
  unsure (1)..(452): unsure at all n locations
agtctcttatgcttcgggatgccgaagatccgataaacaccttccctaagatcgttgccgagaaacgattaatataatccgagcgcgatgtggtcccaccatgcatcatttacacgcgtcctggcaattcaccttctcggtgtcggtggcccaccgttcagtgggtgcggtgggctgtttgtcctgtgcggaagagttgacgatttacctttccacctgcggcactatataaatagatgggtaggtgtgaagttaccacagcattcattgctattgcactgttttgctgccaaaaatttgaccatagtcgaagcttgcttactgcatcgtcaaccgaagctattcatgttgctcaagcttcgtaacaagaaagagcttcgacatagttaaaataattcaacttcatcataaaacaagaaattcaatcattagatggctanggtatgctcaac

SEQ ID NO: 68328 - DNA, 495 bp, Zea mays
  unsure (1)..(495): unsure at all n locations
agcnttggtcttggcatagtgatctattgatgtttataaattgtaagttgagaagttaagtgatcaagaaagtaagtttcaagtatacgcaaataagtatgagatcaagtgagggaatgttgggttgatctcgtgttacttaagcctaactaagttctaagtgccctgatcaaagacgtaactatcatgttagttgtgacccccttcacgcgcgggaataaaaaggttaaggctttgttcgtttacgtcggattagacccggaatcgttctagctaattaaagtttatataaattagataagcaattcggctagaaatcgttccgacctaccaatccgatataaacgaacaaggcctaagggaccggcttagaaaccaatgttgtccagaccaccctaaccaccacagtgaaaccctaatctgatctctaagtcctgcagaaatgaggaaagattgatgttgtcctaaccaggaaaattaagaacattagatctt

SEQ ID NO: 68329 - DNA, 360 bp, Zea mays
  unsure (1)..(360): unsure at all n locations
gtttgactggcgtgagattcaaactcatccaatcccactcaatttacatggattgagagctaaccgaaataaccctaacagtttatcacctgtgtagggcattattgccgccgacgtttggctagctctctctatctgatttngaatatagcggtgcaaaatattattttatattatagataatattgtttacagagtatggtttaagataaaagaaggggtagagatagcctaaaaatttccgctgatgcgcgtctacctacggcctgaacttcatcatcacgacatggaagatcgccatcaatgatccatctgccctgttgtgcgtcgcgtgggaggaacatggagttacttcttatg

SEQ ID NO: 68330 - DNA, 367 bp, Zea mays
  unsure (1)..(367): unsure at all n locations
agctngaagccatggtaagtagcataggccaattatatacgaattgactcaagcctagctacgggtgcataggtttcaccgaaatccaaaccttcgacttgggagtatcccttggccacaagtcgggctttgttccttgtcaccacaccatgctcgtcttgcttgttgcggaagacccatttggttcctacaacattttgattaggacgtggaactaaatgccatacctcattcctagtgaagttgntgagctcctcttgcatcgccactacccaatccgaatcttgaagcgcttcctctaccctgtgtggctcaatagaagaaacaaaagagtaatggtcacannaatgtgcaacacgagatctag

SEQ ID NO: 68331 - DNA, 364 bp, Zea mays
tctggcgactcgccggcgacctctgcatcagcagccatggtcctatgactgacgcaaccaccggaaggctctcgttcgcgtgcccactcataggacacgaaccatacatttaagtcctagagccggatgtctgtccgtatgcggcgctgatggcctcgacggtggggaagctttctccaactgccaccacgtcaacaccgacggcgacgtacgcccctccaccaacgccacaccatcgagcacgggccgttccaaagcgcaccggcatgtgctcgctcccgtcctcgccacgaaagcgatgacagatgacggaatgttgcatcctagctgggcagcaacagttcgacttccccggcatggctgg

SEQ ID NO: 68332 - DNA, 481 bp, Zea mays
  unsure (1)..(481): unsure at all n locations
ctgcagcttttaccatgggcacgggttcttttatagttgagcaangcactttccttttagctgtgtcaagctcattttaagcctctcattttcttctttgagctttagatatgaatcatcgcttgttcctgcaaattctagctcaaaggaagatttgcttgtcgacggacaacaagcattagcacatggtaatgtagtttcaatttgaatacatgtgcaagagtgaggttgttgggattntaagttttctatcacaacctcatgagcaatatttaatatgatatgatcatccataagattttcatgagaatagagaagcatatcatattnttcttgaanagctatattttcaacttttagcttttctacttggtccttaagcaaggcattcctatntactaattgagcgatacaatgtgaagcgttatcttgctcaattgaaatagtttcatacctttggaccanatcaacatgagagcac

SEQ ID NO: 68333 - DNA, 414 bp, Zea mays
  unsure (1)..(414): unsure at all n locations
tagattacaatgttatttgagaaaacaggatntgtagcgcatgccacgcaggatagcaagttggagctcatcatccacacaagaacatcatgacgaccgacaggccacttgagctactccacatggatctattctgcccgattgcttacataagcatcggcgggagtaagtattgtcttgtaatagtggatgattattctcgcttcactcgtgtattctttttacagganaaatctcaaacccaagagaccttaaagggattcttgagacgggctcaaaatgagttcggcttaaggatcaagataattagaagcgacaacgggacagagttcaagaattctcacattgaatgcttccttgaggaggagggcatcaagcatgagttctcttatccctacacgccacaacaaaatg

SEQ ID NO: 68334 - DNA, 456 bp, Zea mays
  unsure (1)..(456): unsure at all n locations
agcttggtgccaatggagaagcaaaaatccttgtattcttggctgtcaaactgcttgccgttgtcaactgttagatcggatggtactccgaagcggcaaagaatgttttgccaaaagaatttctgtgcagtctttgatgttattgtggaaacagccctcgcctcgatccatttggtaaagtattcgacagcgacgaaggcgaacttaaggttcccctgagccatgggcaggggccctacgatgtccangccccagcgcttgagaggccatgtgtgggcgaatcagtttgtgaattgcgaggggctgcctgatcgaggagaaaacttctggcaggcttcacaggaccttgcaacccggtttgcggcgcagatcattgcnggccagtagaaaccttggcggatcacctttgngctaggaccctggccctgcgtgagagctgcagtaccactgtggact

SEQ ID NO: 68335 - DNA, 311 bp, Zea mays
  unsure (1)..(311): unsure at all n locations
cgagcatagtccgctgcatggcacatgcgcgtnngttgatgatagattggacatgcgtgtcatctgacaccgtctgccagcggagaggactggacgcattatatgctgatggggcacatcattggttggcttggcggcaagcgtctcgtccctactgtaataaatgtagcggctgcgcgactccaatgacacgacgtcagactccttctgttggctcacgtcatgggccaacaaccatgtggtagtatcgggtttctgacttggcggggagcgtggtgcaagctccggacacatgtcatccccggacccct

SEQ ID NO: 68336 - DNA, 422 bp, Zea mays
  unsure (1)..(422): unsure at all n locations
ttggaaagtgattgtataaaaataacaaagccaacttttgttgaagaaaccggtgtcattgcccccgaagcatcccccanagttcgtgattatattattcgtcatgcttcggggaaaaaattattagaaaaagaagagcaagaggcggagcactacgcccagaaactgaaatatccaaagggggcgttaatattcaatggcagcggagaagaagacttcttgtattgtctccctgacagcaaggaaatttctgtctgtcgggagatgagcaggagcttcggattcccaactttagaagatgggctttcggtgctgtcgaagaatgatctagccgacagcctagcttacaatagcttaaaggtgcaacaaatgaaatccttatatcttttgtcgagtctcaaaattctcgtttgttaaaccta

SEQ ID NO: 68337 - DNA, 346 bp, Zea mays
  unsure (1)..(346): unsure at all n locations
ctttcaatctaacattccncctcaatcataactcgcatatgttgagattgtctctaaaggatgccaatttcttcatagtcaaggccttagtaaaaccatctgctatctgatcttcagtggagatgagtctcacttctaagagctctctagctactctttatctgacaaagtgaaaatcaatttcgatatgctttacctggccatggaacattggatttgctgtgagataagtagcccctatattatcacaccacattcttgccgcagctggacagggaacctttatctcatacagaagagattgatccacattaattctccagtagcattggcaagagccttgtat

SEQ ID NO: 68338 - DNA, 364 bp, Zea mays
gcttcccctgcacgccaaggatacacagatctctatcgccactgcacaagaagattgcctcggcaacagacattagaggatccaagcactatattctttatgtccctgggcccacatgtcggggtccagtccttttgtgcatgcccccttcagctataaaaggggaggcatacgacgttacaaggagaggctctcagacctagctttaggcggacactcataagttcatacaagctcccaagcaatacatcacacagttggagtatggtattccgctccggcggcccgaaccactctaaactctcgcgtgctctcgtgtgttgatccaccagtctcgcagcaagcaacacacttacacccctcc

SEQ ID NO: 68339 - DNA, 346 bp, Zea mays
tggactaggtcgtcccagttggagatctgccccggaggctaatgctccatccaggcccgagcggtgtcggagaggaacagggggaggttgcggatgatgaggttgtcgtcgtccgttccacccaggtggcaggccagtcggtagtccgcgagccacagatccggcatcgtctcccctgagtactttgtgatagtagtcggggttcggaatcgggtcgggaacggcgcccgtcgtatggcccggctgaaagcctgcggaccgggtggttccggcaagggactccgatcctccccgctgtcgtagcgtcccccacgcctgtggtggtagcctctgcgcaccttctcgt

SEQ ID NO: 68340 - DNA, 425 bp, Zea mays
  unsure (1)..(425): unsure at all n locations
ggtaagtagcataggctattatatacgaatngactcaagcctagctacgggtgcataagtttctccaaaatccaaacattcaacttgtgaataacccctggccataagtcgtgctttgttccttatcaccacaccatgctcatcttgcttgttgcggaagacccacttggttcctacaacattttggttaagacatggaactaaatgttatacctcattcctcgtgaagttgttgagtttctcttgcattgccaacacccaatctgaatctcttaatgcgtcttccaccctgtatggctcaatagaagatacaaaagagtaatgttcacaaaaatgagcgacacgagaatgagtggttacccccttatgaatatcaccgaggatggtgttcatggngtgatctcgttgtatcgcttgatggactc

SEQ ID NO: 68341 - DNA, 427 bp, Zea mays
tcatcttgcttcgctcagtcctttcggtcgaaatatatttcgccctacataagttacgtgaagtcatcctgttagtaactgtaaatttggcctcataatattttaagaatgccagataatgatatctatatctatactatacttaaagcaccagtttaaacagtcgtgtacaaataacccctcacagctatgtcaaattaatccgttgcacgcctatagatagccaaacggtggaccagacgcccgcgggccacagtatgatgactgtgacggaccaacccgtcggtccatttgattaaatcagcgtagaatgttaaaaatggtgcaagagatggggttcgaacctacggctgggaaataagctcgggctcgactagctggctcgagctctgccaggctctggtcggatcgggtcggatcgcgagcc

SEQ ID NO: 68342 - DNA, 434 bp, Zea mays
  unsure (1)..(434): unsure at all n locations
tctcacgttgagataagctntaatgcacaaattctccccctttgacatcaaacaccaaaaccatattcaagcaagaacataggatgatgtcaagggacagtagggtgttagggaggaaaaacacactatcagaactcccccttactcattaaacatatgcatcatcaacatttgagtaaaattaagatacatatacgcaaaagatcaatacttccttttgtacctttaccatgttgcggtgtacttcccatcttgaaagtatttattctcgagagcttctccacacttgtgcctgattcttttatcctaaccttttcttgttgctaagacaccaagcttagagcaagttatagtattgtgacacaagatgaagcttctattctagtgattacgaanagatgtcaattgaagcanactatcacggctatcaattg

SEQ ID NO: 68343 - DNA, 477 bp, Zea mays
  unsure (1)..(477): unsure at all n locations
tctaaagggagaacacgtgatagggttgactaatgtgcatttcgaaaaagatagaccttgtgcagcttgtcaagcaggtaaacaagtgggaggagcgcatcacagcaagaatgtgatgaccacttcaagacccctggagttactacatatggacctcttcggacccgtcgcctatctaagcataggaggaagtaagtatggtctagttattgttgatgacttttcccgcttcacttgggtattctttttgcaggataaatctgaaacccaagggaccctcaagcgcttcctaaggagagctcaaaatgagtttgagctcaaggtgaagaagataaggagcgacaacgggtccgagttcaagaaccttcaagtagaggagttccttgaggaggaagggatcaagcacgagttctccgctccctacacaccacagcanaatggtgtggtagagaggaagaacaggacactcattgatat

SEQ ID NO: 68344 - DNA, 318 bp, Zea mays
agcttctaaagggagaacacgtgataggtctaactaatgttactttcgaaaaagatagaccttgtgcagcttgtcaagcagggaaacaggtgggaagctctcatcatgccaaaaatgtgatgacgacatcaagacccctagagttactttatatgaacctcttcggacccgtcgcctatctaagcataggaggaagtaagtatgggcttgttatagttgatgacttttcctgcttcacttgggtattctttttgcaggataaatctgaaacccaagggaccctcaagcgcttccaaaggagagctcataacgagtttg

SEQ ID NO: 68345 - DNA, 419 bp, Zea mays
  unsure (1)..(419): unsure at all n locations
ntataactcctagtggcacctactattatcttcggatgcccgaggggctcanaaatgctagaggaagcttcagcagaatgactgccaaagttcttcactcccagattggtagaaatgtgctaacatatgtcgatgatatcatagtaaagagcacgaaacaagagaaccatgctactgatttacaagagacatttgctaatttcagacaggttggtcttaagttaaatccagaaaaattagactttggagtgaagaagggaaagtttcttggttgcctggtatcgacaaagggtattaaagccaacccaagcaaaatcgaagctatccttcggatganaccaccaaattcgagaaagggggctcagagnatagcangaagggtggcatcattgaacagaattatttcaagatcagttgag

SEQ ID NO: 68346 - DNA, 335 bp, Zea mays
agcttggaggcgtctattggttgtcgtcttggtgtagactcctccttcttcttctccgctgccttgaatgcaacgggttgggcttcggatgagtcaccaagctcgttgattttcctcgagccttctatcatgcactcaaaacttacaaaatgcccgataacttcttcgggggtcattttagtatatctaggattaccacgaattaattgaacttgagtgggattaagaaaaatgagagatcttaagataacatttaccacttcatgatcgtcccacttcttgctcccgaggttgcgcactttggttaccaaggtcttgagccggttgtacatgtg

SEQ ID NO: 68347 - DNA, 338 bp, Zea mays
cacatgtgctaagctgttatgctacaccagcccatgttagtcttagcaattaagcatgcatctagaccggcctcctcttttgcaaaatcaactaaatagagtttgccgtctaatacacccttaaaagctaatgaaccataacttcttctaaagacagacacatctagcattgtgaatagacaattatatcccatattacataattgacttacggatagcaaattatatccaagcgactcaactaagaatacattataaatagagtgctcatttgagagtgcaatcttgcctaagcctttaaccttgccttggttcccatcaccgaatatgattgaatc

SEQ ID NO: 68348 - DNA, 390 bp, Zea mays
  unsure (1)..(390): unsure at all n locations
gctttacctagttgattatgcanaagaagatgcctgtctagatgcatgcttaatggctaagacttgcatgggctggctgtggcatcgctgcttaacacatgtggggatgaagaacctccacaagcttctaaagggagaacatgtgataggtctaaccaatgttcatttcgaaaaagatagaccttgtgcagcttgtcaaacagggaaacaagtgggaggctctcatcacaccaaaaatgtgatgacaacatcaagacccctggagctgctacatatggacctcttcggacccgtcgcctatctgagcataggaggaagtaagtatggtttagttattggtgatgactnttcccgcttcacttgngtgttctntntgcangataagtctga

SEQ ID NO: 68349 - DNA, 432 bp, Zea mays
  unsure (1)..(432): unsure at all n locations
tcacggctccatggngaagctatctangggctcgggtgatgctatgtgtctacaggaatggctggccgcggtggccggcgctcgggtggttctggcgggcggcgtaaagcttgtcggagctaagagctgggtctgggaagttaagcgaggtgcggagggagtatgaccgaggctgcactgctcttatatgaacgggcactgtgcacggatgggcgtggatcggtgcgagcgcgtgggctggcgtgcaccggcgcgtcagccgcggtcgagcacgtggcatatcgcttctgctcctgttctaacgccaataggcttcatatcttcgcgaattnggcaagatcgccgtgtaagatttgttccctgatgttagctatgtcgattatgcgtgggagccgaggggctttccgacgtgtacagtgagttatcttgtca

SEQ ID NO: 68350 - DNA, 393 bp, Zea mays
ttatctaggaaaaatcaccatataactagcttttgatgaagcaaatgatgataactgcttggcaagaacgaaacaagactcgtatccgcccaggatccatcttcaacaacagatagtactgctctcatacgaagaaatcatcaggagtagagaggatacaacaggtctccataagatcttcatatttctatcacacattatcatcactagtagtctagtggtcaagacatatgactcttctggctccgaggaccaagaatatgttaatgtctaatttagcttcaagctctgtggtgatgtgggatttcatagttatttgtctactcttctcacttttggtagatcgaaggtagataatggtaagtgatagtcgcctagagggtggggtgaata

SEQ ID NO: 68351 - DNA, 405 bp, Zea mays
  unsure (1)..(405): unsure at all n locations
actcaagcttggtgatcctctttgagcctttgatcatcaactctaagtttacaaaattacctataacttcctcgggggtcatttgtgtatatctaggattaccacgaattaattgaacttgagtagggttaagaaaaacaagtgatctaagaataaccttaaccacttcgtggtcattccatttcttactcccgaggttgggcacttggttcaccaaggatttgagccggatgtacatatattgtggctcctccccttggcgaagacggaagcgaccgagctccccctcgatcgtttaccgcttggtgatcttggtcacctcatctccttcgtgcgcggtctttagcacgtnccanatctgcttagcactcttcaacccttgcaccttattatactcctctcgac

SEQ ID NO: 68352 - DNA, 454 bp, Zea mays
  unsure (1)..(454): unsure at all n locations
ttaagtcacctgacgcatgcaagcttctgatgagaaaagtgaagatgtattggaatcggtcactgcaagcacttcttctattcatattgaagcgggacctttaggagctacgcagtagagctagtgaaggaaagccttccaaaaaagcccacatcacctattcccgaggcacctgcctagggtgatttgggctatattgttcgacatgtttcaggaaagcgactatcagaagagcagattgctgaagtgcaacattatgccaaggacctgaaataccccgagggtccttggtatacggaggaaatgatgaagatggcttcctttactgtctactagacaacaaagagataaatgtctatcgggaaatgatggacaacataggatatctgaagcttgagcttgacctatcntgcatgatgaaggatcaacttgcagacagtcttgcttacaacag

SEQ ID NO: 68353 - DNA, 476 bp, Zea mays
  unsure (1)..(476): unsure at all n locations
taagcaagcaaacgtgcatgtgtgattgtacacaacattgtcgatgtcatgtcaggtttcttgtgttcaatttggctatatgaaaaaatcacccatgttaagatagtttatgaaattggctatatgaattgcataggttgctgaccctaattatgacaaatatggtaaaccacaaggcaaataattgtatgtttagatatttctatcacttctaattgtgtgttaacatattttattgttcatatatatttaaagcaatgctatttttgtaaacctatcgatcgaagactctcgcaaggcacgagcaagctactagtaatatgaaatagcacttgccttctgagatcaaggattcacaagaatctatgtaatacaataggctgaaccaatttcattattttgttatcaataaggctgaaccagcttctgtntctgananaatngactaatagtaattggtaccaccatgatgtctt

SEQ ID NO: 68354 - DNA, 430 bp, Zea mays
agcttactcctccctaggaagggtcgttcatcgttgccaagatattgaagcccagcacatacaagctagccaacgatcaaggtgaggtctacaacaacgcttggaacatccaacagctacatcgcttctacccttaagatgtttcaagtcgttcatatacctcgttctctttacatacataaataaagtctaaccgtcaaggaagggtcagccttgcctcggtaaagcctgaccctccctcgggggttagaaggggggaaccccctctgcgtcagaattttcctcggaaaagttttcaaccaaaacgactttcgtgctttctgactatgtcgataacagaatcctacaagcgagtaagagcgcacataagcggcaaggccgaccgagccgacggactcctacgcctccgggatacggatacctcactcgt

SEQ ID NO: 68355 - DNA, 402 bp, Zea mays
cttggctatcttatgcgggtagcaaatctaaatctaattcctaaatttaacttggtcaaaaagtctaagtgccatgtgtgtgttgaatcaaaacaaccctgcatgcctcacaaggctgctgaggcgaggaatttggcacctctagaactttttcattctgatccgtgcgagatgaatggaattttgacaaaaggtggtaaaagatactttctcacttttatagatgactccactagattttgctatgtgtatatcttataaacaaaggatgaagcgtttaattattttaagacctataaagctgaagttgagaaccaacttgagaggaaaataaaatggttaaggtccgatcgaggtggagaatatttctctaatgtgttcgatgaagtctgcgtggaacat

SEQ ID NO: 68356 - DNA, 430 bp, Zea mays
  unsure (1)..(430): unsure at all n locations
agcttgtgagagcaagttaattctataattaattattttctgtggatgcatgaccatattaagtttccttatgctactataatatcacacaaggacagtggaacatcattttccatttttatatccatatattatttataaatcatttaaaactactcaaggtgcattaaacaagctaaatcactaacttaaccatacatgcaccacaattcatgaaatttttaccagtcaccaagcatcacacagagggtctactgtaaaaatttcaatccattttaagcaatcgagctacagatccaaaaataacaatcaaaacaatcatctntttcctatttaacatgtttcaattaacacaccaagaaaacagtgaacaacctataangtttatantttccctagatggagtatgacaacatctaactaacaaaac

SEQ ID NO: 68357 - DNA, 422 bp, Zea mays
  unsure (1)..(422): unsure at all n locations
tgagacaacaactgcacaacttgcaagaaaatcatcggtacgtcaacaaaaccctgcaagttttacagatgcatcattcagaanattgccaaatgtaaggaagatcaataaaagaattgtcagcatgagcacaaatacaaaacgtctgagtacagaaacacaagggattttttaaacaagaaaatccattctgctttttaaagaaaaatatataaagtggtttaaaacaacaacaaatctgcgctgctggatcaaccttaaggagtaaggaccacgaggtaactataacacctccaacatcgaacttgtgcatagtgtatgaattagtatagcaatatgtgagagtaattttagcatacanaatgcataagagcagaacctagttagggacgtgggtatgatgcatangatatacatggtta

SEQ ID NO: 68358 - DNA, 433 bp, Zea mays
agcttctaaagggagagcacattttgtgactaacaaatgttcattttgagaaagacagggtttgtagtgcatgccaagcaggaaagctagttggcacccaccatccacacaagaatataatgacaacggacaggccactggaactactccacatggatttattcgacccgatagcttacataagcatcggcgggagtaagtactgtcttgtaattgtggatgattattctcacttcacttgagtattctttttataggaaaaatctcaaacccaagggactttgaagggattcttgagacgggctcaaaatgagttcggtttgagaataaaaaagataagaagcgacaatgggacggagttcaagaactctcaaattgaaggctttcttgaggatgagggcatcaagcatgagttctcttcttcctacacacc

SEQ ID NO: 68359 - DNA, 458 bp, Zea mays
tgtgtttacaagaaggaaagtgggagcgctgttgtatatctgatcttgtatgtggatgacatattattgattgggaatgacattcctatgctggagtacgtcaaggcttcactgaaaaagagattttctatgaaggacttacgggaagcagcatatattttgggcataaggatctatatatataagtcgaagaggcttatatgattaagtctagatacctacattgacaaggttttgaaacggttcaacatggaacagtccaagaaagggttcatacctatgtcacatggtaaacaccttatccagatgcaatgttctgcaacgactaatgagcgggagcgcatgagtaaggtaccatacgccttcacaaatggttcaaacatgtatgccatgataagtcacgccccgatgtttctacgcttaagtgctccagtagaaccaagctgaccaagtaggat

SEQ ID NO: 68360 - DNA, 419 bp, Zea mays
  unsure (1)..(419): unsure at all n locations
agcttgtgaaggttcttcatccncacatgtgctaagcggcgatgccacagccagcccatgctagtcttagctattaagcatgcatctagaccggcctcttcttttgcaaaatcaactaaataaagtttgccgtctaatacacccttaaaagctaatgaatcatcgcttcttctaaagacagacacatctacatttgtaaataggcagttatatcccatatgacataattgactaacagatagcaaattatatccaagactctctactaaaaatacattagagatagaatgctcattagaaattgcaattttacctaacccttttaccttgccttgattcccatcaccgaatataattgaatcttgggaatccttattcttgacgtaggaaagtgaacatcttcttttccccgtcatatg

SEQ ID NO: 68361 - DNA, 373 bp, Zea mays
ctatcaaatggacgtgaagagtgccttcctcaatggactaatcattgaagaggtctatgttgagcaacatcccggctttgaagatagtgagtaccctaaccatgtctataaactctctaaggcgctttatgggctcaagcaagccccaagagcatggtatgaatgcctaagagattttcttatcgctaatggcttcaaagtcggaaaagccggtcctactctctttactaaaacaattgctaatgatttgtttatatgccaaatttatgttgatgatatcatatttgggtctactaacaaaactacttgtgaagagtttagtacgataatggttcaaaaattcgagatgtcaatgatagggagttgaagtatt

SEQ ID NO: 68362 - DNA, 410 bp, Zea mays
agcttgtacagtcaatagtattgtaccagaatctaagcacatatactgagcaatatcgtgcttctaaaatacttttatcttctatgccattttgctttttgaataaggaacaagcaatgaaaatttagttttaatttcttgtaatgattttgcttctatcagaacggaatatatcttcttcacagatttacaaagctcaaaagtcgttcctaagggaatgcagagccaaaattgccgaagctacaaaaagtcgttcctaagggagcgcagcgtaagttttgtgctcaaaagtcgttcctaagggaatgcagagccaaaattgctgaagctacaaaaagtcgttcctaaaggagcgcagcgtaagttttctgctcaaaagtcgttccaaagggaatgcagagccaaatacc

SEQ ID NO: 68363 - DNA, 386 bp, Zea mays
acctatgaaactaagcttatacgatgattatccaagtcttccatggtgaagcgatggctcttctccaagatggtcaacgagttgttggcgtcgcggtataacttgttaaggttgtcacgagaagttgcaagggcacgtttctcctcctgcagacaagaatcagttccccaacgtcaagcaagcattaagaacacaacagataagggcaagtaaaagtttaattcattggccaccttttcagagtcaagctgagcattgagagtggagttcagcatgttggcatcattcagagaagcagaaacctgtgccaaatccatctgaccttgagaatatttttcttcaagatcagaataccgacgagccatatctatcatgaaacagtcaag

SEQ ID NO: 68364 - DNA, 402 bp, Zea mays
  unsure (1)..(402): unsure at all n locations
gcagctacactgtttaatctctagggtcttcttttatttattttattaaataaataaaaatacatctacattagttcatgttcaatcctaaaaattagagtgtgtagacagtaagtgaaaccgttttatttaaacagagaataattctatgaacattttgcaatttgaatcactaaatttggagttcatatgcaaaagttatgaaataaacaagtttggaaattcaaaatatgaaaataggtctaattctgtgaatatttaaaagtctagggctaaatctacaagattacaggggcctgcgcgtgaaaaccagggacggtgggttgatttccaataaaccgagggtctctntaagaaaactaccgcgcgaaggggtatcaggtgaatctaaccgtcagatct

SEQ ID NO: 68365 - DNA, 379 bp, Zea mays
  unsure (1)..(379): unsure at all n locations
tcganatcaaaaagaccagcaaatctcaatgagcaagagctaaaaatntttagtgggccgaagcaaaaggcaagcgtgtgtaccaaatgaattcacgatgtgttcttatttatacgcctagggcgttgaaagttaaaaggccccgcttgtcagtgaatgttgctattctagcaaagggaaggtgttttttcggaccttctgctcaaggccttcgtccatatcgcaatctgaatttattatttacaaattaatattgcgaggggctactgttgggggccttcgtcctccgaaggtcctcaaaaacatgatttgacaatgttttccaagtgaattatatgaacaggtattttcggattcagaattatggatatggagcacg

SEQ ID NO: 68366 - DNA, 421 bp, Zea mays
  unsure (1)..(421): unsure at all n locations
agcttctcctggacaagcgctgcacttaccgctgagtgcgaagctgccacatataataacaaaggagcccctggcgtcggtggagttaatgttgtgagatctatcaaatactgtttcagctcttcaaaagccttctgctggattggtccccattgaaagacttcggctgacttcagtacttcgaagaatggtaagtttctctctgctgatctggatatgaatctattgagagatgccaaccttcctgtcaatctttgagcccccttctttgtagttggtggctccatccgaagtatagcttcaattttacttggattagcttcaattccctttgttgaaaccaagcatccaagaaattntcccttctttactccaaagacgcatttttctggattcagccttaaaccagcttgtctgaaat

SEQ ID NO: 68367 - DNA, 456 bp, Zea mays
  unsure (1)..(456): unsure at all n locations
ggtgtagattcttcatcccaacatggacaagtcggtgatgctagagccaacccatattagtcttaacaattaagcaagtgtcaagttcacctctattaaaagcaactaagtatagctgaccctctaacactcccttaaatgctactgaatcatcacttcttctaaagatagtaacacctatatcactaaaaagacagttgtaacccatattgcataattgagatacagaaagcaaattgtaatctaaagattctacaagaaaaacaatggaaatagaatggtcaggtgatatagcaattttaccaagtcctttgaccaaaccttgatttccatccccaaatgtgaatagtttttggggatcttcgttnttctcgtaggaggagaacatccttttctcccctgtcatgtggttggtgcatccgctatcaattatctagctngagcccncggatgcat

SEQ ID NO: 68368 - DNA, 112 bp, Zea mays
  unsure (1)..(112): unsure at all n locations
gcttgtctgcngagctggggccgacatcttgctataagacctatgagaataaatgtgtcgctttgaaggctcaccgcgacagggccatggataaggccgttaaccctgggca

SEQ ID NO: 68369 - DNA, 468 bp, Zea mays
  unsure (1)..(468): unsure at all n locations
tttgacanaacanaaactctattctactattttcaaaatctctcaagtggtagctgatccatttatcactttggcctttattttctccccctttggcatcaagcaccaaaacgggatcaatcttggcccgttaaccccattgcctcaccaaagtcttcaattaagagcaaatggcaataagatttcatgagatgaacttggaattagttaccctctcatcggagtgcagtggaagtctttcatggtccaagtccacctttttcctttcaatcctccttcgagactaaattatcaagctcaagcacaaggttagtctcaaagggtcaagttgtaacacatctccccctaaacatgtgcatcactttgcaacggacttgtgaggtccagggagtgtttgtacaacttgagcaccataataagcaacataatgcanaaaaantgacatgatcaaagcatactacatgtatg

SEQ ID NO: 68370 - DNA, 397 bp, Zea mays
  unsure (1)..(397): unsure at all n locations
agcttctccacacgtagcttcngtgattgtgagagcacctagagggggggtgaataggtgatcctgtaaaacttgaaacttaagccacataaacttggttgagtgttagcacaataatcgccaagtggctagagaggagtctcaacaaaacacaataaccacaaagatatcaatcacagacatggcacggtggttatcccgtggttcggtcaagaccaacgcttgcctactccacgttgtggcgtcccaacggacgagggttgcaatcaacccctctcaagcggtccaaagacccacttgaataccacgggtgtttgctttgcttttcttaatcccgtttggaagaatctnacaacttggagcctctcgccttacacttgaattcacaaagaacacg

SEQ ID NO: 68371 - DNA, 445 bp, Zea mays
  unsure (1)..(445): unsure at all n locations
tctaagggagaacatgtgataggtgtgactaacgtgatattctaaaaggatagaccttgtgcagcttgtcaagcaggtaaacaagtgggaggagcgcatcacagcaagaatgtgatgaccacttcaagacccctggagttgctgcatatggatctcttcggacccgtcgcctatctgagcataggaggaagtaagtatggtctagttattgttgatgacttttcccgcttcacttgggtgttctttttgcaggataagtctgaaacccaagggaccctcaagcgcttcctcaggagagctcanaatgagtttgagctcaaagtaaagaagataaggagcgacaatgggtccgagttcaagaaccttcaagtggaggagttccttgaagaggaagggatcaagcacgagttctccgcttcctacacaccacaagcaaaatggtgtg

SEQ ID NO: 68372 - DNA, 434 bp, Zea mays
gcttatgaagattcttcatcccaacatgggctattcggtggtgctagagccaacccatgttagtcttagcaattaagcaagtgtcgagttcagctctatcatcactcccttaaatgctattgaatcatcacttcttctaaagacagtgacacctacatctgtgaaaagacagttgtagcccattttgcataattgagatacggaaagcaaattgtaatctaaagaatctacaagaaaaacattggaaatggaatggtcaggagatatagcaattttacccaatcctttgaccaaaccttgatttccatccccgaatgtgatagctcgttggggatcttggtttttctcataggaggagaacatcttcttctcccctgtcatgtgggttgtgcacccgctatcaatgatccaactcgagcctccggatgcataaa

SEQ ID NO: 68373 - DNA, 440 bp, Zea mays
  unsure (1)..(440): unsure at all n locations
tcttaatttatcgcgcatgtcaataaaaaagtgcgcgcatgtttgaatggaatcatgcgggagggggctagcagctatgctgatccggtggtgcacgggtggctagggcttactgtatctattggaagcccggtacttccaatatcctattttatgtatatatttatgtatatacttgtgtatttttgtttttatgttgaactatttcaaaaaaatcggacattnttctagtattagcataaaaatcatccaacaattgtttatgattgtatgatgattgagttatatatatcttgacgactgtttcatggactgaaactctacacaattgcagacatttaattttcgtgttcaacttgacgctggtgtggacatgatgagcgataataatccgtgtgtgtctaccgtatgttaaagcctttgcagagaacccggtcatg

SEQ ID NO: 68374 - DNA, 423 bp, Zea mays
  unsure (1)..(423): unsure at all n locations
cactgagctgcagctctactatatatatttgttttattttaaatccaactctaacgatctatggttctagatttatcttggtcttgcagtcggggttgccataaagctggcgtccacgccgaggtgagcggtaccggtgctgagtcccgacgggagcggaggaaccatcatccaagtgacggcgtttcgcgcgctcagcccgcagcagggcgatctcagcatgagccctacttagctcgtctaatgcatggtccagctccgagtttagcacggcggctaggttgactgtgctgttcaacctangattgccctcaccaacaggtgagacaatcacgccttctgcgctgccagatggacggtgggggtaatacttcatgtcgagaccgtcagctacctcaccgagaaccgagcagtagtgcgaaa

SEQ ID NO: 68375 - DNA, 453 bp, Zea mays
tgagtaagcttcacggcctcaccaggaagctatctgattgcttggatccaacggaggaggaccggaatagggctggccacggtggttgctctcgggcggctctggcgggtcgcggggaggttgccggagctaatggcgggctcaggcaagttatgcgtggtacggaggaggcaactgggaatgcagccgagcactgggacgggctttatagccgtggcgtgggcgtggtcacgggcggccgcaagcgcgcggtggttcgcgcacgggcgtgctctgagcgcgcccccgggtgtcatcccgcatcgaacacgtgggagctcgcttctgtcttggttcaacggcagatttgagcaccttagcgtgcgtatcttagcagagacactgtgtacggactctttcctgctccatatgctacctttttgctgtgagttccaagtcaagatatggtcggga

SEQ ID NO: 68376 - DNA, 389 bp, Zea mays
agctctctatgatatattattctgactgtttctcacatgttctttccctagacgaaagacttgatttatttttggctctgcaggaacattgcgtctctgcgagctaatcatgttgggatactttgttatgtttggacagttctatgattgggaactgtgtccaatgtgacacgcatttcttattttaatgtgcattgcagctctgtgagcgtctccctagccccaatggcgagtcaactgttgattgccatcatatctcaaagatgcccaatcttgcattcaccatagccaataagactttcaccttaacaccagagcaggttactccctacttacagtttcttcagtgtttgaattagtagtgaaacattgtctatggaaccatgatc

SEQ ID NO: 68377 - DNA, 365 bp, Zea mays
tactagttaatagaaccacgtgtttgcttcacaaatttttagttcacttgcgaatttccttttttcgagaaaatacaaaacaaaatagctagctgcatccatccaaaagaacttttgatctttcttgttgtagcatctataggcaccaccacgatctacttgctattgacatcatgaagtaaacaagtgattgactacctctatgacctccctcctgacaaagattaaacccccatcattagtagactatttagaaatctattcccaaattatatgaacagaccacacttgacaggacaccttgccgcatatgtatgtaatcctattgtggacatgtagtatacattatatgcctacttttacaa

SEQ ID NO: 68378 - DNA, 465 bp, Zea mays
  unsure (1)..(465): unsure at all n locations
tgaagccatggtangtagcataggcaagtaaaatgcgaattgactcaagtctagctacgggtgcataggtttccccgaaatccaaaccttcgacttgtgaataacccttggccacaaggcgggctttgttccttgtcaccacactatgctcatcttgtttgttgcggaagacccacttggttcctacaacattttggttaggacgtggaactaaatgccataccttattcctcgtgaagttgttgatttcctcttgcattgccaacacccaatctgaatcccttaatgcgtcttccaccctgtatggctcaatagaagacacanaggagtaatgttcacaaaaatgagcgacacgagatcgagtggttacccccttatgaatatcgccgaggatgggagtcacgagatgatctcattgtatcgcttgatggactcttgngtgaggcggtcttggaccgtcatcat

SEQ ID NO: 68379 - DNA, 416 bp, Zea mays
agcttgtgatttatacaatttaaaacaagcaccatctcttaacatagaatttctatggataaactcaacacaagagatggcattagtagcacaagcacttgtttcttatttagcaaccctttatatgtgaagggcaaacgagttgctaaaatagagaaacatcataatatggactaaatttcccttgagccctcatgcacaatatattttgaatgacatggataatatgcatggttgttcaatgaagtctaaagggctgacttaatccatattatggtgagtgtctaatatagaagaatcaaatccaaattaactagatagagaatatgtcacataattttggattggtgatcatatgataatattcattcatcttccaattggacctttatttcataatcaacaactgatgtata

SEQ ID NO: 68380 - DNA, 101 bp, Zea mays
atctattaattgagatttatatagttatggggttttccattgcttttaatctcgagaagtattattaccgacactggaatatttatattccctattttata

SEQ ID NO: 68381 - DNA, 372 bp, Zea mays
agctttcttgtattgttctacaaaggctttaatacagtcaggtattatcaagaaaacaagaagaaaagaaacggatggctactttgaggtaaatattttaaggccatttgtatttacttatgagggttagatcaaatgatagatgatgtcctgcatgattttggaattgcatttgtattgtataaacctgaatataaatgccattattaaatttgtgaagtagtctgatagcatcaaaaatttgtgaagtagtctgatagcaacagaaactataattaattgagtcttattactcacactagatcttgtcccccaccgcctgatctgactacttctgagctgatttggtcaggaaaggtgccatttttaccc

SEQ ID NO: 68382 - DNA, 293 bp, Zea mays
tatctgcgcatagcttcattatgatcttatccttcgtcacaatcgcctttcgtcccactcaagcttcgtcttgaccatacccgattccgaagatgcctgttcacacatttcacttggaaaacatttgtcaatcatgtttttgaggaccttctgaagccgaaggcccccaacaccaacccaaaccaaacttgaaggctcaacgcagacatggtttttggttcttcaagcaaaaagaaagcgtgcagatgaaaaagatgatgatgatgatgatgatgtgcaagtcgtccatgagt

SEQ ID NO: 68383 - DNA, 408 bp, Zea mays
gcttcggatcatccgccgagctttggctcattgctcctcggctttgtcatcctgtacataacaaagcgttataaggtaaattcaagttaaaaggaaaaggtaagcataaggtatgaatttattaccggtttgaggtggcttcgagcttcgtcaccagccaagtttcgcccgcactttgcccagatttgagtaacgaatctgtttccgatgcttcgggcttggccggggatgtcatccaagtctactggtgacaggctaaagtttggtctgtttacaatgtttccatgtgtacaaccagccttcatgaaagcaacagctgtgcctcgagaagctagcagagcacaaaagtcaccatgtccagctataacttcgtcgagagcatcaacttcaccttcaatatgatcaaat

SEQ ID NO: 68384 - DNA, 340 bp, Zea mays
acttcgagacctatgcaatctgaagcttacagcgggtgacgacgaaatctatcaagttagatctccatagttatagggacatgacatcgctgctaatctcgagatttattgttacggacactggatcatatatatgcatcactgtataagaaacgtacccgtatctcttgctatgtccgctccttacgaactcttgaccttgagactacacactattttagcgcttaagcggagacgactgtcagcattgactatatccttctccaagtcagaattactctatgcttgcggtacggctgcttcctttcattatgagaaattggaatcttactattggaat

SEQ ID NO: 68385 - DNA, 367 bp, Zea mays
ttgagcaagcactggcactgagaccagctaaaccatcattgtcaccagtccttcaaagcttaaattatgttcttgaagagattttgattcccaaagagtccaagagcggttctttgtttggaggttttccatccctggaggaacgagataagtcttatgacataaaagactcgatgactgtacattgtgggtatgcctatacatttcatatgatttatctcgatatcatgtaatggttgtctacaattatcagtatctcttttgctgtagctaacctactggttgtttctagatttgtaagagggaaggtacctggtcttaatactgggtttgacatagatgaagctgatcattctgagatgcagct

SEQ ID NO: 68386 - DNA, 430 bp, Zea mays
  unsure (1)..(430): unsure at all n locations
nttaaactcgtttgatcttcatcaacctacaagatgaagtcaatctgcttactttcagccttcagctctaagtttgtgcgaaaactctaatgaggggtatcaaaatcaaaaaatagtgcttacatgctagaagattacaaatgtgatctgggctcaattgcttattactttttttattttgcttgatgatctgttgatgaaataaaaaagtaccctctccttcaccggtccataccatttagatttcatcatacaagaccaatgaaagattctgttactgtttcttggtcatattttcatgcatggtagagtggtctgtcagtctcaaatagtggcgataatgtctatgttatagattacagattggagcacanagttctcggtgatttcccacttaaggtgcgtgaactcttgtatccttgtttttttc

SEQ ID NO: 68387 - DNA, 423 bp, Zea mays
  unsure (1)..(423): unsure at all n locations
actcattggtgcaggaaagcttactagtagtggatccttatgccaaacttttacttcacaaattaagtacttttcctgaatatagatttgcctaatctagagcattcacttgtcctacaatagcttcattttagcagctntagtttcacttgttatctacgatgagggtcgaagatccagtcttcatatctgagaagttcggcgattcgaatcgattaatacctagctggagatctccaaccatatgacatatgtagcacttaacccttgcatatgtcaactcgcacccgggtttctcaagaccagaatgaattcacgcgacccgagagcacagtaccccaccatccagccacttgccagatgggcacacgttactcccgccatctctccactcctagtgtgtgcgagctgttctggtattgg

SEQ ID NO: 68388 - DNA, 464 bp, Zea mays
tctgccacgacgtgatagtccctgaccgaagagaagaataccatgtttgggctacattctggactgccatgacgaaggacttcgccataactgaagtattgcctccatacaaagatatagttgcttcgtagctcatcaaaaactgctttggatctgaatgcccatcatacatgggaagctgaggtggcttgtatgacgggggccatggggtagcctgcagttctgctgccaagggaagcatcatcaaaagtaaaggcatcatgattaaaatcatcataccatccatcttcattgaacaagccttcttgatgaagctccatgtgttggggtcttcgatcctgttcaccttgagcaagatgacgcacttcctcagtggcttcatcgatcttcctttgaagatcagccagccgcgccatcttctccttcttactttgtacttgctgatggataatatcatgtccctg

SEQ ID NO: 68389 - DNA, 455 bp, Zea mays
gtcacctgcggctgcaagctggctacatggactcgcctttctccctatcttctgaaggccatgcctttattacatgttctttcgatcctcacaaaatttcacctatttccaagaaattaagtgaaacaataaatttggattgtgattagcccaaccgtccacacttgcctcatacgttgttcacatccgtatgtcaccaccgttgcctgactcacaaatatttaataaaatgttagagcataacgatcacataaaaattaaatattcaggttagacactctacaacatctaggtattaactataacaatgaatagcttaatatttaattgttcgagtgataaaaaagtaagatactaatatccagtgaggtattgtgtacaccgtacgactggaatcagaactatgaataattctcgattaatataatcttagcaacaatttcttctctagttga

SEQ ID NO: 68390 - DNA, 482 bp, Zea mays
  unsure (1)..(482): unsure at all n locations
ggcatgctcttataaaatatatagttgagagttgtttcaaccaaacaaatatcagtatttcataacggtcagctcacaactcacagctagaatcagattttcagaaatctactgctgaacaagcatacccttattcccttgaatgagccaaataaaatcaacctaacattcagaacctataataaactgcatgtactagaaggctcctttttgttgcactaaaaataaatatcgaataaatactttgaaacagtttaaatcaaattaatacatgcattaaaaacaatataggagaaggatacagggaaaaaattaaacaaatgtcaaaatattatattatacaaatgtcaagtatatacatctaaatatcattattggtaaatttctagcatcatttaatcatccattcaacacaccanagataattggataaaatagtaacactaagacagtactacatagcacattacatggttcattac

SEQ ID NO: 68391 - DNA, 438 bp, Zea mays
  unsure (1)..(438): unsure at all n locations
agcttangaatgagctaaatatacttgattctcataattttgattgaaacattgcacacatagctcaagtatatacctntgatcatatctctttcatttgatgtaaatgcatatttcttattcttcttgtgccaaggctacgactaanatgctttcaagtgtatttccatacttagtggtagattgaaagggaaatggagtcttcggcaaagacaaggcttccattccaaatctggcgatatcatgtaccctttgccgttgttcctccacactctcaattggtataatccttcactcgtattcattntaccatttgtgagaaagtattacgccccataaggcgagaaaatgctaagggctctcaagttctccgtgtttggcacttaatgccacagggggagaaaatattaagcccacagaacaaggaccgcaccacca

SEQ ID NO: 68392 - DNA, 478 bp, Zea mays
  unsure (1)..(478): unsure at all n locations
tctaaagggagagncatattttggactaacaaatgttcattttgagaaagacatgatttgtagcgcatgtcaagcagggaagcaagttggtgttcatcatccacacaagaacatcatgacgactgacaggccacttgagctactccacatggacctattcggcttgattgcttacataagcatcagcgggagtaagtactgtctggttattgtggatgattattctcgcttcacttgggtgttctttttgcaggaaaaatctcaaacccaagagaccttatagggattcttgagacgggctcaaaatgagttcggattgaggatcaaaaagattagaagcgacaacgggacggagttcaagaactcacaaatagaaggcttccttgaggatgagggcatcaaacatgagttctcttctccctacacaccacaacaaaatggtgtagtggagaggaagaatagaactctacttgacatg

SEQ ID NO: 68393 - DNA, 383 bp, Zea mays
  unsure (1)..(383): unsure at all n locations
gcggcgatgccatagccagcccatgctagtcttagcaattaagcatgcatctagaccggcctcctcttttgcaaaatcaactaagtaaagtttgtcgtctaatacacccttaaaagctagtgaaccatcacttcttctaaagacagacacatctacatttgtaaatagacaattatatcccatattacataattgactaacagatagcaagttataaccaagagactcaactaaaaacacattagagatagagtgctcattagatattgcaattttacctaacccttttactttgccttgattcccatcaccgaatattatcgaatcttgggaatccttattcttgacgtaggaggtgaacatcttcttcntccccgtcatat

SEQ ID NO: 68394 - DNA, 410 bp, Zea mays
  unsure (1)..(410): unsure at all n locations
tcagacannatcttatgttaggagtatcagatatctttctttnttatcaaattaatcaatgtcctattactagactcggcctgtccattggcctgagcataatatggagatgaattaagcatcttaaatctgtataattcagcaaactcacgtacctcctttgacataaaagaagtaccttgatctgtagtcaaggtctggggaatgtcgaatctatgaataatatgctcagttatgaactcaataacctncttgtgcgtcatgttctttagagcaacggcttcagtccatatggtgaaatagtcagtggcaactaacacaaaccgatgcccctttgatgatgaaggatgaatttctccaataaagtctaatccccatcctttgaacggccaacgcttgatgataggatg

SEQ ID NO: 68395 - DNA, 434 bp, Zea mays
  unsure (1)..(434): unsure at all n locations
gcttgagacggagacaaccgtggcatgcactatatccctngaagaaaatgtcaaggacttgaggattgccaagaggagggaacaaaagaagaaaatcaatacctcttccaaaagcctcaaccatgcctccataaaaggtaacattcaaggtaataatcaagtcacgcttcacactaagagaagtaagaagtgtagtaaatgctttgaaaagggacactcgattaagtcatgtccctatattaaaaatgacttgattattaacaagaatgataaactttgttttaaatgctcaaagaagggacacttaattaagacttgtccatatttgaaacaaaaaggcatagtgctagaaaagaaaatattaactaaccatgtagcacgcaagaaacaaggaaagaagaaaatcttcagacttgaagatcacctctacatat

SEQ ID NO: 68396 - DNA, 419 bp, Zea mays
actgaggctgtgtatagattaccgccctcttaatgcggtaactatcaagaacaagtatcctttgcctcgtattgatgttctttttgactagatggtcggggccaaggtgttttccaagatagaccttcgctctggctaccatcagatcaaaatacgagcaagtgatattccgaagacggcattctcaaccagatatgggctatatgaattcttggtgatgtccttcgggctgacaaatgcaccagcatatttcatgtatctgatgaattctgttttcatgccggaattggacaagttcgtggtggttttcatcgatgatgttctggtgtactcaaagaacgaagaagaacatgccggacatttgcatgtagtgcttcaacatctacgagagcaccacctttatgccaagttatccaagt

SEQ ID NO: 68397 - DNA, 355 bp, Zea mays
cacatgttctaaacggcgatgccacagcccatccatgctagatttaaccattaatcctgcatctgaccggctactgtgtgcaaactactagccaagtgatggcggtacatcacccttatgaggtggagaaccagaacttggtttagagacatacacatctgcttcggtgaagaagccgttatatccggtattgcacagatgactcacagacaacacggtgtgttcgagcgactcaactaaaaacacagtagaaataagagggctcggatgacatatcaattacttctaagcgtttcaccttagcttgagtgccatcaccgaatatgactgaatcttcgggatccttgctcttgac

SEQ ID NO: 68398 - DNA, 457 bp, Zea mays
  unsure (1)..(457): unsure at all n locations
gacactatgaaactcagctgggacggtcaacaccgacgagaagattgttgctcacctctgttctaatataagtgtaggagcttgcatngcttcaatggccgaactacgcaggtgtggaattgcttctctgatggtgcttgtaccaggactctccaccggcattctgattacgtgatttgtcttgctgctgctgagaataatgtaatattatccacacttgtgcttttctgtggcatatttagctttttcattttttacagtttttttgcctctgaattgtacagcaatattgtagcctctggtggtcttggtggtgaggttttcattagggaccttgatgctgctcttgctcctgtagcccaatctgtggatcaaaagatgatgaggttctaatggaaactccggacctgctttgacaacactgtgcagcatgaattctagttcttaatatgttgat

SEQ ID NO: 68399 - DNA, 393 bp, Zea mays
  unsure (1)..(393): unsure at all n locations
atctctgagtcacctgcggcatgcagcttctaagggagagcacattttaggattaacaaatgttcattntgagaaagacaggatttgtagcgcatgccaggcggggaagcaagttggagtccatcatccacacaagaacatcatgacgaccgataggccgcttgagctactccacatggatctattcggcccgatcgcttacataagcatcggcgggagtaagtattgtcttgtaatagtggatgattattctcgcttcacttgggtattctttttacaggaaaaatctcaaacccaagagaccttaaagggattcttgagacgggctcaaaatgagttcgccttaaggatcaagaaaataagaagcgacaacgggacggagttcaagaactc

SEQ ID NO: 68400 - DNA, 438 bp, Zea mays
  unsure (1)..(438): unsure at all n locations
ggggatatcaaccaaatctgctgctgacaagctgaagtttggcctattcacaatctttccgtggtacagccagccttcagaaaagcggtagctgtgcctcgagaagctaccagggcgcaaaagtcggcatgcccaccaataacttcgtcaagagcatcaacctcgccttcaatatgttccaaggtgctgggcaggttttcggctgaaggtgaatttttttcagaactggctccgatagagtgaaatacgtccttcagccgctgcacgcatcggctgccgaaatttaggcatttctcttggagatccttcaatgatttttgcaaatgtgaatttttctcgacgtcagtcttgagacttgcttcaagtttctccttttcttgctcatnattttctgactntntcagtaattcattctttaaactatcattttcgggctgg

SEQ ID NO: 68401 - DNA, 413 bp, Zea mays
  unsure (1)..(413): unsure at all n locations
agctntaggcaaggattccttcaccatgctcaacgccgaccaaatcatggccttttaccaattgtgatgaagacatatcttctgattcccaacaccaaacgcgtacattctggaattcagattggaactccacctccttgtcaggaggacaacctgggagcgccagaaaagacctgtttttacgcctgtctaggagaagaacaaagcagccangacagcaacaaatctgatcgggctagctttcctagccgattctaccaaaaaacaaacagtctggtgttgttgcgttttctacttcccagtttccgtttctccgctgcgtactctgatatgtgttgaagtcatccgattgcgacctgcgtgacttcatgttgtgattctgggttttcgggagccctttggtattgggtcat

SEQ ID NO: 68402 - DNA, 440 bp, Zea mays
  unsure (1)..(440): unsure at all n locations
gggaggcgtctatgggatgtctacttggtgtacactcctccctctcttcttccgtcgacttgaatgcaacgggatgagcattggatgtgtctccaagctcgttgaatttcctcgagccttctatcatgcacttcaaacttacagaatgcccgataactttctccggggtgattttaatatatctaggattgccacgaatcaattgaacttgagtacgatttagaataatgagagatcttagaagaacatttactactttgcggacgtgccacttattgctcacgaggttgcgcactnggttcaccaaagtcttgatcacggcgtacatgtgatgcggctcctatcctttgtgaagccggaagcgaccgagctcccgctcgatcgtttaccgcttggtgatcttggtgagctcgtctacctcgtgcgcggttttgagtaca

SEQ ID NO: 68403 - DNA, 431 bp, Zea mays
agcttcatcccatttgaactctttacctttctccagtagagaggtaagaggtttcactaacttggaaaaaccctcaataaatcttctatagtatcctgccaatccaagaaaacttctgatcttggacgcatcctttggttgcttccaatctagtatctcacttatctttcctgggtccactttaattccaccatcagtaacgatatgccctaataaagcaacttcctttaaccaaaaatcacactttgagaacttcacatatagctggttgttacgaagtttttgtaggactagccttagatgatcttcatgtgtttcttcatttggagaataaatcagtatgtcgtcaatgaatacgaccacaaactgatccagatattccatgaatactttattcatcaagttcataaagtatgctggtgcattagtca

SEQ ID NO: 68404 - DNA, 423 bp, Zea mays
ttccctcgtctttttaaattttgtgatgaagcaaaatatttctgatgaagactattttgcacagagtatgctactgagcaaagcactgaggatgtagaaagattttgaggataaaaagaatgaaattataatcgagggcctagaaaagaaaatcaaagatcacgaagcttctctggagaaaaaggacttccttcttcagacaatggagggttcattggcagaagcccaaatcgaaattgctagattaaacgatgaactcctccgcaaatcagaaagcttagaacaagaaaggaagagttttgatgcgaggcttgaagctgaagtcgagaaaagttcaaatcttgcaaaatccttaaaagagcttcagaatatatgcttgaacttcggcaaccgtgcgtgcaacggctagacaggtctttaact

SEQ ID NO: 68405 - DNA, 347 bp, Zea mays
ggaagaagaggaagcggctcaagcaccgccgggcgagcaccagcggctgctgggagcgcttccgtgctcatgctgttctgtgatacggcgctatcctcgccgagcttattcctcgactttcaacctattcaccaccgctgtcagaacccttcttgtgacaaaaagttaagcgagcgtcttcttgaccttgcgagactttttgtgcggagataatctcctacgaattaccctcttgcatcttgcgactacctctcctcgtctcgcgcctgtcgattcttccatacctcttcgtcccgtctatccctcttgagctgggacactcttgcagctagtagtactatatatta

SEQ ID NO: 68406 - DNA, 456 bp, Zea mays
actcagcttgcaattttggaagagaaaaaaccaagtattactggttattattaagtgttataagactggttctatgcagggtttcatgaacgttaaggagcttttaaaaatgctgatatttaaggatatcagcataaaatcatcagttcaccaaatgatatttaaggagcttttagaaatgctcatgttcgtggaatccgtggaaatcatacgggtagccccccttcccatatagatcggataaaattatactaccttatctgttttatttgacgccaaatagtgtaaaattaaactacaaaacgtcaaagcacagtaccatggttggtggtgttaggccgaaatatcctctctctcttttttcttcgagaaagaaactatcgtacagcaacgtgccccacctcgagagtgcgtaatacgtagctagcgatgctatgctatgctctatatgtgttg

SEQ ID NO: 68407 - DNA, 424 bp, Zea mays
  unsure (1)..(424): unsure at all n locations
gcttggcctttagagcctgctaagaanataccctctgaaattgaagagaaggcagcagaggaagaggctatagaacggactttgcctaanaaagctgccgctgctcccgaagcaccttccaaagaccttgattatgtcattcgacatgcttcaggataaagattatctgaggaagaaatttttgaagctaaacactatgcccgagaactgaagtacccgaaaggggccttagtgtttaatggtacggatgaagatgatttcttgtattgtctcccggacaacaaagaattatccgtttgctgggagatggccagaagtatgggttttccgaagctcgaagctggcctttgtgccatgacgaaggacgatcttgcggatagcctctgatacaacagtctgaagttggaattttgaagttatggat

SEQ ID NO: 68408 - DNA, 448 bp, Zea mays
  unsure (1)..(448): unsure at all n locations
tatcttatcttctttccacggatctgaccttatctcataattcgttctgagtgctctgcaatcatcgtagagatttctggactttctatattaacaagatctgttaaatctgatttaaaggggctgttagcaatatctttattgtttgggttgtcatagtgaaaaaaaagggtttaagcccctgcnaaaaaaacagaagaagaagaaaaaaaaagaatataataaaaggaaaagaagaagaagggggctgaatctctaaatctgttgtttctctttgtgctgcgctagttgttctttttcagtgactacctttgtgcctaggctcacgtctctaacctggtttagcctaggactagcacagtaccaccgctgaacgattattcagcttgcttttgtaactaacgtggtactagtgtattccttgcttcagcccacctacaactctaca

SEQ ID NO: 68409 - DNA, 398 bp, Zea mays
gcatcaagaggctgatggtatatggggactcactggtggtcacaagtcagataaacaaagagtgggattgctcgaatgactccatggggaaatactacaccgtcgtccgaaagctagaagacaagtttgaagggctagaatttcatcatgtggagagagatcgcaacgcggcagctgatgcattgtcaaagctaggatccagctggactcaggtcccgcctggagtcttcgtctaagaagtactgcgcccgagcatctcattggatcgggcagaagagtgcaatattctgagccaaccagagtcagattctgatgactggagggagccaatcattagatatataaagaacgaggaggagccgggtgacaaaatgcagcagagcgcatcgcaaggcagt

SEQ ID NO: 68410 - DNA, 412 bp, Zea mays
tgccttcgcctcagtataccacccgcaatccaacggagtcttgtaacgcgccaacggtaaaattttcacagccgtcaagaaaatgctcctcgacgacaaaaaaggcaagtggccagacctgttacctgaagtggtctgggcgctgaacacgactgagtgcacggcgactgggttcagcccttttcgccttctatacggattggaggctatgactccgcaagaaataaaacatgggtcaccgcagacagtcgcattggccgtccccgacgtagacgagcctacttcgaaggacctcatcgacggagaccgcgtcttcgccctacaggctctaaacaaataccaagctcaaacaaaagcatggcgcgaccacacggtcatcccgagggaattcagcgaaggagacctcatactc

SEQ ID NO: 68411 - DNA, 405 bp, Zea mays
gctgagcaacacgaggtgatctagatatggttagtcgccccatcttacctcgactggtttgaccacactatcaccttcgaccgctccgagcatccagagcatgttccccaacctgggtggtactcgcttattgtggtccatatcgtcagttcggtacgactgacaaaagtattgatggatgggggaagtgggttgaacattctatacccaccaccttcgaggccatgtgtatctgtagggaccgccttcaaccaatcagaggttccttccatagcgtcgtacctaggaggtagaccacgccctttgggtagatcgacatgcccgtccacttcaacgtgtcttccaactttagaacggagaccctcaccttcgaggtggttggtttctggcgaacgtaccatgcca

SEQ ID NO: 68412 - DNA, 361 bp, Zea mays
tgtggttttgttataactaacgccttctaactgtatattttatctgccacgctggaggtgagttggctgactacatcattgttcttaggaacaaagatgccatcaaaacttttagtggaaatgcacatatgtcaattggggctggtgttagtgcttctgctggtcattttggacgagtggcagaggctgatttccgtgctggtgatggtggttatgctgcctgttacacatacagctgtagcaaaggtatatcctaatgaattgtccacattatttatgatttggccacattgctctatggaaagctgtcatggaccttcggtccatgggataactgtcttctccggcgaggttatacccc

SEQ ID NO: 68413 - DNA, 410 bp, Zea mays
  unsure (1)..(410): unsure at all n locations
gcttgtgaagattcttcatcccaacatgtgctattctgcgatgccagagccagcccatgttagtcttagcaattaagcaagtgttgagttcagctctatcaaaatctaccaagtatagctgaccctctaacactcccttaaatgctattgaatcatcacttcttctaaagacagtgacacctatatcagtaaaaagacagttgtagcccatttgacataattgagaaacagaaagcaaattgtagtctaaagaatctacaagaaaaacattggaaatggaatggtcaggtgatatagaaattntacccaatcctttgaccaaaccttggtttccatccccgaatgtgatagctcgttgggaatctttgtttttctcgtaggaggagaacatcntcttctcccctgtcatg

SEQ ID NO: 68414 - DNA, 460 bp, Zea mays
  unsure (1)..(460): unsure at all n locations
cttgatcaaagttntaatgtcaataattaactctactttctgtgggtgataccagatataaacaagcatcaattaataattaataagaaagaataaggatgaaatggttcatttgacaaaactgatttactgtaacataaaattgttattgcgccatgatacacagggttgctttcaaggaaaaaaattgaagaaaaaaaggaagatttctagtactactttgttccagtgacttctaaatgatagtttcctcataatacccaaggtcatgtaggaacctgactaaactaagcaccttatgttaacacagtgaaaacaaagcactacttcaaaaaaatccagcgcttacaaaatgcctgaattcatagggatatatagcataatacaatgtctatcanaacatagcacaacaacaaatggtgaaatactaaaatgcatcctagacaggtactgtagttat

SEQ ID NO: 68415 - DNA, 442 bp, Zea mays
  unsure (1)..(442): unsure at all n locations
agctnggtgaagggacatcttccatcgcggagccaagatagtctgctcgtattggccgaagcgccgaagaatcgaatgaagtgccaaaggttcctgcaaccggatcgatcgaagcgccgagacatactgccgaagctaaaggaaaggtagccgaagagccagaccgagaggaaacggcaggaccaccaaaaatcttaagtccgccactggagccagaattgccgaaggtgtcaaagctcctgcaataactcccaagaggaggaggatggcaagcgtgctaaacgctgtcatggagtcgacaagggcattaactcctgcccatgcaaagaaggttgccgaagctgctacagctcgcgttgaagccgaagctgggcccttagtgcccactgaggcagagcctactggaaccgagcagagaactgaacaagaatcttcagatgct

SEQ ID NO: 68416 - DNA, 444 bp, Zea mays
  unsure (1)..(444): unsure at all n locations
nntgatgcacctctcaactgtagaaccacaacgttccatatttcaatactctgctcaacaaagctatcagccttgagagtaagatgaaggagttgattgaccataagaggaagtcctagtatcaaggccagtctagcaggaatgtttgttacttgtagagcatccggagctctcattctcgcttcgtaggtcagagtgggagctatcaaaaccagattaaacgctcaggccagtagacctagaagtacaaccggcaagggcagaggactggtggaagtcagcagaatcgtcaaggaattgccacgaacaccccaacaaagactagcaacctagtttccctagtgcaccccaatggctgtttcaagtgtagagagggtgggcactatgcctatgcctatgccctatcccagagaaatttctagacagcacagactaataacaatc

SEQ ID NO: 68417 - DNA, 439 bp, Zea mays
agcttatatgtattctgagatgaccattttctctggaggaagggtccatcgcaggcatgtcaggacgatccataatcccaactcaggtgatgacagaggaaaccactctcaaggcatcagctgagctcccagacttcagggacgcaacaaagctcttacaggtaggggtggtaatgggctctagattttacactacaaaccttaaggatcgaatcggattaggatcgggccctattcctattcatttttgaactaaaactatttaagggccttaactttttgtgaagggacatttggatcgtgatccattaccacccctacttataggccaccggctccaagaggtagaggaggcagaagcttctgaggaaggttcagctcccagcccagaagattgttatgtttattctgcggtgaggacaaaagatatagaacaacg

SEQ ID NO: 68418 - DNA, 460 bp, Zea mays
tcttacaactcgtggtggccaccacatacgccctgtctttgtatccagcctcacatctaaagaaatcctatatataaagacgaagtatccatacatgctctttggcagaatgtgatcctccggaagcaggctaccaataactgtcaataagccatcgaatgcgtctcgactcatgctgtactacgacttgaacacctttacacgcctaatggcatccagtggagaaacctttgtctggccgtgaaggggcttctgtgccacgtcaaacatgttgtaaaacgcctttgctatcggctctggctcgtcctccgtacatcctccatgaactgtgccttgtggtagtcgatcaacatatccgctaccctcgcatcagcatcataatccttgacgcattgtctcaacacgatctctctcgtatgatgtgcttcaccatggaagatcacagagaatgtccgacgta

SEQ ID NO: 68419 - DNA, 462 bp, Zea mays
  unsure (1)..(462): unsure at all n locations
ccgaccggatcttaagtcacctgcggcatgcagcttctaagggagaacacgtgatatgtctatactaatgtgcatttcgaaaaagatagaccttgtgcagcttgtcaagcaggcaaacaggtgggaagctctcatcacaccaaaaatgtgatgaccacatcaagacctttggagatgcttcatatggacctcttcggacccgtcgcctatctaagcataggaggaagtaagtatggtcttgttatagttgatgatttttcccgcttcacttgggtattctttttgcaggataaaactgaaacccaagggaccctcaagcgcttcctcaggagagctcataatgagtttgagctcaaggtgaagaagataaggagcgacaacaggtccgagttcaagaaccttcaagtggaggagttccttgaggaggaagggatcaagcacgagttctncgctccctacaca

SEQ ID NO: 68420 - DNA, 440 bp, Zea mays
  unsure (1)..(440): unsure at all n locations
tctaaagggagaacacgtgataggtttgactaacgtgcatttctaaaaagatagaccttgtgcagcttgtcaagcaggtaaacaagtgggaggagcacatcacagcaagaacgtgatgaccacttcaagacccctagagctgctgcatatggacctcttcggacctgtcgcctatctgagcataggaggaagtaagtatggtttagttattgttgatgacttttcccgcttcacttgggtgttctttntgcaggaaaaatccgaaacccaagggactctcaaacgcttcctcaggagagctcaaaatgagtttgagctcaaagtgaaaaagataagaagcgacaacgggtccgagttcaagaaccttcaagtggaggagttccttgaagaggaaggaatcaagcacgagttctccgctccctacacaccacagcanaatg

SEQ ID NO: 68421 - DNA, 413 bp, Zea mays
  unsure (1)..(413): unsure at all n locations
gtttgagttcaagttcaatattggaaataatatagaaaataaaataaaataaaaagaaaggggggagacttacctgagcttcaatacctgaatttggcccaccagaggaagtacatcgtgcggcccacgctccatcccaccatgagcgcagccgccctggcacgggggacccacgacgcagtcgcgcacgtccttcaccctccgctgggcaccgacaccgcggccccaccggcctgccgctcgcccgcgcgcgggtttgaccgcggngatcccctctcgctgacggcccggatccatccttccgccaccgcgagcgcgtcaccagaagtgactgacacgcgggaccatgttgtcagggcagcttcttcctcaacggcctcaccatgcatggcggagcgcgaagatcttgcaaa

SEQ ID NO: 68422 - DNA, 425 bp, Zea mays
tcgcagatctcgcccacctcctgccgagttagatggctatacacccaagctgggtagtacgtctggcttctcctctctgcatgctggtctaggttcctccgtccaccagccatctccagcaacagcatcccgaagctgtagacgtctgacttgcacgaaacgacgccgaaattacgggagatcatcttcggagctatgtacccaatggttccccgcgcggcactcaccggcacaaagctgttgtcccttgggtacagcttggctagcccaaagtcggcaactataagagtgaagctgttgtccaaaaggatgttgtgtggtttgatgtcaaagtgcagaatctgcatctcacagccttggtgcaagtagatgatccctctggcgatgcctaaagctattccattgagcttatcccacgaaaagct

SEQ ID NO: 68423 - DNA, 393 bp, Zea mays
agcttatggcgttcatctgcttgggtctatgtgtttataggttgagaacatctctggaaattgctagagcgatactgctgatgccatatcctattctctagaagcatgggagataaagtcttttctatcttgtctgcttcagaggcctctttcttgcacaacttcaatttggaacaaatactatgaagagcatgattatattctgcaacacatttaaaatcttgcagtcgaaggtggttccactcatggttggctgacagccatatgagttccttctgcttgtcatagcactctttaaaagcttttcacaagttctgagggcatctttccataatgtactcctacttaaggtccttatggatataaagcctcaaaaagagaagtgttgtgttc

SEQ ID NO: 68424 - DNA, 458 bp, Zea mays
tacggacactaaaaactaagcttcaataaccatctggacccaccccatcacgctattgtttgtgagtcagagctcccttcggcaccctccgttgcaagcaaccaaccgccagcaaatgcctgttggcactgcggggaccccagtcactttaagaataactaccctcagttaaaggcacccggaccgacctactccaactcggtgaatggccccaagattccctcggcacctacctccaaggcacctcctttcaacagccagcagagcaggactcagtaccagggcagagcccgagtcaaccacgtcgacgctcaagaagcccagcaagccccgggagtagtgctcggtgaattccttggtgaatttactcccgctactgtgcttgttgattcggcgagcatccattcatttataaaccgctagtttgtggaaaaacatggcatccactctacacccct

SEQ ID NO: 68425 - DNA, 406 bp, Zea mays
agctttatcaaatggacgtgaagagtgctttcctcaatggaccaatcaaggaggaggtctatgttgagcaacctcccggctttgaagacagtgagtatcctaaccatgtctataagctctctaaggcgctttatgggctcaagcaagccccaagagcatggtatgaatgccttagagacttccttattgctaatggcttcaaagtcggcaaggccgatcctactttattcactaaaactcttgacaatgatttgtttgtatgccaaatttatgttgatgatattatatttgggtctactaacgaatctacttgtgaagaatttagtaggatcatgacacagaaattcgagatgtctatgatgggggagttgaagtattttctatgattccaagtcaagcaactcca

SEQ ID NO: 68426 - DNA, 431 bp, Zea mays
  unsure (1)..(431): unsure at all n locations
tacggacctataaaactcagcttgtggggttgtgatgttgccacttacttgatgctaacaagacatttccttcaccaaagccatcttcaacacttcgcccataaaaagatcaattctctttttcaattgcctgtctgcaagacaagtgataattgcaataagtaacatgatatgaattgaatcttccacgggtgacgccaaacataattactccataaaattattgaatcgatgtagtcattctagaaagtgatcttccttggggcagtatgaatatgaattggagaaagctgttggctgtatttaatattatccaaagcaagtgatgaagaaatcaattttgaatcatatgagggcaaagggtcacggcgaataaaagtagcactcatcatgtggatganactaattgaatggatattacagaccttcat

SEQ ID NO: 68427 - DNA, 412 bp, Zea mays
agcttctccagaagatggatgaatacatcctagctcacaacgattttcgctagagaagggaggaagcgtacaggtattctgagatggctaggggcttcggaggatgacttcaccctatgcatgttagaacgatccataatcctaacacaaatgatgacagggccaataatactcagagcagccagcaaagctcacagtcttcaggaatacagcaaacttcctataggccaccagccccgagaggcagagggggtagaagcttcagaggaatgcatggtaatcagcccatgagacgttctgcttattctgtgaggaagataacggacacacaacaaggttgtgccaattcacgatccagaagcagaaggaaattgctgaagccaaagcatagcataactagccaaagcagatc

SEQ ID NO: 68428 - DNA, 367 bp, Zea mays
  unsure (1)..(367): unsure at all n locations
ctggantaggtctagcctgagagctccaatatgagacataaatttttgctccagacattntcattttaagttcaggaaaattaatcatctcatcaagtttttcttgagaagaaaattgcatcaagaacccagcatggcacttggttgctttccaagttttgccccatggaaaatgaaaaccaaaatccttctcaaggtcttcagcagaaatcagaccctcgacaaccttcaccaaaccgatgaagcttctttttggttttcttgataagggtttcgcaaaatgagaagaataaaaccctaatccatcagtcgccatatgtggnggacagatatcccccgggtccatcagaaggataaaagacctcac

SEQ ID NO: 68429 - DNA, 337 bp, Zea mays
agcttgctcaccaggtcgcgacatgtggtgtcggcgaggaacgcgccgatgacatccaagtcagtgacgttgggcagctcggtacgctgcttcgagaatcgccggatgtagtcccggagagactctctcggctgctggcgggagcttcggagatcccaggagttcccagggcgcacgtacgtgccctggaagttaccatcgaaggcttggaccaagtcgtcccagttggagatctgccccggaggcaggtgctccagccaggctcgagcggtatcggagaggaacagggggaggttgcggatgatgaggttgtcatcgtcccgtccacccaggtgac

SEQ ID NO: 68430 - DNA, 370 bp, Zea mays
  unsure (1)..(370): unsure at all n locations
ntactaagagataagccctaataacaaatatatatgtgtgagaacataaaaacagctggaaaaccaacaaacataacttattttacaagcaaaagtatatatacctttaagctattacaagcaaggctatgtgcaagttcatccttcgacatcgcagataagccgagctctagctttggaaatcccatattctttgccatttctcgacaaacagatatctccttgttgtccggtaggcaatatagaaagtcatcttcgtcagtgctgctatataccaaggatcctgggggatacttcagatccttggcatattgcctagcttcggcaatttgctcctccgatagtttttcccttgagcgtgacgcactat

SEQ ID NO: 68431 - DNA, 452 bp, Zea mays
  unsure (1)..(452): unsure at all n locations
ttaagtcacctgaggcatgcaagcttgcccgagctgggcctagggcgagttgtatgtgcgcctattgcttgaggaggccctcgggcaaggcgtgaatccgcctgggtctactgttcctgcccgaggctaggctcgggcgacgcaagatcgtgtcccttgagtggacggagccttgacctgaattgtgcccatcaagcttttgcagcttgtgctgatggtgattaccatccgagtttaggagtcttgggggtacccctaattatggtccccgacaaaagggaagatacaaaggggattgttggaacttgctctcggtcgcaaggggggccaacaagggtgaacagtgacgttaatagggnttacgcgctagatggcaaaagctctggtaatctggcctctcacgggcactgtgcggaggtatttataggtatctgagcgcccagcaccttgtg

SEQ ID NO: 68432 - DNA, 411 bp, Zea mays
  unsure (1)..(411): unsure at all n locations
tcgatgatcaagtggtcaggttcttcgagttctacagagttgtatatcctgagcatctatttggtgaaggcaagtgtcctctgacctattatgtcctatttactttataattcactgccccacataccatgatcaacctaaggattgtctagctttgtatttactttgtccttgatttccttttgggttattatggttagcttcatgctattgctttattttaatcaatgaacatgatgtgaaaatttatgatacgatgatgttatcccgatgatgatcttgtgataatttaggggactcangctgttttcctgagtacctctccgtaaggacctgttcgttgagtgaccacccgagataacagtgcaaccataaaggtggaatgggacgcctttagctgaataattagat

SEQ ID NO: 68433 - DNA, 413 bp, Zea mays
agctttgcaaagtgtacagctgaactaaattattttatattgataactactgcgaagatcacgttacgatggtgtaacacaaatacatgaccgggctgattggtggttcataaaggatctatccacagcaccgtagtgcaagtggcctatgtttggatggttggacttacatatgcaacacaccggctgcaggcagcaggcctgcacaagccacccttctaagtgactaagtgaggctcatttcccacgaccttcaccgcaacggctgatatcctcactcctcgtcccccaacttgccactcatcagtgtttggctggtcagtgtcatgccggtgcctgccacctgacttcagtgctcgcatcggtgtttcccaaggagacgatttgtgattagcaggaggggcagagagagc

SEQ ID NO: 68434 - DNA, 442 bp, Zea mays
tatctcccacaacgcttctcatgcttcagatccttgagtttcttttacatacaatttaataagaaaaaataagaattagataatgcatgatgtattaaagaaactactgatttagtagttgaccattacttgtctaacacaatccaacttgcatgtgatttcttgcactctacacctacaacatctaaagagtctaagacaagattatacctcacattaatctatagaaacaacaaattaagcacacaagcatacaacaacaataataagatgtaaacgagcattattcccagctccaaagtctatatcatacacatcaattttcttaactcttataaatcacatttctgatccaacatagacttatgttcacatgtacagtcttcaacgaacatcataaagtcctagaactctctacctgaaataaagaagtgtgcatata

SEQ ID NO: 68435 - DNA, 414 bp, Zea mays
  unsure (1)..(414): unsure at all n locations
gctttaccaaatggacgtgaaagtgcctttcttaatggaccaatcaaagaagaggtctatgttgagcaactctccggctttgaagatagtgagcaccctaactatgtatataaactctctaaggcgctttatgggctcaagcaagccccaagagcatggtatgaatgcctaatagaattccttatcactaatggcttctaagtcagaaagggcgatcctacactctttactaaaacacttgcaaatgatttgtttgtatgccaaaattatgttgatgatattatnattgggtctactaacgaatctacatgtgaggaatttagtatgatcatgacacagaaattcgagatgtctatgatggnggagttgaagtacttcctgggatttcaagtgaagcaacttcgagagggcacc

SEQ ID NO: 68436 - DNA, 387 bp, Zea mays
atatcacacacgagtgctacctaatgtacccccgaactctttctctatagtgtacccaaattccttgagaaggtcatcaaggctggccagggacatgtactctgtgtcggactggtttctgggagggttctcttcctgctgctcaatatggcatacttggtttctggtattcttgcggattttccttgcgagggcgagcttcttcagtaccttgacgtagaccattttgaaggtgcggtaagcttcacgggtgatggactcttcgccttcagctaacgagaggctctcttggagggacgctatttcttctgacagttccctgactttctgctctaggctttccacctgggaggatatggaggtgcagtggagggcgacgtcatcata

SEQ ID NO: 68437 - DNA, 430 bp, Zea mays
  unsure (1)..(430): unsure at all n locations
agctntaacccctgcgagacctttccccgtttctttctaaccatggtaaatgcattatcgtatgtcatattctatgcatgtttaatctacttgttctcttgtatggtgtactgttggtttcctagtttcaatggatggatgtatgtatgtttgcacccgcatagagaacgatctggttgaagagcccgaggaactcgcaggagaagcccctgagcagcagtcggttggtggaggcaagtgtcccttgacctatctctgtcctattcattctttaattcacctcccgcattacacatttatgcctaaggatttactagctttgttatccatatccttgtttaacctattgggttggattaattattgttagctttatgctattgctcaactataatcaatgaacatgatgagattatatatgatacactgt

SEQ ID NO: 68438 - DNA, 474 bp, Zea mays
tgagctgaggcattgcctcaccggagaggcggattcaactctctccggacttcggtcgcccgccgccgcgcgtggacagagcaatccggtgagccattctctaattccttgcaccacttccttctttacctctggcgaagctctctgactggttcacttggacaatcgcgccgtgagcaagccggattcctcgccgccgacgagcatctccgcctgcgcacgtggaccagccgactccaaccattcccgacggcgacccgcacatcgccgtgaccctcaggacctcccctacatcctcgaccacctcaccagagcagtctcgccgccggtaagcccctccgcccctttcttcctctacggccactgttccattagggaaggaccgcgggttcgattatgcaaaaccctagcgggttttctgcagagccgtagactcaagtgaatagtgcaccaaggacctgtctgtaattcatt

SEQ ID NO: 68439 - DNA, 66 bp, Zea mays
actcatcatccacacaagaacatcatgacaagtgacaagccactggagctcctacacatggattta

SEQ ID NO: 68440 - DNA, 386 bp, Zea mays
  unsure (1)..(386): unsure at all n locations
ggccgccacctcgctcatccncgaatccgccgtgttgacccctactcagcgtcgccattccatgtgctactgctttcgccaaggcattccggggccattatgtgccactgcgcccggacaagaacatcgtcaagagcttggtcatgcaacgagacgagttcgtggcgcaggcctgtgctgcgctcgagcggacaccgaggtcgacgacgaggttgtcgtgtggggagcggaggacgagggagatgacgtggggcagccacggtaatacaaaggcgtgagtctcgggtccgcgaggtctangtacggctcgatacattcgctccctgccttggttccgctctgctgtgctctcgctatggatccgctctgctctcgcctcgctaggc

SEQ ID NO: 68441 - DNA, 381 bp, Zea mays
  unsure (1)..(381): unsure at all n locations
agcttcggctatgactaanaatntggcagcttaacagtacaatagcaatgaatgctgtggtaacttcacacctacccgtctgtttatatagtgctacaggtgggaaggtgaatcgacaaggtctccagcaccgaacaaacgatcacctgcactcactgaacggtgggccacatagctcgagaagatgaatcgctggcaagcgtgtaattggtgcaagatgggtcgcgtgtccgacgattattttaatcgtttctcgcaaacgagctcagggaaggtgttttttcgatcttcggcatcccgaagcttagaagatttttcacggatcaagctcgttacgaaaaacgatctagcgccgcgaaggggctactggtgggggtatgc

SEQ ID NO: 68442 - DNA, 435 bp, Zea mays
tatctatgctatacttgttgtgtccaggaagttgttctcttattttcaggcacatagtgttgtggtggtgacctccttcccgttaaaggccattctccacaactctaacgccacgcgcaacatcgccaagtgggtagcagagcttgccgagttctaactagacttccagcctcgccacgctgttaagagccaggtcctggctgacttcatcgtggagtggaccccttccccgagtgctcctgggggtccggatcctgattcggaccccacacctatggagcctagggctccggtcttcatcgagcctcactggacgctcttcttctacggatccgcccgccagcagggtggcggtgctggagtgatccttatcgacccaagaggagatcaagtgaagtacatggtgcaccctgagttcaaggtcaccaacaacat

SEQ ID NO: 68443 - DNA, 400 bp, Zea mays
cgagcagcactctggtctctttatgaaggaggatatccttggccgtctgtggcaccaacaggaaattggcatggatgcacctaccattgataacagacgcggattgcacgatgtgttattggctggttagaataaagccggcatgcgcctactttacgtgggggcttcgcacagctgagggttgcactcatacgacttaagtctgtcactataactgcttgatacatcttgggcagacgtgtgatactgaggtataggctgaaatgagcatatgtaagcgggtgacatcaccttgcacaaacctgctgattgctaccataaagtctgatttgatgacctgcccatccactttgaagaaatgtcctatgattgctaccatggctctaatggcatttctttc

SEQ ID NO: 68444 - DNA, 433 bp, Zea mays
agcttgtgaacagtacatattcagaatggataaagcagcttcagcagatcagccgaagcccatgctcttatgtgaggacatagcagagcagaaggtgctgttgggctctcaattatctgaagagcacgagaaaaccttgataaggtttttgttcaacaacaaagatgtttttgcatggtcagccaatgatctctgtggagttaatagggatgttattgaacactcgctcaatgttgacccatccttcagacccagaaagcagaggcttcggaaaatgtctgatgataaggccgaaggtgctcgtaatgaagtcaaaagactcctcagtgcaggagttatcagagaagtaaagtacccagaatggctagctaacactgttatggtaaaaaaggccaatggcaaatggcgaatgtgtatcgattttacagatctc

SEQ ID NO: 68445 - DNA, 401 bp, Zea mays
  unsure (1)..(401): unsure at all n locations
ggaggctctgtatagattaccgctctcttaatgtggtatctatcaagaacaagtatcctttgcctcgtattgatgttctttntgaccagatggtcggggccaaggtgttttccaaaatagacctttgctccggctaccatcagatcaagatacgagcaagcgatattccaaagacgacattctcaactagatatgggctatattaattcttggtgatgtcattcgggctgacaaatgcaccagcatatttcatgtatctgatgaattctgttttcattcctgaattggacaaattcgtagtggttttcatcgatgatatcttggtgtactctaagaacgaagaagaacatgtcgggcattngcatgtagtacttcaacgtctgcgagagcaccacctttat

SEQ ID NO: 68446 - DNA, 407 bp, Zea mays
  unsure (1)..(407): unsure at all n locations
tctgcttctgtctccctcgatcatcagnttgagcagagttatggattgatctaacatgcctcgggtgaaatcttcctccgaagcccctggtcatttcagagaacctgaatgcttcctcccttctttggcggaagtcattgtcagctcgaatgtattcgtccatcttctggagcagcttctccaacgtttgtggtggcttcctggcaaaatattgcgctgatggtcccggccgaagccccttaatcatgtcctcaatgacaatttcattgggcactgtcggcgcttgtgccctcaggcgcagaaaccttcgaacatacgcctgaaggtactcttcatggtcctgggtacactggaagagagcctgagcggtgactggcttcgtctgaaaccctctgaagctaagtatc

SEQ ID NO: 68447 - DNA, 326 bp, Zea mays
taccgcatttgaagcatgagcgctgggcaatggcttatttcttgcttggctgccccgcgcgacgcttaagctccgtcttgaatctatagacgatcacagctatcgtcttatcactaagaccggccggctcaaactgtgccaccttgcatggtagagaatgacttgcttctagcttccttgagaggcaaggggttgtcgctctttgaatggaccatataaagtgcaatacagctacctacctgccttgatcatgattagcccgctccgggattgacaagaacattttcgtgcgacaccatgccggacctgtgatattcacgaatatt

SEQ ID NO: 68448 - DNA, 422 bp, Zea mays
agcttgctagcatatctcataacaacaattatttgttccttactagaaataccagatgactcgtctaacaataaacaaaatacatcaccatcaatttctttaatgatagatttcactattatatgaaaaagatatgcaaaccatgttaactcatctgaatatacaatcaatgaaagataatgttatttgcaaattaaaaaatagtactatttcctacctctccaaaacactttgcaatatccttctgggtgtgtgaggccaacattcgggcattcctcataagggcattgttatgtttgtcatttatgctttccaacaacttcaccaactcctacaaattctctctatttttagacttttacatgcatcgtgatcacgataagctaagccatgacgcaacaagtatctaacaacgtcaatag

SEQ ID NO: 68449 - DNA, 464 bp, Zea mays
  unsure (1)..(464): unsure at all n locations
tgccacaacctctntacgagctgagccaatatttggttctctaccacaacaagccatgataaagttttcccatatcttcaactttaaacgcaggatttcacagaaataatatagaaatttcacataaattagtttacaaacacaggatttagaaaattatcctttgatcaaagaagtccttagcttttcatccacagctttctatagtgctatccaaaaaaaaggctcacagggagctatcgtcaccggataatttagcttgggtgggagattttttttaattaccaatggttaaaatttcatgtcaccaaggatcatctaactcgcgacctccagatgctagtctttttccatcgggctacaagctcgttagcctctttcgtgccatcagtgtacccctctatccatatctagggatgacaacgggtatacatactcatncggtagtactatttcgtacacat

SEQ ID NO: 68450 - DNA, 254 bp, Zea mays
catgcatatggtacaaataggcgaggagtaggacacttggactgtcacaattaccgcagtcataatgggtagccgtatcgacggaggtactcgcctctcaagatagctgacacaaccaacacattggaagaccatacagagcacaccaatctggtgaaattcacccggatacagatgcttactagcgccaagatatgacgtgaatgaaaagctcatatccagaacggtcgaactttgaatattaagactaccaa

SEQ ID NO: 68451 - DNA, 410 bp, Zea mays
  unsure (1)..(410): unsure at all n locations
taatgccacanaacttgattaggagttcgtactataaatccaagtggctagagaggagttcttgcaaaacataataaccacacggagatcaacacagagaggcacagtggtttatcccgtggttcggccaagtccaacacttgcctactccacgttgtggcgtccaacggacgagggttgcactcaacccctctcaagcggtccaaagacccacttgaataccacggtgttttgctttgtttcactatgtcccgcttgcgaggaatctccacaacttggagcctctcgcccttacaatttgattatcacaaagaagcacggaagtaaggttgggatgagcaacacacacaagacacaaaatcagagcaaccatatgcagtacagtcacaacacgagctctcaacacaagc

SEQ ID NO: 68452 - DNA, 271 bp, Zea mays
  unsure (1)..(271): unsure at all n locations
gtatttacgggaatgcgtcgaaatttcagtggataactccgcgtgaagaagaaaaaactgtgcaattgtcgccgcaaaacatttgtcgtgctgtgcaccacagaaatntacccagtgatctgctggtgatgcaagattcttgcaaacaaaatgtttgaccgcatttcggagcacctctggcaatccgtatcatgcaaggaatcatataccccggattattaatgttgttttatattgcgctcatgacggaatcattacaaaatggagaact

SEQ ID NO: 68453 - DNA, 437 bp, Zea mays
  unsure (1)..(437): unsure at all n locations
ntacactaagcacttgttaaacacttaacacatctgtcagccctttaattgggttgtcatccaaactaccaaaacccacaaaaagctttcacttatagagtagtagagactagagttcgaatgctcaaatttgcacaacaagaagggaagagaaggggctgggcatacctactgtggtgggttcgggtctccggcaaatgcaccaatgaagacatgggcaacagggcgtacgaccgcacatcataaggggaagtggaagcggtggagggagctgtgcgtcggcatctagcgcgatcccggaggagtcgtagctgcagtacttgatgtgacnngcggggcgcgggtaagggtggccattnttgcggcagatgtatcgggcaaagcgcgagtganggcgtgtgcgacagtcacgagcgcatcngcatgtaaagcgtgag

SEQ ID NO: 68454 - DNA, 415 bp, Zea mays
tggtatctctacgatgcaatagcagtaaatgctgtagtaacttcacacctacccgtctgtttatatagtgttgtaggtgggaaggtgaatcgtcaagccgttcgcacccgctgaacaggcacccgcactcgctgaacggtggaccatagtgcccaagaagccgaatcgccagatcgcgcgtacccattgcagggtgggaccatctttcactcggaatattttaatcgtttctccgcaacgagctcaggtaaggtgtttttcggacctttggcattccgaagcctgagagagtttttcacgggtcgagctcgtcacgaaaaacgatctggcgccgtgaaggggctactggtgggggtctgcttcgtcgccgaaggtcccataagaagaatacaccttcggaagaatgacacaaagc

SEQ ID NO: 68455 - DNA, 462 bp, Zea mays
  unsure (1)..(462): unsure at all n locations
tgtgaaggttcttcatccncacatgtgctaagcggcgattctacagccagcccatgctagtcttagctattaagcatgcatctagaccggcctcttcttttgcaaaatcaactaaataaagtttgccgtctaatacacccttaaaagctagtgaaccatcacttcttctaaagacagacacatctacatttgtaaatagacagttatatcccatattgcataattgactcacagatagcagattatatccaagagactcaactaaaaacacattagatatggagtgctcattagaaattgcaattttacctaaaccttttaccttgccttgattcccatcaccgaatataattgaatcttgggaatccttactcttgacgtaggaggtgaacattttcttctcccccgtcatatgggttgtgcatccgctgtcgataatccagcttgaacccccggatgcat

SEQ ID NO: 68456 - DNA, 409 bp, Zea mays
gcttaagtctcagaatcgaacgaaggtgcttctcaacgttcgcttcgtcaaaaagaagagcttcggagaaaagaaaaaaggaaaaagtttctgacttcccaaacttagaatcaaatggcgagaatacgatctactgccaaagttgtacgtgagggagacgaaaccgaaggttcagacactgtgcccatcttcgaaacaatgcagcgttccggtctactgactacagaagaaatgcctgctgctgaagcacgcccaacaactgccgagggaaaagaaaacattgaagggactgactccgaagatgactatcaccttgctatgcccagcatgcccagtcacctggattttgtgaaatcaactgtttcaaaagctgacctttcgaagaatggtgaagcaggttatttcaatg

SEQ ID NO: 68457 - DNA, 399 bp, Zea mays
tggctgtgtacagccaagactcagcccagtctggcacactttactgtccggtggtgcaccggacagtgtccggtgcgccaggctgactcggcgtgaagaagccgctctcgggaattcgccgacggcgtacgactataattcaccggactgtccggtgtgcaccggactgtccggtgagccaacggtcggtcgggccaacggtcggccgcgcgatctgcgcgggacacgtggccgagccaacggtcggaaggtggcaccggactgtccggtgtgcaccggacatgtccggtgcaccagcggctcccagatctgcaacggtcggctgcgttgtttaaggaaggaaatcgggcatcggacagtgtccggtgtgcaccggactgtccggtgcgccagtcgaca

SEQ ID NO: 68458 - DNA, 431 bp, Zea mays
gcttctaaagggagaacacgtgataggtctaactaatgttactttcgaaaaagatagaccttgtgcagcttgtcaagcaggtaaacaagtaggaggagcgcatcacagcaagaatgtgatgaccacatcaagacctatggagctgctacatatggacctcttcggatccgtcgcctatctaagcataggaggaagtaagtatggactagttattgttgatgacttttcccgcttcacttgggtattctttttgcaggataaatctgaaacccaagggaccctcaagcgcttcctaaggagagctcaaaacgagtttgagctcaaattgaagaagataaggagcgacaatgggtccgaattcaagaaccttcaagtggaagagtaccttgaggaagggatcaagcacgagttctccgctccctacacaccac

SEQ ID NO: 68459 - DNA, 476 bp, Zea mays
  unsure (1)..(476): unsure at all n locations
tctaaagggagaacacatttaggattaacaaatgttcattttgttaaagacagggtttgtagcgcatgccaggcgggaaagcaagttggtacccatcatccacacaaaaacatcatgacgaccgacaggccactagagctcctacacatggacctattcggcccgattgcttacataagcatcggcgggagtaagtattgtcttgttattgtggatgattattctcgcttcacttgggtgttctttttgcaggaaaaatctcaaacccaagagaccttaaagggattcttgagacgggctcaaaatgagttcggcttaaggatcaagaaaattagaagcgacaacgggacggagttcaagaactctcaaattgaaggcttccttgaggaggagggcatcaagcatgagttctcttctccctacactccacaacanaatggagtagtggagaggaagaatcgaactctattggacat

SEQ ID NO: 68460 - DNA, 316 bp, Zea mays
agcttctcctggacaagcgccgcacttactgctgagtgcgaagctgccacatataacaacagaggagcccctggcgttggcggagttaatgttgtgagatctatcaagtattgcttcaactcttcgaaggctttttgttgacttgggccccattgaaagacttcggctggcttcagtacctcgaaaaatggtaagattctttctgctgatctggatataaatctcgtgagagatgccagccttcctgtcaatctttgggccccttttcttgtagttggcggctccattcgaagtatagcttcgattttatttggat

SEQ ID NO: 68461 - DNA, 400 bp, Zea mays
  unsure (1)..(400): unsure at all n locations
tcagctccatctatgttatggattgctgttgagtcagttcagttttcctcggcccttctggcagcttcctgacttccatgaatagcaatgggtccttgatccgaaggtatcttcatgcaaaggtaagcatgatgaagaattgcttccaaagcattgagggtgccatgaccaataattgcattgtaagggtattccatgtcaacaatgtcaaacacaacttgctcggttctggtgttgttgatgaagccgaaggtcactggcatggtgatcttgcccaatgctacaatctgtcttcctccgaagccacagagagggtgtgtagcatcatgaatcttgtcttctggctcttgcattngtctgaaggccttagcaaatataatatcagctgcactggctgtat

SEQ ID NO: 68462 - DNA, 405 bp, Zea mays
  unsure (1)..(405): unsure at all n locations
agcttcattatttattacttattctattttatgaagaaataccttctagtatataattacttttacgagaaaatactcttatttagatctcaggattagatatatgtatatatattttatctctttcttttattatttcatgatatatattttttcttaccaagtttttgggctttacaaatcctacccccttaacagaaatctcgtcctcgagatttgtaagaggatgtagtagaaattgtttgtagtttatgggttagtttctaattgattttaataccaaaactcttctttnttttatatgtcgcaaattatcaggtgattacgaaagcatgggtatatatgggtatcgccactttattatgcaggataaaagatatctntacagcatttataggtttgggt

SEQ ID NO: 68463 - DNA, 404 bp, Zea mays
  unsure (1)..(404): unsure at all n locations
tgcaggccanaagaataaggtacttagattatgctctatacaccatttaacttgatggtaatgcaaagtcatgcatcaaacttaaaattatgtttagttatcattctcaatgtattctcatgtggtagtactgaatcatgtagggagctattctaccaggataccatgctgacattgtagtatggaaacccaaaacagagtttcaacttgacaataaccatgctatatatcataaacatcaggtttacttcctcaaatggccctacaacatttgaaatatttaaaatgctatactctgatacttggaaaatagcaagtaatatctttgtattttgcagaatatttcagcgtatttaggaaagcaactttctggtaaggtcctgtcgactattgtgagaggaaat

SEQ ID NO: 68464 - DNA, 402 bp, Zea mays
tacctccaactactgatatagcttttgagaggaatatgggcaaagaagccgaaacccctgctcccgaagcaccttccggagatcctgattatatcattcgacatgctccgggaaaaagattgtctgaagaagaaatttttgaagccaaacactatgcccaagaattgaagtatccgaaaggggccctagtgtttaatggtacagacgaagatgacttcttgtattgcctaccagacaacaaagaattatccgtctgctgggagatggccaaaagtatgggctttccgaagctcgaagctggcctctgtgccatgacgaaggacgatcttgcggatagccttgcatacaacagtctgaaagggacaaaaattgtgaattttggaagttatgaattttgaatta

SEQ ID NO: 68465 - DNA, 431 bp, Zea mays
  unsure (1)..(431): unsure at all n locations
ggtcaacananaatatcggcagcacctcccctgttggtgagatttacaaaacctgcagataaaagtagtagcactatggttgacatgcacacacatttcatggtataagaggatacaaactactaaaagatcaaccttgtcaagataaaataatccacgagggtgttaactcaggcttaaaaattatatggaagaacattaacttatacaaattatacttcaccacttttcataacaagccctataaactaagaaccttaacttatacaaattataattcaccacattgcaagacaagccctagaaactaagcatgtcacacactaaggtttgtgcctcatgacatcgcattatgtccttaatatttcgagacattaaacctagctagtagaacacaccatggcctaatcaacaatgtcacacacaattat

SEQ ID NO: 68466 - DNA, 405 bp, Zea mays
agcttcagcagaatgacagccaaagttcttcattctcagataggtagaaatgtgctaacatacgttgatgatatcatagtaaaaagcacaaagaaagaaaatcacattactgatttacaggaaacatttgctaatattaggcaagctggcctgaaattaaatctagaaaatgtgtctttggagtgaagaagggcaagttccttggctgtctagtttcaacaaaggggattgaagctaacccaagcaagatcgaagctatccttcggatggagccgccaagcacaaagaagggggcacaacggctgacaggaagactggcatcattgaatcgatttatatctagatcagcagaaagaaacttgccattctttgaagtactaaagtcagcccgaagttttcaatggg

SEQ ID NO: 68467 - DNA, 397 bp, Zea mays
ctatgttatggattgcttgtgagtttatctatttaccctcggcccttctggctgcttgctgacattcatgaatagcaacgggtccttgatccgaacgtattttcatgcaaaggtaagcatgatgaagaattgcttcacaagcattgacggtgccgcgaccaataaatgcattggaagggtattccatgtcaacaatgtcaaacacaacttgctcggatctggtggtgttgatgaagccgaaagtcactggcatggtgatcttgcccagtgctacaatctgtctttctccgaagccacagagagggtgtgtagcatcatgaatcttgtcttctggctcttgcatttgtctgaaggccttaccagatataatatcagctgcactgcctgtataaccaaa

SEQ ID NO: 68468 - DNA, 388 bp, Zea mays
  unsure (1)..(388): unsure at all n locations
gccacattcatatcacatttgttctggaatggtcatccactgagctcaatttcctgtaagatataattatcgntgaattagctgaccaacatttatattgccacttgtagagatcatgaatggtccctggagttggcctggttcacgctccattctcgctgcttgcagcgcgttttctggcatcgttcttcaagcaagcatgcgagctggctcctattttcaatgagctcgtggattgtgtgagcttagatggggagtccttgcaagctgctttgtctatgcaagttctgaattctatacactggattcttgtggtaccaatgtggtatatatctttgttcagagcatacagtgagtagatgagattatcaactgattttttcatcac

SEQ ID NO: 68469 - DNA, 375 bp, Zea mays
ggcctgggggatgaagaccccgcgatgtggagacgtgttagctcattgggcgtcaccgcgtcagtgaacccaagtcaatcgccttcgaaccacaaagattcagctgtcacaaaaggagcacaagcggtagccactcgccacggacgaaatccagggtatcctacagcaagtagaaagcatcaatagcagccaaaggaaagaaaacctcgaatgaattgtaatctgctaaacaagcaaagaagcgtcaggttgtaaatcgccgaagcgcatagctggtataaatgttttagcgctcgatgtgtcagtggcgcaagaaaagacataatgcatagctgaaggtttgtaggcaaaggcgtaatgctgcccacgggccac

SEQ ID NO: 68470 - DNA, 426 bp, Zea mays
  unsure (1)..(426): unsure at all n locations
agcttgaagntagcctttctgctatgtcaaatgatgacctcgcagacaactttgcgtacaatagtctgaaggtacaaaagttatggacttataagtagaatattttttttgtgtctcttattcttgtactgatcctttgtctcccccctttgagagcacctagagggggggtgaataagtgatcctgtgaaacttgaaacttaagccacaaaacttggttaatcgttagcataataattgccaagtggctagaaaggagtctcaacaaaacacaataaccacaagaaatcaatcacagagatggcaaggtggttatcccgtggttcggccaagaccaacgcttgcctactccacgttgtggcgtcccaacggacgagggttgaatcaacccctctcaagcggtccaaagacccacttgaataccac

SEQ ID NO: 68471 - DNA, 476 bp, Zea mays
  unsure (1)..(476): unsure at all n locations
tgaccaccttaagaatgtccttcctgactgatatgtggctgggtgaattattgcaaaattgtcttctacatggagggaatttgccacatctctgaagtgacaccggatgaatatgtgctttgtgcgtctgtgttcaacaagattgtccgccatgcggattgcactctcattgtcacataggagagagaactttactcaattgtagccgtagtccctaagagtttgcgtcatccaaagtaattgtgcacaacaatgtcctgcaacaatttctatcaatcttacatctaagcataatcggcgttagaatacccgaatagatcaaagatagatcccttggggtaccatagcccaaacctaggagtataaactaaatatctcatgtttcttttcataacccttaggtggattntcttagggtcggctttgaatcgtgcacacatgcatactatnagcataatatccaatcgtgaacacat

SEQ ID NO: 68472 - DNA, 396 bp, Zea mays
gctttcttcgccaccaccattgtattctatttatacccgaagccagcagccagaagggcgccagcactcccaacaacgtgacttcagggaggagtctgaagctcgtacagtcaacaacactgtaccagaatcaaagcacatatactgagcaatatccttgtcggcgtttcgaccctggggggtccctggaccgacgagtaaactgtcactgcgtgtcccagcccaaatgggtcggcgcgagacgggacacaaaggggggagaacagtaaggggaaaccgcgaccttcgtgttgtcctgcgcccagggcggatggatgcgcttgcagtagggggttacaagcgttcgcgtgggagagagagagcgagagccttatgcgtctgcccgttcttccgcac

SEQ ID NO: 68473 - DNA, 439 bp, Zea mays
ggcacctagtcacaccagcataccaaatctaataccctctgaagttgtagtttgtgtgtggctggtcgttgacatagtttagatccccctgctgatcccattcatcaatatagtcacggtggtgggtctcaaagtccatgaccttcttttgcctctgtctgtcgaacctgcaaaagttagacacatatattagtaactaattgcatatttgaaataatagttagaataactagtggacaaagtcactcacttgtgaagttgtattgaagtcgagaacggctcaaccagaaactcctgtcgcaatccgaactgtcgagcaactctgtggggcaagtggtactcaacaacataaaaacaaatgaggggacacctcattaggtagatgttctcgtctattgagcacacgctgctcaactgtatgctggcgaaatatggatca

SEQ ID NO: 68474 - DNA, 394 bp, Zea mays
agcttttgaagcattagtgtcatttacttttaataagctatgtgtcatgcttaattaaatattttaaaccatgtagggttcctcaataatatgaattgagaacgagttatcctaccatgtgatttacctagtatgcatgcattgttaatctaaagtaagtaccaaatgaaatactaggcatgaaaggtaaaactaaatacaagaaaatagatacacatatctaaaaacaaggaacacaataaatctagttaccttagtcatgggtggggaaatttgggtccaaaatattcactaactcacttggcaataaacttgatccaatatgatgtatccccaacttttacaagtcttcaaattccccgtctttctttggactcctcacttccctttcggg

SEQ ID NO: 68475 - DNA, 401 bp, Zea mays
  unsure (1)..(401): unsure at all n locations
ntcccacatacctacaatgcttgctgacccgtccaattatactagaggtccactgaccattgtgaacgcatgaatctttagtttatccgcgcgctcaccgtggccagaccatattagttcaccaaatgtgcaattaacttaagggaatcgatggttggggtgtgaatttggtttcgaccgatgaagggcgtcagtcctttctccattcgaccggcctgctagctcgccggagctcagtcgcacttgaacaccgtcggggacctcccagtgcgaagaaacagaagttggaggacccctgtgcaaagcgtcagtgacttgcgaaaacagtgaatgaacccgttcctagttagccgaaacatcaggggcttttctgtaagacaccagcgcgggcgcgcgcggac

SEQ ID NO: 68476 - DNA, 419 bp, Zea mays
agctttagcacccgctcccaccctcgatcgttcaccggcacgcccgaattgcgcattctccccaattcggttcaagaacaccgcgaagagcaacctcaccgcggccagccctttctaggtccgtccatccctcactctctcttgtttgagcactctggtcaccctgcgatgcttaccgagcctctaattcgaactaagagactaccactcgccgggaacacgatgatcttgccacgctgctcacggtcaccgtggccagagagttttagtgcgcaattggtgaaataaagttaggggaaacatcgattaaggtatgaattaggtgttagtcgacggagagcgctagtcatagcccctatcggctggtctacgcgctcgccggagctcctccgtgcgctgccgtcatcggggacctagcc

SEQ ID NO: 68477 - DNA, 472 bp, Zea mays
  unsure (1)..(472): unsure at all n locations
ntatatggacgacggtgtcgtactccattaaactggtctgttccaggtgaaagaaatttcttcagacctgatatggtaaaggagacagaagagaaagttcaacgaataattcataatttgaaagaagctcaagctcgtcagaagagttacgtagataaacgtcggatacccttgtactttctagttggagattatgtctacctgaaagtttcaccaatgaagggtgtatcacgtttcggggcaaaagggaagcttgcaccccggtatattggtccttttcttatccttgaaagatatggaccagtggcataccaactccaattacccgaaacattgtatgtcgtgcataatgtgttccatatgtctcaattaaagaagtgtcttcgggttctcgatcgaactattgaagtaacgaatgtggtcttagaaccagacttgacatattcagagcaccctattcgagtcttggatc

SEQ ID NO: 68478 - DNA, 410 bp, Zea mays
atgactttaatctaattcgtcgaccggaggataggaatatagttggaggtgatattaatctaatgatgaagttcaatgaggcaataagtaacctagatctggttgaaattccccttcatggtctttccttcacctggtcgtataagcagagggcaccccttcttcaaaggctcgattggttcttcatttcgcacgaatggtcagtggtctatcctgaaactcgcgtaagaacgttgccacgtgatatttcagaccatgtgtcgtgtcttgtttcgttcaagtcgagggtcccaaagcccaagatttttaggttcgaaaactattggctggaatttgagggctttatgaacatcttccaaaattcttggcttagacaacagaatctcgctgataaagcatagaatttaaca

SEQ ID NO: 68479 - DNA, 478 bp, Zea mays
  unsure (1)..(478): unsure at all n locations
tcggctatggtcaaattnttggcagcgaaacattgcaatagcaatgaatgttgtggtaacttcacacctacccgtttgtttatatagtgccgcaggtgggaaggtgaatcgtcaagtcttccgcaccggacgaacagtcgcccgcacccactaaatggtgggccacagaacccgagaaggtgaatcgccaggacacgtgtactcgccgcatgatggggccacctcgcgcttggaatattttaatcgtttctcggcaacgagctctgggaaggtgttttcggaccttcgacattccgaagcctaggagactttttcacggatcaagctcgttacgaaaaacgatctagcaccacgaaggggctactggtgggggtatgcttcgtcgccgaagatcctgtaagaagaaacaccttctgcagatcctctcanaagcagtgccgaagctatcatccataaagcttcggcataatggcatgtc

SEQ ID NO: 68480 - DNA, 382 bp, Zea mays
  unsure (1)..(382): unsure at all n locations
taatgctcctcctaagaaatngtctaataatgttaagggtaatgctcccatggttcaggataacgagggttacattttataccctgctggttatcccaaacacaaaattagaagaattcactctagaaagtctcactctggctctcatcatgcttttatgtataagagtgaggcatctagttctaggcaatcaacccattctaaattgcctaagaagaaaactactatagcatcaaatgaacctaatatttcatttaagacctttgatgcttcttatgtgctcactaacaaatcaggcaaagtagttgccaaatatgttgggggcaaacacaagggctcanagactagtgtttgggtacccaaggtgctttgttctaatgtc

SEQ ID NO: 68481 - DNA, 414 bp, Zea mays
  unsure (1)..(414): unsure at all n locations
gcttgtgaaaattcttcatcccaacatgggctagtcgacgatgctagagccaacccatattagtcttagcaattaagcaagtatcgagttcagctctattaaaatcaactaagtatagctgaccctctaatactcccttaaatgctactgaatcatcacttcttctaaagacagtaacacctatatccgtaaaaagataagtgtaacccattttgcataattgagaaactgaaagcaagttataatctaaagaatctacaagaaaaacattggaaatggaatggtcaggagatatagcaattttaccaagtcctttgaccaaaccttgatttccatccccgaatgtgatagctctttggggatcatcanttttctcgtaggaggagaacatccttttctcccctggtcatgtgg

SEQ ID NO: 68482 - DNA, 476 bp, Zea mays
  unsure (1)..(476): unsure at all n locations
tctaaagggagaacacattntaggattaacaaatgttcactttgagaaagacaggatttgtagcgcatgccaggcagggaagcaagttggagtccatcatccacacaagaacatcatgacgaccgacaggccgcttgagctactccacatggatctattcgggccaattgcttacataagcatcggcgggagtaagtattgtcttgtaatagtggatgattattctcgcttcacttgggtattctttttacaggaaaaatctcaaacccaagagaccttaaaaggattcttgagacgggctcaaaatgagtttggcttaaggatcaagaaaataagaagcgacaacgggacggagttcaagaactctcaaatcgaaggcttccttgaggaggagggcatcaagcatgagttctcctctccctacacgccacaacanaatggtgtagtggagaggaaaaatcgaactctattggaca

SEQ ID NO: 68483 - DNA, 446 bp, Zea mays
  unsure (1)..(446): unsure at all n locations
gcaagctgaagccatggtaagtagcataggcctatattatacgaattgactcaagcctagctacgggtgcataggtttcaccgaaatccaaaccttcgacttgtgaatatcctttggccacaagtctggctttgttccttgtcaccacaccatgctcgtattgcttgttgcggaaaacccacttggttcctacaacattttgattatgacgtggaaccaaatgccatacctcattcctagtgaagttgttgagctcctcttgcatcgccaccacccaatccaaatcttgtagtgcttcctctaccctgtgtggctcaatagaggaaacaaaagagtaatgctcacaaaaatgtgcaacacgagatctagtggttacccncttatgaatgtcgccgacgatggtgtcgacggtgtgatcatcttggattgcttggtggactcttgcg

SEQ ID NO: 68484 - DNA, 478 bp, Zea mays
  unsure (1)..(478): unsure at all n locations
ngcacacttcaaccatgcaactnctatattcagtgtatcatgattaatggaacaccaattatcaactaagagaatttattcagcacttaaacttagttaataaccatcacactattgcactagatatatgcatatgctgtgactcactagaagttactgtgtttaaagtgtacagtttaaacatatgaagtgcatacctttgtacgctcctcctccataagttcaaagtttcttctgatactaccaggtatatttggcttcgtaacacgaacactgatgatttcaattccaggagcatagcgtgtacagtctctttgaatagcttctttcattgtttcatcaatctgtaatttttgcagaacagataaggtgtgttacgaatgtgggtttaaggttaactatattgcacgcactagtccatagacggccaaatntgtctaacaaaaggaccaactaacctgatcgaacatgtcaatgt

SEQ ID NO: 68485 - DNA, 423 bp, Zea mays
agctggtggatgatccgaagcttatcttatggtgatgaagccgaagacattggtatgaaaaaactctagagaaactttgaattaatccttgtaagaacattgtaatttaagaatcagatactactccgtaaatttgtccataccttgtaatatatttttacctttccgtccatgtatgaactgctttgatgtggacgaaacttgtattttttgagccgaaggcgaaaaacaccttcccttcttttcgtacacaacgaagcataaatctgctttctttcctttcgccgaagcgttatccttatagccgaagcaactgtctgtatctgtatgatatgatgatgatgatcctatgtatgtctaaatgaatgtatatgaatgtaatgaatgatgtgatgtattgtgcaaatgaatgtccagacacac

SEQ ID NO: 68486 - DNA, 414 bp, Zea mays
ggtggaggttcttcatccacacatgtgctaagcgtcgatgccacagccagcccatgcaagtcttagccattaagcatgcatctagaccggcctcttcttttgcaaaatcaactaaataaagtttgccgtctaatacacccttaaaagctagtgaaccatcacttcttctaaagacagacacatctatatttgtgaacagacagttatatcccatattgcacaattgactaacagatagtaaattatatcctagtgactctactaaaaacacattagagatagagtgctcattagaaattgcaattttacctaacccttttaccttgccttgattcccatcaccgaatatgattgaatcttgggaatacttattcttgacgtaggaggtgaacatcttcttctcccccgcatatg

SEQ ID NO: 68487 - DNA, 358 bp, Zea mays
actcgctaatgtgtccaacaactccaccgcgcctccaggattgagctcagggtcttcgctgatagtaaaagtccttggatgcacgttgaattgctcgtcgtagttgcttcgtcgctgcacgccgtggggagcgtcgctgccgccaccatatccgatatgaagtgtgctaccaagttcaccaactctcccgcttcgagtaggatatatcggtgtcgtgaatcacacatcgtggcatgagcggtggagatcaccggcgcggtgcgccgtgggggggggtgctgcaccgccgtattgccgtgtcaaggaagaatataacacccgggcattgatcttggatcaacggctttggttgatgatg

SEQ ID NO: 68488 - DNA, 431 bp, Zea mays
  unsure (1)..(431): unsure at all n locations
tctgtnacaacaacttcatcttcttcgggtgcaggagcagcactgtctccccaaccctcacaatagacatgtcacgaaagtatcttcccttcatggcatcaatctgactctatttaatggtcaagatggtatggcttggccgctagggccgatcttcggaatcttcatccccactttccacatcgaagtcatcgctatcaccagaatcctcagacagcccaactaatatttcatttgtaatcttttccgtgtttgacttttccattgcttcgtaaaacccagctagggcagggtccacaatctttgtctcctcagacatcttctctttagatgtatatcgaacactngtgcaaatgccgaagctcacaaaacaagtgaaatctgacagcatgaaatttaaaatttgagaaaacaacacacgcaattgaaat

SEQ ID NO: 68489 - DNA, 427 bp, Zea mays
  unsure (1)..(427): unsure at all n locations
agcttggaatatctaacaaatctgaagctgacaagctgaagtttggtctgttcacaatgtttccatgtgtgcagccagcctttaaaaaagccgtagctgtgccccgagaagctaccagggcgcagaagtcggcatgcccaccaataacttcgtcaacggcgtcaactttgccttcaatatattctagtgtttttggcagattctcagctgaaggagtaaatttcggagaactagctccgacagagtgaaacacatccttcagtcgttgcacacatcggctgccgaagcctaaacattnttcctgaagttctttgaaggatgtctgcaaatttgaatatttatccacttcagctttcaagcttgcttcaaaatgtttcttttcttgctcgaatttttccgattggtggagtaattcattctttaattt

SEQ ID NO: 68490 - DNA, 371 bp, Zea mays
tggtgccaatggagaagcaaaaatccttgaagtcttggctgtcaaactgcttgccgttgtcaactgtgagttcggacggtactccgaagcggcaaacaatgttttgccagaagaatttctgtgcagtctttgatgttattgtggaaacagccctcgcctcgatccatttggtgaaatactcgacagcgacgaaggtgaacttgaggttcccctgagccgtgggcaggggcccgacaatatccatgccccagcgctggagaggccatgtgtgggcgatcagttttgtgaattgcgaagggctgccagatcgaggagaaaacttttggcaggcttcgcatgaccttgtgacccgatttgcggcgcagatcatt

SEQ ID NO: 68491 - DNA, 240 bp, Zea mays
ttgagaaagacaggatttgtagcgcatgccaagcacggaagccagttggtactcatcattcacataagaacatcatgacgactgacaggccactggaactcctacacatggatctattcggcccgattgcttacataagcatcggcgggagtaagtactggctaattattggggacgaatattctcgcttcacttgggtgtcctttttgcaggaaaaatcttcaaccccagagacattaa

SEQ ID NO: 68492 - DNA, 439 bp, Zea mays
  unsure (1)..(439): unsure at all n locations
nggatgaggtgtcatcatcatcatcatccgagctatcattcgagtcccattcaactaagtaggctttgccatctttcttcttgttatagtatttctttttcttcttgtcactttcatctttgcccttcttcttcttgcttggacaattcatggcaatgtgaccgggttccccacactcaaaacattttctatcattgaaagcatttcttctagatgtttgacctcttctaggttgacctcttttcatcttcatgaatttattgaatttccttacaaataaagccatgtcaccatcactctcgctttcattttcttcatcattgctatcttccttttcaattgcctttgaggccttggctttgagagcaatagattcatttttcaccttctttgccaaacttaaagcatcggcttgtgacttcttaaatatatcttgagt

SEQ ID NO: 68493 - DNA, 426 bp, Zea mays
agcttggatatattggagaataaatgatgactaattgataagggtcgctggggacgaagtaattctagagccaagagatgatgaagttgttgtttttaagagcttcttcagagacggactttggttccctcttatgaaatgatcggtgaagttttgaagaagtttgaaatctaccttcatcaaataactccaaatgctatagtcaggcttattgtgtacatatgggctctccgaagccaaggaaggagtgccaaagctgaaggattttgcagggtacatgaactccattaccagactaaagcgagagcatatggactacataagaacttcgtatgttacaattttgtgtaccgaaaggatactacggcccctgtgattatatatcgcacctactggttgactgggtggacaagtgaatggtttatg

SEQ ID NO: 68494 - DNA, 389 bp, Zea mays
tattgatatcccaaaacaactctatctcatccgagtatccgacgagacgacgatatataagaaaccgttcttggcaaccttccataggcagcacgtacgcgagctgctaactcaccatgttgatcatcatcagtccatcacctaatgatgctgagggtccgggcctcccgggctcaggcgcttggactcgtgggccgccgccgcggcgccaaacactgggcctctgctctgcccctcgccgggcactgtcatgtcggcaattgccggctgcccgtgtccggccggcagcgcgtccggccgtcctctcggaacccgagccgagtatgagctcatgaccgcagagagcagcaagacgacgaggagtagttgactcgcgccgtacgtgccat

SEQ ID NO: 68495 - DNA, 428 bp, Zea mays
  unsure (1)..(428): unsure at all n locations
gcttgtgttacaagaaagaaagtgggagcgctgctngatttctgatcttgcatgtggatgacatattattgattgggaatgacattcctatgctggagtccatcaaggcttcactgaaaaagagtttttctatgaacgacttaggggaagcaccatatattttgggcataaggatctatagagataggtcgaagaggcttatacgattaaagcaagatacatacattgacaaggttttgaaacggttcaacatggaacagtccaagaaaggcttcatacctatgtcacatggtaaacaccttatccagatgcaatgtcctgcgacggctaatgagcgagagcgcatgagtaaaggaccatatgcctcagcgattggatcaatcatgtatgccatgataagtacacgcccagatgtttcatacgctata

SEQ ID NO: 68496 - DNA, 402 bp, Zea mays
  unsure (1)..(402): unsure at all n locations
ntatatgcgatagcttcggcattgctattgagaggatcctctgaaggggttctttcttcaggatcttcggctacgaagcataccctcaacaaaagaatcatatgaaaagtaaaagataacatgaacaattatatatcaactcatttctattttattactatggaaaaatagaaatgatttcaaattacaaatgtaccttcagctctaaggaaggtaagggtacaagtgtgacgcaaaagcaaaatgacaagtcagcgtgaacagtacgggagcactgttcatctatttatatgcacgggatgcagcgcatgtacaattacactcatgccctttacatttgctaatgactctatagtaatccatcgaggtctaaatagccttttcccttttagtcgggtcccc

SEQ ID NO: 68497 - DNA, 408 bp, Zea mays
tcacgggctactggcggagctagccgaagcactggttgtgcttgagggtggctggagtgggctggccacagcggccgtagctctggcggcaatggcgggcggaaatacgcttgccggagctaaggaacggtggctggccggtgagggtgagtgcggcgcgaaaagaggtgcgcccggcgaggctttatatgcgcgggcgggcacggacgagggcgtgggcgcgcgacggacttgaccggacgccggggcgagcgcgcgcgcggtttgggcgagctctggcgtgccgaccagggtcgaacacgtgtgcccgtgcgttctgcccaagctctggcgcgtgtggtcgctcatccgagcctgctctcgccttggccagtgcacgaaacctcttctcctccttacactaccatt

SEQ ID NO: 68498 - DNA, 438 bp, Zea mays
  unsure (1)..(438): unsure at all n locations
agcttctgcttcaccgagtatatcacatacccctgcatacacacaatttaattgagactccatccaaccattgcaggattataacggatggattcacaacatacacagttccaagaagtgaagtgaaccaattcatctcacctggctgggtatggcgtgataggtcctgaaagccctgaccttgaggtccctcctgagctcgtactcctccccgacctccagggggaccaggttgtggttgagctcggactggtccatggcgcggtgcacctcanatagccgctccacgaagtcccggaggcacgccgggacgaacatggtgggcggacacagcctatagagcccccgtgtggccacatacatgggaaggcccccgatgtggtcgacgtgcccgtgagagatggagaggaactcctgcgagacngcgcgctgcgggca

SEQ ID NO: 68499 - DNA, 463 bp, Zea mays
tcatactcggctgcgttgtagaggccgggatagcaattggagagcatacttgaggtgttcgcctccaggtgcagtgaagagaattcctgctcctgctccctgcagcttcagcgagccatcaaaatacattcgccatacttctgcggtttctggattatacggcacttgctgttctgtccactctgatacgaagtcgaccagtgcttgagttttgatggcagtgcgaggtcggaactccatatcatgggaccccaactcgcaagcccacttggctattcagccaatggcttacttgatgtgaagaatgtaccctattggaaaaccagggactactgtgactctgtgatcgtcaagtaatggcgcagcttgcgggcagctataaatactgcatataatagtttctgaacatgatgatacttcttctctgatgggcctagaacctcactaatgaagtagacaggat

SEQ ID NO: 68500 - DNA, 435 bp, Zea mays
catgcaagctttgttatctattcgtccttcctcgttctgttctcctggcgactaatcaacaataaagtctgctaatgcctgacattggattgtacacatatgaacataatctatggtgaatcatttagctctgcaactcattatccaaatcttcctgtggcttctttgttccttattatatccttgagaggctcagaagaaggtactataatatggtatgtctggaaataatgccgaagctttctagaagcaatcaatacagcatatagtaccttctccaactctgtgtaatttttctttgatggactaagtacttcagagacaaagtacactagcacttgcttcttagcttggccctcttgcttttcttgcaccaacgctgcactaactgcagcgtgagaagcatctacatatagcagcaatgtggcttctgac

SEQ ID NO: 68501 - DNA, 479 bp, Zea mays
  unsure (1)..(479): unsure at all n locations
tgccttcgcttcagtctatcatccgcagtccaacggggtcttgtttcgtgccaatgggaaaatattcacagctgtcaaaaagatgctcctcgatgaaagaaaaggcagatggaccgatttattaccggaggcagtctgggcgctaaacacaactgagtgcagggcgaccgggttcactcctttccgccttctatacggatcagaggcaatgaccccgcaagaaataaagcatgggtccccgcgaacagttccgtcagccgtccccgacgtggatgagccaacttcaaaagatctcattgacggagaccgggtcttcgccctacaggccctaaacaaatatcaagcccagaccanagcatggcgcgaccacacagtcatcccgagggagttcagcgagggggacctcgtactcatacggacggctcggacggagttcaagggcaagttggagctcaagtgggagggcccctacatagtca

SEQ ID NO: 68502 - DNA, 420 bp, Zea mays
  unsure (1)..(420): unsure at all n locations
tggttaaagatntaactcatggttgcacaattgcttattctctcccnctctcaaccatggttttggaagatagggttcaagagaggtctagggttttccctcctcttgcccaaggtagtaagtgcacaaaagcttgagtgatgctcttaggtcattaacaatcttgattaacacatggtctccaaggttcttatgttctccttaagtttctaccacatgtgatcacagtccttagtaccaaggtgtgctctagccatggtaacacctgaggtgttacaccccgcgtcgacctcgatggaggcggcgggcgcaactggggcctcctctaccgctgccgtcagtgtactcgatggcatcgctgtcgttgaggctgtggcagctgtcagagcagtggggaccccctccgacgctgcggcacca

SEQ ID NO: 68503 - DNA, 413 bp, Zea mays
  unsure (1)..(413): unsure at all n locations
tatcttcagagctcgtctacattccatgatcttggaatgtcatttccttccatgtctttaagcatttatgaccctagtctgttcaaagctattacgagaaaaggtccttcccactttacttgcaattttcctgttgtgtttgggttggctacccttcagaggacaagatgtcctggtgctacgttcttgagttttacttttctgtctcgccacctcacggtttctgcctgatatttccttatgtgcacgatcgcctctagcctcagttcctctacggcatccttcgagactttctcattgtccgaattttgtgctgaagctataattcttgtcgagcctaacttgacctctntaggggtaactgcttcatctctgaagaggagcttanatggaagaagtttgtcaatcttgat

SEQ ID NO: 68504 - DNA, 467 bp, Zea mays
  unsure (1)..(467): unsure at all n locations
tattcactgccacagtggtgttatcctgaggaggatggatttgtttgtctttgcctttattgtcatataaagccttgctaaggcgagccatctcttgctttaattgctcattctccattgcaatctcatccgaacatgtttctataacaacattcttaacaagaacttgattgtaggggttagaattatcaattaaatcaaagcaagaagtagaatcatctttcttaataatttcaggcatttcaatcaaagatactcctagggtgctaccaatgttttctagcttagtagttagctcattgttatgtatgctaagaattttcattnttcctagcaagttttcaatggcttcttgagagctagctaacttagccttaagttnttcattctttntaataaggccatcattggtagcgaatgatggagcattagaatctaattgctcaattttagtgatgctcacaatt

SEQ ID NO: 68505 - DNA, 434 bp, Zea mays
  unsure (1)..(434): unsure at all n locations
agcttgtctttntaagtagctatctagccggcaccaacattattaggttatcttcttgtcatcactgcaccaaccacgctcatctatcatgcatataaactctgagctcatcaattattgtatatatatacgggcatttacacaaattaaacgttaacagatgttggtcctgttatcctgtatatgcttaagtagcaaaatctggattggtaataaaatcccaatcagaaaatgccatggacgatggatgcaaacgcatgcagcatgcctgttgttggaacggagcatccagcagcagcccagcaggccatttatctttaaacccccacatggcacattagcacgtgaaaatgtggtagagcgtaccaatcaaagcatggttttttatgtgtaatacatgctcccgtggtcgatggatggcccttgcatataca

SEQ ID NO: 68506 - DNA, 417 bp, Zea mays
  unsure (1)..(417): unsure at all n locations
ngagaagatatttccacccggctttntcaatccaatgcatcatttgattcttcatctcccctatgaggcacgaatggggggccctgtgcagggacgttggtgctatccaatcgagagatgtctaaagactattcgaaagaaatgtagaaataaatgcaaaatcgaggcttccattgcagaggcatacattctagaggaggtctcaaacttcacaacaacttattatggtgacaaactgccgagcgtgcataatccaccccctcgttacaatgatggcgacaatgaatcgaaccttagcatatttcgaggccaactcggaagcgcaagtggctcgaccaccaagaccctgaatcatgacgagtggcgacatatcatgctatacgtattgaccaacctttgagaggtgacgccatacat

SEQ ID NO: 68507 - DNA, 436 bp, Zea mays
gcttcgaagcctctctgtatcgcgggatcataacaagcagattgctagaaggtccctaaaagcaagcggtacctggcggtgctcccagttccagacagagacgcggtcgttggcgtccgcggtgacgagccaggggtgagtggggtggagctggatcttcacgactttgtcgctcgtcggccggaacgcccgtaggcggagcatctccccgcggccgccgcgtgctgcggcggggttgtcgctggcaagaggcaggcgggggcaggagcagagatctggagtctggagatctggggatgagcaaaggggaggtagcagtgatgttgtgctggtctggtggcgccgtggcatggtcggtgagatctgaaccagcaaggctgcaactgcaactgcaacggtgagaaaggaggcgaagagaagagataaatgagctgga

SEQ ID NO: 68508 - DNA, 461 bp, Zea mays
  unsure (1)..(461): unsure at all n locations
tggccggtagccaaagcatgaacaacctcctccattctcttctgttaaaagaccagatacgtcatgttggaatccaaaattacaggcaactaccaaaaattacatgatttcaatctggcatatcatgaaaacatgtacctgacggtaaaaaatactatttatgtacaacatattattgcgagaacatgatatgaggtgccatatctgatagcagaactcaaaagacaaaatgatacataaaccaaacaaaatcaaggatcctttatttgtctagcactctagcataaggataactcaaaaaggaaaaaatatattttagttgtctccacatgctcgtgagtggaggtgggtgctgcgtggaaaggcacatcgagcccggagagttgacggcgcgggcacaggcatgagagctggagcgattgcgggagagcagcanggaagacatgaagtactaccttctt

SEQ ID NO: 68509 - DNA, 407 bp, Zea mays
  unsure (1)..(407): unsure at all n locations
ctatgactaanaatttggtagcttaacagtacaatagcaatgaatgttgtggtaacttcacacctacccgtctgtttatatagtgctgcacgtgggaaggtgaagcggcaaggtctccaacaccgaacaaacagtcacccgcactcactgaacggtgggccacatagctcgagaaggtgaatcgctggcgagcgtgtaattggtgcaagatgggtcgcacgtccgacgattattttaatcgtttctcgccaacgagctcagggaaggtgttttttggatcttcggcatcccgaagcttagaagatttttcacggatcaagctcgttacgaaaaacgatctagcgccgcgaaggggctactggtgggggtatgcttcatagccgaagatcctaaagaaatgaacacct

SEQ ID NO: 68510 - DNA, 428 bp, Zea mays
tatcacataataattatacagaattggagaaggtgctatatgttgtgttgatggcctccaggaagcttcagcattatttttaagcatatcatataattgttccttcatcgcaacctttgaaagacataatgagaaatagagaagctactgggaggatcggaaaatgggctgtcgagctcaatgaattttctatagactatgtacacaggtcctcaattcagtcctaggcgttaggggatttcatcgctgattggacgccaggggctcatgaagaagtaataaaggacgccgaagcctggacagtcttctgtgatggttcttgtggaaccttcggcacaggagccgtcgctgtcctagtagcgccctataaagtcagaacatgccatgcagcacgactggatttagttgtataataacattgtgagtac

SEQ ID NO: 68511 - DNA, 298 bp, Zea mays
  unsure (1)..(298): unsure at all n locations
gcttatggagattcttcatcccaacatgggctagtcngcggggccagagccaacccatgttagtcttagcaattaagcaagtgtcgaggtcagctctatcaaaatctactaagtatagccgaccctctaacactcccttaaatgctactgaatcatcacttcttctaaagacagtaacacctatattcgctaaaagacagttgtagcccattttgcataattgagaaacaaaaagcaaattggtatctaaagaatttacacgaataacattagaaggagaatggtcacgagatataac

SEQ ID NO: 68512 - DNA, 402 bp, Zea mays
  unsure (1)..(402): unsure at all n locations
cggcttcagcattgattggtaggatccttattcttccgagctgcttaaatgattattttgagacacttcgtttctgctaggtattcggcaatcccaagaacgttagattaagacctcatttaggccttattcgtttacgtcaaattacacccggaatcgtttcatctaaccaaagtttatataaattagagaagcaatccggttaggaatcgtttcgacacaccaatccggcacaaacgaacaagatcttaggagggcttctaaaccggctctggctcttacacgagctctaccaaaccattttaaaaacaaaagagctctcatctctcaataaaaagcattaaggagccagagttaattttataaagagaagccggagctaannaaatggctcctagcgac

SEQ ID NO: 68513 - DNA, 413 bp, Zea mays
  unsure (1)..(413): unsure at all n locations
ntntgttggccgaagctnttctccatcgcccatctattgttntgttgagaccaaggctaaatgaaatggggccaagagacgaagatcgcaatcgttcaaaccatgttgattattttgtcctaaaataacaattgaaaacaatcttaattatcgaggacttttggctggagacttcctcctcaacaataagctagagcgaaaaatattgaaaaaaaataaaagtagacatctgagccagaaatgggccaatacaaaatttgttgaatcgtttaaaaaataaatatacctacgtaaaaaattggactcaagaagttaaatgagccgaggaaacatgggccccttgctcaagcgtacggctggtgtatgacttcgtaatgaaacaccagatgatagagggccaagtctcatatcta

SEQ ID NO: 68514 - DNA, 433 bp, Zea mays
  unsure (1)..(433): unsure at all n locations
agcttactcctccttgggaagggcctttcatcatcgccaagattttgaagcccgggacatacaagctggccaacgttcaaggcaaggtctacagcaacacttggaacatccaacaactatgtcgcttttacccttaaaatgtttcaagtcgttcatgtatctcgcttttctttacatgcacaaataaagtataaccgtcaaggaaggatcagccttgcctcggcaaagcccaaccctccctcgggggctagaaggggagaaccccctctgcgtcaaaattttcctcgagaaagtcttttactagaacgtctttcgtgcttttcgactgcgtcgataacagaatcctaacaacgagcgagagagaccttgaacggcnaggccgaccaagccgagggactcctacgcctctgggatatggatacctcactcatca

SEQ ID NO: 68515 - DNA, 386 bp, Zea mays
  unsure (1)..(386): unsure at all n locations
tctacgtatatatttcgtattaattacaagatccaactctaacgatctatggttctagagttatcttggtcttgcagtcgggattgccataagactggtgtccacgctgaagtgagcggtacgggtgctgagtcccgacgggagcagtggaaccaccatccagatgacgacgttccgcgcgctcagcccgcagcagggcgatctcagcacgagccctactcagctcgtctaatgcatggtccagctccgtgtttagcacgacggctaggttgactgtgctgctcaacctangattgccctcaccgacaggtgagacaatcacgccttctgtgctgtcagatggacggcgggggtaatacttcatgtcaagaccatcagcttgccca

SEQ ID NO: 68516 - DNA, 275 bp, Zea mays
  unsure (1)..(275): unsure at all n locations
tatcttttggtttgttagaagtattctctaaaagatctacactaaatagatatgtttttataagagtttttaaagtggtgtccttagatttagtattgtgcttacctataccttagtcgtgtttttttctcagctgtggccttctgttcaataaacattatgattttgacgtggataaaacttattgccttaatgaaantgtatgaagggatccttaattaatgagtgtaattatatatcatttgtaacacctgaaaatcctatgacgagctttt

SEQ ID NO: 68517 - DNA, 347 bp, Zea mays
tgtaacccctactacgagcaccccggtgcaagataatataagtctcatccccctctcgtgtttcatcttgcatcaacccatctgggcagggacacgcaacgtcaaattcactagtcggttgagggtcctcgcgggtccaaaacgccgacaatactgtttctcaccatgcatttatgtacaaaagtgaggcttctagctctaggcatactactcatgttaaattgcctagaaaggaaattactgctgcatcaaatgagcataatgtttcatttaagacttttgatgcatcttatgatttaactaacaaatcacgcaaagtagttgccaaatatgttgggagcaaacac

SEQ ID NO: 68518 - DNA, 310 bp, Zea mays
  unsure (1)..(310): unsure at all n locations
ntcccaagcttgagccgaggcattgcatcaccggagaagcaagctcgacctcactggacttcggccgaccgccactccgcgtagaccgagtcactcggtgagtctttttccgattccttgcacccacatcaccgctgaccttcactaaagctccccgagcactttaatttgactctaccgccgtgagcaggccggagcacgcaccgccggcgagcccgaccgcctgcgcacgcggacagcccatctccgaccaccaccgccgacgatccgcacctcgacgtgatcgccatagacccccggacctcacccg

SEQ ID NO: 68519 - DNA, 323 bp, Zea mays
  unsure (1)..(323): unsure at all n locations
atatatgaggaggtacctacaccatctaatcagattcgtacactaattgatgctattggctatgttattccttggccaattacacatgtaagtttcttttntatttgaaatagtacatgtgtccccataacaacttgagttattgatctaacacatgtttcataggtgaagcaagctagaagctcatcttgtacccgcaacaagttggtacctgcagcacgtggacaaagctagatggcgtggacaaagctagatgggaagcctagtataattgcacagtgaatcagttagattctacgacttactaaaacttctaagcgata

SEQ ID NO: 68520 - DNA, 474 bp, Zea mays
  unsure (1)..(474): unsure at all n locations
acctgaggcatgcaagcttgcgactagtaagaataaagnttcattatgtattttctttgctgagatagttacaacagcgaaggtctagctaaatgatacgtggaggctattacaattactatccaaaatcagcgaaggagacgtaaaaacaatgacaacatttaaaaaattctttgcggtacaacccacacattctccttgtaaactgttaagagaggaatcagatccatacaattacgagttgttgttcgaatttggcagcaaaactattaggttgcttgactacatggngcacaacattctgcagagtcgcagattttcctgatagtgttctagatgttcacgctcaacagattctgtatgaaaaatagaataactattcagaactactttatttcgcaaactgagggcatacaggaacacttcatggaactaaaagcctgcacataatctgattctggttgttcatatggt

SEQ ID NO: 68521 - DNA, 465 bp, Zea mays
  unsure (1)..(465): unsure at all n locations
tatntaggtatgatgtatttttcagtacgactaactgggggtgtctagtctatattttccactcctataaagcacaccactgctctactgtgtctgtatagttggtataattgaaacgtagcaaggtatggctaggtcgtgtgaatatgagttnggaccgcggttcgaatcttttggaagggaagggacgacacgctactacngtgcacacaggtatgttatatgatagatatttattagaacctctaacgtccttttccatgcttccacgggtgagtgtgattaaggacctaattgtttcagcttatagaatatacaatctagattataatctaacctatataatccagattataatctagtatatgtagatgtttagtagtttagattatacaaatgtagattattcacaaagataatagtacttttgtttgttatttgaggtgagtaagaacgatacatata

SEQ ID NO: 68522 - DNA, 455 bp, Zea mays
tgcaacttcgactcaattctgctctccagcttcagcttctcgccatccgccttcctgcgtctgaagctcgaagtccttctcttcaagagcagctgattgggcttttattttgctttctaaactctcaattataacttcatgtttcttatcttcaaaatcttgctgcattttcaaagccttactcaacagcatactctgcatacaaacaaccttcgttagagaacatcttcgctgttgaaaaccatcaaagctaaagaaaagttgtttaccttgaaattggaatagaataaactaccaacgatgtgctgtcgtctatagcggctaatgtgcgactcgagcttcaagaaactaatactctttgatagagtaccaataacctccgctcctgtatgatcccagacacagcccaacttttcgttatcaatgccaccgaagagaagtgctccggctgatat

SEQ ID NO: 68523 - DNA, 444 bp, Zea mays
ttggccgcacctgcaggctcgcatcctcccctgaagtgggcccgtgggccactatctgtaccctgaaactagggtaccccttactgatgtataaaagcacagtacccacgtggctactcttagtcgcgtggtaaaagagttgtatgtgggaccaggccataactcgccccaacctcgggcgactactctgggttagcaatggcgcctgaccccaccacatgggcgggtccggggccgccacgtgtctagagagagtgatatactccaaggcatcaacagtgagtccgaacccccatgggatagtgtcggacccctggatatattagacggacctccaagtttgttccaagacccccacgtgtaccgaccggaccctccccccgtatggtgtccagtgccgccacagtatggtcccatggtttcatgacagaacacacccgatcc

SEQ ID NO: 68524 - DNA, 445 bp, Zea mays
  unsure (1)..(445): unsure at all n locations
agcttaaccttgtaatgaggataagatacctctgttccatatgtggaggctccttaagcctctctgaaatccttaagggtaaatgcttaagatgtttataacatgctttcataagtgcatagtctgtcatgagcatcacacttatattatgacacattgcacttcacattttctatgatatatatatgttttcattaacctaactatgtgcacttagcatttaaggccaaaaggtgtattcttctcaaggcacatatttagggggagcaatttatattatatagaactatgattaagcttaattgacatatccttcgatcatgtctctntcattntggtacaaatgcatatatcttattattctcgtaccaagactacgactaatgtgtttccaagtatatttctatactaagtcgtagatcgaaagggaaatggagtattcgtc

SEQ ID NO: 68525 - DNA, 503 bp, Zea mays
  unsure (1)..(503): unsure at all n locations
ntatcanatggacgtgaaaagtgccttcctcaacggaccaatcaaggaagaggtctatgttgagcaacctcccggctntgaagacagtgagtaccctaaccatgtttataggctctctaaggcgctntatgggctcaagcaagccccgagagcatggtatgaatgcctaagagatttccttattgctaatggcttcaaagtcggcaaggccgatcctacactctntactaaaactcttgaaaatgacttgtttgtatgccaaatttatgttgatgatattatatntgggtctactaacgagtctacatgtgaagagtttagtaggatcatgacacagaaattcgagatgtcgatgatgggggagttgaagtattttctaggattccaagtcaagcaactccaagagggcaccttcattagccaaacgaagtacactcaagacattcttgctatagttgggatgaaggatgccaaacccatcataacacccatgggaactaatg

SEQ ID NO: 68526 - DNA, 436 bp, Zea mays
gcttcaattctatgtctcttagctctggggtctccttcatgtgacattttgagaatgtaccaaatgtcacgagcatcctctctttcttggacttttcggtactcttccggacaaaggcttgcttttattatgctcaccgcttgagcattgcggtgcacttcttgcatcatttccagagtcatctcttctccttgggcaggcttatacatacctatattgacaatctcccaaagactaggatgtacactgattaaatgcgacttcatcttatcggcccactcgtcatagttcaactcactaagagttggtaactttccaagtggggcggaagagaagttgggaataaaatttctagaataatcaaattgaactttattgaactcgttacctttacttctggtggatgatccttcggtggtgagacttaccttgctca

SEQ ID NO: 68527 - DNA, 381 bp, Zea mays
  unsure (1)..(381): unsure at all n locations
tctnctatctagaataatctacggtattctggacaatcaacttataatagttgtagatgaacttatgcacctgagaaatgaccaactaggcaaactagttaattcataagggtcgagatggtcgtcaaacaccataatcgcttataaaaaatgttgatgtcatttccctttcactacttctgcgtggtaaccatgcagcaagagagtaaaaggagatggctttggttgtcatcagtgaatggctctgataaagccacagtcgaacaggtgtttgggtattgccatactttaaggcacaagaccaccctgcatactcctattgtttcctagatgccaccgtgttagcctctgtccatgccttgaccaaccagttcatcccaa

SEQ ID NO: 68528 - DNA, 355 bp, Zea mays
  unsure (1)..(355): unsure at all n locations
ataagatangaaacgactcaagcctagctacgggtgcataggtttcaccaaaatccaaaccttcgacttgggaagatcctttgggcacaagtcgggctttgttccttgtcaccacaccatgctcgtcttgcttgttgcggaagacccatttggttcctacaacattttgattaggacgtggaactaaatgccatacctcattcctagcgaagttgttgagctcctcttgcatcgccaccacccaatccgaatcttgtagtgcttcctctaccttgtgtggttcaatagaggaaacaaaagagtaatgttcacaaaaatgcgcaacacgagatctagtagttacccccttatgaat

SEQ ID NO: 68529 - DNA, 459 bp, Zea mays
  unsure (1)..(459): unsure at all n locations
tctgaatcatttatatctataccgcggctgtgttctctcatgcatcacatggaggtacagtacaccacaatacaaagtacgttttgctaggatctgtggctcggatgtctgtctnntttggagcaagctattcctgtggaatgtctcgtctcacattatctacagctgattgttgttgagatagacgcggcggcggtgacatccttgggaagattgagatatctaccaccactaggcatataataatgtactatatccttcgtagtttgtgcctacaattagcccgcactactacctcgttagccttactcgtgtggtgtacgtgtaccaagagttacctggtttggtcatggtaatttatgaggaagctctagcggccgacactatatctccgctgntatttcatcacatcagaagatatccgaagatcatgtgtgcatcgcttgtgctccgatctta

SEQ ID NO: 68530 - DNA, 481 bp, Zea mays
  unsure (1)..(481): unsure at all n locations
gtacccgcgatcctctcagtcacctgcggcatgcaagcttcggctccatctatattatgaattgcttttgagnctgtctagtttccttcagcctttctggtagcttcctgacttccatgaatagcaataggcccttgatccgaaggtatcttcatgcatagatatgctggatgaagaattgcttcaaaagcattaagtgtcccacgaccaatgatttcattgtaggggtactccatgtcgacaatatcaaagacaacttgctcagtccttgtattgttaacaaatccgaaggtcactggcatcgtgatcttgccgagcgctacaatctgccttcctccgaagccacaaagggggtgtgtagcatcatgaatcttatcctctggctcttgcatctgtctgaaggccttagcaaatataatatccgctgcactgcttgtatcaactagaacattngtggaccagaaatctttgatgacgcaag

SEQ ID NO: 68531 - DNA, 393 bp, Zea mays
  unsure (1)..(393): unsure at all n locations
tcacgaaatggcaccttngacatcacgcacgagcagcttcaaccgaagctggttttntctgcaggaccttcggcgacgaagcatggtcccaacagtagccccttcgcggtgctagatcattnttcgtaacgagcttgatccgtgaaaaaagtctcttatgcttcaggaagccgaaggtccgaaaaacaccttccctgagctcgttgtcgagaaacgatacagtttctgagcgcagagcggtcccacagtgcagggttcactatttggttttgcggcccaccgcgcagcgggtgcgagcaactgtttgcctggtgtaaaaatcctgacgattcaccttcttacctgcagcactatataaacagacaggtagttgtgaagttaccacatcattca

SEQ ID NO: 68532 - DNA, 456 bp, Zea mays
  unsure (1)..(456): unsure at all n locations
agcttgtcaatacctgtcaaagcaacagcttatgccagcgcagcagctgcagaccataccagtaacttggcctttcgcatgctggggactggatatgattggacctttcaagaaagctcaaggaggatatacccatgtgttggtggcaattgacaaattcactaaatggatagagttttagcctattgcttctttaacctctgctaaagccgtggaattcatacaaagcataatatttagattcggggtaccaaacagtatcatcactgacttgggatccaacttcaccagctcagaattctttgacttctgcgagcaaaagagcattcagatcaagtatgcatccgtagcacatccaagagccaacgggcaggttgagcgggctaatggaatgatattagaggcactcanganaagggtcttcgataagaatgaaaaaatcgctggaaaatggat

SEQ ID NO: 68533 - DNA, 430 bp, Zea mays
  unsure (1)..(430): unsure at all n locations
tcatcgaagcatataagtttctggatgagaagtggtcacccaagctccgttgatgaagcaccagaagaccaatcaaggaaggaatccatgtgggagtttgcaaaaagaaggtttgtgtgttggcattcgtgctttttcaataagctagctgccaagcaaaagccagaagcctgaagatgattttttgagtagccagaatcagtgtttgcaatcggcaaccagatgctcctccaaggccagaatttgttgaagttccatctcctcgaggacgagattcactttaagtggggtagatttgtagcatcacaaaaattcaaatcttgaagatttctcaaactcgctctaaattcaaaatgaatatcanatttcgtttcacaatggttggttgcgagtcgatatcaacaaataaaatatattggtctatattctc

SEQ ID NO: 68534 - DNA, 461 bp, Zea mays
  unsure (1)..(461): unsure at all n locations
agctcttacatatgggttacatataacacatgtgtattattgncttctatctctatcatcttgtcatcaaaatcttgtaaacaccttcttccgacctcgtttgacttctatcttcatcttcttgtattgctataacaaatataatgccttcatctttttcttgatttgttccgaaggtggctattgccgaaacacctgcaacacttagagataaatcgggaaatagtggctaactatatgtttttgaggacctttgaagtacgaaggcccccaacacataacatatgtgtgccaggatctattttccacacatatgttgacgtcacaagtgtaatatatcaaaatacaatgcaataaaggcgtaaaagagagtaataactntattacatcatccaaacttaagagtcttaaacagtatcataatcaaagtacaacagaaataacatgggcgatctcccaca

SEQ ID NO: 68535 - DNA, 394 bp, Zea mays
  unsure (1)..(394): unsure at all n locations
actataaaaactcaagcttctcctgacaagcgccgcacttactgcaagtgctaagctgctcttacagcagtagaggagcccctggcgctgtgtggagtaaagttgttaaatctatcaaatactgtttcagttcttcgaaagacttttgctgagctgatccccattgaaaaatttcggctgacttcagcacttcaaagaatggtaaatttctctctgccgatctggatataaatcgattcaaagatgccaaccttcctgtcagccgctgagcccctttctttgtgcttggtggctccatccgaaagataacttcgattntatttggattagctccgattccttttgttgaaaccagacaaccaacgaatttcccttctttaccccgaaacacact

SEQ ID NO: 68536 - DNA, 460 bp, Zea mays
  unsure (1)..(460): unsure at all n locations
agcttcttgaaagctgaacttctatttcccttaagcagntntgttgtagaggtactgaagatatttgaaatctaccttcaccaacttacccccgaagcaatcataagaatgaatatcttcgtgtgggctgtgagaagccaaggcttggaacctaatgcgaaaagtttctgcaacatacatgaattattgtacgagacaaaaccctgnggtaaggaacagtatcacaacaattttggctgctacagcttcggctcccggtctgggtcaagttgtcctgtgccgacctttccaaagaggtggcccggcgactggatgacggaatggttttacgtgaagaatgacttgaaatcacgggaagatataaaaaagatcatcatgcgccccatctggcaacgcttcggcctgcggaggccgaaggtggaaatggatgaagcacccgaagaatgccagagagccttcc

SEQ ID NO: 68537 - DNA, 429 bp, Zea mays
  unsure (1)..(429): unsure at all n locations
tgaacgtgaagagtgccttcctcaatggaccaatcaaagaagaggtctatgntgagcaacctcccggctttgaagatagtgagtatcctaaccatgtctataaactctctaaggcgctctatgggctcaagcaagccccaagagcatggtatgtatgccttatagatttccttatctctaatggattcaaagtcggaagagtcgatcctactttatttactaaaactctcgacaatgatttgtttggatgccaaatctatgttgatgatatcatatctgggtctactaacgaatctacatgtgaagaatttagtacgatcatgacacacaaattcgagatgtctatgatgggggagttgaagcacttcttgggtttcaagtgaagaactccaatagggcccttcattaccaaacacagatactcagaca

SEQ ID NO: 68538 - DNA, 414 bp, Zea mays
  unsure (1)..(414): unsure at all n locations
cttcttcaccatgagatcactgttatcttgagaagggtgagcaatgcacttccctgtaagttatgtcaagctcatctttagcctctcattgtcttccttgagcttttgatatgtataatcttttgatcctgcaagttctagctcanaggaagatttgcttgtcgatggacaacaagcattaccacatggtgatgtagtctcaattagaatacatgtgcatgagtgaggttgttgggattttaagttttctatcataacctcatgagcaatgtttaatatgatatgagctgctgggggccttcggcttctgaaggtcctcaaaaacatgatttaacaatgtctctggagtataatgtgtaaacaggtaccttcagacttacatcaaaaccacagcgtgaagatgcacacagaata

SEQ ID NO: 68539 - DNA, 352 bp, Zea mays
agtcagcacaggtctctcttcgccatctgccctcacgatggacatatcttcgaaatatcttcccctcatgttttccaggtgactttgcccaatagttgattttccgaagactgaatggcttggtcgccatggtcggtcttcggaatcctcacccccactgtccgcatcgtaactatcactttcaccagtatcttcagataagccttccaaaatctcccttgggagtttctatgtatttggttctgctattgattcaatgaagcccagatttttcttctcaaaaaggctcagcttcatctcggtagcaaccttcttctcctcagacatcccttcggaattcctgcctctcgct

SEQ ID NO: 68540 - DNA, 495 bp, Zea mays
  unsure (1)..(495): unsure at all n locations
tctaagggagaacacgtgataggtttgactaacgtgctattcttaaaagatagaccttgtgcagcttgtcaagcaggtaaacaagtgggaggagcacatcaaagcaagaatatgatgaccacttcaagacctctggagctgctgcatatggacctctntggacccgtcgcctatctgagcataggaggaagtaagtatggtctagttattgttgatgacttttcccgcttcacttgagtgttctttttgcaggataagtctgaaacccaaaggaccctcaagcgcttcctaaagagagctcanaatgagtttgagctcaacgtgaagaagataagaagcgacaacgggtccgaattcaagaatcttcaagtggaggagttccttgaggaggaggggatcaagcatgagttctccgctccctacacacctcagcaaaatggtgtggtagagaggaagaacacgacgctcattgatatggcgaggactatgcttggg

SEQ ID NO: 68541 - DNA, 447 bp, Zea mays
  unsure (1)..(447): unsure at all n locations
catgcagctnttaaaggagaacacactttaggactaacanatattctatttgagaaagacaggggtcgtagcgcatgccaagcacgaaagaaagttggagctcatcatccacaaaagaacatcatgacaacggatagaccactcgagctgcggcacatggacctatttggcccgatagcttacataagcatcggcgagagtaagtattgtctagtaattgtggacgattattctcgcttcacttgggtgttctttttgcgggaaaaatcacaaacctaagagaccttaaagggattcttgagacgggctcaaaatgagttcggattgagaatcaaaaagataagaagcgataatgggacggagttcaagaattctcaaattgaaggatttcttgaggatgagggcatcaagcatgagttctcttctccctacacacctcaacaaaat

SEQ ID NO: 68542 - DNA, 400 bp, Zea mays
  unsure (1)..(400): unsure at all n locations
tacaangatatgacgtgcactaaccttgtgggatggtcttgaaaataaaatctgatggtggatccatcaaagccttgatgaggtcaacatctgagaagatgtacctctgtcatgtacgaaaatttgcgtgtgaaataatcaagttgagaccgggcaggtgacttgcactataagagagtctcggtgtagtgtctacgtctgagtcgattaaagaccttgtcgatgtaggcctgctgaccgaggaccctataactggtcacatgcctcgtcatgggtaagactgtcctcaggtacacgatttgacgatgactatggcacgtaatgtgcgtggagcggcggcgagagtaacgtgtaccctccgtggcaagaagctggacagaggtgtatctgtgctctcggt

SEQ ID NO: 68543 - DNA, 470 bp, Zea mays
  unsure (1)..(470): unsure at all n locations
cagcttctagacggggatacataaagtgtgatcagactattttaaagttcggntccgagaaaaacaaggaagacagttgcatttatgcaaagcttaagaaaggaaaatatatcttcctcattctgtatgtcgatgacatacttttatcaagtagtgataaggatctactggcagaaacaaaaaggtttctttcctcaaacatatgatgtgaaagacatgggagaagcctcttatgttctaggggtattaggactctcacaaaagtcatacatagaaaatgtactaaagaggtacaatatgcatcagtgtaagaccacgcctgcgccaatagtcaagggtgattagtttgggaataattagtgtgcccaaaattagtgtcagacagaccagatgaagtcaatatcatatgcttctactattggaagcattatgtatgctcaaatatatattcgccctgacttagtatttac

SEQ ID NO: 68544 - DNA, 376 bp, Zea mays
  unsure (1)..(376): unsure at all n locations
tggctgacgacgtgaccggtgctcctgcccgcctgccaccgacattactgccggtccattnttggccgcattgaccgtcgcgccaggctggcgctgctgggtcgtgcgctgggtcgcctcgagtccgggtattggttccgcagtcgatgagacgtggtattggcgcgaggggcggtgcaattgcttgcacgaagcatccggcgcgccggttgcatgacgcgtgggcctgggcctccatgctgggcatgttggaagtctgagaagtgcgcacacctggcgcggttgcatgctcgctgcatggntgcccgccctttcgcccgctggtctgggcaaaagtggagagccgcttgtaaccgctgggcggntgcatgcaccg

SEQ ID NO: 68545 - DNA, 467 bp, Zea mays
  unsure (1)..(467): unsure at all n locations
agctggaaaagtatctagatacaggccgaatgattgaggctctcttcnaaggtttctctgttaaaaatattcctcgtggagacaatgaatacgctgatctattggctaagtcagcagcccaggggttgcctataccttcggaagtattttttgaaacaataaaagcaccttctgtcgagcttcttgaaagagcaatcctcaacatatcccctgtttatagtgaagattggagaactgaaatcatcactttccttcagggtaattttctttcagacgacgaagcttacaacaggagaatagaagcaagagctcgaccatatgttataatagaaggggagttatacaagcgcggggtctgttccccactgctcaagtgcttatccagatccgaaggtatagaattaatgaaggacatacatgcaggtttgtgtggatctcacattggatctacgcccttgcttgggaaa

SEQ ID NO: 68546 - DNA, 286 bp, Zea mays
  unsure (1)..(286): unsure at all n locations
acactatacatactcaagcttgacaagccctgtcagccctcctcgaccatgccacggaccacactgcggcgtatgccaaagacggcgacagcggccggntctctggttctctctctctacctcctatctctcgcgttccccggcggccatggccccagcgtaaaggtggtgcgctacgcggcttgctaacaggggaggatcagctcaagaagggggcgccgcaatccacggatcttatggtgaagagggagtcggtcggtggaagcgcgcggttccactgtaacca

SEQ ID NO: 68547 - DNA, 444 bp, Zea mays
agcttcagctccatctatgttatggattgcttttgagtctttccaattgccttcggcccttcttgcagcttcctgacttccatggatagcaatgggtccctgatccgaaggtatcttcatgcaaagataggctggatgaaggattgcttccaaggcattgagggtaccacgaccaataattgcattgtaagggtattccatgttaacaatgtcaaacacaacttgcctcagttctagtgtgttgatgaacccgaacgtcactgacatggtgatcttgcccagtgctacaatttgtcttcctccgaagccacagagaggatgtgtagcatcatgaatcttatcttctggctcttgcatttgtctgaaggccttagcaaatataatgtcagctgcactgcctgtgtcaaccaagacattgtggaccagaaatcctttgataacaca

SEQ ID NO: 68548 - DNA, 501 bp, Zea mays
tactggctcctgggaaggacccttcatcatcgccaagaatttgaagcccggaacatacaagctggccaacgatcaagacaaggcctacagcaacgctgggaacatccaacagctacgttgcttttacccttaaaatgtttcaagtcgttcatgtatctcgctttctttacatgcataaataaagtctaaccatcaaggaaggatcagccttgcctcggcaaagcccgaccctccctcgtgggctagaaggggggaaccccctctgcgtcaaaattttcctcggaaaagtcttttaccagaaacgtcttcgcgcttttcgactgcatcgataacagaatcctaaatacgacgggagaacacgtaagcagcaaggccgaccgagccgagggactcctacgcctccgggatacggatacctcactcataaccttccgtgaaaagtaactcacgctcggataagcgattctgctaccgaacaagttctaacacacgatacgagag

SEQ ID NO: 68549 - DNA, 392 bp, Zea mays
agcttgtgttagcatgcaccatccttcacatctggattcttagatatgggctggattcacattctccttcggaaaacacttgggctccaaacattgccaatgtggaaggtgccattgatgcagttcatgataaccaaacttggacccaacaaagagatgctatatcaactcaaatgtggcagcatagggggtctagccgcgtgtaatttctttgtggttttcttctaagaaacattgtaatctgcagtgatgtttttgttatcagccttacaatctgagagaaattgtgatctgcagtgatgtcttttgtggaacttaattatttttatatgctgagagaaattgtgatctgcagtgatgggttttgtggaacttaattatttctatatgct

SEQ ID NO: 68550 - DNA, 463 bp, Zea mays
  unsure (1)..(463): unsure at all n locations
agctgaccctggtggagcccnagggtcgagctctctggtgactgttcttgctgtgcgctcanaggacttggaatntcctcttgaggtgccctttgtcttcttcttttgccctttccacttgaatagctttgttggagaggtgagagaagctgtggaagtcttggctggcgaggatggtcttaagctcgggtcttaaccctctcagaaaacgggccatttttctggcctcggtgctgacatcctcagccgcgtagcgggccagttcggtgaacttgtcacatactcactgactaaccttccgccctgagttaactcccggaattcatcctccttgagttgaactatcccttggggtacgtggtgctcacggaaagttgcttcgaattctgcccatgtagcatctctgacggcttcactgaaggtgtcccaccaagctaaggccattcctgaaagctgatgagct

SEQ ID NO: 68551 - DNA, 395 bp, Zea mays
  unsure (1)..(395): unsure at all n locations
taaccatggnaaacgcaatatcgcatgtcatattctatgcatgtataatctactcgttctcttgtatggcgtactgttggtttcctaatctcaatggatggatgtatgtatgtttgcaatcgcatacaaaacgatctggttgaagagcccgacgaactaccaggagaagcccctgacaacacttcggtgggggaggcaagtgtccctcgaactatctctgtcctattcattntttaattcacctcccgcattacacatgtatacctaatgatttactagcttttgttatcgcatccttgttacctatttggttggataatatggttagctatgctatccgttactctatcaatgacatgatgagatattatgaacgctgtttccccttcctatat

SEQ ID NO: 68552 - DNA, 452 bp, Zea mays
cactatagattagctgagctcgacacaagatgtatgcagacgaacgacaccaaccttagtacttttaagttgaagaatatgtctacctgaaagtatcaccaatgaatggtgtatctcgttctggtgtaaaaggaaagctcgcaccccggtacattggtctatttcccattcttgaacaatgtgggccagtggcataccgactctaactacccgaaacattgtctgcagtgcacaatgtgttccatgtatcctaattgaagaagtgccttcgggttccagatcgaaccattgaagtgatggatgttaccttagaaccagacttaacatattcagaatatcctattcgagtcctggatcaaaaggacagggttacccacagaagaaatctcaaattctataagatacaatggaaccaacacacagaagatgaagctacatgggaaacccaagac

SEQ ID NO: 68553 - DNA, 461 bp, Zea mays
agcttccaaggtccaagtcgataccgaagctgggccctccgagcccgccaagcagaaatccttggaaatcggaggcaagattgagaaagaaactgcagaagcaagcaaaactgaaaaaacagccattcctattcccgaaacattatcttatacgacatgcttcgggaaaaagattatctgaaaaggagaagcaagaggctcagttttatgctcaaagattgaaatatccaaaggggccctggtattcaacagcagcggggaagaagacttcttgtattgcctcccagacagtaaagaaatttctgtctgccgagagatgagcaagagcttcggtttccctacactagaggatgtgctctcagtgttatcaaaagatgagttggccgacaacttagcatacaatagcttaaaagtgagaaaattagaattttgtatttaaaaacgaaatcttccatttactt

SEQ ID NO: 68554 - DNA, 384 bp, Zea mays
  unsure (1)..(384): unsure at all n locations
tgaagccatggtaagtagcataggctaataatatacgaatggactcaagcctatctacgggtccataggtttcaccgaaatccaaaccttcgacttgtgaatatcccttggccacaagtcgggctttgttcctagtcaccacaccatgctcgtcttgtttgttgcggaagacccacttggttcctacaacattttggttaggacgtggaactaaatgccatacctcattcctcatgaagttgttgagctcctcttgcatcgccatcacccaatccgaatcttgaagtgcttcctctaacctgtgtggctcaatagaggaaacaaaagagtaatgctcacaaaaatgtgcaacacgagatctagtggttacccncttatgaatgt

SEQ ID NO: 68555 - DNA, 419 bp, Zea mays
agcttaaagccatggtaagtagcataggctattaatatacaaattgactcaagcctagctacgggtgcataagtttcatcaaagtccaaaccttcgacttgtgaataacctttggccacaagtcgggctttgtttctagtcaccaaaccatgctcatcttgcttgttgcgaaatacccatttggtacctacaacattttggttaggacgtggaactaaatgccatacctcattcctcgtgaagttgttgagctcctcttgcatagccagcaccctatccgagtctcttagtgcatcctctaccctgtatggctcaatagaggagacaaaagagtaatgttcacaaaaatgagaaactcgagatttagtggttacccccttatgaatgtcaccaaggatggagttgacggggtgatctcg

SEQ ID NO: 68556 - DNA, 409 bp, Zea mays
taacactggaagaagcaagaacggtttcaataagaaccttagcttcgatagaggatgaaggtgattgtcaaataacaaaagacaccacaaaagagactagactgcaagcaatagaacacataaataagtatcatgccgaaacaatcaagtggtgtgatagaaaggtaaaattgaagaatattaagccaggacatttggtgcttcgtagagtggccaaccctgatacagtggggaagcttcagctcaagtgggaaggtccctttttggcagtaatttcgtcaagacctggatcttacagactgaaagacatggacgacaacgacataccaaggtcttagaatgcagatgatcttcgacgatattatgtgtagacaatgtaattctcttatttctttcctatggcaccatt

SEQ ID NO: 68557 - DNA, 453 bp, Zea mays
  unsure (1)..(453): unsure at all n locations
agcttccatctatatcgtctcaggctgtttataaccagctgtaagtcttcgatgaagttatccgaattctccgttttgattaccacatcatctacgtaggcttccacacgcttgccccagtgatcggctaaacatgtttgaatggctctctgataagtcgctccagcgtttttgaggccgaacggcatggagatataacagaaagcaccaaacggagtgataaacgccgttttttcctcgtcttctttcgccaaactaatctgatgatacccggaatagcaatctaagaaagacagcacagaacatccagcggtggagtccaccacctgatctatccttgggagcccgaagggatccttcggacagtgtttgtngagatcagtatagtcgacgcacatgcgccaatccactttattctttnttagtacaagaacacgggtggcctaaccactc

SEQ ID NO: 68558 - DNA, 466 bp, Zea mays
  unsure (1)..(466): unsure at all n locations
tatctatgcaatacttgttgcgtccaggaagatgcgccgctattttcangctctcagaagtgtggnggtgacctccttcccgttaaaggccattctccacaactctaacaccacgggcaacatcgcccagtgggctgcggagcttgccgagttccaactggacttccagcttcgcgacgctatcaagagctatgtcctagccgacttcatcgtggagtggaccccatcttcgagcgctcctaggggtttggatcctgattnggaccccacacctgcggagcctaaggttcttgtcttcatcgagccccactggaccctattcttcgatgggtccccccgccagcaaggtggcagagccggaatggtcctcatcgacccaagcggagatcaagtgaagtacatggtgcaccttgagttcaaggccacgaacaacatggcagaatatgaagcgctgatctttagctta

SEQ ID NO: 68559 - DNA, 358 bp, Zea mays
  unsure (1)..(358): unsure at all n locations
agcttctccaccatgtcgctgctagccaatttgttgcagctacctccatcaatgatcaaacgacatgaacgctccttaatgacacactttgtttgaaacaacgtatgtcgttgattctgctctgccttctccatttgtgcactaagcacacgctgtacaatgaggctctcataatgctctgcatcatctgcaccaatctgttcttcgggtggttccttagtgcctgcatcatcagccccaagcaaagcaaatgtagcttcatccaaatcactagtagaggaatacccaccatcgttnttaccaccaaaacacgctggttaggacaatcacgctgcacgtgtccatagcccttgcatcg

SEQ ID NO: 68560 - DNA, 432 bp, Zea mays
  unsure (1)..(432): unsure at all n locations
cgcacttacgaccaaaccgcacccgcatccatatcacattcaatggctcaacaatagtggtaaggtcaaggtaaccaaggctggacgaattaattttgctatgggttcatatcgtgatgttgttgactgtgatggtgagcctatggatgcttgtaatattctgctaggtagaccatggcaatttgattcagattgtatgcatcatggtagatcaaatcaatattctctcatataccatgataagaaaattattttgcttcccatgtcccctgaggctattgtgcgtgatgaatgtgctaaagctaccaaagctaaaactgagaacaacaagaatattaaagttcgtggtaataacaaagatgggataaaattgaaaggacattgctngctngcaacaaaaactgatgctaatgaattatttgcttcactact

SEQ ID NO: 68561 - DNA, 402 bp, Zea mays
  unsure (1)..(402): unsure at all n locations
agcttatatggagtgtcgcggnggccactacgttctggcttgcccgtggaatcgtgggggtccacttccatcatggattatgcggtggcggacatttgccgtctcaacatgtgtttgtccaacctctcatcgcgatcgctatcgtggtgctcctcgccttctagtcagggggcactagtggctttaggaaggactcggtccagtcgacgacttttggaaagataggttgagccgtggtggagcgaataccactgcgcgtatcattacgccagtgggggttcccttagggcttcttgcgagtagggaacgatcttccggggtgccgaccgtgatgcactcctaagtcgggtcacgacttgcccctctcgatggggatctatgtccatttgctgatctcgacag

SEQ ID NO: 68562 - DNA, 462 bp, Zea mays
  unsure (1)..(462): unsure at all n locations
ccagaaacgaagccttcgcgttccataacttagttggagaacttctatcanaagctgaaatagaagagcttaaagagtatgcccaatcctgtggatacaaacctanggcactcctcttcggaggcgttgatgacgagaaattagagtgtattcgggaccaaacaggggccaaagttatcagtactctgtccaagagtattggattcccgaagctagaaacagacatcagccgctaccgacgacaacatgtcgttggtagtttattttactccaacttcaaggtgaatgacnttgtcccttaacgttattgcttctaataaaaacatgtctgacgaaggttgtgtttgtgtagagtatgttattgagcaaagccttgcaaatgcagcaagatcttgaagataaaaagcatgaaattataatcggaaatttggaaaacaaaataaaggagcaatcagatgcttt

SEQ ID NO: 68563 - DNA, 331 bp, Zea mays
tgctaatcttagttatcaagcatgtatctataccggccttttcttttgcaaaaagaactaaatatagtttgcccgcaatacacccttataagctagtgaaccatcacttcgtcttaagactgacacatctacatctgtgaatggaccggtatatcccatattgcataattgactaaccgatagcaaattatattctatgagactctactaaaaacacattagagatagagtgctcattagaaattgcaattctacctaacccttttaccttgtcttgattcccgtcaccgaatataattgaatcttgggaattctttatcttgacgtagga

SEQ ID NO: 68564 - DNA, 468 bp, Zea mays
  unsure (1)..(468): unsure at all n locations
tgaggagatggcgctcgtcatcgagagcttccgccanattctcaaacaaagaagggggaaagaatacaagtcccgctccaagaagggttgctacaaatgtggtaagcccggtcattttattgctaaatgtcctatgtctagtgacagtgaccgaggcgacgacaagaaggggagaagaaaggagaagaaaaggtactacaagaagaagggcggcgatgcccatgtttgtcgggaatgggattccgacgaaagctctagcgactcctccgacgacgaggacgccgccaacatcgccgtcaccaagggactcctcttcccaaacgtcggccacaagtgcctcatggcaaaggacggcaaaaagaagaaggttaaatctaactcctacactaaatatgaatcttctagtgatgataatgctagtgatgaggagggataattgcgttccctttttgccaaccttaacatagc

SEQ ID NO: 68565 - DNA, 441 bp, Zea mays
catgcaagcttgtgtgagaggatcgagctcctctatcttgtgggaggtgtggatggtagcagcatctgggttgcttgtccacgtcaacgtggggcttgagaaaattctaacctagaaacatgatcccagatataatataggaaccacactgggcctaatatagtatgcgcaaagaacacaaagattagtgccaattcagcattagtttattggcggcggtatgctaaagaaagagcctcttaagcgttgggcatctcttggcttgaacctaattatcaggttgtcggcgtttcgaccccgggggtctctggaccgacgagtaaattgtcgtcgcgtgtcccagcccagatgggtcggcgcgagacggagcacgaaggggggagaagagaggagggaggcaggcaaaaaaggggaaactcgcggccttcgtgttgtcctgcg

SEQ ID NO: 68566 - DNA, 227 bp, Zea mays
  unsure (1)..(227): unsure at all n locations
gtatgttcgcacatgaatggcactaatctcactggacgtcantacattcagtgcgtatatacgctgaatctgagaccaccagcagcaagtcactcctggccctgccgctcacgttcagatatgactagcagccatgaaccatgtgaaccataacacacatctcggcgctttgttgtgtcagaaacgtccatgcatactctgcatattatcttctgatccccgaacaa

SEQ ID NO: 68567 - DNA, 456 bp, Zea mays
  unsure (1)..(456): unsure at all n locations
agcttagtgtctctggctttgattacaagtgctttaagaataagaatgggaaggaagaaagcacgattgcaaaagccaagtgacaagagcgacaaataacacacggatcactctctctctcttaagtcactaatcactaatgatcacttgtctcaattgtggaacttggagagattggaggctctgattgtgtcttggaatggattgctagctcttgtattgaatgttgaaggttggaatgcttggatgaagtgaatggaggtggttggggttgtatttatagcctccaaccacttcctagctgttgctcctttctgccgaccgcggacggtccgcccgcctggtccgcccctgcagatcaacggctaanaatgcaacggtcagcagtaacggctatatcaacggctatattgcatttaatgtgtcgtcagatgtcagataacggcagtcgcggac

SEQ ID NO: 68568 - DNA, 450 bp, Zea mays
  unsure (1)..(450): unsure at all n locations
ggcccgagctngagccgaggaccagccncaccagaatagtctaatcgcgctngccggagttcgcgaacccgccggagcacgtggaccgggtaaccttctgcaccatttctcaatttgttgcgcgcatggcctctacatcaccccgtggagctcctcgtgcactttaattgaaccctaccgccgtggtttggccggagcaggagccgccgacgacctccgccgcctgcgctcgtggttaaggtagcttcgaccacctctgacgccgacccgcacaccaacgtgaccgccgtgacctccccgacaccactgaccaccccgctggagctctactgccgccggtaagccttgccgccgtaatctttgtcgtgagttctgtttaagccagctagggagcgcgggttagatntagactatagtccaggggttntgtgcaaggtcagtgactcatgc

SEQ ID NO: 68569 - DNA, 431 bp, Zea mays
agcttgacaatgaggagatggcgctcgtcatcaatagctttcgccaaattctcaaacacaggagggggaaagactacaagccccgctccaagaaggtttgctacaaatgtggtaagcccggtcattttattgctaaatgtcctatatcaagtgacagcgaccgacgcgacgacaagaaggggagaagaaaggagaagaagaggtactacaagaagaagggcggcgatgcccatgtttgtcgggaatgggattccgacgaaagctcaagcgactcctccgacgacgaggacgccgtcaacatcgtcgtcaccaaaggacttctcttccccaacgtcggccacaagtgcctcatggcaaaggacggcaaaaggaagaaggtaaatcaagatcctccactaaatatgaaacctctagtgatgaaaatgctagtg

SEQ ID NO: 68570 - DNA, 496 bp, Zea mays
  unsure (1)..(496): unsure at all n locations
aacactagaagacgggctctcatgtttgtcaaaagatgaatnggtcgacagcttatcgtacaacagcttataggtgagaaaataaactttttgtgtgcttaaaaattcgtgtgcttaatttttataccacattccttttgcagggccttattcttagcaatgccctcagagcatataaaagcgctgaagatgagggatgtaccatggcgttgaataaccttcgttccaaagcgattgagctaatgaacgaaagtcttgagaaagataaaatattaaactcattgcttaataaaataaaagaagacgaagctacttccaaagcccaagctgaagcccagaagtgcgaaattgaaaatcttcagaaacagctggctgaagcgaaattaaagtgtgcaactaccgaagctgaccgagacgccagcgattactgggaaaatcattgtgagaaaacaactgcagaacttccgtcttaatagaaaaatgtatgaaaaatcat

SEQ ID NO: 68571 - DNA, 467 bp, Zea mays
  unsure (1)..(467): unsure at all n locations
atgcaagctttttagcctcatgtaatttgtaaagtatatttagtgttgtaataaagaagtgacccccacatcacccctgccttgtaccagaaataaggaaataaaagtatgccgcgtttccttttccattacttaccctaggacttttaatctcgggacgagattcttttatggggggaaggatgtaacacccctggtgttactataactaaaacttgagcatggcatcataagcattggcattgcatatgtttgatatacctagagtgcattccctaggcaaaaatttcaaacaagttgtattgttttagtgttttgcaaatagaaccctggatagggaactcaaccctaaatagggactaaagggctaagacctaacccaaattgagaaaacctaaagtctttagggaaatagttataaaatatccacaaanaataaagtgaatcacatttatacccctgggata

SEQ ID NO: 68572 - DNA, 465 bp, Zea mays
  unsure (1)..(465): unsure at all n locations
acacagganacaccaagtcaaacaaagtatgatgaaagtttcattcatagcatggaactgtttattgttgcaacaggatatggacagagaacatttgctagacgggaacaagcagcaaaagggatataaccatctttgctttatttcttgcacacaccaggaaaatacaggaatccagaatatgacaagagattcattcaaaccaaggaactgtttatttgttcttataggatctgaatggataacttttgcatgttacataaagtttattcgtctctcatgcactttgaatagttttccagtatcttgacaagttttcgtagctactgacttaaacaaataaaactctaaagagtttcaattgtaggactcattaacagtaaatgcatacttaatggcttatagacatccacagaaaaaaggacagtgccttgtgaaggtggaaagacatattcttgacatcgc

SEQ ID NO: 68573 - DNA, 248 bp, Zea mays
acgcgatgcactgtgctttaacccattttttttgtgccactaaaatacgccaaggaggaaactactggctcaaccaatgttaattagtcttatctaattattcgggcatatggttgaaatctgggctgcttgggaattaaataatcgaacttggctcccatgcaaactaccttgtattttaaaattccttggcattttgaattaaattgggagccaacttaaaaggcttggctcagtgatgtggtaaa

SEQ ID NO: 68574 - DNA, 369 bp, Zea mays
cgtgctcgggtattgatggccggcggtggcgctcgctttcaatagagaactccggtgatctctggctcgggcggggttttgggtgcacaagtgcatacgactaatgcctttgggggcacatatatgcgatggctatgcgcaagcgtgcggtgcgaggcgaccacgctcggtgcgcgcgctaccgcggcagtccgcgctctgtcggtcaagcaaaccatcgaacatgtgtgatcgctcggtctggtcattttcaaacgctaattggctcacgatcttgtctgaactctgccaaatacctacacatgaattcttcttttgtcgttactctatgcttttcttacagcacttgagtggattggatctcagatt

SEQ ID NO: 68575 - DNA, 449 bp, Zea mays
  unsure (1)..(449): unsure at all n locations
agcttcggtctacggaggcttttgttgttatgaatgaaggtacccgaaaatgccatagagccttccgagttacttgctcttttattggaacgagggatttggtccaagagcatattgccttcagagtatgggcgctcgcggaaaaatgggaaatgccgcaagagaccataaaggaggccgacgaaggtggacttatcacgctgaaatatactttcaagttcggagataaattctttgagccagatgatgattggctaaaaagcattgaaaatgtaagcgatgaactacttggggtttattcaaaggccgaagatactgcattgtcggcagccttcggaggccgaaaaaagaaaagactcaaccgggtatttgatgcaatcgggttcgtctaccctgactatcgntatcccattcgagggcagaaaagaaaaggcacaacttctgtgaaa

SEQ ID NO: 68576 - DNA, 439 bp, Zea mays
  unsure (1)..(439): unsure at all n locations
acatgtgctaaacgtttatgccacatccagcctatgctagtcttaccaattaagcatgcatctataccggcctcctcttttgcanaatcaactaaataaagattgtccgctagtacacccttanaagctaatgaatcatcacttcttctaaagacagacacatctacatttgtgaataaacagttatatcccatattacaaagttgactcacagacaacaagttatatccaagcgactctaagaacacattataaatacagtgctcggatgacatagcaatttttcctaaccctttcaccttgccttggttcccatcaccgaatatgattgaatctttgggatccttgctcttgacgtatgatgagaacatcctcttctccnccgtcatgtggtttgtgcattcgctgtcgataatccagctcgagcccccggatgcat

SEQ ID NO: 68577 - DNA, 382 bp, Zea mays
agcttgaaggactgcttctgtatgagagcttccgaacgtgaagacttgttcggtccacggagtcgctttatccgagcgcgagttacttatcgcagaaggcgatgagtgaggtattcgtatcccggaggcgtaggagtccctcggctcggtcagccttggctgcttacgtgtactccgtcgtttccaggatccgctttccgaagtagtcaagaagcacgaaagtaatcctgctaaaaagagatcctttttcgaggaaaaattcgacgcagagggggtctccccccttttagcccccgagggagggtcgggctttgccgaagctatgccgacccttccttgacgactaaactttgcgtaggtgcgaggtatatgaacgacttgg

SEQ ID NO: 68578 - DNA, 483 bp, Zea mays
  unsure (1)..(483): unsure at all n locations
ctcagcttctaagggagaacacattntaggactaaccaatgttcattntgataaagacttgatttgtagcgcatgccaagccgggaagcaagttggcactcatcatccacacaagaacatcatgactagtgacaggccactggagctcctacacatggacctattcggcccgatcgcttacataagcatcggcgggagtaagtactgtctagttattgtggatgattattctcgcttcacttgggtgttctttttgcaggaaaaatctcatacccaagacaccttatagggactcttgagacgggctcaaaatgagttcggcttaagaatcaagaaaattagaagcgacaacgggacggagttcaagaactcacaaatagaagggcttcttgaggagganggcatcaagcatgagttctcctctccctacactccacaacaaaatggtgtagtggagaggaagaatcgaactctattggacat

SEQ ID NO: 68579 - DNA, 463 bp, Zea mays
  unsure (1)..(463): unsure at all n locations
agctntcctgctcatttcttcggcgctgtatcaaccttcgtattctttgagcttctcctaccgtggtaccgattcgggtccaaagatacctgttcacacattatactccagaaacactgttaaatcctgtttttgaggaccttcggagctgaaggcccccaacatcggggtagcttttgtgtcggcctgcctttaattctcttcgcaaacacacacttgtctttttgtttaagcaagcgtgtatggtggtgcgtgcctgatgactaacgatatatgacggaacttctacaggcaggtgtggcacgtgctctccaatgatgagaccatgcaaatcgtgacatatatcgaagtctgcatgatactgatggttgcaatgtagtagtgaaacagctaaattaaaataacaaaatttatgtatggctaggatcacaaatggattatgaaacattttctgataatataa

SEQ ID NO: 68580 - DNA, 502 bp, Zea mays
  unsure (1)..(502): unsure at all n locations
tcagcttctanagggagaacacgtgataggtctaaccaatgtacatttcgtataagatagaccttgtgcagcttgtcaagcaggtaaataggtgggaggagctcatcacagcaagaatgtgatgaccacttcaagacctctggagctgatgcatatggacctcttcggacccgtcgcctatctaagcataggaggaagtaagtatggtctagttattgttgatgacttttcccgcttcacttgggtgttctttntgcaggataagtctgaaacccaagggaccctcaagcgctttctcaggagagctcanaatgagtttgagctcaaggtgaagaagataaggagcgacaatgggtccaaattcaagaatcttcaagtggaggaaattcttgaggaggaggggatcaagcacgagttctccgctccctacacacctcagcanaacggtgtggtagagaggaagaacaggacgctcatagatatagcgaggactatgcttgga

SEQ ID NO: 68581 - DNA, 416 bp, Zea mays
tcttgattgtcaaactgcttgccgttgtcaactgttatctctgacggtactcccaagcggcaaacaatgttctgccaaaagaatttctgggcagtctttgatgtgattgtggacacggccctcgcttcaatccacttggtgaagtattcgacggctacgaaggcgaacttaaggttcccctgagcggtgggcaggggcccgacaatgtccaggctccagcgctgaagaggccatgtatgggcgatcagctttgtatattgggaggggttgcctgactgaggagagaacttctggcaggcttcgcaggaccttgtgactcgatttgcggcgcagatcattgcaggccagtaaaacccttgtcggatcaccttagcagccagtgcccttggccccgcgtgcgagccgcacgtgccact

SEQ ID NO: 68582 - DNA, 326 bp, Zea mays
  unsure (1)..(326): unsure at all n locations
ctaacgacatcacaacctaacatctcctggagagcgactttgtttgggtctagattggtggcgtggaatgaattgctttcacgcatcgccaacattcacctaactcaggataatgatgccttctgctggaccttgtcccaatcaggacaattctcagtacaatcgtcctatcaagcattgattatgcgtgagataccatatgttaatataacgattgtggaaactacaagccgcactaagatcaanattttttttggtatctcagaggggagtgatactaaccaaggataatntatcaaggcgcaactggctggaaacaaaacatg

SEQ ID NO: 68583 - DNA, 459 bp, Zea mays
  unsure (1)..(459): unsure at all n locations
agcttcatgagtggtagcttctgcatcatgtataagcagnttttgccgaagctgttttttcctgcaggaccttcggcgacgaagcatggtcccaacagcccatttaccaaccaagtccccaccgagcaagtctgcgaggtggggggaacgaccaagtctccgcggagcaagtctacggtgcagggcgaacgaccaagtccccaccgagcaagtctgtgtggtggcacgaatgaccaaaccaccaccgagcaagtctgtgaggaggggcgaacaactaaatcctcgtcgaggaagtcagcgacgcggtgcgaatgaccaaacccccatcgagcggacccacaaggagggaacccatgccgacacagctggcccacgactcccaagacaagatgcaacatcttcaaacaacgtctaaatcgtacatacaataccagaaggtctctgacagacatgatggaa

SEQ ID NO: 68584 - DNA, 420 bp, Zea mays
  unsure (1)..(420): unsure at all n locations
tgatagcactcctctcttttatttggtgctcatccctttnnttttggtntaagtcttggatataaatcttgaataccaaatgcttagntatcattatgtgtttagttttgagagatatattctataaaggaatgaaatcgttattggaattcatttcctaaaataaaattttaggtgctacaaatcctaccccccttaacagaaatctcgcacccgagatttgtaggaaaaagggcgtataaccatattgtctcaacacacatgcacaaacaaaaacctcagcatgatgcatactttattagtaacacttgggtcagttagaccttattattccttctaaaatagtatcataccaactagtaactaaagtaacatttaggtctttacaattagtagtagatatatatatttactgttatg

SEQ ID NO: 68585 - DNA, 444 bp, Zea mays
  unsure (1)..(444): unsure at all n locations
agcttgtatgggttgtgatgtcgccacttacttgatgctaacaagacacttcgcccataaaaagatcaattctctcttntaattgcctgtctgcaagacaagtgataattgcaataagtaacatgagcagtcgctgatggcgatgacaatatataagttcttgtttacaacgaacaatttaaaattaagcaacaataataatatattctctagcaaataaatataaataaggatgttgagagacacgttaacaaaataagatgaatatatcctttgtggcctacctctgtgagtcattgaagtaggcagggaccgtgacaacagcattcttgatcgtgctgccaaggtagaggagatctcttcggctggttcattggcaaagtatcatggctagttcatcctccaattttgtagaacatgatggctggttcattggcaaagcat

SEQ ID NO: 68586 - DNA, 489 bp, Zea mays
  unsure (1)..(489): unsure at all n locations
tatcgtagtttattgctntntggtgctcaagttgtagaatgttattcccggacctcacaagtccttatgcattgatgcatatgtttagggataggatatgctacaacttgactctttgagactaatgtgttttcttgagatgtgttgatgtagtctcaaaggagaattgaaagggaaaaggtggatttggacaaaggaaaaggcttccactacatagcagtatcaatgtactttgttccaaattatcttggtttttcattgcctttgatctttattngctatntttggtgcggcaatganggttaagaccactaatntcttcgttttggtgcttaatgccaaaaggggggagtaaaggccaaagcaactagatcaaccaccacttagaattntaaannagttttgagttctaacttggtctttntatcnaaaccctatngatagcanataggtgccctcttattacanaaatagctctcttatgtgggg

SEQ ID NO: 68587 - DNA, 434 bp, Zea mays
  unsure (1)..(434): unsure at all n locations
ttttgaagcatgatcgcttttccttggtcttagccttgcttggctgtccctttcgaccttttagcgccgtcttgaatnctttaatgatgagggccatctcttcatcattaagaccggcagcctcaatttgtgccaccttgctgggtagcgcctccttgctccttgttgccttgagagcgatgggttgaggctcgttgatcggaccattcaaggcatcgtcgacgtatcttgcctccttgatcatcatccgcccgcttacgaattttccgagtacctcctcgggcgtcatcttcgtgtacctgggattctcacgaatattgttcacgagatgaggatcaagaatggtaaatgaccttagcattaggcggacgacgtcgtgatccgtccatcgcgtgctctcgtagctccttaatttgttgataaggatcttgagc

SEQ ID NO: 68588 - DNA, 495 bp, Zea mays
  unsure (1)..(495): unsure at all n locations
tctctacgcgcagcttcngaaccggttcaaccttctcccagactatgcttttcatatcgggtacagcttcattccgaggccgaaggtccctgtgaatgtattatacatggaaaacatgttagttgtgtttntgaggaccttcggaagccgaaggcccccaacagtagcccctcgcagtattaatttgttatagcaataaattcagactacgacgtgaacgaaggccttaagccgaaggtccgaaagaacactttcccttcgctagaatagcgaaagtcaatgacaaacgggacccaccaagttgcaaagcgctaggcgtataaataggaacacacaacgacatcatttgatgcgacatttctgctgtttgcgttattnntctcaatttntaacccttgcttatcagctcttgcttggttttgagcttcggtttatagacgtgtttgcttcaaatctaaggagaagaagatgagtgaggacgagaagatgactgaa

SEQ ID NO: 68589 - DNA, 467 bp, Zea mays
  unsure (1)..(467): unsure at all n locations
agcttaatacccctaaaagattgtctaattttgttaagggcaaggctcccatgcctcagtataatgagagctatattttatatcctgctggttatcctgaggataagattaggagaatacatgctaggaagacttattctgtttctcatcatgcttttatttataagaatgaggcttctagctctaggtgttctacacatgttaaaatgcctaaaaagaaatctcctattgcatcgaatgaacctaacatttcatttaagacttttgatgcatcatatgtgcttactaacaaatcaggcaaagtagttgccaaatatgttgggggcaaacacaagggctccaagacttgtgtttgggtacccaaggtgcttgtttctaatgtcaaaggacccaagaccgtttgggtacctaagaacaaggcctaaatttgttttgtaggtttatgcatctggnnggctcaagtggat

SEQ ID NO: 68590 - DNA, 445 bp, Zea mays
  unsure (1)..(445): unsure at all n locations
gcttggaggagctgagccatggacgtacttctgaagcaatcagagggagacgtacgtgactcgcatcgcgggtcacatggttgattggagtttggagctaaggaggcgagcaagcggcggcagggcaacctgtccttgtgaaggttcctcttgtcgttgcaggcgaccaggctggaacgaacaagaccatgcatggattcatccatccatggcgagagcgagcgaactatatacgatccatcctangctcctaggctaggccggtggttggcgcatcttcaaggagacaccattgatccacttgttttctgaccctcttttatgcagggttgttcgtttcattattaatccatatatgtggattgaatgttattgagtanggttaaatccatcgcagttaaaatccatggcaatccattctattacgtagcgtttgctacaaccc

SEQ ID NO: 68591 - DNA, 266 bp, Zea mays
acactatcatactaagcttctaagggagaacacgtgataggtctaactaatgttacattcgataaagatagaccttgtgcagcttgtcaagcacggaaacaggtgggaagctctcatcatgccaaaaatgtgatgacaacatcaagacccctggagttacttcatatggacctcttcggacccgtcgcctatctaagcatatgaggaagtaagtatgggcttgttatagttgatgattttctccgcttcacttgggtattcttttt

SEQ ID NO: 68592 - DNA, 464 bp, Zea mays
  unsure (1)..(464): unsure at all n locations
cagctggtcaacctatacaagtaataatagatattatatataattatagacactccgaactcgtttcttaacctcttaataatacacatatatcaatttatattacctcgtaactgtcacaactaataattattctattttacactcgataacactacttacattcatctatataactacacatattcatttatcacaaataactttatattacctcgtaatgtcacaacatgattatttattttacatcgataaactattaatctattatattgttaattcattatataatacaatattatttatcaaattaatttatattactcgtaatgtcaccgaatgattatttattntacatcgataaactattaatctattatataatagaatattatttattaaatggcacctcgtgagtttgtttgtttggctcgtgagctaataacgagcccagcctccttttt

SEQ ID NO: 68593 - DNA, 257 bp, Zea mays
  unsure (1)..(257): unsure at all n locations
taagctntgtgggctcacanaatatctaaacacaatgccactaaagtatcttcttttgatcttgtctatgggcaggaagcactgctgcctgtggaaataagcttaaatgctgttaggctcgccaagcaaaatgatctaactgtcagtgactattataattcaatgatggacaatattgatgaacgaaccgcacagagggtgacaaccttatgagacatataaaacgcgaaatcatggtagccaaggcctcctataag

SEQ ID NO: 68594 - DNA, 419 bp, Zea mays
agcttctctgcctcgctgttgcagacgatgtcttcttctaacacagttggatcaatggatcaggcgacgagatcgctcgttcgctgcaacgctacccagttgccgatcaagcggacgacgacagaagccggcgtcgttgtgtgccgtaacctgacggccgatcgcagaagcgcagatcgcaacaggaaaaatcagaacaggcgaacagccatgcagatcgcagaatggcggctgggaaaacctgttaacataacgacagatgggaacacctattaatagacggatactttctttatatacaagaacaagtgtgtagtctggtggtagcaacgatataaagaaagtcgtaggtccctggttcgaagctccgcgggtgcaactttttttttgccaaataactaactgccgcttccagtact

SEQ ID NO: 68595 - DNA, 486 bp, Zea mays
  unsure (1)..(486): unsure at all n locations
ctcaagcttctanaggggagaacacatttgngactaacaaatgttcattttgagaaagatatggtttgtagcgcatgtcaagcatggaagcaagttggtgttcatcatccacactagaacatcatgacgaccgacaggccacttgagctactccacatggatctatttggcccgatcgcttacataagcatcggcgggagtaagtattgtcttgtaattgtggatgattattcttgcttcacttgggtgttctttntgcaggataaatctcaaacccaagagaccttaaagggattcttgagacgagctcaanatgagttcagcttaaggataaataagattagaagcgacaatggaacggagttcaagaactctcaaatagaaggctttcttgaggacgagagcatcaagcatgagttctcttctccctacactccacaacaaaatggtgtagtggagaggaagaatagaactctacttgacatg

SEQ ID NO: 68596 - DNA, 396 bp, Zea mays
acatgttggtcaccagttttctattgtttcagacgaagccagtcaccgctcacgccttgtttcagtgcactcaagaccatgaggagtaccttcaagcgtatgtcccaaggttcttgcgtctgagaacacaagcgcctacagtgcctaatgaaattgtcattgaggccatgatcaagggtcttcggccagggcccacggctcaatacttcgccaggaaacccccccaaactctggagaagctgcttcagaaaatggatgagtacatccgggctgacaatgacttccaccaaagaaaggaagaagcttatagattttttgagatgactaaggggcttcggaggaagaatccaccctacgcatgtcagatcaatccatagctccagtcagaacaatgac

SEQ ID NO: 68597 - DNA, 445 bp, Zea mays
  unsure (1)..(445): unsure at all n locations
ttgcctcggcagactaataccaganaggccaacacgcaatgggagtggagagatggcgagagtagcgtgtaccctccatggcaagaggttggacggtggtgtatccgtgctctcggttggtgtgaacccggtctggtcttaagaacctcggtggcgagttgacatatgcaagggttaagtgctacatatgtcgtgtgattggagatccccagctgggtattaatcgattcagatcgtcgntacttctcggacatgacttctcggacatgaagacttggtcactgccctacacatagcattctagtgaacgagaagggttgataaaaggatggatagtatatgccaagtgcttgaactatggtagaaaaaactctagtgacaggtaatgacttaacttgctaataaaactgaattttaaagatccactattagtaagcatttttgc

SEQ ID NO: 68598 - DNA, 386 bp, Zea mays
tggtcttggccttgcttggctgttcctttctacttcttagcgcccgcttgaatcttttaatgatgagggccatctcttcatcattaagaccggcagcctcaatttgtgccaccttgctgggtaacgactccatgctccttgctgcctttagagcaatgggttgaggctcgtggagtggaccgttcaacgcgtcgtcgacgtatcttgcctccttgatcattatccgcccgctcacgaattttccaagtaccttctcgggcgccatcttcgtgtacctgggattctacgaatattgttcacgagattaggatcaagaacggtgtatgatctgatcatgttgcggacgacattctgactcatccaacacgtgcttccgtatttcttat

SEQ ID NO: 68599 - DNA, 137 bp, Zea mays
tgataagcccaaataatacatatacataccgatgtaaacaattatactattatggaatgatgacccagatacggcaccataggtacatgtcggttggaatacttaatctaggctgcacctaccaaaatggcaaggga

SEQ ID NO: 68600 - DNA, 460 bp, Zea mays
  unsure (1)..(460): unsure at all n locations
agcttgggatttatctaatttataacaagcatcatctcttaacatagattntttatggataaactcaacacaagagatgtcattagtagcacaagcactagtttcttatttagcaaccctttatatgtggaaggcaagcgaattgctaaaatagagaaacctcataatatggactaaatttcccttgagccctcatgcacactatatttgaatgacatggataatatgcatggttgttcaatgaagtctaaagggctgacttaatccatattatggtgagtgctgatatagaagaatcaaatccaaattaactagatagaggagacgtcacataattntggattcttgaccatatgataatattcattcatcttccaattggacctttatttcataataaacaactgatgtatatcctcaagtgcttctttttccttagtggctacacaagtcacaaaag

SEQ ID NO: 68601 - DNA, 397 bp, Zea mays
  unsure (1)..(397): unsure at all n locations
cgaagttgactcgccgaagcaacaganactacagggtggttgcctacatattctgggatgtaaggcgaatgatacgaaacagtatgcatgacctgcttcggctgagcttgttgtgctgcggcttcagctatttccttttgcttctggatggtaacatggcacatcctggtggtatggcctttgttctcaccgcaaaacaagcaaaagattcttcttggttgatctccgaatcttccgccgaagcccctggcgcctctgcctcttggagctggtggtcggaaggagccttgctgttgccccgaagcctgtgatgaacactgtggcctttgctgttggctccctcgatcatcattttgggtagagttatgaatcgatctaacatgcctcggatagaacc

SEQ ID NO: 68602 - DNA, 64 bp, Zea mays
ttactggaggcgaattctattaagccaaaagctatggaaaaagggtgtacataatcaccggttt

SEQ ID NO: 68603 - DNA, 460 bp, Zea mays
  unsure (1)..(460): unsure at all n locations
agcttgtacacgtggttaggtcttttggtgtcctcaaaactgggaggttgttcaacatacactagttcagtaatcttaccatttagaaaggcactctttacatccatttgatagagcttgatactatgagcacaagcataagcaagaaggatccggattgcttccaatcttgccacaagagcaaatgtctcaccaaactccaatccctctatttgagtatacccttgtgccactaatcttgccttgtttcttactactattccatcttcattgtgcttgttgcaaaacacccatttggtaccaataacattgtggttctttggtctcttaacaagctcccaaacttcatttcggatgaagttatttaattcctcatgcattgcattcacccaatcaacatcaagtagagcttcatctacacagntaggttccatacaagatacacaagagaaatgttcac

SEQ ID NO: 68604 - DNA, 501 bp, Zea mays
  unsure (1)..(501): unsure at all n locations
actaagcttgccggcgagcacggtaacattattatatactctgctattgcctgtctccgcctaacaccctagatatgcttgcagcacacgggcaccctgctcatcctctggatcacttggatgagctgttactaaatggtctttgacgttgttgaccaaacctncaacaccaccaccctcccccataatcaagattattgttaagtaccgatcggtacgagcagtaaaattntgagttgtctaagagcatcttcaagagattcttcattgtttgctctctatgtgactatctatgtaacgtttcatcaagattacactctatatatagcatctcagtccaacagactatctatctagtttggctagtcaggtggctagccaaatttaactactgagagaaccaacttatagagtcagatagcttgcgagtaagatagctaatctggtggagattaaattactatcgagtagctaaaattaacttgacgagttattagctag

SEQ ID NO: 68605 - DNA, 417 bp, Zea mays
atgcaagcttggacaagaagaataatcatctagactttaatgaggaggtcgtcacagcactccatgataagctgaaagcttataatgcagtgctggagaaacagcgggacaagcaagctgcggctgaggcgaagctgcagcaggaactcaccgacaaggccagtgatattgctcgcattgagggaaacctcaaggcgagggaagcttccctggcgaaatgaacaactgacctcacttggcaggaggaggacctcgccttcaaggaggagatgtgggtaaggcagaacaagctgttggatgagcttgagctcgaggcagcggagaaagtgaagcgtctggaagggaaagtgcggacgctggaggaacaggtccgccagttccaggcagcgcaggcgacgcagtcggccctgggcccct

SEQ ID NO: 68606 - DNA, 453 bp, Zea mays
  unsure (1)..(453): unsure at all n locations
tgtgaagattcttcattccaacatgggctagtcggcgatgccttatccaacccatgttagtcttagcaattaagcatgtgtcgagttcagctctatcaaaatctactaagtatagctgaccctctaacacacccttaaatgctattgaatcatcacttcttctaaagacagtgacacctatatcagtgaaaagacagttgtaacccattttgcataattgagatacagaaagcaaattgtaatctaatgaatctacaagaaaaacattggaaatagaatggtcaggggatatagcaattntacccaaacctttgaccaaaccttgatttccatccccgaatgtgatcgctctttggggatcttggtttntctcatatgaagagaacatctntcttctccctgtcatgtggtttgtgcacccgctgtcgaatattcaacttgagcccccggatg

SEQ ID NO: 68607 - DNA, 429 bp, Zea mays
agcttcggcctactatctgcagttcacccaaggttcgaaggatgagataaatcttctgtggctcaaaattatctgctggaaatgaaacatgagcaggcatagagaaaaaaaacacaatataaaagatgtacattgctggaattcaatataactgtttgggtcaaatctttatatcagagaggggatcagcatgtgatgatagcactccttagtactaaatagttataccaacaccttgacgaaatttgataccattgcgtatataagcataaaagtagcatagattggattgttacctcttttttctagaccagatttctacaagtgaacacaccgcataaaaatggaagtagcccaagttgcataaattagctgaaagcagctgaaaagcatcatgtagcatgtgcaagctgcaagcttacaaagaca

SEQ ID NO: 68608 - DNA, 419 bp, Zea mays
  unsure (1)..(419): unsure at all n locations
tcgtcgccgtctcaagatctacactgttggcggcgctgcgctcttcgccacngctgaagaagaggcgaaggcggtggcggatcccccggggcggcgcgtgctcgagcgtgtggggcacgggcgtgctctagtgtgtgggccggggaattgcgctggattgcgtgatgcggggcatggtgcagccgcgggcgggacgcgcgggcggcagaacaccgcggggtgtgcacgcctacattatgtttataactagtagtagagataagaaaatgtttcataatccatatgtgatcctgaccatacataaattntgttattttaatttagttgtttcactactacattgtaaccattagtatcatgcagacttcgatatatgccatgatttgcatggctcatcattggagagcacgtgcaaatct

SEQ ID NO: 68609 - DNA, 434 bp, Zea mays
  unsure (1)..(434): unsure at all n locations
agcttggcgaacttccctgacctatcaaatgtacaattnttcacttcataataataccggtggctacatatttttacattttctcatcatgcacaatagcatctttccctgtaaatgctatgaaaatttacagtaaattgtagtgtaccatattatttgagtttgcatggcgcactgaacttggttgtgttgcagattgtaactgggttgtgctgcagattgtgttgagagtgtgacaaagaatttcagtgttcatgttaattcagtgtctattatttgtacttcaaatttcttgtcagtttaaatgtttaatgcagtgttgggtgattgttacttgtagctgatagttttgggtgaccaccacttcagtttgtgtcatattttggtgaccgtcagttntgggtgattgccactgcagttgtgtcatgttttgg

SEQ ID NO: 68610 - DNA, 463 bp, Zea mays
  unsure (1)..(463): unsure at all n locations
tcccctgcacgccgaggatacacagatctcggatgtatggcacaagaagattgctccagcagcaaacatttgtaatgccaagtgctatattctttatgtccctgggcccacatgtcggggcccagtacctttgtgcatgccccccttcggctataaaaggggaggcatgcaacgttacaagacagacccaatcttatgctcactcagacactcacaagttcatacaagctcccaagcaatacatcacacagtggagtatggtgttacgctccggtgggccgaaccactctaaatccttgtgtgttcttgtgttcttcatgttttcccgactaacaagcaaaacgtctaggcccctcctcatcttatgatttatggcgagtgcactccgccacccggccggagatttcctctcttgacagttngtgtgaatctttatgcacctgtagaacatataataatccta

SEQ ID NO: 68611 - DNA, 465 bp, Zea mays
  unsure (1)..(465): unsure at all n locations
agctngtaagtatgatcattggtggtaagagtatctaagtatcattcctaaatattagagtatataataatcaattatctatttctgtgattcagacgaataggtgacattgtaactgggagttcttcgctggcattcatcagtaacatgacatctttgaacttattgtattcccaattaatcattcactttatgaatcaaactgcgccttcatttgctccattgtaaccaagttgttatatacttaaattggtgacattattcattgcagaattttaaggaattgcaggatatctggtactttggcattagtgaacttttcaaaatttacaggattaacattattgtaaggcatttcgtttcttccaattttttggttaaatctgctctgtgcagatgcttcctatggatatgcatcgcgagatgtttcctttcacacatattatcgtctcttacttactgatg

SEQ ID NO: 68612 - DNA, 287 bp, Zea mays
agagcttccgagcgtgatgactctttctgtccacggagtcgctttatccgagcgcaagttacttatcgcagaaggtgatgagtgaggtatccgtatcccggaggcgtaggagtccctcggctcggtcagccttggctgcttacgtgtacctcgtcgtttccaggatccgctttccgaagtagtcaagaagcacgaaagaaatcctgctaaaaagagatcctttctcgaggaataaattcgacgcagagggggtctccccccttttagcccccgagggagggtcgggc

SEQ ID NO: 68613 - DNA, 461 bp, Zea mays
gcttaagagctacaacaattggactagaatccatcggagaggggagggtgggactcaccggagcagaagaagggcgcggcagtgctggctcaattgagcttggggaagggaggagggagtggccgacgccggtgtggagaaagagggagctcgggcggtccttttatgggcgcccggcgcggggaaggggcgagaggtggcgagcaccatcgagcttgccacgacggtgatggtggtgcacagtggtgacgacaggacggcttgggcaggggggtgacgggatggctctgctagcgcacggggacagaggcgcaaggtgccaactgggcatgcgagcgagtaatggcgagacgacggggcggtggcgaccggtggcgatcgcgtcgctagcccggtcacgggcgtgaggaatgcgctgacaagcacgacccgcttgcacagagagagatcatgagagagcg

SEQ ID NO: 68614 - DNA, 507 bp, Zea mays
ctaagcttctgatggatctaatactccctgctacgacattgaaagatatatctataagtttgtgagccaaaccttcagcatgttctataaggttagggtagagcacacacttaataacttaagctgtatttgtagaagtttgtataaggcagtctcagctctggaaaggcatttcgttgtttgacgaaagtgtatcagatagtaggaaataattaagttaatgtgcaatctcctatcagttgttacatccaccatggccctgctttaagcttgtatacaaaatgatgacatgtcatattcaaatatttttagcgccatatgtgtagtgcagaatacatcaatgatgattcacaacaagatctgattgctttcaccatttatttgacaatcgggttccttcgaacaatattagcactctcagtttcacaaatgtacatttctaaatgacatagattcacatacctttcatccacagatgaaggtgactgagatacagatcttaataca

SEQ ID NO: 68615 - DNA, 449 bp, Zea mays
  unsure (1)..(449): unsure at all n locations
agctttaataactagtgagagagacttgtgtgtgttctttctagctcttgcactcggattgacttccttttttattcttgtctgagatcaaactcacttgtaattgaggcaagagacaccaatcttgtggtggtccttgtaggaactntgtgttccaagtgattgagaagagaaagctcactcggtccgagggaccatttgagagagggaaagggttgaaagagacccggtctttgtgaccacctcaacggggagtangtttgcgagaaccgaacctcggtaaaacaaatccgcgcgtcacacctcnttattgcttgtgatttgctttgcaccctctctcgtggactcgattatattcctaacgctaacccgacttgtagttgtgattattcttgagaatttcagtttcgccctattcacccctctctatgcgactttcaattggtatc

SEQ ID NO: 68616 - DNA, 440 bp, Zea mays
  unsure (1)..(440): unsure at all n locations
cactatacantactaagcttgccttcgcttcagtctatcatccgcagtccaacggagtcgtgttacgcgcctactgtgaaatcttcacagctgtcaagataatgctccttgatgaaaagaaaggcaaatggaccgatttgctacctgaagcagtatgggcactaaacacgactgagtgcatggcgaccgggtttactcccttccgccttctataccgatcggaggccatgaccccgcaagaaatgaagcatgggtccccgcgaacagtcccgtcagcctgtcccgacatggacgagccaacttcaaaggatctcattgacggagaccgagtcttcgccctacaggccctgagaaagtaccaagcccagaccaaagcatggcgcgaccactcagtcattccgagggagttcagcgagggggacctcgtactcattcggaca

SEQ ID NO: 68617 - DNA, 466 bp, Zea mays
  unsure (1)..(466): unsure at all n locations
agcttagtttcgaaggaggtgacttattgttcttgctaattatgaatcgaaagtttgtattgtctacatcgatacttattgtgtgcatggatcttgcaggttaaaaaacagcaccatgtctttcttcacattgttgacatcgtctagaaagtcaacccctacttcatgtagagacctaactgcactggtcaacttgggctcagcgcactctagaaggttgtggctgccattcgttttcttgtgtatggtgttcctatagatttcatggatttcctagcatgctcgacatcatcgactgcatgcactaggagtggtttaactaccctgccgcttggaagggtattgtcactagttgggcaagcaccctcccatgatcctcgaggcaatggcctcgtacaatatatggatttggcatgcatactntangatgcncaagagaaacaatgatatcaatgtgtnggatcaa

SEQ ID NO: 68618 - DNA, 484 bp, Zea mays
cacttcaaactcagcttaaactagggaggcaaccaaatatttgtaagcaagaaactattttagcatgttaaacagatggcaagagagcgtgccaaataaattgtggcgagccctatttatacacccattatgtcggggactggagggtcccacttgtcgatgactgttgctattctagcaaagggaaggtgttttttcggaccttcggctcatagccttcgtccatttcacaatctgaatttatcattctgacaaattaatattgcgaggggctactgttgggggccttcggcttccgaaggtcctcaaaaaacatgatttaataatcgttctggagtaaagcacattaacaggtatcttcggactcggatcagagccacggtatgaagaagcacaaagaacacgaatgttggcgcagagccgaagctgtgtgtagaagagcttcgaagtaacggcggaaagggaaaccgacttaaagatgaaa

SEQ ID NO: 68619 - DNA, 442 bp, Zea mays
agcttgcttctgccgcgttttacatctgtttggcggccctagcgtgcatatcttggcaaagatcctatgtatggtctcttcactgtgccaaaatctatctcttctgtgcaagttccaagcacaaatatggtcagggtcataagatcttggggtgtcaagttggctctgtcagccgtgtcacccctgagacaaatcccataccaaatcatgtcaaacgattttggtttgatttcaaacttcaccagggtgtttctagggtatcttggagccactttgtccattgagccatgtggtcttgggttctagaactacgtgaacacagttgatctttgcaaggggctaaaaatgaacttagagataagctaatttttcttttgagtctccacttgagctacctttctgggacttttgtaaaacctctctgcggtaactttctgattat

SEQ ID NO: 68620 - DNA, 465 bp, Zea mays
  unsure (1)..(465): unsure at all n locations
actaagcttacacattctgagcccctagcatctgtttgttcacttattgttgatgggcgttatgaagctagtcttcgactcatcctncttcattcagatctgatggtatcctgagtagcaattcaccaaactcataagctccaaagtgccagctgcatccactagagagaaacaattcttaggagtgggaatgcattcttcgcgcatgctttattgaggtctataaaatcaatacacatcctccattaaccattggacttattgaccataactgtgttagctagccacttcngatatgcaacttccattataacttctgcactaagcaagcatttgacttctgcactaaacttctactttattggtctagtacttgngtcgacatttatagcatgctctattatgcttctatcgactccgcataagtcgtttgctgaccaagaaaagacatccttgatgtggaac

SEQ ID NO: 68621 - DNA, 458 bp, Zea mays
agcttatcgatggcttgttgaagaagtgtcttggcttacggtggaagcatgtcaacctcgaaacatatttttataccaataaaatactatgcgacgttttatcgataacaattacacacaatatcacatcaaatgttaattaatatttacaattcgaaattattaatcaagcattctttcggagattattatttgcaaattaatgaaatacactatttttgcatcctttgtattgcgtgaaatgggaagaaaacaaagaaaataggaaaagaaatggaaaaaagaaatccgctaacactgtagctttagtggaccgaatttatgggacgttgctggagactggaaagatatagaggacagaatcttttagagtgttgtaaaggacacagaatattcctttatgagatgtaatttagaggacgctgctagagacagcctaatattataagtagaaattg

SEQ ID NO: 68622 - DNA, 493 bp, Zea mays
  unsure (1)..(493): unsure at all n locations
acttcaaactcaagcttgtcatatggccaacgacgccttcggcaggagagtcgccaatcttcttggttatgtctttcatgtgtggctnttagttcttttaaagactcctatgagtgttggtatgtttctaatctgttaggttagttcttaatcatttcatatatgccttccttctcgcataatgacgcaagatgtctatattggcttctgctgatcatgcctatatatgcatctgtgatgtgaattgagattcattgagcaacacatgccttctatgttggagatgggggtgtaaatagtgataaaatttatggcacgtgttttttaaatacatacatatgtacatataaattntgttcnctcanaacgtactaacccttctccgtgttttgcagnatctgaccgagaacaattatttcgtgatgattggggtaattgggctgccccgtgtatgcaagtcaaccatcatgaacgagctttattaatatgatgc

SEQ ID NO: 68623 - DNA, 456 bp, Zea mays
  unsure (1)..(456): unsure at all n locations
agcttctccgccagtctgagtagttcgaactatataaacaagatctcaatgcaaaacttgaagccgaagctcagcaaaattcggatttgagaaaactactaacaaatcttcaagaaaaatgcctggaatttagcaacaagtgcattcaacgactaagaaagattttttactcggttggagctagcagcgaaaaatttaccccctcagctgaagatctaccaaaaaccttcgaacacattgagggggagattgacgagctcgacgaagtcatagctgggcatggtgacttctgtgcctgggtggcttctcgagggactgctgcagccttcatgaaggctggctgtgatcatgggaaaattgtcaataggccaaattttactttgtcaccatcaatcctggatgacatccctgatctcgcccgaagcatctcgaatcgatntgtaaaaatgatatgga

SEQ ID NO: 68624 - DNA, 402 bp, Zea mays
cgagcaagtctcacggcttcaccaggaagctaactgaaggcttgtatcgaacggaggaggacaggagaggggctggccacggttggtgctctcgggcggcactggcgggtcgcggggaggtcgccggagctaatggctggctcgggcaagtcatgcgaggtacggaggatgcaacacggaaggcagccaagcactgtggcgggctttatatccgtggcgcgggcgtggtcacgggcggccgcgggcgcgcggaggttctcgcacaagcgtgctctgagcgcgctcccggatgtcatctcgcgtctaacacgtggaagcttgcttctgccatggttcaacggccgattagagcgccatagcgtgcgtatcttggcagggcactgtgacggtcgcttctctgct

SEQ ID NO: 68625 - DNA, 473 bp, Zea mays
ggatccttaagtcacctgcggcatgcaagcttcaaggtatgacggttgtgtgccatttcctagatcttctgcggctccaccgggttcggttgtaacgaaccgaactaaaagacggtactagcgaggtgggttcagtcgtcagtcaaacacgcgtgcggggtgggcatagccgaagcggccccacatggtagcgttagtccggaagagcgcaggcgggtccatgcgggtggaaaccaggaagtgggccagcggatgtatatgtggcccattaggccaaagcagaggggtgaggttgggccgagcggtgtggaaatacagccatgggaagctctactattttcctttctctttattttttctctttgtcttttgaacctcaaatttgaatttgaatcttgttatgagcttcacctttgagttaattatacaaatctaaacccaagtgtaggaatcatatactcttatttacttat

SEQ ID NO: 68626 - DNA, 477 bp, Zea mays
  unsure (1)..(477): unsure at all n locations
tgcatgtanagggtgctgggcgtgcggcaagaggctgcaatcgtttcttgttccttgcatgtacgngggaagcagagcgcagcaccaggcggcccgtcggccaaagcagcccatggcggcccggctggatgcttccgctgggaacagcgcaatctcggcccgcgatgggaggccacgtgcggctgcaattcgaatccgcgtcaaatatgagaggcaacaactaatatacacgtgttatgtacaaacatgcaaatgagtctcttagntcattagattatgatataactgtagatatgatccttgattcttagggagttctctataaatctatacaagctggtggtgcaagggtttaagtgttaaatatgatacatnggtggattagaatctaacgaaccagaaatcttgcttgcacgcttacacataagatctgattgcatattagttgttaccaataagagaacgttngacccatat

SEQ ID NO: 68627 - DNA, 456 bp, Zea mays
agctcgaggatgaatttgaatataagttcttatttatagaaatcattgaaagagcttcaagataaatgcatagacttcagcaaccgatgcgtgtagcggctgaagcaggtattcaactcggttggggccagttctgagaagtttaatccttcagttgaagacctgcccgggactttcgaacacattgagggcgaagttgatgctcttgacgaagttatagctgggcacggcgatttcagtgccctgctagcttctcggggcacaacttttgccttcatgaaaactggctacacgcatggaaaaatcgttaatagaccaaacttcagcttatcaccaacagatctgattgatatccccagcctagctcgaagcatatggaatagattcataacacaaatctggacaaagggtgggcaaaacttatctggtgacgaagctagaagccacctcaagccg

SEQ ID NO: 68628 - DNA, 479 bp, Zea mays
  unsure (1)..(479): unsure at all n locations
ntcatctntcttctttacanaacaaagtggacaccctcaaggctaagtacttgggcgaataaaacctttgtccagcaactcctgcaattacttcttcaattctgccaactcagcgggtggcatccggtaaggcctcttataaatgggtgccgttcccggttgcaacttgatggcaaattcaatgtcctggtctggtggcattcctagcaattcatcaggaaaaacatctgcatattcacagaccactggaatcttcttcacaggtgactccatcatagcaaaagcacatgatcgggtagaatcttggctaggtagatataactgttggaacttgctctccgagcaagatgatccaacgagggagtgaaagtaatgcaaacaaggttttagctcaagaaggcgattgctctgttaatctatcatctcaagggcactttgcggnggtatttatangtgcctaagtacccagcgtcatggat

SEQ ID NO: 68629 - DNA, 436 bp, Zea mays
  unsure (1)..(436): unsure at all n locations
agcttctgcgcgtcgatccgtnctccgttctatcaggcgctgcgcccttccacgggatcatccctgggaagcgcgtccagcccctcgggcgactcgacctcccagtctgcttcggaacaccctccaacttccgaagggagaccctgacgttcgaagtggtcgggttccgaggaacctaccacgccgtgctagggaggccatgctacgcgaagttcatggccgtccccaactacacctacctgaagctcaagatgccgggccccaacggggtcatcaccgtcggccccacgtacaaacacgcgttcgaatgcgacgtggagtgcgtggagtacgccgaggccctcgccgagtccgaggccctcatcgccgacctggagaacctctccaaggaggtcccagacgtgaagcgccatgccggcaacttcgagccagcgga

SEQ ID NO: 68630 - DNA, 399 bp, Zea mays
  unsure (1)..(399): unsure at all n locations
cggtgccaatggagaagcanaaatccttgaagtcttggctgtctatctgcttgccgntgtcgactgttagttcggacggtactccgaagcggcaaacaatggtttgccagaagaatttttgagcagtctttgatgttattgtggagacagcccttgcctcgatccatttggtgaagtattcgacagcgacgaaggcgaacttaaggttcccctgagcggtgggtaggggcccgacaatgtccaggccccagcgctggagaggccatgtgtgggcgatcagctntgtatactgcgaggggttgcctgaccgaggagaaaacttctagcaggcttcgcaggaccttgtgacccgatttgcggcgcagatcattgtaggccagtaaaagcctcggcggatca

SEQ ID NO: 68631 - DNA, 447 bp, Zea mays
agcttagtttgtgggagatttggatcactttattcctattcttgggtcacattataaaccgagaaggattggctatggatccgaagaaagtaacaactatcttggactggaaagcaccgaaagatgttcgaggaatcaagagctctatcggaatggccggttattatcggtgtttcattgaagggttctccaagattgccaggccaatgacagccttgttagcaaagaaggttgagttcaagtggaccccagcatgccagaagacctttgagacattgaaggagcagttgacaacagcaccaatactgattctgccagatgttcataagccattcttagtatactgtgatgctttgacaccggactgagatgtttgtaatgcaggaagggagagtagtggcatactcgtcccgacagttgaagaatcatgagaagaattatcctact

SEQ ID NO: 68632 - DNA, 459 bp, Zea mays
  unsure (1)..(459): unsure at all n locations
tcgnctggaccatgcttctagatacctctaatctgattcctgatttcgaagaaaccngcgcgnatacttagaaaacattgtttaatcacgtcttttgaggaccttcagaagccgaatgcccccaacaggggggtttggtgtgtaaagcaagggtgagtacacatcaacatactcagcaagtatcctattttggttgtagtggactaactatatgtgggggtaagtcaagcatgtgcttttagttggtcagattattattactagtatagaaagccaagttgtataagtaaaccacgttattaaccctacatactcctttccaaactgaaagagtgccacttaccattaccagagccaataccaagaaccatcaatctcattgccacctgcataccgaacatctctgatcataactgcgagctccctttgccgctcataactgcgagcacggctgatata

SEQ ID NO: 68633 - DNA, 455 bp, Zea mays
  unsure (1)..(455): unsure at all n locations
agcttcttatggagaggattcctacattattttggagttcatgtgctgcacattgcttggacctaatgttggaggacataagaaacttgaaggaattcaagataccaattgcacgtgcaaggcgtgtgacaactttcatataccgacatgggagaattcttgctgccatgagagagaaaactggtggggctgatcttgtgaggcctgctgccactcgttttgctacttcctttctcacattgaagagcttgtacaagcacaaggatgctttgaaggctttatttgcaagcacagcttggactgataacagattgtcaaagacaagtgctggattggatgtgtataacattgtcttctccacacagttntggaattcagtagaagattgccttagagcttcagggccactacttattgtacttatggtgtgagatggagatgagaggccagctatg

SEQ ID NO: 68634 - DNA, 428 bp, Zea mays
  unsure (1)..(428): unsure at all n locations
atccttganatcttggctgtcatactgcttgccgntgtatctgttagctcggacggtactccgaagcggcaaacaatgttctgccaaaagaatttttgggcagtctttgatgtgattgtggaaacggccctcgcttcaatccatttggtgaagtattcgacggctacgaaggcgaacttgaggttcccctgagctgtgggcaggggcccgacgatgtccaggccccagcgctggagaggccatgtatgggcaatcagctttgtatattgcgaggngttgcctgaccgangagagaacttctggcaggcttcgcatgaccttgtgactcgatttgcggcgcagatcattgcaggccagtaaaatccttgtcggatcacctttgcagccaggggcccttggccccgcgtgcgagccgcacgtgccactgt

SEQ ID NO: 68635 - DNA, 467 bp, Zea mays
aagcacctgcagatgcagcttctaagggagaaacattttaggactttatatgttcatttgagaaagaccaggattgtagagcatgtcaagcatggaagcaagttggagtttgtcatccacacaaaaacatcatgatgaccgacagaccacttgagctattccacatggatctattcggcccaatcacttacataagcatcgacgggagtaagtattgtcttataattatggatgattattctcgcttcacttggatattctttctgcaggaaaaatctcaaacctaagagaccttaaagatattcttaagacaggctcaaaatgagttcgaattgagaatcaaaaagattagaagcgataatggaatggagttcaagaattcacaaattgaagggattcttgaggaagagggcatcaagcatgagttctcttctctctacacaccttaacaaaatggtgtagtgaag

SEQ ID NO: 68636 - DNA, 488 bp, Zea mays
  unsure (1)..(488): unsure at all n locations
gtagcataggctaataatatgcgaattgactcatgcctatctacgggtgcataggtttcaccgaaatccaaaccttcgacttgngagtatcccttggccacaagtcgagctttgttccttgtcaccacaccatgctcgtcttgcttgttgcggaagacccatttggttcctacaacattctggttaggacgtggaactaaatgccatacctcattcctagtgaagttgttgagctcctcttgcattgccaccacccaatctgagtcttgaagcactttctccaccctgtgtggctcaatagaggaaacacacgagtaatgttcacaaaaatgtgcaacccgagatctagtagttacccncttatgaatgtcgccgaggatggtgtcgacggggtgatctcngtggatcgcttggtggactcttgggtgtggcggcctttgctcttcatnctacttgtcttgatcattttgcatctccnctcgatctat

SEQ ID NO: 68637 - DNA, 464 bp, Zea mays
  unsure (1)..(464): unsure at all n locations
agcttcgggtcacatggtttgaaccccactgttctcacgtgcacacatttctcgcanaaaagttacagggtttgtgacccgaaacaaaaaaaaatggctcaaaatcgatttgtagaggcaattgtaaacacaaactgcccttggaaattcatctgtagagacaactcttgtttctagccgcctctacaaatcaataatttaaacaaacacataagtaggcacctctacagaggctgccttcgtagtagcgttgcatacattntatactcctagtttttttcaataattatgttaatgttgtagtgatgttattaattatatgcaataatcttgttctttttcactttttattttgaatgatgttgtatgtttacaagacattaacttaaagtatagagattcgtgcaatgcccatatagaagaatcaaaccggaatgaataccagttggaagcattttggcact

SEQ ID NO: 68638 - DNA, 456 bp, Zea mays
  unsure (1)..(456): unsure at all n locations
ngagtcagtccttttacanaggataatggatgctcanagggatatttgatggtatgaaacacatccaggagaaaatagaggccagaaaagccaaatgcttcagaaaggatgatcaagacattgtatggtttaacaaccgcatagttgtgccgaaggatgaagagctccgccagcaaattttggatgaagcacatcttagtcgctattctattcatcccggaagcactaagatgtatcaagatctgaaatagcattattggtggacgaagatgaagattgaaatcacacgctatgtggcaaggtgtgacacctgcagacgtgtcaaggccatacatatgaagactgcaggtccattacaatctttaccaataccaacatggaaatgggaagatattagcatggacttcattgtgggattgcctangactgcanaagggtatgattctatctgggtta

SEQ ID NO: 68639 - DNA, 440 bp, Zea mays
  unsure (1)..(440): unsure at all n locations
gcttgtgaagattcttcatcccaacataggctagtcagcgatgccagaactagcccatgttggtctttgcaattaagcaagtgtcgagttcagcattgttatcattgaaaccaactaaatatagctaaccatccaacactcccttaaaagctattgaatcatcacttctactaaagacagtaacaccaatatcagtaaaaagacagttctaacccattttgcataattgagaaatagaaagcaagttgtaatctaaagaatctacaagaaaaacattagaaatggaatggccaggagatatagcaattttacccaaacctttgaccaaatcttgatttccatccccgaatgtgatcgctctntagggatcatcatttttctcatatgaggagaacatccttttctcccctatcatgtggtttgtgcacccgctatcgata

SEQ ID NO: 68640 - DNA, 412 bp, Zea mays
  unsure (1)..(412): unsure at all n locations
atactcaagctttcanaatgtntattacaataaaacctattcctctntaagaactttctctgcaacttcgttcagcaatttgttcacgacttcgtcgataatggattcagccatgtttatgatgtccagcgcttccatcatttctggatcggctaggggatcgaacggttccggcggcggagataattcagctgaagtaggaaaaattaatcagtccgaagccacaaaaacaaatgccgaagctaaaagccaaaaaacaatacatatacacttttcgcgctcttgagcttcttcagctcgccttgcttctgctcgaacgtcatgggtatccttttcacttttctttataatttcatgggccatctctcggccaccattcacccagacatcattggtaaaattctcgcccatc

SEQ ID NO: 68641 - DNA, 442 bp, Zea mays
  unsure (1)..(442): unsure at all n locations
gcttaggaaacgggagaagcttctccctttgtggaaagcgagagaagcatttttgggcgtccaaacttttggagggtctgatggagaagatgctggagcttgtatttggcctgngttttccaaatattgctattggaagctggatagtagatctgtaggagatgctctaagtaatttactgccatcactccacacaagattagtaagaaaaaatcacagcaagaccttatgtttaatcagtgatccaggcacccagatccagattctatatttgcccactgtcgaactatatacaagtcctaaggcactacacaaggaagtgtggataacggcacaactatgactccaagggtgaaggagattgaggtatgacttactctatcttcatcttccacggtgtgaggcatatctgacaagctatcaaatgagtactccacatact

SEQ ID NO: 68642 - DNA, 372 bp, Zea mays
  unsure (1)..(372): unsure at all n locations
tatatgtatatacacacatcatgactcacttttatagttgtctgccagannccntgaacatatataatggggcatacttagtcgtcaacgatatcgtctaatcatatttgtaaagggaaaatctcctcaaaaattaaaatcttcatgtgattacttgagaacaatgtgctgttaactcaagagaattttggttaccagaaatcggactggagataattcttgcagctttcgcccagaatttgagtcgacatatcatcctctctttcattgggatggctaaatgtatcaactctgataatgtcccacataatctagagcagtgctcgacgtggcttaactgtaatctctatggtgctaaagaaattggaattc

SEQ ID NO: 68643 - DNA, 270 bp, Zea mays
ccgcagacagacagctatactgattgaactaatcagatcctacaagatatgttagagcctgtgcgtgccagacaagtacgatgggacataaggtaccttatgctaattctcctacacaatagtacctggccagcctgagatgtaccgcctatgcactctactgacggagtgaatgacttcgctgcactggaccagcctggagagagacaggtgtttggcccccacatcttcttgaagccgaagagaatatctaaatggctcgggagaatc

SEQ ID NO: 68644 - DNA, 488 bp, Zea mays
  unsure (1)..(488): unsure at all n locations
tcggcctcaccactgatccactggataactccatctgagtcaccgctgatgaatntctgctcgaaggagaaggctccaactttagagaaactggtctttataattttagcgcactctatgaatatctcatagcatttttctttgcccgcacgaagctcatcaacattcttttgtgctctcgatctttcaatttcgcatatctcatgctttaccacttcaacctcaaaattttcggttgcttcggcaattntacttttcagctcttgtacttcgactttgtgagcttctgcttgagcagacatcttggcttcactagacttcagcctttcgaccagagatagcaaaatcttatctttagcgagagcttcattcctcaaagttataacctncgatcggagactactaagtgccatttggcaactctcgtcgtcgacatccttttgggccttcaaaggttaccaaggattagaccctgcaaataaaacaag

SEQ ID NO: 68645 - DNA, 386 bp, Zea mays
agctttatctcagaatactacttccttatctctggattgttaggatcaagactgatggcaaattcaggatctatacacataattggtgtataatacatgtcaccattcattgcctcgttaagcttcccaagttctctccagcgtgggtatgctttaatatagcgatcatcaatatttagagcttcagtgcaatcatcatctgccgccttgaatctgatgaattccaaatatgaaatataagacatcaccagaaagcagatcttggaaacaaaacattaaggttccacagtgttgagtttgtgatccaaattctgaaaaaggcggtcaaattagcaagcgaagcggaggcccatcgcgcgccttcggcctgcagcccaaggacgcct

SEQ ID NO: 68646 - DNA, 443 bp, Zea mays
  unsure (1)..(443): unsure at all n locations
tcgactcagacaagaatacagaggcactntgtacaatcaacatgcttcgatttgtacganaagaaaggaaggtgttattcgccttctgctcanaagctgtaaccgtgggtttcgtccacaacaaagcaatttgtacatggacggaaaggtaaaattatattacaaggtatggacaaatatgtacaatgttgtcttcagctctcaattacaatcttttgcaaaaataatgcaaggaacatcctaagctctatacaggaaagtacaaaaagatgcttcagcccagcaaccttcggaacatagcttggcttactgatctttggcgccgcgatcctacagacagacaacggtataaggtaaatacaagtgcgatcaagaaaaatcaaggttaataacaggtacaagtttcataccgacttaagtagttttcgagcttcgtcttcagc

SEQ ID NO: 68647 - DNA, 461 bp, Zea mays
  unsure (1)..(461): unsure at all n locations
agcttttataaggggcatacttgttatttctcacaggctgcgtcctgtgcctataaatagtgaacagtattccgttactattcaggcattcgagtaattgcaatcgcatcttccggaacccaaccttttgccaaggcagaggtattattgtattcaataactcaatatattaagtagatacaatgtaattcgtctatgatgtatntatcccttttataccttntgttttatgtcatcttataatttttactgaaattctattacgaagatttaagcttcgtaattatgctcttatcagccttcgtccaaggcccattatcctcaagggaataatgtttcatggacgaaggacatcgacatttaacactntatgttgccttgttcttaattcatagcatttgagaacaagtccccaacaggagggtaaaacataacccanactgggaaaacctaaaagcatt

SEQ ID NO: 68648 - DNA, 439 bp, Zea mays
  unsure (1)..(439): unsure at all n locations
aaaactaagctagcctttgacattaagcctcanattcttaagactatctagaatatccaatggcaaccctctgtactttntacagaatgtttggaaaatattagacccctgtcatagttcaaacctaccctagaaaccataagtagaaaataaaagaaaggggaaagtgggtaatagaaaactggtgccatcctaaaatcctttatatttatccactgaagggtacaagagcaatacaaattccctatngttatcctcaacaaaaacctaagcctaagggtgataagtctaacccactaaaagcaccacataaccaagagnaaccctaagtacttcttgacttagtttctttttagcataatgttattaaatcctgcataatcatgacatacatgttcattgcattcgatagactgtaaccttgctgacggagagtaca

SEQ ID NO: 68649 - DNA, 451 bp, Zea mays
  unsure (1)..(451): unsure at all n locations
agcttctaaagggagaacacantttgggactaacaaatgttcattttgagaaagacaggatntgtagcgcatgtcacgcagggaagcaagttggtgttcatcatccacacaagaacatcataacgactgacaggccactcgagctcctacatatggacctattcggcccgattgcttacataagcatcggcgggagtaagtactgtctagttattgtggatgactattctcgcttcacttgggtgttctttttgcaggaaaaatctcatacccaagagaccttaaagggattcttaagacaggctcaaaatgagttcggcttaaggatcaaaaagattagaagcgacaacgggacggagttcaagaactctcaaattgaaggcttccttgtggaggagggcatcaagcatgagttctcctctccctacacgccacaacaaaatggtgtagt

SEQ ID NO: 68650 - DNA, 460 bp, Zea mays
  unsure (1)..(460): unsure at all n locations
tggtcattntattgctaactgtcccacaatgattgtgatcaggatcaagggaacaagagggagaagaagaagaactataagaaggcaaagggcgaggcacatctaggcaaggagtgggattcggattgctcctcttccgactccgacaatgaaggactcgccgccaccgccttcaacaagtcatccctcttccccaacgagcgtcacacatgccttatggcaagggagaagaaggtatgtactcgaaactctacttatgcttcttcaagtgaggacgaatctagtgatgaggatgaaatagattattcatgtttatttaaaggcctagatagaaccaaggtagataaaattaatgaattaattgatgccttgaatgataagaataggctcttagaacagcaagaggaattgtcgttgaagaacatgacaaatatgtagaagcacanaaatctcatgctct

SEQ ID NO: 68651 - DNA, 461 bp, Zea mays
agcttctatagggagaacacgtgatacgtctgactaacgttcaattcaaaaaagatagaccttgtgcagcttgtcaagcaggcaaacaagtgggaggagcacatcacagcaagaatgtgatgaccacttcaagacccctggagctgctgcatatggacctcttcggacccgtcgcctatctgagcataggagggagtaagtatggtctagttattgttgatgacttttcccgcttcacttgggtgttctttttgcaggataagtctgaaacccaagggaccctcaagcgcttcctcaggagagctcaaaatgagtttgagctcaaggtgaagaagataaggagcgacaacgggtccgagttcaagaaccttcaagtggaggagttccttgaggaggaagggatcaagcacgagttctccgctccctacacaccacagcaaaatggtgtggtagagaggaag

SEQ ID NO: 68652 - DNA, 461 bp, Zea mays
  unsure (1)..(461): unsure at all n locations
tcagctatggggtaaaatatcggcagcacaacagtgcaaatatcttgaatgttgtggtaacttcacacctacttgtctgtttatatagtgctgcaggtaagaaggcgaaacgccaggattttcacaccaggcggacagtcgcttgcactcactgcgcggtggaccgcagagaccaaacagtaactctgcaaggtgggaccgttacgcgctcggaaactgaatcgtttctcgacaacgagctcatggaaggtgttttttgacctttcggctcccgaagcttaagagactnttttcacggatcaagctcgttacgaaaaacgatctagcgccgcgaaaggggctactgttgtgactatgcttcgtcgcgccgaaagtcttgtatgaagaagcagcttcggctgaagctgtccgcatgagatgaccgaaggtcctcttcatgaagcttcngaatacaaaccgac

SEQ ID NO: 68653 - DNA, 452 bp, Zea mays
agcttaatatacttttttcacggatcaagctcgttacgaaaaacgatctagcaccgcgaaaggggctacttgtgggcctatgcttcgtcgccgaaggtcttgtaggaagaagcggctttcggctgaagctgtttgtataagatggccgaaggttcctcttcataaagcttcggtattacaaaccgacctaaagatagaatgaccttttagtccataaaggtctgagtcaatgttgtaaacttttataaagggcatacttgtaattcctcacaggctgcgccctgtgcctataaatagtgaacagtattcctttactgttcaggcattctgataattgcaatcgcatctttcggaatccaacctttaccaaggcagaggtattattgtattcaatgattcatcatatcaaataaatatagtataatataattcattaatgaattattcaccct

SEQ ID NO: 68654 - DNA, 479 bp, Zea mays
  unsure (1)..(479): unsure at all n locations
cttggcatcnttgtttatttcttcttcgtgagcccctagcatcctatcatcgatgaagtctgctaacacctgngactgaattgaggatctatgcacatagtcaatggtgaattcattaagttctgcagcccatttcccaatccttccagtagcttctctgttcctcataatgttcttcagaggctgtgacgaaggaacaattatgtgatatgcttgaaagtaatgccgatgatttctggaggccattaacacaacatataacaccttctccaattctgtantaattttctttgacagacttagaacttctgagacgaagtacactggagcttgctttttgacttggccatctagcttcacctgtacaagtgccgcactcactgtagaatacgaagctgcaacatataagagcaatggagcccctggcgaaggtggagttaatggttgtaaatcaatcaaatactgcttcaactcttcaa

SEQ ID NO: 68655 - DNA, 444 bp, Zea mays
agcttgtctacaatataagcacaaaagagagaaggctgcttcggcagatcaaccaaagcctatgctcctatgtgaagatatagcagatcaaagggtactgctaggatctcagttatctgatgagcaagaaaaaaccctgataagttttttattcaacaacaaagatgtcttcgcttggatagccaacgatctttatggtgtcaacagagatgtcatcgagcactcacttaatgtggatccttctttcaagcctaggaagcaaagacttcggaagatgtctgatgataaagctgaaggtgctcagaacgaagtaaagagacttctcagtgctggtgttatcagagaagtaacatatccagaatggctagctaacactgttatggtgaagaaggctaatggcaaatggagaatgtgtattgatttcacagatctcaacaaagcatg

SEQ ID NO: 68656 - DNA, 460 bp, Zea mays
  unsure (1)..(460): unsure at all n locations
ntccananagtcttggatcactcattttggtggtctgaagattttttacatgtgtttgaagtgtgaagactgaatctgtccagttttggacaacacagccttgataatatattttacccttgatacatgctaaaccagctagggatgtttataaatgatatgtagacaatttaattagctttccagaaagtctaggataaatttaattggatgtctgaatcttcagttaggaaattttaaagtcacaagtctgaatctgtccaaatctggaccagcgctgtgtgttacatcttttgaccttctaagtgttaatcatgctggatgacataccaaagttgtaagcacttntaagctttcaaaaagcctagtgctattttggattcatatttaaaagtatgataanacaagtgactgtgtttgctgtcaaaaatctgaagtgcccattgatgatgagtcaccc

SEQ ID NO: 68657 - DNA, 418 bp, Zea mays
  unsure (1)..(418): unsure at all n locations
agctnggtgattgcagttcacatgcacgtctatgagcatatgaatcaaggaaagatcccaacaagttgatcgggacaagcttctttatgtttctggcggcagagctacgtagtaccaacttattggatcgtgaaccaataaaagaggcagcatatctacgaaaaagagcatgtccgacatagcgccgtcgccgagctcgtcaccgtcgagcggaggaaatggaggtggcaacaattccacggcgcctgcaccccgcggttcatcaagctcaagctcaccccctaaaccgaggaatggctggcctagtagcagcccacctccaactccaagctcagactcagagggctcaagatcaacgccaccatcagattggcaagatccgtcgtcctcctcctctagccctccgccatcacgatcg

SEQ ID NO: 68658 - DNA, 513 bp, Zea mays
  unsure (1)..(513): unsure at all n locations
actcaagcttataatttcagatntgcctattcatccccctctaggcgactttttattggtatcagagcctgatacttcattagagtctaaccactcgaagtgatgtcgggagcatccgccaagagggagatcgggaccggcggcgacaagtccgcaagctcggggagaactcactcaagggagtccggccacaagcacaaggaggaatcctcttcctccatcaagacacaacgaaaaggtaacatgaagaagaagatgaagaaagtggtctactatgagacagactcttcgtcacctttcaccttcgggtccgaatcgacatctcccacttctaagcgccatgagctcaagaagtatagtaagatgcccctccgctatcctcgtatttcaaaacgcactccattactttccgtcccattaggcaaaccactggtttttagagtgaagattactctatgtggagtgataaaatgaggcatcatctaacctcactccacanaagcatatgggata

SEQ ID NO: 68659 - DNA, 465 bp, Zea mays
  unsure (1)..(465): unsure at all n locations
agcttgagcaacaaataccgattntggtattctaacttgataaactatntccaccaggtttcttcaatccgatgcaacatctacttgttcacctaccatacgaagctaaggtaggaggtcctgtgcaatataaatggatgtatcacatcgaaaggacactaaagaagctacgtgcaatggttggtaataagagacgagttgaagggtgcatcgctgaagaattcaaatataaagagatatcatcgttcacgggcctgtactttgcagaggaacacaatgtcaatgcccatacgttgcggtatcatgtcgacgagccccctatcagtgatattgaaatttttcaatggaggggcaaaactgtaggacccagcacaacatactgtttcaccaacgacgaatggaagactgctttactctacatgtataacaacatggaagagatgaagtcagttctcctgtaagtgt

SEQ ID NO: 68660 - DNA, 502 bp, Zea mays
  unsure (1)..(502): unsure at all n locations
tactcagcttctnagggagaacacgtgataggtctaactaatggtacattcgtataagatagaccttgtgcagcttgtcaagcatggaaacaggtgggaggctctcatcacaccaaaaatgtgatgaccacatcaagacccttggagatgcttcatatggacctcttcggacccgtcgcctatctaagtataggaggaagtaagtatggtcttgttatagttgatgatttttcccgcatcacttgggtattctttttgcaggataaatctgaaacccaagggatcctcaagcgcttcctcagaagaagctcaaatgagtttgagctcaacgtgaagaagataaggagcgacaacgggtctgagttcaagaaccttcaagtggaggagttccttgaggaggaggggatcaagcacgagttctccgctctctacacacctcatcaaaatggtgtggtagagaggaagaacaggacgctcatcgatatggcgaggactatgcttg

SEQ ID NO: 68661 - DNA, 341 bp, Zea mays
ctgatgtaaataaacttattcactgtaattcaaacatacgcctatttaggatgaatctaatctactctaaatatacttttgcaacattggccaattatgttttgtgctaactacctgcaagaaaaagccacaggaagtcaaaaaattgaaaagctctacatatggtaaaaaagtgaacccatacaagtcctaacccacatggaaaaggggctggttcactatcaagaaaacctaccaggataaggtggaatcccaattcataagaaccactatatagcttgggagatactctcaatacactactaagtaagtaacttatcccaaagaaataagaagggatc

SEQ ID NO: 68662 - DNA, 433 bp, Zea mays
  unsure (1)..(433): unsure at all n locations
cgcttgcgagagatggaacagatcccaggtctcttgagagatctagtgttgtgaatatgaatttgatgttgagcgagccgtctcagtccgtcctcctccttttttcttcttttgggaaagccctggcatctcattttataggtgcaaggaggtgacccagctgtacatatgggggtgtagctatgcgctaacatggatggcagagaagtgcttgagccctgtagaagcgtggctggcggtgcagccctatgtcctgctgacgttcttttgatttgtagagaacttgatgacagtcgacgtcatgagcgcatgtcggggatcatcattacctgttactggagtaatntgatgtgacaccgatctcgttccttcgtagcctgaggtggttagctagggaaaggatactgctgattcctcgttcgcgtagtcggtc

SEQ ID NO: 68663 - DNA, 465 bp, Zea mays
  unsure (1)..(465): unsure at all n locations
agcttgcggcatcttagaatttagtgtttcttccaaagtacaggttttagaccccttaggcccgtatggctattntggcctcccgtgacacatgtttttgtcgtcgaacagcgatttcgtgcctcccgtccgccacccatgatttgaccattgagactggtaaggctgttttggcctcccgtgagctatagcacacgttttcatggcccagcgaccatttttatgtctgcgttccgccacacgtgtttttgtccctagagcaccttaaagcgattcttggcctcccgcgagctatatcacacattttcgtggccaaacagccaattntatgtatccgacctgccaccttcgnttataccggggaggccgttatggcatntttttgccacccgtgagctatagcacacgattttatggaaacctagaccctaaatcctatccctataccctagacctaaacatcgc

SEQ ID NO: 68664 - DNA, 473 bp, Zea mays
  unsure (1)..(473): unsure at all n locations
tactatgaattggagactcanacttcattntactatggttgggacactaaaaccttntagtgtcggagtttaaggttagggtttaaggattggattcngggtctaggttaccataaaaacgtgtgctatagctcacttgtggcaaaaaatgtcgtaacggcctctccggtgttaaacgtacgtggcaggtcggatacaggaaattggcactttggccacggaaacgtgtgctacagctcgtgggaggccaagaacaacattaaggtgctctatggaccaatacgcgggtggtggaacacgtacataaaaatggtcgctcgactatgaaatcgtgtgctatagcttacgggaggccataaacagcctntgcagtctccgtggccaaatcatgggtggcggacgggaggcatgatatcgttgtttgacgatgaanacatgtgtcacgggaggccaaanatagccttactgggctc

SEQ ID NO: 68665 - DNA, 461 bp, Zea mays
  unsure (1)..(461): unsure at all n locations
cctgagcatccgcttctcattgcaagatgcatacctttcgaccattctagcatgaanaaacttgagctcttcgtgtctttggttgacttcttcgagcatataaattttttataagaaaatcttcttgctctttgattttatctatgacttcgagcatgatcaaattgtctttcttggttaaatgggcaaagtgttgattggattcatcatcactttcaacttcactctcacttgacacattcttctctttaccatgagacccatataagaagtggtatagagttaagcctttttggtgaggtggcttcatcatttggtctccatcaatcacaatcttctttctgcnaaagattatatccataagaactaaaggaagtagaagtgccatatataaaagaattgttctcaccaaccatttcattaccttccattgagtcatatgttggtaagagaatggatgt

SEQ ID NO: 68666 - DNA, 495 bp, Zea mays
  unsure (1)..(495): unsure at all n locations
ntaagctctctgacanataaatcacttcatctagtttcaacaatgatgcattttagcatgaatggaattttgagaagttaaactagatatgaagcagggaaaatgcatggacatgctttctcttccttntaaacaagatatataaagagagtatagaanaggaagatntaggtacaagtttaaatgaaaggagatagttttacctttttgtacctttactaggaaggctctcttcattgtgctttgtccttagtcttagatgctaaagacctattcttaatgacaactatagggaaatatttgcacaagagagttctacaactagggatcttttcaagttattgttagcatatatcaaatggatcacaagttgcataaatgtatcatgaattctncttttaacttagtgcatatcaagagagatatcgatggatagtatatacagcactaagaagcatgattgttgattgaagtcattcaatgatcaaacaaata

SEQ ID NO: 68667 - DNA, 364 bp, Zea mays
gctgacaccgcggaagtaaaaggcgaagaagctcctaagagatgcttacagcgaagaataaacgctgataccgccgaagtaaaaggcgaataagctcctaagggacgcttacagcgaacaatcaacgctgatacaccgaacaataagcggcgaagccgaacaatacacggcaaacagactgtgttctactgtgggaacgtgtgtgtatctttcgcacaaatatcattttgcatatcatagcatcatcacatcattcacataacatgacatcatacatcatatagcatcaatggcacaagaagggaatacaatgttaatcttctgacaattgttttaagaaattgtgccaaggcacaaaataaag

SEQ ID NO: 68668 - DNA, 482 bp, Zea mays
  unsure (1)..(482): unsure at all n locations
tnaaggagaaaagaaaaagaatgaacttgttcgatttttctacctcttcaagttcaagaaacatntcaaagagccttgccaagaatggttggaaatgattgaagctatgtgcaatgaaattctgggcaactatactaagaaagaagatcaattaatgaccgcagccttctgcacccgacctaaataaaggctgaaccgagtaatggatgccctgaaatttgaataccctgactatgaacaggtaagcaagggtgccgaatggccaaagcgaaaaagagttgtcagtggtatgaagaggcaagttgctagaatgatagaagaagatgagaaagctctgaanaagaaaatattcagccttgagccgaatgtggctatttcgaagaaaagaaaagttgcggctgtgaagccaaaaacaactgatatagaggaagaaattccttcacgccttctgctgctgacgttgaggaaatttaaaggtaatg

SEQ ID NO: 68669 - DNA, 452 bp, Zea mays
agcttcctccagcattcttgagccccttatgcatccgaagatagcaataggtgccactgggagttatgaagctagtcttctgtaacaccccgggctttaaaggacaaagccgggtgcatctcatacatgcgccaaagaagacaacatatataatcacagagtgtatagagataaatgtcacaataatcagagtacttgttacatagcggaagtcttacaaaataaatgataaatatagcaggatctaaaatccatccttggcgccagaaagtcaactgggagacgccacctagatcgaatcgaactccttgatatgatgctccacttgaaccacctgttcttctcctgtgggggggtgtgagacagcaagagtgagctcacatacgttcatcgctcaacaagttgtggggaataatgtgcatgaactcgccaaaggtgggagctcatgaagt

SEQ ID NO: 68670 - DNA, 477 bp, Zea mays
  unsure (1)..(477): unsure at all n locations
tggcagccgatgcgtgcagcggctgaaagatgtgtttcactctgtctgagctagctctacgaaatttacaccttcagctgaaaatctgccgagaacattataatatattgaaggcgaagttgatgcccttgacgaagttattggtgggcacgccgacttctgcgccctggtagcttctcggggcacagctactgcttttttgaaagctggctgcacgcatggaaacattgtgaatagaccaaacttcagcttgtcagcttcagatttgatagatatctcaagcctagccagaagcatcgganatagattcatgacccagatctgggtaagtggcgggcgaaaaatggcaggcgacgaagctcgaagccatcttaagccggtaagaaacttatngttgtacttttaccttctcctttgaaatttggaccttttcttactctgctgttggatacatangatgacgaagctgaagaatga

SEQ ID NO: 68671 - DNA, 448 bp, Zea mays
  unsure (1)..(448): unsure at all n locations
agctggtggcgtcctcgggtgtcttgtcgtatccgaagcaccaagtccccaacttggaagcctcggggccgaatcttttgggcgtgatagcgtcacagagactgttgataccgtgctgagtgcagcaaggctacgtcccgagcttcttctagttggtccaatgaatcctctcggctagtttggttgttttggtcgttgtatgcctttgccctcggggaaccgtattctaagtccgtgggtaggatggcctcggccccatagaccagaaaaaacggcgagaaactcgtggctcggctcgttgttgtcctcagactccaaaccaccgagggtagctcctttatccaccgcttgccaaacttattgaggtcgttgtagatccttggttntagtccgtgcaaaatcatgccattggcgcgctccacctgtccattcgtcatcgggtgagcta

SEQ ID NO: 68672 - DNA, 502 bp, Zea mays
  unsure (1)..(502): unsure at all n locations
ntatcaaatggacgtganaagtgccttcctcaatggaccaatcaatgaagaggtctatgttgagcaacctcccggctntgaagacagtgagtatcctaaccatgtctataggctctctaaggcgctttatgggctaaagcaagccccaagagcatggtatgaatgccttagagattttcttattgctaatggcttcaaagtcagaaaagccgatcctacactctntactaaaactcttgaaaatgacttgtttgtatgccaaatttatgttgatgatattatatttgggtctactaacgagtctacatgtgaagagtttagtaggatcatgacacanaaattcgagatgtctatgatgggggagttgaagtatttcttatgattccaagtaaagcaactccaagagggcaccttcattagccaaacgaagtacactcaagacattctaaacaaagttgggatgaaggatgccagcccatcatgacaccatgggaccaatggg

SEQ ID NO: 68673 - DNA, 408 bp, Zea mays
  unsure (1)..(408): unsure at all n locations
agcacctgcgctgcagcttagctgattcctttttactaatgtnntaaccgnttgtgatcgatctttttgcggctcctgcaagatcactggaatatatagtccagaacaaataagtgacattttgtgtggcattgaaggaagagtgatactgctttggccatgtcttcttccacatgtgcagtgagatctgaggtagtattgtgtgtttggtgatcctggcttatcctttgggatggtcatgtgatagcatatttgacatcttattttgcatgtgagctatgtaattgacccaaaaggcactttaagcgggcaagaaagtctaaggcccttactaagtactctcatgaagtagagcaataccacacacggatttatcaagacttttgtgtaaaccaactgcccctttca

SEQ ID NO: 68674 - DNA, 335 bp, Zea mays
  unsure (1)..(335): unsure at all n locations
ataagaaataaaaatgtgatgtgtntcctttaccattacctaccctacgatgtttaatctctggacgagattcttttatggggggaaggatgtaacgccccttgtgttactgtaactaaaacttgagcatgacatcataagcattggcattgcatatgtgtgacacacctagagtgcattcactatgcaaaaatttcaaacaagttgtattggtttactgtttttgcaaatggaacccctggtaatggacttaaccctaaatagtgggtaaaggggtaaaacttaactcaagtaagaaaacctaaatactttatggtaaagtcataaaatgaccc

SEQ ID NO: 68675 - DNA, 450 bp, Zea mays
  unsure (1)..(450): unsure at all n locations
agcttacaacataagaatataagcaagagctcgaccatatgccataatagaaggggagctgtacaagcgtggggtctgctccccgttgctcaagtgtttatccagatccgaaggtatagaaataatgaaggaaatacacgcaggcctatgtggatctcacatcgaatctaggcctttgcttgggaaagtttttcgtcaaggattntattggccaaaggcagctttggatgcagcggatttagtccaaaagtgcgaaggttgtcagaaatgtgcaagagatcaaaaacaaccttcgtctttaactcaattaatacaacccacttggccgttgcaaaggtggggccttgatttactaggtccattaccaccagcacagggaaacttaagatatgttgtagtggcagtggaatattnttccaagtggattgaggcaaagccgctagccacaat

SEQ ID NO: 68676 - DNA, 484 bp, Zea mays
  unsure (1)..(484): unsure at all n locations
ggcattgcatgtntaaattccttgtattgcatctatggcttgtctaacctagttgagataaccgccaacaaagcgagtgaaaaagcttaactcgggtcaaacttgacaagtcttagttttaagcttttagcacttaaattcttactttntatgcaattattggttcttgaaatatgcataaggtactgcactaagggggagtattcaaaactcaaatcactcatgaaaacccctagtgcaagccaaaatgcaaatttcaccatttgcctattttctctanaaatatctagcctatggcaaaatattttgaaaaatatatgagggtgccaatatctgtcccaacaagtggttatttgtgtgattataagttgggaattggtttggttgggaactagatagaanaattcaatntttcaaaactccnctctgtctgggctcaccggaccgtccggtgtgcaccngacactgcactatgncaatgtcg

SEQ ID NO: 68677 - DNA, 451 bp, Zea mays
  unsure (1)..(451): unsure at all n locations
tcatanaaccatctccatgaatacttatgcagtaagtcatcatgacccttaactcttccattccaatccttacgccactcatttcctcgaatatttgcccagtaaagtacccaaatagcggcaagccaggatcagaactgaacattatatccaccatgccaccatgttccccaagaaaatcattaacatttgttggcatattattgccgcccaaatccaccttatgatttttcttctcccagtaaaaatccttcctatgccgaggccggaggtgtgttttttttcaagactttgtatcacctcgatgtatggacttgaaaattcaatanagcttcctttatcgaaaaaaaagtaaaaatccttcctgcccaaagtcgattgctgcactaacttgtttgattctagtgcaagtggcatctcctcgcattcctcaagctcacaaggaattgac

SEQ ID NO: 68678 - DNA, 445 bp, Zea mays
  unsure (1)..(445): unsure at all n locations
agcttcatatgcggtaagactggtcactttattgcccaatgtcccgataatgataatgaccagggacaagaaaaaggcgggaagagggagaaaaagaaaaactacaggaaggcaaagggcgaggcgcaccttggaaaggaatgggattcagactactcctcttccgactccaatggtgaaggattagctgcctcagctttcaacanatcttcactcttccccaacgaacgccatacatgtctcatggccaaggagaagaaggtaagtattcgagatacacctaagtattcttcttctagtgatgaggattcttccgatgatgaagtagattactctggcttatttaaaggtttagatagagccaaagttgagaaaattaatgaattaattgatgctctaaatgaaaaagatagactgctagaaaagcaagaggatattntgtatg

SEQ ID NO: 68679 - DNA, 504 bp, Zea mays
  unsure (1)..(504): unsure at all n locations
actcaagcttgtgaactctngattccacttatttagatatggtggatagttcacgttacttagttccagagggttatgataagttagcatcatccctcaatctccctgtttcttctgatatacgtgtcgaggaacacttcttgaagggcatgctagatttacgcaccctatcagcaatgcttggtactgaccaaaggtttgaggcttccaatcgtggtggaatatctgaacccctgccacaatttgaatctctcanagaaagggtaaaggtgcaggaattttctcttcaagtaccaaggacccctttgcaattccggaaggatcagctgggaggatacgaaggtatattatatcagaagctggcgaattgcaggttcattatgttagagtcatggaaaaaggagatacatatgaggttggtattatctgatataactgtgaatgcacttctatatattcactatatntagcaaccatgcgatatcatcaatgcagattatcgag

SEQ ID NO: 68680 - DNA, 465 bp, Zea mays
  unsure (1)..(465): unsure at all n locations
agcttgcctccaccacgatatgtatttttctgagcaaggaataagtcgttctaagggacgcagagtaagcttgccaaagctacaaaaagtcgttctaagggacgcagagtaagcttgccgaagctacaagaagtcgttcctaagggagcgcagcgtaggttttctgctccaaagtcgttcctaagggaatgcagagctaaataccgccgaaagtaaaaggcgaagaagttccaaagacgttcctaagggaatgcagaacttacagcgaanagtcaacgctgataccgccgaaagtaaaaggcgaagaagttccaaagacgttcctaaggggatgcagaacttacagcgaanaataaacgctgattccgctgaagtaaaaggcgaagaagctcctaagggaggcttataatgaacaagtcagtattgatacaaaagattgtgctccattgcangaatgtgcgtatc

SEQ ID NO: 68681 - DNA, 163 bp, Zea mays
tttccaatctactttgatgcgatacagatgacaatgaaacaaacagtttctaatgcaagaacatatggttgtgggttgtgagtccatatatttcttaatcctctatagctaaatcacatgattgaatataggctcagagctaattaattcatttccacgattg

SEQ ID NO: 68682 - DNA, 393 bp, Zea mays
agcttgaaggtcaaatcaaaaagcaagccccaatatactttgtatccgaagttcttagtttatcaaagaaaaattacacagagttggagaaggtactgtatgctgttttaatggcctccaagaaggttcggcattattttcaggcatacaatatagttgttccttcttcacaaccgttgaaggatattatgagaaataaagaagctactggaagggttggaaaatgggccacggagctcaatgaattctgtattgattatgtgcatagatcttcgattcaatctcaagcattggcagacttcattgctcactggacgccagaggctcaggaagaagaaacgaataaagatgctaaagtttggacaatattttgtgatggatcttggggaacct

SEQ ID NO: 68683 - DNA, 421 bp, Zea mays
  unsure (1)..(421): unsure at all n locations
tattgctaactgtcctgataatgaaagtgaccaggataagggaaacaagagggaaaagaagaagcattataagaaggcaaagggtgaggcgcatctacgcaaggagtgggactcggattgctcctcatccgactccgacaatgaaggactcgccgccaccgccttcaacaaatcaaccctcttccccaacgagcgtcacacatgccttatggcaagggagaagaaggtatgtactcgcaactctacctatgcttcttcaagtgaggacgaatctagtgatgaggatgaagtagattattcatgtntgttcaacggcttagatagatctaagatagacaaaattaatgaattaattgatgccttgaatgaaaagaatatactcttagaaaagcaagaggattttgtgtatgaagagcatgat

SEQ ID NO: 68684 - DNA, 462 bp, Zea mays
agcttcaagatcttcccaggtggccaggtctgaaggtaagccggaccactgcacaaggccttgctgtacgagacggttgcctttggtaagtcctcgcgtctgaaggatttgaacaggaacactgaattcaggtaaatctagaggcagagttgctggagcagggcctttgtaacctgctgccagtttcagttgtgatacgtggaccaccgggtggatcttactggagataggcaggtccaaacgatatgcaaccttaccaacccgagctgtgactttgtatgggccaaaatacttaaaactcagcttatgatgaactcgcagcgagagaaatgactgcacatagggctggagtttcatgtacacccaatcaccgatggcaaacgagcgctcagacctgtttttgtcggcctgacgatgcatcctgagttgggctcgaaccaagtgctgatgaaccaattcttg

SEQ ID NO: 68685 - DNA, 443 bp, Zea mays
  unsure (1)..(443): unsure at all n locations
ngaccgttgtaagcattgtgaagcttctagatatgtcgaggtgacaaatgatgatggtgaattggtagttacgaaggtcgcagctaagcaacttcgtcgggtgcctatcattcctcggctttcaaggctgttcctcaacaaggaaatagctctgcatatgacgtggccaaagaatggtgtacgtctcgtcactgatccagacataatggtccatccgtcggacggtgatgcgtggaaggcatttgacgaagttgatcccgaatttgcaaacgaccctangagtgtacggcttgggctatcgacggacggattcacacctttcaataccagtgcaagcccttactcgtgttggcctgtcttcattgtgccatataatcttcctcctgagttggtcaataaagaagagttcatgttccttgcactagtcatcccaggccccgagc

SEQ ID NO: 68686 - DNA, 436 bp, Zea mays
agcttgtgaacagtacaaattcagaagggatatagcagcttcagcagatcagccgaagcccatgctcttatgtgaggatatagcagagcagaaggtgctgttgggttctcagttatccgaagaacaagagaaaaccttgataaggtttttgttcaacaacaaagatgtttttgcatggtcagccaatgatctctgcggagttaatagggatgttattgagcattcgctcaatgtcgatccatccttcagacccagaaagcaaaggcttcggaaaatgtcagatgataaggctgaaggtgctcgcaacgaagtcaaaagactcctcagtgcaggagttatcagagaagtaaagtacccagaatggttagctaatactgttatggtaaaaaaggccaatggcaagtggcgaatgtgtattcgatttacagaccttaac

SEQ ID NO: 68687 - DNA, 450 bp, Zea mays
  unsure (1)..(450): unsure at all n locations
tactcagcttgacctngatcccaaggatactgtgtacctgatctgactggtcctatggtgaaacatgtnagcatgagtcatagtatccgaccttgtagctattatattcgtgtcatgggtgctgtggatgtctttaatgggaaccaatcttatctcgtggaggagtccgatctcggtgaaaggtcagagacggtggtcaagtcctatcttggcggtggtaggcagagttgtcctatctacggctctgggtgtccagtgtgtgtcatgggtcttgactcaatttagacttatcctgaaccaccccttgagtcatgttggttcccacacacatcacaatgtagctcatcatattctggatcttctttaggctctcgagggcctatgtgttgtcctacactaagagtagtgatctcatccagtaggagctttgtcgtcatgaaattctgtgtc

SEQ ID NO: 68688 - DNA, 428 bp, Zea mays
  unsure (1)..(428): unsure at all n locations
agcttatgaatattcttcatcccaacatggtctattcggcggtgccagagccaacccatgttagtcttagcaattaaacatgtgtcgagctcagctctatcaaaatctactaagtaaagctgaccctccaacacacccttaaatgctattgaatcatcacttcttctaaagacagtgacacctatatcagtaaaaagacagttgtagcccatttgacataattgggaaacagaaagcaagttgtaatctaatgaatcaacaagaaaaacattggaaatggaatggtcaggtgaaatagcaattntacccaaacctttgaccaacccttgatttccatacccaaatgtgatagctcgttgggggtctttggttttctcatatgaggagaacatctttttcttccccgtcatgtggtttgtgcanccgct

SEQ ID NO: 68689 - DNA, 441 bp, Zea mays
  unsure (1)..(441): unsure at all n locations
tattgatgaactaatcgtctggagcaattaatagataagttgatcggctctgctgcaggactaatcttctgaagggagttggttctcgtgcaagactccctgcacagtgacatactttgtgcaggaccaatctcgttgcgatgtctgtntgttgtgtggttcaagatgtaacgatgataggttcattattcaataattatgaggttcattaggtttgttntatgtgtatacacgagtatctaatttgtaagtccgggtgtcgcaacgagattgatcatgcacataatatttgcagggagtcttgcacgcaggggcggacctagctcanaattcgagtgtgggcccaactactgagtgngggcctaaatacaagcttactacctaatggtcttttatatctacagtaattaagataaggtccattggaccanaaatctgagt

SEQ ID NO: 68690 - DNA, 450 bp, Zea mays
  unsure (1)..(450): unsure at all n locations
agcttgttgtcgaggggggagtattgatattgtccaaccaaatagggtgtattttaggaaacaatagttgaggaaagtaatcagttgtggcttatttagcagcaagtatctctcatttntgtaatggtagtattagttaccttattgagcattatactgctccctagtttctatgtttaggaaaaaggatttggaataaaagagagaggggcggcagagagaaaagggacgtcttgttcccacaaactcagcagcaagcgttgccgacgataaacggccggtggttccgccaaccattaccataggtcgccggcgagctctcccagtgccagtgccggtgccgccccagcctactcaatctgggctgcggccgggaacgcgctcttacaaccgagaacacccatatcagggttcatgcagtaaccatctggattatgtggaccctgttta

SEQ ID NO: 68691 - DNA, 482 bp, Zea mays
  unsure (1)..(482): unsure at all n locations
aagaagatagtgatgatgaataatatgattgtgagtgatggagatatggctctatttgtaaagaaattcaacaaattcatgaagatgaagagaggtcaacctataagaggacaaacatcaagaagaaatgctttcaatgatagaaaatgttttgagtgtggggaacccggtcacatcgccatgaattgccccaacaagaagaagaagggcaaagatggagatgataagaagaagaaattctacaacaagaagaaagatgagaaatcctacctagttgaatgagattcagatgatagctcagatgatgatgatgatgacacctcatccaagcttaatgccggaattgccatcaaggaagccccttcacttttctcatcccctcattgtctcatggcanagggagatgctanggtaaaatcatcaccaatttacatgatataaatcatgatgatgatgttgatgatgttgatgatgatgactat

SEQ ID NO: 68692 - DNA, 459 bp, Zea mays
  unsure (1)..(459): unsure at all n locations
agcttgcataacacagtctgcccattgtgcctataatanaatagttgggttgggctaggttgttttctttttggttggatcgctggtggttgcagaggccggaatattataatcgccaacgccagtcgtcaacccaaccgctgggcgggactctgtcaccgccaatcgtattcgtagttggtcgcttgctggacactggcaactagcgccaagcagccgacgaacgaagcggcctgctggctgctgcctggtgggctgcttcactcaagacgccattgcggtgacagtctgacagataggacctgtgcgtgccgattgccaccgcatgttcgccgtcggtccgtcgcgccggccacatgtacgcacgctggcattggcattctcgcgcggaaaagattgggccctgatcgccgtctgccaactaaaacaggcaagcgaccaatcaaccgagcagagcat

SEQ ID NO: 68693 - DNA, 428 bp, Zea mays
  unsure (1)..(428): unsure at all n locations
tctagaggagagcacatttatgactaacaaatgttcattttgagatatacaggatttgtagcgcatgtcaagcacggaagcaagttggagtccatcatgaacacaagaacatcatgacaaccgacaggccgcttgagctactccacatggatctattcgacccaatcgcttatataagtatcagcgggagtaagtactgtcttgttattgtggatgatgatactcgcttcacttgggtgttcttttttcaggaagaatcacaaacccaagagacattaaaagggatcttgagacgggctcaaaatgagttcgaattgagaatcaataagattanaagcgataatgggacggagtncaagaattcacatatagaatgatttctgaggaggaaggattaagcatgangtctcttctcctacacactcaac

SEQ ID NO: 68694 - DNA, 455 bp, Zea mays
agcttctaaagggagagcactattttggactaacaaatgttcattttgagaaagaaaagatttgtagtgcatgccaagtagggaagcacgttggtgttcatcatccacacaagaacatcatgacgaccgacatgctgcttgagctactccacatggacctattcggctcgattgcttacataagcatcggcgggagtaagtattgtcttgtaattgtggatgattattctcgcttcacttgggtgttctttttgcaggaaaaatcacaaacccaagagaccttaaagggattcttgagatgggctcaaaatgagtttggcttaaggatcaaaaagattagaagcgacaatgggacgaagttcaagaactctcaaattgaaggctttcttgaggatgagggcatcaagcatgagttctctttctcctacatgccacaacaaaatggtgtagtggag

SEQ ID NO: 68695 - DNA, 494 bp, Zea mays
  unsure (1)..(494): unsure at all n locations
tactcagcttaccatagagcnaagcactcagggccctatatctactgttatagactctttccacanaaaataaatctaatattaaagtgaatacatgacttatatattagatattaaactgataagaatagatactatacttaattttagctaaagaccgagaaagatatgatttgcatagttggtctctgtctcttttcacatgattggttttcttgctatccgcgctcatgtcctccgcctgtgttggctgcgtccaaaccgctgattggttgcatggacatacagaaactgatctatacgcacaggtacaatgtaggacactttntaccaattgaatgcatgaacggngacgggaggtttctagatcccagctcgtccaggccggcgcgagcttggctttggtgagcgtgccaaccaatcacgggtattattgatgtatctgaacggactgcatgagcgctgactgctgtgtccctctatgctatgttaat

SEQ ID NO: 68696 - DNA, 426 bp, Zea mays
  unsure (1)..(426): unsure at all n locations
agcttggaggtatcgattggttgtctacttggtgtagactcctccttcctttcctccgtcgccttgaatgcgacgggttgagcttctgatgtggtgggatcatcaagctcgttgatcttcctcgagccttcgatcatgcactcaaaacttacaaaattcccgataacttcctcgggggtcattttagtatatctaggatttccacgaattaattgaacttgagtggggttaaggaaaatgagagatcttanaataaccttaaccatttcgtggtcgttccacttcttgctcccgaggttgcgcacttggttcaccaaggtcttgagccggntgtacatgtgttgcggctcttcccctttgcgaagccggaaccgaccgagctcccccttcatcgtttcccgcttggtgttctttgtgagctcatct

SEQ ID NO: 68697 - DNA, 527 bp, Zea mays
  unsure (1)..(527): unsure at all n locations
tatcatggaactatgaaactcagcttctaagggagaacacattntgtgactaacagatgttcattntgagaaagacagggtctgtagcgcatgtcacgcacggaagcaagttggtgttcatcatccacacaagaacatcatgacgacctacaggccactcgagctcctacacatggacctattcggcccgattgcttacataagcatcggcggaagtaagtactgtctagttattatggatgactattctcgcttcattngggtgttctttttgcacgaaaaatctcatacccaagagaccttaaagggtattcttgagacgggctcataatgagttcaacttgaggatcaagaaaataagaagcgacaacggaacggagttcaagaattctcaaatcgaaggcttccttgaagaggagggcatcaataatgagttctcttctccctacacaccacaacanaatgtgtagtggagaggaagaatagaactctattggacatggcangaaccatgcttgatgagtaca

SEQ ID NO: 68698 - DNA, 431 bp, Zea mays
  unsure (1)..(431): unsure at all n locations
agctntgagaaattcataacttccncattttaactcctttttaatctgtttcagttgtaataattttgtccatcacctagtgcctctgtttagccatgaaacttgaattaaaaatgctcatttgaattaatctattctaggtgcttaataacttcagaaattcataacttggtgaacgtagctccgaatttatcggttctcgaacccacgatctcatagcaacgcgtagattattattatgcagtttgatattatgtttgatgtgatgttcattttgccataccatgtttgtctgtattgctacgactagcgtgaggtcacgtgtcatcggaagagcaagttggtgcctggaatctcaagtgccaggcaagttgtgcccttgatcacttcttttacccactcatgttctaattaatcataatgatctgcat

SEQ ID NO: 68699 - DNA, 414 bp, Zea mays
tgtgaaggttcttcatccccacatgtgctaagcggtgatgccacagccagcccatgctagtcttagctattaagcatgcatctagaccagcctcttcttttgcaaaatctactaaataaagtttgccgtctaatacacccttaaaagctagtgaaccatcacttcttctaaagacagacacatctatatttgtaaatagacagttatatcccatattgcataattgactcacagatagcagattatatccaagagactcaactaaaaacacattagatatggagtgctcattagaaattgcaattttacctaaaccttttatcttgccttgattcccatcaccgaatataattgaatcttgggaatccttattcttgacgtaggaggtgaacatcttcttctcccccgtcatat

SEQ ID NO: 68700 - DNA, 430 bp, Zea mays
  unsure (1)..(430): unsure at all n locations
agcttatgaatgagctaaatatacctgactctcagaactttgattgaaacattgcacacataactaatttatatactttgatcaagtccctttcatctagtacaaatgcatatttcttattcttcttgtgccaaggctaagactaatatgctttcaagtgtacttctatgtttagtcttaaattgaaagggaaatggagtattcgacataggcaaggcttccactccaactctgacagtatcatttatcctttgccttactcatcttaattggtatgacctttcactcatatactttaattacaaaaagggaagtggcctttaaagtttcttcgtttttggcgcttaatgccaaaggggagaaaagtttatgcccaaagcanaaggaccgcaccaccacattttcataaaacaaaaactatttcacaaaa

SEQ ID NO: 68701 - DNA, 483 bp, Zea mays
  unsure (1)..(483): unsure at all n locations
tacctttagtcttatgtaactaagtgttataagactntaaaaagaggagaaataattaacaaaagggggaatcataagagaacataagatgtagaannatggtaagtgcattctatgtcatgagcatcacatttattttatgacacactgcaccccatgaaaagtatgatataagttgccttcaaactttgacctaaatatgtgcttttggtatttgagtacaaaattggtattttctgaaatgcacatatttagggggaggaaactatatcataggattcaaaatcttatttatcanatcctatgtaagctntaaatgtgttgtcatcaatcaccaaaaagggggagattgaaagtgcattcatcccttttgtgagntttggtgattnggataacaacacatttaaaggtctaacgagtttgtaagtggtgaacaggaaattcagtatgatgaacatacttgaatagtgtacaatgatcagt

SEQ ID NO: 68702 - DNA, 446 bp, Zea mays
  unsure (1)..(446): unsure at all n locations
agcttcggctttgaaaatagttnttagtgtctccgaagatgtctgaagataagaaggctgctgctgagacgaaactaagcctcgacgaagagaaaaatttggggtttnttatagcgatgtcaaagaccaacacagaaaaaatcaccaaggaaattctggaaggtttgtctgaggatactggtgatagtgatagctatgatgtggacagtggtggggaagactccgaagatcgcccctggcgaccaagtcatgcggttttcggcaaatcagctatcaaagaaaaccatcttgccaatatgaggggaaggtatttccgggatctgtccattgtgagggcggacgaaggggaaaggacttgtccacaccctgaagagaatgaagttgtggtgtaccgaagctctttgaaagctggattgcgattccccttgagcagcttcgtcgtggag

SEQ ID NO: 68703 - DNA, 368 bp, Zea mays
  unsure (1)..(368): unsure at all n locations
tattcatctcagtaccaaatataacctgaaggaagcagaatatcatagcgtgtattctaacactctttttttgaaaaaatataccaacactttaggtattgaggggatgcggtctaaccttntcaaccatgtgctggaaggtgaagtcgagacaacgacacaccccttgctggagccggagtgcggtggaatgggcgtcgtgggtgcggcggcaggcaccagtggggagaggaggagcccgagatggtggggatggccttaccgtgtacgacgcgcgacaggctgctacngtggnggatggcttctcgctctacaacggtgggggagggacctcacatgttnggtgcttcctgcttgtggtcgggtgc

SEQ ID NO: 68704 - DNA, 95 bp, Zea mays
agcttgttgttgtgacgatccccaacgaaacttctttccattctttgtcaactcgtggaagaaggtgcctgccaattggtccctgaaaatccccg

SEQ ID NO: 68705 - DNA, 207 bp, Zea mays
ggatccttaagtgacctgtggcatgcaagcttatgaggggtggtggcaatttttttttatagcaaatgcacccaaacacgcgaagggtgatcggtcaaagggtaagaaggtgcccaaagaagaagcaaagttagggttgtggggtgaccgaattccctttggcgggggaagggctgatttaaacccacattaggtgggcaagtggga

SEQ ID NO: 68706 - DNA, 213 bp, Zea mays
agcttggagtcgctggagcgaccttgtttttctttcccatgggactccttcaaatttcttgttcgcttcaagcgggcccgatacgaattattcctaatagcaccagtatttgggggtttggctggccctaaggggggaaaaccgcttcatttgcagggattctttctagaaaaatccgggcccaatttggtaagcccccggatttttttaatt

SEQ ID NO: 68707 - DNA, 188 bp, Zea mays
agcttgggctaccaccatgcattcatatcgtggaggagaaccctgcgttgaacactccatggtaagttaccaaggaggggaggacaccccgcttcgggacaaccccttccggggggcctgtggttcattaaattttggcgccttacccccacctttggaggccccgggattcctttctttccgggcca

SEQ ID NO: 68708 - DNA, 181 bp, Zea mays
agcttacacaacaataagatttaagctcaaattttgaattctaagtttatagaatgctccccctaaatatgtgcttacattaaaatcttaactttggcccttaaatgccaacatgccacattacttaggcctaatttcgaaagcattgcttacacctttagccacctgtggggaatgcatt

SEQ ID NO: 68709 - DNA, 162 bp, Zea mays
agcttgaaaagtacctatatgcagtccgaaggttggaagcctcttttgaaggattcctctataaaagaataatttcccaaggggagaagaattgaaacatgccagaccttgtttagcccaaaatcaagccggcaaccagggggcctccccaactaccttttc

SEQ ID NO: 68710 - DNA, 135 bp, Zea mays
  unsure (1)..(135): unsure at all n locations
atcacctgcagctgcagctttgcagggaaagttttttatattaacctngggaggagcttgagcgggttaanttccaattcttatttaacgtcaaagctattccaatctttacaaatgtgtatgttatattctaag

SEQ ID NO: 68711 - DNA, 54 bp, Zea mays
  unsure (1)..(54): unsure at all n locations
aagctcgacccccncgcaagccaagcggcgacagtttttttttaatatgccccc

SEQ ID NO: 68712 - DNA, 87 bp, Zea mays
  unsure (1)..(87): unsure at all n locations
agctttgtctttgtacactgtaaaacatttatttctgnnccctttgttctctctcattttttgccatttttntttttaaattttcct

SEQ ID NO: 68713 - DNA, 147 bp, Zea mays
agcttgacttgtatcaatatcacatgtgccatgttatgtttaacacgcatcgccttttacttccaaggggttaagcagccagggatttttaacctggaccagcaagaatgcatggtggctttcacatatcccttcctttcttcattt

SEQ ID NO: 68714 - DNA, 267 bp, Zea mays
  unsure (1)..(267): unsure at all n locations
tcaagctttntaacctcgcatggtgagaaaggacccttttattgttttcttctaaagggcgtacgaggaccaaatcccaattttgcagaggcgcctcccaagttttttcaagaaaaaacccttgtggccaagcaacgcttatacctttcggccaaaaaaattggcattcaaccccgggatccttcccctttttaaatggaaactttttctgggtgggtattttccaaaacccagggggncatcccttttttttncnaattttttttt

SEQ ID NO: 68715 - DNA, 221 bp, Zea mays
agcttctaaagggagaacacattttatttactaaccaatgttcattttgagaaagacagggttttgttaagcgcatgcccaaggcagggaaaagcaaggttgggtgcctcatcattccacaccaagaaaccatcatgaaccgacccgaacagggcccactttgaagctcccttacaccatggggaccttatttcgggcccccgattcggctttaccattaa

SEQ ID NO: 68716 - DNA, 195 bp, Zea mays
agcttcttgtagaagggataactttttgttgctgcttggcacgggcgcactgttcgccagcagacccagccagggcgcggctgccctgctggatgacccttgacggcccgcctgcccaacgggatggggacggggacaacatttaaaatgcttgaaaaggggcaacaatcgccccgtcggccccccgtcaagcgc

SEQ ID NO: 68717 - DNA, 135 bp, Zea mays
agcttaggagtggttagagaatgcaaactctcgtagaatgcggccggattattttttattggagggtattccaggaaacccattggcaaccgttcccttttactaaaattcatttcatttgggttattcggctta

SEQ ID NO: 68718 - DNA, 209 bp, Zea mays
  unsure (1)..(209): unsure at all n locations
agcttgagtcagttcttttgtagagaattattgatgcccaaagggaccggacaaggggttattgaaagcattatttcactggaagaaaaaattagaaagcccggccaaaaggcctaagtttggccttnttagaaaaaaggattggatcccaaaggggagataaaattaatgggtttttaaaatggaattcgcccattaaaatttgtttg

SEQ ID NO: 68719 - DNA, 182 bp, Zea mays
agcttatcaagttagctttccaacgcattcgttcccacgtcatttggagattcctagaagaagttattatcaaaatactgaagactgcgcagaagtcaaacaaccacgcggaattcagctctgcagatcttcccgaagaggctccttcacattaagcacgttgaaaatacttttggtttcgt

SEQ ID NO: 68720 - DNA, 196 bp, Zea mays
  unsure (1)..(196): unsure at all n locations
agcttatggcttttacaattgctgtacttagatgtcgtntattataggttcaagaatttacttcttacatgggaacaaatcttaagtgggttttacgcgagttgaattggtccgttgggaccttttttcaagtaaccccaaacccagncccggtggccaccaaccttcggtnggtttgaataatttttcctcctta

SEQ ID NO: 68721 - DNA, 147 bp, Zea mays
agcttctaaagggagaacatgtgatatgtttaactaacgtgcaattccgaaaaagaataggactcttgttggcagctttgtccaaagccagggtaaaacaagtttgggagggaagcgcaatcaacggccaaagaaatgttggattga

SEQ ID NO: 68722 - DNA, 225 bp, Zea mays
  unsure (1)..(225): unsure at all n locations
ctgccgcatgcaagcttgcggcacattcgctacgccgtgcttttttttttttccccatggacacctggcataccccgaaggggggactttcaagtcccccaggcgggcaaacccggccagccccacctggcttttctttttaaagaacaatcccacccttatttggctggccaattcttaatggccttccttccccttttgtaacctggacaaanaaattacccc

SEQ ID NO: 68723 - DNA, 89 bp, Zea mays
gaccgccttttcccagtctggggaaaaccctgttcgtgtccattctgtcaattaaatgaaattcgggcccaaacggccgaacccccctt

SEQ ID NO: 68724 - DNA, 99 bp, Zea mays
agcttctacaacatacacgcaagggcctaatcgattaaataaaccctggcggtgaaggtaaccaattattccacaaaacaaaccttttttgggcctggt

SEQ ID NO: 68725 - DNA, 268 bp, Zea mays
  unsure (1)..(268): unsure at all n locations
ccgggatccttaatcgaccgaggcatgcnagcttattaagggggttttttttttttttttcagccccacggtcattttggaagaatttactaggaaagaatagtcttatttggacaaaaaaataccttgtaagggtttgtcgaccattatatttattacaacctttatcccacaacgggggaaaaatttaagggtttcttggcgagggaattcttttctcggaaaaggagaggctttttcttttcaaacaattttaaatctaaccgtt

SEQ ID NO: 68726 - DNA, 109 bp, Zea mays
  unsure (1)..(109): unsure at all n locations
agcttactcctccctgggaagggccgttttatcatacaccaagattttngannagcccgggacatttacaagnnnccggcccccaacgagtcaaagggcgagggtccta

SEQ ID NO: 68727 - DNA, 224 bp, Zea mays
agcttcttcttcattctgatgaaaaccttttccctttgaacacttcattcaaaaccgaattgtttccaacctcccgaagaatgcctttggctttcaacccccaataaaatggggatctttcttggaaagattttgccattatcctttttcccacgcccatttggaatccgggaattccgaaccaaaaaaccccttccggcgccctgttattccaattaattacc

SEQ ID NO: 68728 - DNA, 103 bp, Zea mays
agcttcggcctgcggaggccgaaggttgaaatgaattaagctgtcgaagaaatggccagaagaagcctttcgggtggttaatttgggttctttttatttggga

SEQ ID NO: 68729 - DNA, 181 bp, Zea mays
  unsure (1)..(181): unsure at all n locations
agctttgccggaaagcattcccgacaagggctcggggcgctgcgtggtggccgcgaagccccccgagtgtattttcttgcagcagtttcccgaaccttcggccgatggaagattgcaatcgcttggagggatgtgcccgaaggggctgccnaatggttaaagccttccttctttcattcgc

SEQ ID NO: 68730 - DNA, 179 bp, Zea mays
agcttctaagggagattttgtgttatgactaaccgatgtctgttttgagaaaagacagaacctttgttgcagcatgttcagggtagggaaaaacagggtgggaaagccacaacattcatcggccaaggaatgttgatggaccaaccatccaaagaccgcctgggaacctcctttcacat

SEQ ID NO: 68731 - DNA, 222 bp, Zea mays
  unsure (1)..(222): unsure at all n locations
agcttcggaaagccaacactcttcgatttagtgctaacaatcttcggcttccagtccgggtcccgggaggacatcccttaaggcttcttctttcggtcaaccgcccaccggaaagagacacatggctcccttgaattggaataagcccgccgttggaataatttgccattaaattnccccttcaaactcctttgggcttttcttccaggcccttttaggaac

SEQ ID NO: 68732 - DNA, 186 bp, Zea mays
agcttgtacaaagtccactcgaattattttttttttaaacccgaacctcgcttgcaataatgtaccaccccggatagggttcccaaaccaccaaaccaaaggccaaatggaaaactggaaatttcccaaccaaattttaattttggccaagagaagtccatattatttctcaaggtcccacccaat

SEQ ID NO: 68733 - DNA, 106 bp, Zea mays
agcttggcgactggcgcggcgcgccaagttcgtttgtcttactgggtgacgaaaaaggagctctaactcaccgcagccccccctcaggccatttcttccaaccgat

SEQ ID NO: 68734 - DNA, 199 bp, Zea mays
  unsure (1)..(199): unsure at all n locations
cgccttttccagttcggggaaaaaccctgttccgtgccccaggctggccatttaaattggaatacggggccaaaccgccgaaacccccccttggcgtggaccgctcccgtaggccccgttcccgacccaaattttcctcaagggttttttnaacccacgcatttaattccatttcccacatttttccttgggctcactt

SEQ ID NO: 68735 - DNA, 216 bp, Zea mays
  unsure (1)..(216): unsure at all n locations
agcttaagcccttgtgctggtcctgtttttttattaccttaagaaagatgggatctttggaggcatgttgtgtttgaatttgtacgaaccttattaaaataaattatttacccggttcaacttatccacccattccttatttcccatggggcttagcaatgaatattggctttggatggaaatttaaagntgggtttcccaccaaattttttttta

SEQ ID NO: 68736 - DNA, 163 bp, Zea mays
agcttttgaaaataacaatttcttctttctctcggctttgggggtaagtctctttcttccccccgaaagccgcaattaagcctttctttctggattttttcaggtaaaaaaaaagccccggattttttacccattctttgggaaccagaattcaaggcccttt

SEQ ID NO: 68737 - DNA, 72 bp, Zea mays
gaaaaccttggtcgtggccccagcttgccatttaaatgaaaattcgggcccaaccgccggaaaccccccttt

SEQ ID NO: 68738 - DNA, 70 bp, Zea mays
  unsure (1)..(70): unsure at all n locations
agcttcacattggagaagaacgttctgtttttttgcnctccacccaccaagggttattcttggccttcaa

SEQ ID NO: 68739 - DNA, 194 bp, Zea mays
agcttgtagtgaacacttagtttcaatttcaaaactaaatgatgaagtggcttaagtcttaatggctcaaacttaggaacttagcaaaagttgatttttgtaaaaacttaaaaatttgcttaggggaatgcccttacaacggttggttagaaacaccccctccaattttaagggatgggggccttgggcctttc

SEQ ID NO: 68740 - DNA, 173 bp, Zea mays
agctttatcaaatggacgtgaaaagtgctttcctcaatggaccaatcaaggaaaaggtctatgttgagcaacctcccagctttgaagatagtgagtatcctaaccatgtttataaactctctaaggcgctttatgggctcaagcaagcccccaagagcatggtatgaatgcct

SEQ ID NO: 68741 - DNA, 275 bp, Zea mays
  unsure (1)..(275): unsure at all n locations
ctgcagcatgcaagctctagattacaatgtggccgcccgcgttttttttttttataaacncaattggccataaatacccaaaaggtttaatttattacctggggcccaaaaccttcaattcttccattagaaatagggtccttcccaaaagaacttagacccctttcctgggccttcctccccaaaaagaacttttgccttttctttatattaggggtggttaaaaaaacttcccaattttccccttttacttgtttaccttggccccctttctc

SEQ ID NO: 68742 - DNA, 126 bp, Zea mays
agcttctaaagggagagcacattttaggattatcaaatgttcattttgagaaagaccaggatttgtaagcgcaatgctagggcgggggaaagcaaagttgggagcctcattcattcccaccacaag

SEQ ID NO: 68743 - DNA, 161 bp, Zea mays
agcttatccatcggtccagcccaacacacttatatcctccacaacgatgagcccactaatatggaggagcattagagcatctccaagagactctttatttttgactctttatttgacactttatttggcctcctctataaaaatttaacctcctattatat

SEQ ID NO: 68744 - DNA, 179 bp, Zea mays
agcttatgaagattcttcattccaacatgagctttttggcggggccagagccaacccatgttagttcttagccaattaaagcaaggtgtccgagtttcaacctcttattcaaaaatctaaccaagttataggttgaaccctttttaaccacttcccttttaaaggcttattggaaattc

SEQ ID NO: 68745 - DNA, 220 bp, Zea mays
  unsure (1)..(220): unsure at all n locations
agcttatgaagattcttcatttttcatgtgctagncggcggggctagagccaacccatgtttaagtctttagcaaattaaagctaagtgttcgagattcatcttctatacacaaaatctacctaagttaatagcctggaaccccttcttaaacaacttcccttttaaaatgcctacctgtaaatcaatccaacttttctttcctaaaaggaacccagtaa

SEQ ID NO: 68746 - DNA, 209 bp, Zea mays
agcttagcaaaagaaatttctagaatcttgaatattgagctcatgcctaagtctggtaaaagatttgttcattcaaagtggccttggttaaaagatattcggcttaattgatcttttagtatttaattgttaaagaaaatcctcggattatcccccccttttttggttggttgaattccccttaagaaaaaaatgataccccccaaatg

SEQ ID NO: 68747 - DNA, 198 bp, Zea mays
agcttctctgccgaaacgattctttggtgtccttctcgactgcgtcagtgacagaaccctatggacggggtaagagtgcgcgtaagcggcaaggccgaccgagccgaggggattcctaccgccttcccgggataccggatacctcactcaatcgcctttcccgtgaaaaggcaaccttctcgctccaccacaaaacaa

SEQ ID NO: 68748 - DNA, 93 bp, Zea mays
  unsure (1)..(93): unsure at all n locations
agcttgccttcgctttcagtaatatcacctcgcagttccaacgggnagtttgtgnggaacgcgcctcaattgtggaaaaaaatttttttcaac

SEQ ID NO: 68749 - DNA, 101 bp, Zea mays
agcttcggccttccgaggccgaaggattgaaatgaatgtacgctgcccgacaaaatggccccaagggccctttcggaagataaatctggttccttttttat

SEQ ID NO: 68750 - DNA, 87 bp, Zea mays
agctttgagaaatacaacttcatcagctctgttaccaaaagaaggggatttcctttgtttaccgaagcctttggtttaattttttta

SEQ ID NO: 68751 - DNA, 198 bp, Zea mays
  unsure (1)..(198): unsure at all n locations
agcttttaagggagagcacattttgggactaacaaatgttcattttgagaaagacagggatttgttagcgccatgcccaagccaggaaaaagcaaagttggggtctcaattcaatccaacacaaaaaaatatcaatggaacggaacccgaccagggcccaactggnagnctcccttaccaccattgggaatcttattt

SEQ ID NO: 68752 - DNA, 324 bp, Zea mays
  unsure (1)..(324): unsure at all n locations
gaagctctaaacaaggtgttaaatgctgctaaggggttctctctttnnttatttnattnntatnnntaaatagagaataaaagacaattaccaattcttgaccattttaggttttccattagttttcaagattcccttaaananaaattttaagtaaggttggttgcccaaattccaggttaaaaggttgggacaacccctttattttttttaatttttttanaaaattaaggaaggaaaataaaatttttcctttattgggaaaaccaatttttttttgggccagaattttttgggaaaatttccaaccttaaaaaaaatttt

SEQ ID NO: 68753 - DNA, 215 bp, Zea mays
agcttaataggaggcggcgagagttttttttttttttacaagggggcacactttctttatttgaggaagtccttacccctcaaaaaatagaccccttctcaggttgtaaagacgagccctttggccccaacaaagtaaaattctttgtgggaatgcgggttggattttggaccttacgaaaaaaggtttttttcccctcagatggcctccccatt

SEQ ID NO: 68754 - DNA, 179 bp, Zea mays
  unsure (1)..(179): unsure at all n locations
agcttcatgaattggtctattttgctcctagttgagngaataaactctacgtatctatgggtagtttagaaaagaggaataaccctctataaataggagcggagagctaaaccattcaaccacattctctagcttgtaatctttatttccccacttttattttgttaggaaaaatccta

SEQ ID NO: 68755 - DNA, 186 bp, Zea mays
  unsure (1)..(186): unsure at all n locations
agcttcactaggttggntatggcatattttacttggncatgttgggatgaagcaactcaatcggttaaccaagcatgacttagttcgaggcttgaaagatgtgaagtttgaaaagaacaaattgtgtagctcttgtcaagccggttagcaagtggcaaaatactcatccaaataaaagttcaaatg

SEQ ID NO: 68756 - DNA, 183 bp, Zea mays
  unsure (1)..(183): unsure at all n locations
agcttctgctatctctttctgtttctggatggngacatggcacatcctggtagtgtggcccttgtcctcaccacagaataggcaataaattcttctgggctgatccccaaaccttccttcgaagcccctggcgcctctgccccttggagctgggggaaccaggatagnctctgttgcctgccc

SEQ ID NO: 68757 - DNA, 193 bp, Zea mays
  unsure (1)..(193): unsure at all n locations
agcttaactggtgaactggntgctttgaccttatcgggtgctcgagaccgaatcaattgcaatttctttgtagggaagtctcctggaaccctatggggtttagggaaccccacnaacacggctttttcggtttgcggcccaaccttctggattcttttgttttgggtttggattggttgggattcaaccaatt

SEQ ID NO: 68758 - DNA, 88 bp, Zea mays
cctgatagtctacatgcagctgtgcggcgcatttacctaaggatttgactttcccacatgatttctctggggtctgctgagcatagca

SEQ ID NO: 68759 - DNA, 202 bp, Zea mays
agcttttcttgaagttatttcttgactttttccatgtttcccttttcgtttcttgggatctgatgcgaacgacgagggctgaaacctgtggtacaaggtaataagtacattccattcaatggtaacaactccctggtggttttctttcttggggggctggggcattccctttgtggaatgtttttccctttttttgggaaat

SEQ ID NO: 68760 - DNA, 154 bp, Zea mays
agcttttagcatacatggatagatccaattataacagcaacatgaattaatccacatggatatgcccgtttcatagataagctttgataaaacaaagcgttcatggattcctccggaagatgggggcttatggagaaaggtatccacgaaattg

SEQ ID NO: 68761 - DNA, 166 bp, Zea mays
  unsure (1)..(166): unsure at all n locations
cctgagctgcaagctgcccattttagcccaaattttttttgtttgctancggagataaaccgaagcctatggctccctgtggggaagaattttgaaagaacccaagggggttaactggggatcctcaacttattctaggggaaccaaggaaaaagaactcttgctt

SEQ ID NO: 68762 - DNA, 73 bp, Zea mays
agcttatgaagattcttcatcccaacatgggctatttggcggtgccaagagccaaccccatggttaggtcctt

SEQ ID NO: 68763 - DNA, 216 bp, Zea mays
agctttgaaaatgcaacaagatgacaaatattttatgaatgaaattgtttgtcaaggggtttttggaagattaaaattcaaagaaaactttcgaaacatttctttttgaaaggaaaaaaaggttgttttttgcctggcatttcaaaccttgaaaagggattcacctttgccccaaaagccttcaagggccttcaaaaaattggaggaaaaatttta

SEQ ID NO: 68764 - DNA, 148 bp, Zea mays
atcttaatcacctgcggcatgcaagcttgatgtactgcaataatacatgtttttttagacattcaggcacggaggccaagggattacctttggatgtcccaacaaacggcaagaacaaccggtttaaaagcctatagttacactttcc

SEQ ID NO: 68765 - DNA, 187 bp, Zea mays
  unsure (1)..(187): unsure at all n locations
agcttcgataccatttgtggcggaactgcccgaattattccaacttaagtgcctaaagtccccgcctttagagggctagtacccaccacttaaaatgggggaataaaccctgtcaatccctccgggattctaagttccggaaccaagggcccacttgaccaggaattcaaannnacccaccaattct

SEQ ID NO: 68766 - DNA, 229 bp, Zea mays
agcttgtgaaggttcttcatccccacatgtgctaaagcggcgaatgtccacaggccagcccatggctagttctttaagctatttaagccaatgcattctaagacccgggccctctttctttttggcaagaaatccaaccttaaaattaaaggttttggccggtcctaaattaacaccccttttaaaaaggcttaggttggaaacccattcaaccttttcttttctaaaa

SEQ ID NO: 68767 - DNA, 137 bp, Zea mays
  unsure (1)..(137): unsure at all n locations
agcttaccgcatttgaagcacgaacgcttccccttggctttggtcttgcttggggctgtcccttgccgacccctttaaagccgccgncctttgaaatcttttggattgaatgaaggggccattcttcttccattcat

SEQ ID NO: 68768 - DNA, 167 bp, Zea mays
agcttgcaacaatcgagtttgttttgtgagcacttggcaccgttcttatttcaaaacaggtggcccttacctaaaggaaaaactttttatttaccataattatgtggagattaaacctttggccaattttttccttttgaatttttttataattaaggcttggaaaa

SEQ ID NO: 68769 - DNA, 172 bp, Zea mays
  unsure (1)..(172): unsure at all n locations
agcttcggcatggcccactctttcatagttggaaacattttgaaagccaaaaattcctgcactaagtccctagtgccgatgtgctccgcgataaccctaaattcagccagtgcaatttggngttggacccctctggtgttcatattgcaagggggtctgggtctctaccgaa

SEQ ID NO: 68770 - DNA, 239 bp, Zea mays
  unsure (1)..(239): unsure at all n locations
agcttgcttgcctacattgcattggaagtaaagttaactaaaaggaggtaacaaggacccaccaggatttatggcctattcccaccatttcctttcaacggaaatagaaaagccaggttatccttgaccaaacttaaaaaaaaaaataatggtggtttccttggattccccccctttaaaancccatttcaatggtttttcaattaagccttccccttcttccaaaaaacccaaccaaa

SEQ ID NO: 68771 - DNA, 124 bp, Zea mays
agcttcaagaagttgtttttcggatctttcgcataaggcctccaaatttctattctttttcaaatcttaagcttcatttaccaaagggaaccgaaacctcattccccgccaaggggggataatt

SEQ ID NO: 68772 - DNA, 166 bp, Zea mays
agcttctccaaaaccttgaggtgaactgtgaaccttgatcagacacgaatcttctttgtgtacctccatggtaaaacacaccaattcccgaagcccatataataaacttctgcttaagctggaaaaaccttttaataaagttaggtccttccaccagggaaattaa

SEQ ID NO: 68773 - DNA, 179 bp, Zea mays
agcttagagcgacatgtgggtgcaacaaacaaacatgggggcacaacacacctcaacctcataataaaccctaatttggctttgcaaaatcgaagaagtcccgttaccgaaaaagttacctccgtttgtcctcctttgaccccccaaataaaattccaaaataccaaccctttctttta

SEQ ID NO: 68774 - DNA, 109 bp, Zea mays
  unsure (1)..(109): unsure at all n locations
ngcaagcttcttaagggaaaaaactggttggatttcatttgtagtccaattgggcaaagaaaccaacacnnnaggaaaagnaatttaccaaaatagaaaaaatttctta

SEQ ID NO: 68775 - DNA, 207 bp, Zea mays
  unsure (1)..(207): unsure at all n locations
agcttctaaagggagaacacattttatgattaacaaatgttcattttgagaaagacagggatttgttagccgcatttccaaagcccgggaaagcaaagttggggattcccaacattccaccaccaagaaacattcatgaaccgaacccgaccagggcccgctttgtagncttacttcccacattgggaatcctatttcgggcccccg

SEQ ID NO: 68776 - DNA, 205 bp, Zea mays
agcttttaaccatgacaatattgcttttgattaagcctctcctttagctacataactgcttggcaatacctttggccacccaatccgtacaagaccaccttcaaattgtccccatgtacgaatgggtcaacttcttgaaccctggaaggtaaattttctttaatgaagcttaacaaaaggccaaacccaattatccaattcttta

SEQ ID NO: 68777 - DNA, 202 bp, Zea mays
  unsure (1)..(202): unsure at all n locations
agcttatcaagtcagctttccaacgcattcagccccacgtcatttgaagattacctagaagaaaagttatttgttcaaaaaatacctggaagggttgccgccagaaagttcaaaaccattccaccaccgggaaattcaggcttnctggcaggaaatctccccgaaaggaaggccttccctttcaccaatttagncaaccgtt

SEQ ID NO: 68778 - DNA, 212 bp, Zea mays
  unsure (1)..(212): unsure at all n locations
agcttattactatgttgtcattggtaatcggncttttgcatcttcaaattgggcattttaccttagcatagggttggcctttcccaatggtcacccaaaaaattacttttttcacccatggcacatgggtgttgggattcaacataattccttcaccgaccctccaccttttaaaccgcctgaaaaggaatttgggggcaggaaaaaattcc

SEQ ID NO: 68779 - DNA, 137 bp, Zea mays
ggacaaacacgagacagccgaaattcattcttcaaaaaaagatgctctggctagcaagagagactagccgcaagaggagagtagcagaaaggataacaaaacaccactgaaaacaaaaccacaacacgacttccgaa

SEQ ID NO: 68780 - DNA, 194 bp, Zea mays
caaaaacacagcctcggcacaaaagggttctacactttgtaccttgtcattgtgtatttccctcaaatttaaatttaatataaaggaaactactatatattaagaatcttctctacaatgaacattacaactagtaactaagcgtgctcaaactaatgaagacctacagggtcggtccacaaaatatctactct

SEQ ID NO: 68781 - DNA, 394 bp, Zea mays
  unsure (1)..(394): unsure at all n locations
ctcgtacccgcgatcctcatagtcacctgcggcatgcaagcttctcacaactntatattagattggtgtgggaggtcttgagctcctcacaagacacttgaaggtttttgtataataccttcaagggcctaaacttctcattttctttgtgcatgtagtcatcgacctcacccaacattctaacaagatcatcatatgaatatccatcatcatcaagatcatcatcatcatctacatcatttaaattgggtatgatttttaccttagcatcaccttttgccataaaacaatgaggagatgagaaaagtgaaggatcctccttgatagcgattccagcatttagtttggatgaatcatcatcatcatcatcatccgagctagcatctgaatccca

SEQ ID NO: 68782 - DNA, 325 bp, Zea mays
tccgccggtcttagcactcgctcgcttgaaacttctttttgtctgggaaccattcattttaggatcggtcaatgtttattgagaaggaaccacttctatttgaaaaatggagagggtcttctgatttctcatagaagctttgagctctcaactctgtttatgaaacattgattgattgataacaatggctcagataaggaatctatatgtgtgactcttgtagcatgaacaggcatgtgattacccagaatatagaatggggtgattcttcctcacttatgaaaacaccaccacatgagaattgtctatgatagcttaaattgtc

SEQ ID NO: 68783 - DNA, 474 bp, Zea mays
  unsure (1)..(474): unsure at all n locations
gcttactggctggctgctggcggcggcggcgtaagcgtatgcgtatgccgaggagcanggctcactgccgtatgagacggaggccttggctgcggaccgatgggggcaaggtgtggcgccgcggcggcggcaagctcgccggcgtcttcctcatcggaggaggcatcgtaggcaaccagcgacatcgggccagttcggctgtggcggatgcttcgtgggttgggttctttcggctaaatttaggggtgtttggtttctagagacaaattnttagtccctatattntattcattntagttctaaaattactaaatatagaaacctaaaatttattttattttctatatgtgacatattataaactaaaataaaataaaataaatggattaaacattagtccctaaaaaccaaacaccttcttagacgtgggctgtgagttgttggccgacaaagaagctcaatataagctatctt

SEQ ID NO: 68784 - DNA, 324 bp, Zea mays
tttctatatgctaagtaataaagattaggcgtgtgtttaaagatattccgaagacgaaagccccaacaatgggtaaaatactatttttaagcgcaataaatctaatagatgttgcattcaaactaagcagtattaaattaaaatatttgagtcgaattaatcaatttaatattataatttaataaatatttataataagtgtaggttacaactataatctagattaactagattgtctagctaattaacattgattaatcacacacataattatttatttatttatttaaaacatgtggtgtgaataaagcaatgttattacta

SEQ ID NO: 68785 - DNA, 352 bp, Zea mays
atcgatgctcattttgtccttgccattggccttttttaccataacagtgttagccaaccattctgggtacttcacttctctgataactcctgcactgaggagtcttttgacttcgttgcgagcaccttcgggcttatcatctgacattttccgaagcctttgctttctgggtctgaaggatggatcgacattgagcgagtgctcaataacatccctattaactccgcatagatcattggctgaccatgcaaaaacatctttgttattgaacaaaaaccttatcaaggttgtttcctgctcttcagatagttgagagcctaacagcaccttctgctctgctatgtcctcacat

SEQ ID NO: 68786 - DNA, 378 bp, Zea mays
gcagcttcgatccttaccttgaactcttgtatcatgacctcgaacaatctgggaatcagctttaagtatggcccttcttattcccattgcttttaacttccgaagacctaaaagcaagggttcgtactctgcaatgttatttgtgcaactaaagtcaagctttgccgcataacaagttttaactttggaaggtgaaaccaacacaacagccgctcctgcttcgaaggttccccaagatccatcgcaaaacactgtgcatgcttcggcatctttattttgtttttcctcctgagcccctggtgtgcagtcagcaatgaaatctgctaatgcctgagactgaatcgaagatctatgaacatattctatatagaattcgtt

SEQ ID NO: 68787 - DNA, 224 bp, Zea mays
gtgtcgagttcagctctatcaaaatctaccaagtatagctgaccctctaacactcccttaaatgctattgaatcatcacttcttctaaagacagtgacacctacatcaagtaaaagacaggtggagcccatttgacataattgagatacggaaagcaaattgtaatctaaagagtctacaagaaaaaattggcaatggaatggtcaggtgatataacatattta

SEQ ID NO: 68788 - DNA, 333 bp, Zea mays
ccacatgttcttagcggcgatgccacagccagcccatgcaagtcttaaccattaagcatgcatctagaccggcctcttcttttgcaaaatcaactaagataagcttgccgtctagtacacccttaaaagctagtgaaccatcacatcttctaaagacagacacatctacatttgtaaataagcagtcatatcccatattacataattgactaacagatagtaaattatatccaagactctccactagaaacacattagagatagaatgctcattggaaatggcaattttacctagcccttttaccttgccttgattcccatcaccgaatatta

SEQ ID NO: 68789 - DNA, 395 bp, Zea mays
  unsure (1)..(395): unsure at all n locations
gcttcggatatcccatactcttagctatcttccagcaaacagatatttctttgttgtccgggagacagtatatgaaatcatcttcgttagtgccattgaacactaaagccccctttggatatatttagtttctaggcatagcgtctggcttccaggatttcctattcggataattttttccctgaagcatgtcgaanaatgtaatcaacatcttcgactgaagcttcggggcaggggattttgctttttctaccataccctgccctgctgccatgctggtatctgaagtttggtgatcagctttgtcttcagccccgacagccttcgtctcaataagcactacgggcccagctttatcttcggcctggactttggcaacttcagcaattttcaaa

SEQ ID NO: 68790 - DNA, 375 bp, Zea mays
  unsure (1)..(375): unsure at all n locations
gcttgtgaagactcttcattccaacgtgttgctttcggcgatgtcagagccaacccatgttagtcttagcaattaagcaagtgtcgagttcagctctatcaaaatcaactaagtatagctgaccctctaacactcccttaaatgctactgaatcatcacttcttctaaagacagtaacacctatatccataaaaagacaattgtagcccattttgcataattgtgaaactgaaagcaagttgtaatctaaagaatctacaagaaaaacattggaaatagaatgtgcaggtgatatatgcaatttaccaagcccttngaccaaaccttgatttccatcccctaatgggaatagctcttgggtatcatgggttttct

SEQ ID NO: 68791 - DNA, 317 bp, Zea mays
gcttcgtcatctgaaaagaatttttcctgtagataagagaagatctcagatctccaatcttcgctattaacacgggatatattgaggactgccctttcaagaaaatccaccgaaggtgcttttattgtttcgaagaacacatcccaaagtgagggcggcccctgtgctgctgacttggcttacaaataaacatgctcattttgtcctcgagggatatttttgacagaaaatacttcgaaagaagcttcaactcttcgaaccatatacagatatatttcaagcttcggatccttatacttgcaactcttgtgaatatg

SEQ ID NO: 68792 - DNA, 329 bp, Zea mays
agcttggtgccgatggattaacataaattcttgaaatcttggctgtcaaactgcttgctgttgtcaactgttagctcggacggtactccgaagcggcaaacgatgttttgccagaagaatttttgggcagtctttgatgttattgtagaaacagccctcgcttcgatccatttggtgaagtattcgacggctacgaaggcgaacttgaggttcccctgagcggtgggcaggggcccgacaatgtccaagccccagcgctggagaggccatgtatgggcaatcagctttgtatactgcgaggggctgcctgaccgaggagaaaacttctg

SEQ ID NO: 68793 - DNA, 366 bp, Zea mays
agctttatcaaatggacgtgaagagtgccttcctcaatggaccaatcaaagaagaggtctatgttgagcaacctcccggctttgaagatagtgagtaccctaaccatgtttacaaactctctaaggcactctatgggctcaagcaagccccaagagcatggtatgaatgccttagagattttcttatcactaatgggttcaaagtcggaaaagccgatcctactttatttactaaaactcttgagaatgacttgtttgatgccaaatttatgttgatgatattatatttgggtctactaacgagtctacatgtgaagaatttagtaggatcatgacacacaaattcgagatgtctatgatgggaga

SEQ ID NO: 68794 - DNA, 335 bp, Zea mays
ccactccgacttccagcctgctgcccatttgcttcggtagctgattacaggaaactttgtggttttccgataagcaaaattatagcaaccaaaattgtcatgcaatccatcctttctagctttcgtttgatagtgcagctcgtgaactcgacaaaagctgtccgcaaacggctccaccgcttggcttcggagtgcccagatataaacactaagcctaacgatagcgttaggagtcaactgatgaaagtagataccaaatctcttcagtacctctgcaataatcccatgtagggggaatcttaatccagcctttagaaagctcttgaaaatgacta

SEQ ID NO: 68795 - DNA, 302 bp, Zea mays
cacaagcaaacaaacatatacatatgcataataacattacaccatactagataaaacgttataaaagcgaacactataaaatagagagcgcctctatgtttatgcgacgataagaaccaccatagtcgaaactacggccgaaggggtagcgcgtttacgtaaacaaggactaattaaaacatccaactcaacatagatatattaattgatattaatgaaatggaaattaatactactacttagatgtgactaacttactatattaataggacgatagataagcaagtaacctaatgaatatg

SEQ ID NO: 68796 - DNA, 325 bp, Zea mays
accttattattgttattctcatgggtttatttaaggcacaacacataaaactccaacaaatgcattttttttctttattttaaagaaaatgttctatttaatcactctcaattacataggtgctcttttttatgatgcaattatggcacatacaatagggaaatcactatttattccttgtaaacaattttgagtattacagcgagggccctatgccccgagtgatagccgcaagtgccgctgtggacttcgcgcaagaattggatgccttcagtctcggagacacatttgagaatgggttgactgatccctttcttgtataact

SEQ ID NO: 68797 - DNA, 331 bp, Zea mays
  unsure (1)..(331): unsure at all n locations
gcttctttcgaaaggtgttctgtcaagaatattcttcgaggagaaaatgaacacgctgatctactatccaagtcagcggcacaggggctgccattatcttcggaagtattctttgaaacaataaaagcaccttctgttgaccttcttgaaagagcagngctcaatatatctcctgtctatagcgaagattggagaactgagatcatgtcctttgttcacggtaatttcctttcagatgacgaagcttatcataagagaatagcggcgagagcccgtccatatgtaataatagaaggggagttatacaagcatggagtctgttctccattac

SEQ ID NO: 68798 - DNA, 433 bp, Zea mays
  unsure (1)..(433): unsure at all n locations
agcttctaaagggagaacatgtgggaggtttgtctaacgtgcaattcgaaaaagatagaccttgtgcagcttgtcaaatatgtaaacaagtgggaggagcgcatcacagcaagaatgtgatgaccacttcaagacctctggagctgctgcatatggacctcttcggacccgtcgcctatctaagcatatgaggaagtaagtatgggttatgtattgttgatgacttttccgcttcacttgggtgttctttttgcaggataagtctgaaacccaaggaaccctcaagcgcttcctcaggagagctcacaatgagtttgagctcaaggtgaagaagataaggagcgacaacgggtccgagttcaagaaccttcaagtggaggagttccttgaggaggaanggatcaagcacgagttctccgctccctcacaccac

SEQ ID NO: 68799 - DNA, 277 bp, Zea mays
  unsure (1)..(277): unsure at all n locations
accagcccatgcaagtcttaaccattaaacatgcatctagactggcctactcttttgcaaaaatcactaaataaaggttgccgtctaatacacnccttaaagctagtgaaccatcacttcttctaaaacaagacacatctacatttgtaaattaaccattatatcccatctgacataactgactgacagatagcaaattatatccaagactcttcactaagaaaaccattgatatagaatgctcattagaaattgcagatttaccctaccctttacc

SEQ ID NO: 68800 - DNA, 321 bp, Zea mays
  unsure (1)..(321): unsure at all n locations
acttattgacacaagcctacctatccaaatacctgtggaagntgtagttcgtgtgccgctggtcgttctcgtagtttatgtccgcctccttagcccattcatcaatataatctcggtggtgggtctcgaagtccgtgactttcttctgcctctatttgtcgaacttgcaaaaggtacacacttgttttaataattcattgcatatctgaaataatagttagactatacaaatgggcaaagtcactcacttgtggagttatattgaagtggagaagggctccaccgaaaactcctgacgcaaaccaaattgtcgagccactc

SEQ ID NO: 68801 - DNA, 349 bp, Zea mays
  unsure (1)..(349): unsure at all n locations
cttaccttgattcccaataaaccagctttcccttgagagtcttttctttaatcgggtaagtcttgctgagtaattgcgtactcanggttttattccctgttggttttcaggttattagtttgttctgttgtggatggtgctaagtgccggtgggctcggccttcttatataagtatatcccatctttagcttctttattgaggactgtcacttaagctagcatgtactttaaaacttataaatgttttatacattcaaatnggaatattcttgaatcaaattctcttataatcactccgatgatatattgtaatatgggtataacttgtaaatgttgaaccttgtatca

SEQ ID NO: 68802 - DNA, 346 bp, Zea mays
  unsure (1)..(346): unsure at all n locations
cttatgtgccacatatcacagaaagcttatggatggttatttatatgggattntccacaggttaatgccaaaaaggcactttcctctaccttgttatttgaaaaatgtcaaacagcagaattcataattttcctatgttctttataacaaaagattaactatcccaaggggtggggtgttttcactttggggttaattntgtaggggttttctaaggtttccttgttttcttaaaataaaaggtatcctatttattttatactaaaccagggtataatcacattttctagtaaactacactgaataagtataccaataaaaatatgggggctccctggtctttatt

SEQ ID NO: 68803 - DNA, 322 bp, Zea mays
  unsure (1)..(322): unsure at all n locations
tgcaagcttgtgggtaccttcccctgatttatgtttccctcgtaacacttgatatctgtgggatccttgtcaccatgttatcttcatttcgaacctaatattatgattatggcgttttccttccatatgagatgatatcttgacgttcggaaatgtgagttgggataacaatggcgacaatctctgttttcagatggcagctatgcagcgtcgcgggcagaatgagcaaacttccccgccacctcctccagcttccacagtgcatgagctgatggcccncacaatgagattctgcgacagctcttgcagcgccagccccacc

SEQ ID NO: 68804 - DNA, 318 bp, Zea mays
  unsure (1)..(318): unsure at all n locations
agcttcatgagtgggagcttctgtcatcatgtataagcaagcttagccgaagctgtttcttcctgcaggaccttcggcgacgaagcatggtcccaacaatgaggatttaaagtaaaccctaattcgaaatttgatttgaaaatggaaaaggaagagagagatattataaaatataaaacacaatttacaaaaatatgaacccaaccatactggtatgattaaagtttacctttaatttgggtactaaattcacattcatatttgaagttcanattgggaatttaaaataaaatgaagaggagaaccagaanaagaaaa

SEQ ID NO: 68805 - DNA, 363 bp, Zea mays
  unsure (1)..(363): unsure at all n locations
cccaactcttggtgggtcctacaaggttagtcacaaaagactttggaacctagatgcaagtgttgtctctcttgcacttaggacccaaacttcaagcaactactttaccatttctgcataaaagaacaaatgaagcatcatgtgtttgataaagcctggttggtccatttgatgccttcctatgcacatgagaagcaacatgatggagcctangtctatttctatcatgagcatatgaagagctagatgcanacatggcctgagaattaaatgcagcatcatgacgtataggtaaaacaacatgcttatagcacctatcatgatgagcaacactagagacattcttaacatgagcataaaaat

SEQ ID NO: 68806 - DNA, 468 bp, Zea mays
  unsure (1)..(468): unsure at all n locations
ttcctggatgagaagtggtcacccaagttttattgatgaagcaccagaagaccaatcaaggaaggaatccatgtgggagttcgcaagaggaaggtttgcgtgtcggcatcaatgcttcttcaataagctagctgccaagcgaaacctataagcctgaagatgattctttgagtagccagaatcagcgtttgcaatcagcaaccagatgctcctcanagaccagattttgttgaagttccatctcctcgaagagttgcaaagtgaagatatgtagctgaagtaaagctatacccataacccttctaagccgaatctcgaggacgagattccttttaagtggggtagatntgtagcatcccananattcaaattctgaaattntctcanactcgccctatattcanaatgaatntcanatttcatttcanaatggtgtttgcgagttgatatcaacaaataaattatagt

SEQ ID NO: 68807 - DNA, 328 bp, Zea mays
  unsure (1)..(328): unsure at all n locations
gcttaggggttatccttcattacctttctttctgaggagtntaacctctttaatcagggtagttagtagttggccatgcctctcatttttcttaccctcagtccaaaaggatttctatttttcttctatttatttagntttgagcagtatgcttatttaaattaaaactctaaaaagacttgcagtactcagggtgtttgttatttttcctaagtagttcatgatatttaggacctagcaaaattggggtggaccaaattggcttgataaaattcaagttatgaatttttgcaagttctgtattcatttaaaagaataaaacttaaaa

SEQ ID NO: 68808 - DNA, 241 bp, Zea mays
acgcttcggctgcaaaacactggtgacgctacttacaagttaaggcactattaatctatatttgtgatcaagatttgttgttaaatatgcacaactttctgttgcaggctgatctacatgcctcaaccaaaagatctgggcgaagagactttccctgacacttgtcaagaatgacgagacaagctcaaaacaaatgctccttataataaaaaaaacaacttttaaggctgcaactaaacgg

SEQ ID NO: 68809 - DNA, 363 bp, Zea mays
agcttggctcgaagcagccaatagtctgctcagtctgggtacaccggactgtccggtggtgcaccggacagtgtctggtgcgccacgctggcatctgcgaactggctgctctcgggacttcaacggcggcgtacgactataattcaccggactgtccggtgtgcaccagactgtccagtgagccaactgtcggcccggccaacagtcggccgcgtaatccgcgcgcgacgtgtggcagagccaacggtcagaatggggcaccggactgtccgggtgcaccaacgactctgaatctccaatggtcggcttcgccaaagaatgaaagaaatccgcaccagacagtgtcctgtggtgcaccggact

SEQ ID NO: 68810 - DNA, 361 bp, Zea mays
  unsure (1)..(361): unsure at all n locations
gttcaaagctcaagaaatggaagtgagttcaccggaggtgggcgccaatgttggggacttgttctcaaatgctattaatcaagaacaaggcaacacacaatgttaaatattaaagcccttcgtcctttcaaacattatttccccttgggtataatgaatttcggatgaaggttatgaaggtcataccttcctaatcataataaaagataagaaaagatttatgtataaaatactgaaaataacataactactttaaacatcattattatattatttctatgcgctgttcttatataaatgatgacaaactacaaatgtaccttcngcctgaatgaaataagggtacaagcgtgatgccaat

SEQ ID NO: 68811 - DNA, 334 bp, Zea mays
tggtcattctgagaaagacaggatttgttgcgcatgtcaagcacgaaagccagttggagcccatcatccacacaagaacatcatgacgaccgacaggccgcttgagctactccacatggatctattcggcccgattgcttacataagcatcggcgggagtaagtattgccttggtattgtggatgattattctcgcttctcttgggtattctttttacaggaaaaatctcaaacccaagagaccttataaggattcttgagacgggcttcaaatgagttcggcttaagaatcaagaatataagaagcgacaacggaacggagttcaagaactct

SEQ ID NO: 68812 - DNA, 432 bp, Zea mays
  unsure (1)..(432): unsure at all n locations
atccttatagtcacctgcggcatgcaagcttataactaagtcatgacatgctatttcttagatagggtagcatctctctacaattntgcttgatgattgatttaagtgatcttgtgctcgcaaactaaaattcctgtgtgtacagtttttgttgtgcgattaatctagtaaagtaaagtttgttttatatagacatgtgctatataaaaattatagttagcttagatgtatagctcttcctaaaattttatgagctaaggatcaatggtttagaagttatgtttctcacaagtccagtacctgaacctgtccaaattctgtgcagatttcaaagattgcattgtttgcttaagttaagtttacaatcacgtctttgtgatcataagaaagttgcagataccttatttatcttggtttgagtaaaatttcatg

SEQ ID NO: 68813 - DNA, 317 bp, Zea mays
  unsure (1)..(317): unsure at all n locations
agcttatttgggaatntcccctttctttctactcttccaatataatttcttcttcttccctcgctcaatcaaagagcaacttacagtagcgaggtgtagaaattcaattatgtgtcggtcacccacactttgattgtcctttgaaaatgtctcattaaaatgacacaagcgttggttttatgtgagaaatcacgagcctatgcttctagagttcgtaggggaaaggctggtccccaaaacaaaatgaatgggtgatatagccctagaattcattaaacaacactacacaaaagatattgcaagacggtagcaaaaca

SEQ ID NO: 68814 - DNA, 324 bp, Zea mays
ccgcgacctctaagcgacccgcagcatgcaaactctcactgcacgccgaggatatgcttatctctgatgtcacggcacacaaagattgccccagtaacgaacatttgtagctccaagatctataatcattatgtctctgggcccacatatcggggttcagaacctttgtgcatgccccccttcagctataaaaggggaggcatgcggcgttacaagacaaatccaatcttaagctcactcagacgctcacaagttcatacaagccttcaagcaatacatcacacagtggagtagggtgttacgctcccgcggcccgaaccactc

SEQ ID NO: 68815 - DNA, 389 bp, Zea mays
agctctacattgcacgaatgctgtttaatgagttcgtttcacaaatctccaaaggattgtctgctcctgctgcggcctttttacggtgtcctgcaaggggcggcctgttgaactggcgttcaacaatctggggcggcggcgtggtgtctccgcgtcttctcgtggagggctcgtggcttctattggcggcgatagcacacaccgtatcgccctaacggaagagcggcgtgcgggatcacaacccggcgacactccccaacggatgtctgcggcgggcatatatatgaaccctcgcctgttgattgagcgcgcacacactacggtagggggcgcttttcaaatttataggtgcaccgccgaatggccatcccacggactatatattctgt

SEQ ID NO: 68816 - DNA, 367 bp, Zea mays
  unsure (1)..(367): unsure at all n locations
agcttgaagccatggtaagtagcataggctagtaatatatgaattgactcaagcctagctacgggtacataagtttcactaaaatccaaaccttcgacttgtgaatagcccttggccacaagtcgtgctttgttccttatcaccacaccatgctcatcttgcttgttgcggaatacccactnggtacctacaacattttggttaggacgtggaactaaatgccatacctcattcctcatgaagttgttgagttcctcttgcattgccaacacccaatccgaatctcttaatgcgtcttccaccctgtatggctcaatagaagacacaaaagagtaatgctcacaaaaatgtgcgactcgatattgag

SEQ ID NO: 68817 - DNA, 301 bp, Zea mays
ataccgcgattcggcgcctttgttcttaagcggaagatgtggcggtgcggatcttctgtctatcgcgcccaatacagagggccagcgcttctgtgatattctcgggtccaatgaccgcttaaccgggttttcgagttgaaccgtctgccggatggcgggtatcccggccaagacgatgcggatcgtcgcgggaagaaaccggtggttgagactggagacgaccccgcacctggcggcgccccgtcgtctaaaataggaactacgctttctatgggaggatggggggttctgatggttttgc

SEQ ID NO: 68818 - DNA, 465 bp, Zea mays
  unsure (1)..(465): unsure at all n locations
gcttgataattagtaactagctatgttctgtgtgatgtattatnttacatggggcataaaatacttgtagtagtttattgcctaatactcttgcctgngagctggagacgttatagtgaccgcgagtgggaatatgttattaggcatcattgctttagactgttgtttctttactgtatttgtcttgtagctacagatgttgatgaaagcattgtctttattgtgtaggacaagcctgagcctccaccggaaggccgccttcctgatgccacccaaggtacaattgtaaaattcctgtgaagcttctgactcgatgttctgtgagacatgagaaanatgttttgtaataatatgttgttggtgttacatctcgtcatttagcatttagcatctcagtggtagcagtacctaagtcttgttctgcagatttgcatgcttctgggtgtgggatctttctctgactat

SEQ ID NO: 68819 - DNA, 389 bp, Zea mays
  unsure (1)..(389): unsure at all n locations
agctctacctattcccaggtgtgccttctatgttattgctatggncatggcactcggcaaagtacctctttgccgaatattacactcgacaaagtgatcagaataccccttttttatttgttttattattccgtccaaacaaacaaaacatatatcacataatcatcacgtatacatcacaaagttcatagaatcatcacatgcataatagagaccacatatctcacaaaaacaacaaatctcacaagtttttcacaaacatgtctatgttcataccaagtttcactaatataagtattaccaactctcaaacataagtgtgtcatagacataagttcagaccaagtttatcaaacatgtctcaaaatcaccactaagagaagatcatc

SEQ ID NO: 68820 - DNA, 498 bp, Zea mays
  unsure (1)..(498): unsure at all n locations
catgcaagctttggccccacctgtaagctcgtattctcccttgatgtgggcccggtggccactgtcggtaccctgaaatatgggtaccccttactaaagtacgaaggcacggagtccatgtggctatctctagtcgcgtggcaaacagcgtccgaccccaccacgcggacgacttcggtgccgccacgtggccagagaagacgatatcctccaagatatcggtagtgggtctggacccccatgcgaaagtgccggacccctgtatatacggaccggaccttcgggaaaggtcaaggacctccacaagcacgaaccggaccccttggatgggtcctggaaccctttgtgtggaatccnggccactcacaacatggtcccgggattctgggacaaagaataccctgaccttgttgatggccagcgggatgtcggagccacacgtgtctgggcatgtgtgtacgctttactcccgctagcgggaccgatgctgcacgggcc

SEQ ID NO: 68821 - DNA, 427 bp, Zea mays
  unsure (1)..(427): unsure at all n locations
gcttctccctcctctggctctcggggctttttgtctgtaagaagattgntgcatgcacgaagactgtgagctgtgctaactgctctaagaattatggccttgtcatcggtggcattatgattgtggattgtcctaatatgcctgggatggattcttcctccgaagcccctagtcatctcagaatacctatatgcttcctctcttttttagcggaaatcattatcaactcgaatgtactcatgcatcttctagagaagtttctccaagatctgtggtggtttccttgcaaaatattgagctatgggtcctggtcaaagccccttgatcatgggctcaatgacaatctcattgggcactgtaagcgcttgagctctcaagcgcaagaaccttctgacgtacgcctgtaagtactcatggtcctgcgtgc

SEQ ID NO: 68822 - DNA, 234 bp, Zea mays
  unsure (1)..(234): unsure at all n locations
tcttgatccgagacccctcttttctgttaggcgcaatcatgctcgctggagttctgaaccacgtcggcgcacgtataccgggtaagtctctgcgccattattcgattcactgcacacatatcgtttacgtcattcctggagctcatcgtgccgnttaattgaactacatcgttgtggataaaccggagctctctccgccgacgagttcacccgcctgcgcgcgtggagcaattc

SEQ ID NO: 68823 - DNA, 379 bp, Zea mays
  unsure (1)..(379): unsure at all n locations
tcaaatgctactcatgctcttgctcattctaagaatataaaagaatatcatcaatgaacaccactacgaacttgtcgaggtagtccatgaatacattgttcattaagtacatgaagtaagctggcgcattcgtcaaaccgaatgacatgaccgtgaaatcatacaagccatacttggngatgaatgaagtcttcggtatacccgaaggtcggatactgagctgatggtaacctaacctcagatctatctttgagaaaacactggctcctctcaactgatcgaataaatcttcaattctgggtagggagacttgttcttaataatgacttcaatgaaagcttgataagcaacgcacatnctcttcatgccatccttattc

SEQ ID NO: 68824 - DNA, 377 bp, Zea mays
  unsure (1)..(377): unsure at all n locations
gcttctaaagggagagcacattttgggacttacaaatgttcattttgagaaagacaggatttatagcgcatgtcaagcagggaagcaagttggtgttcatcatccacacaagaacgtcatgacgaccgataggccgcttgagctactccacatggacctattcggcccgatagcttacataagcatcggcgggagtaagtactgtctagttattgtggatgattattctcgcttcatttgggtgttctttntgcaggaaaaatctcaaacccaagagaccataaaaggattcttgagacgggctcaaaatgagtttggcttaaggatcaaaaagattagaagcgacaacgagatggagttcaagaactctcaaattg

SEQ ID NO: 68825 - DNA, 322 bp, Zea mays
  unsure (1)..(322): unsure at all n locations
tctacctggttttttgttttatattaaatccggattatgatcatgttccattattattggtggnttaattattggtcatgataagattattgtgttaaatggaacatgtagaaccacccgggaaaacagtgctaccataagagtagaatgtgatgcctttggctaaataattatgaaagctaatgtgagttaatcctttccttaaaggggcaagcgaggtatatgagcaccggtgtagggaggtcctcgggtcggactatctttntatcttttcggatgagagattcctacatcgcctttagcctgaaatccgtagcgggtc

SEQ ID NO: 68826 - DNA, 379 bp, Zea mays
  unsure (1)..(379): unsure at all n locations
agcttcttgaggaaaagactgctggattctttgttgtctttgcaaagaccaatacagaaaagattcaaaagaaattctcgaaggcttatctgaagataccgatgacagcgatagttatgatgcggaaagtgggggcgaagactccgaagatcggccctatcgaccaagtcatgcagtcttctggaaattgactatcagacagagtcatcttgataacatgagaggaaggtattttcgagacatatctattgtgagggctgacaacggagacaagacagntcctgttcctgaagagaatgaagatcgaatctaccgtagcttcttcaatgctgggcttcgttccccttaacagatttgtggtgaagttctaaaatatatg

SEQ ID NO: 68827 - DNA, 452 bp, Zea mays
  unsure (1)..(452): unsure at all n locations
agcttgtagagataagctattattacatggctcgcattcggctggtatgctctgtntcttgttctctgtgccatccattttacaccatttttcctagacaataattatgaagtgataaataagttggtctaaacatttatacatggaaatgtaggtgtgggctagaatatggtctgtgttggcccagcactttattgctgctggaagccacaatgaggagaaagttgcaatgtatgccattgattcactaagacagcttggtatgaagtacttggagcgtgctgaattaaacaatttcacatttcagagtgacatactgaaacactttgtcattntaatgaggaatacccacaactcanaaatccgaggtttaattgttgattgcattgntcaagtatgtccttgtgcatgaactttgacacatatatgaatctatgaaatggaatgatctg

SEQ ID NO: 68828 - DNA, 328 bp, Zea mays
tcaccaaaaatttgaagcccgggacatacaatctggccaacgatcaaggcgaggtctacaacaacgcttggaacatccaatagctacgtcgcttttacccttaaaatgtgtcaagtcgtttatgtacctcgctttctttacataaataaagtctaaccatcaaggaaggatcagcctttcctcggcaaagcccgacccttcctctggggctagaagggggggaaccccctctgcgtcaaaattttcctcggaaaagtcttttgccagaatgtctttcacgcttttcgactgcttcgataatagaatcctaaagacgagcgagagaaac

SEQ ID NO: 68829 - DNA, 453 bp, Zea mays
  unsure (1)..(453): unsure at all n locations
agcttgtgaaggttcttcatccccacatgtgctaagcggcgatgccacagccagcccatgctagtcttagctattaagcatgcatctagaccggcctcttcttttgcaaaatcaactaaataaagtttgccgtctaatacacccttaaatgctagtgaaccatcacttcttctaaagacagacacatctacatttgtaaatagacagttatatcccatatgacataattgactaacagatagcaaattatatccgagactctccactaaaaatacattagagatagaatgctcattagaaattgcaattntacctaacccttttaccttgccttgattcccatcaccgaatataatngaatcttgggaatccttattcttgacgtaggaagtgaacatcnttcttctccccgtcatatggtttgtgcattcgctgtcgataatccagcttgaa

SEQ ID NO: 68830 - DNA, 290 bp, Zea mays
tgtgtctcgctagcccaagagtattatatatgttttgtcgtatccgaactggagggaaacaagaaagaaaatatatatctactatcatcttcttacccaagctccctctctacctgcttgctccttcccatcagtaggtgttgctaacatattggtatcaaaggtcatggatccccggatctggagccgatccactacacccgtcgtgccaagcatctcggtgccatggatccacaggttaagctcgccttggaagctcaaaaactcgatcgttcctcaccgagctcgac

SEQ ID NO: 68831 - DNA, 363 bp, Zea mays
atccttaagtcacctgcggcatgcagcttctctttgttcatgtaaggatgtgcattttagtcaacaaatatcctcctcttactagaattgtcttcatcactagaggatgcatatttagtggaagatatagatttaaccttcttccttttgccgtcttttgccatgatgcacttgtgggcgatgttggggaagataagtcccttgttgacagcgatgttggcagcgtcctcctcagaggaggagtcggcggagctctcttcggagtaccactcacggcaaacatgggcatcgccgcccttcttcttgaagacctcttatttttctttcttctccacttcttggcggcgcccctgtgactatcac

SEQ ID NO: 68832 - DNA, 462 bp, Zea mays
  unsure (1)..(462): unsure at all n locations
accggatcttaagcgactgagctgcagctgaactgagtcaaagatttttantacaaaaaacctttaaagagcctcaagacaaatgtctagacttcagcaactggtgcgtgcaacggctgaagcaaatcttcaactcaattggaaccagttctaaaaaatttgaaccttcagctgaagacctgccaggcacctttgaacatattgagggcaaagttgatgcgcttgacgaagttatagctgggcacgatgacttatgtgccttgctagcttctcgcggcacagctggtgctttcatcaaaactgtgtgcacgcatgggaaaattgtaaatatgccaaacttcaacctatcaccagcggatttaactgacttttctatcctggcccgaagcattggaaataagtttataacacaaatctggacaaaggatgggaaactatgctgtgacaagctcgaatcatctc

SEQ ID NO: 68833 - DNA, 277 bp, Zea mays
ctgcagcttaactacactacaaatgattttttcttatattcataaaaaaaatattagaacatcaggtgataaaaaatcacaaatggtcttgatataaactgtgttattctggttcattcaaattcgacaaagcaatgatctacgaaaatggacctttctcgccattagtaaaaatgaactcaaacacaagggtgaaaacaatatgaggcgacataaattccatgagatagatggatcgcctacctacatgtgaccaacagtgatggatcactgtttg

SEQ ID NO: 68834 - DNA, 392 bp, Zea mays
tctgatgtgttgttgcgttctgcacatgtcacagaacacgcgtagatgatgaaggcgtgctcatcaagagcgagccgctccgcaagatgaggtgccccaccagcagcacctgccgcccccgcccccgatgtcgatcgagcagatgtttctgatgcagactcatgcagttcaagccatcggtcagactctggccgccattcatcagcagcagcagcagcaacagcagcaagcaccaccccagcctcagatgcctcagatgcctagagataagcgtgctgaattcatgagaggtcatccacccaacgtcgctcactcttcttgacccatggatgctgaagattggctgcgcactgtggagcgggagttgcataccgctcattgcgatgaccggg

SEQ ID NO: 68835 - DNA, 437 bp, Zea mays
tgggatgtgtattaacaacctgttttccagcttgacatgcactgcatggcttgtccttttcaaataccacatcctttaatcctctaaccatatctttctttaataccttcttgagtgtgctcatcccaacatgtgcaagcctcctatgccaaagccatccaagagaagctttggtgaagaggcaagttcttaagtctgcatcttctgaagtgaaatccactaagtagaggttgttgtatctaaatcccttgaataccattgattcatcatccatttttgttacaataacctctgatggagtgaataagcattgaagtccaagatcacagagttgtcctactgataataaattgaagctcaaaggtgcaactaagagaacatttgatattgataagtcatttgagattgcaccttgccaagccttgtacttttctttg

SEQ ID NO: 68836 - DNA, 382 bp, Zea mays
agcttatgaagattcttcatttcaacatgggctagttggcgatgccagagccaacccatattagtattagcaattaaacaagtgttgagttcagctatgttttcattaaaatcaactaaatatagctgaccctctaacactcccttaaatgctattgaatcatcacttcttctagagacagtaacacctacatctgtaaatagacagatgtagcccattttgcataattgagaaatggaaagcaaattgtgatgtaaagaatctacaagaaaaacattggaaatagaatggtcaggggatatatacaatttacccacaacctttaccaaaccttgattccatccccgaatgtgatagctcgttggggatcttcatttttctc

SEQ ID NO: 68837 - DNA, 403 bp, Zea mays
  unsure (1)..(403): unsure at all n locations
gcttcttctcgtcatcgatgttctacgttatcgngagtgccttctgctcatggtgtttggttggggtttcaagtaagaaacatggattcatgcttggcgttggtttatgaaaatgactcacaaatctgatttatgaaaaaaaatattacgaagaaaaatgtcacgcatgcaaaaaagggaatttaagtataatacattattcaaacaaaagaaattgcatgcaaagctcttctttaaataatattacctccatccaaaaaactaattcaagaatcttggtgatacttatctactactacgcattgtgcaagggtagcaagtgagcttggtgagagatgtagtagatgtgtttcctgtcatagatgtagacataaatacatatttggtgagtggtagctactct

SEQ ID NO: 68838 - DNA, 391 bp, Zea mays
gcttctaagggagaacacgtgatatgtttgactaatgggccattcgaagaagatagaccttgtgcagcttgtccagcatgtgaacaagtgggatgagcgcatcacagctagaatgtgatgaccactcttagaccgctggagctgctgcatatggacctcttcggacccgtcgcctatctgagcataagagggaggaagtatggcttaaatattgatgatgacttatcccgcttcactcgtgtattctttttgcaggataagcctgaaacccaagggaccctcaagcgctgtctcatgagagctcataatgatgttgaactcaaagtgaagaagataaggaacgacaacaggtccaagatcaagaaccttcaagtataggagttacttgagg

SEQ ID NO: 68839 - DNA, 395 bp, Zea mays
  unsure (1)..(395): unsure at all n locations
acatgttgctttctgctatgccacagccagcccatgctagtcttagctattaagcatgcatctagaccggcctcttctttngcaaaatcaactaaataaagtttgtcgtctaatacacccttataagctagtgaaccatcacttcttctaaagacagacacatctacatttgtgaatagacagttataccccatgttgcataattgactaacagatagcaaattatatccaagagactctactaaaaacacattagatatggagtgctcattagaaattgcaattntacctaaccctcttaccttgccttgattcccatcaccgaatataatngaatcttgggaatccttattcttgacgtaggaggtgaacatcttcttctcccccgtcatatg

SEQ ID NO: 68840 - DNA, 419 bp, Zea mays
  unsure (1)..(419): unsure at all n locations
gcttgggctgaatggcaggaggctgtttggctcatctgctgattattggaaacgcagcttatctaagaaactagtgaaagcagtttctgcttttagttcattttgagaagcaactgaattgataagttacttcagatgcgtcctgtttggtacaacttctacttaagtatgtgaagatgtgaaataagatgtgtcaaacagggcataaggtgaccactcaaataaacaattaggatggttngagcccaactgctatacccgctcgaacccgactcgaagcccaagctagggctccttcaccacaaggccttcacccccgtccgaccacggtgccctgtcgccatgtacaacgtcatcgggctgcanatcgtgcagcaagggtggatggtccggtatgtcctattatgacgtgcaccata

SEQ ID NO: 68841 - DNA, 424 bp, Zea mays
agctttgcacgagcgaactacatgggttgtttgtcacatgatgggtggctagtagaatccctggcgcatgaccttggcggcgagggctctatgtcctgagtgtgaaccgcatattcccttgtggacttctcggaggagtttgatgccttcgaccactgtgatgcacttgagcaaagggtgacttattcctttttttataaagatggccttctattactgtgaaatcacggcttcggtgcttcaacctcttggcctcggcctaatcggtggggtaatagtatccatgaaggtagagggttacgagtgctctccagtcttctgtcattattatggttacaattctttggccttcgggatcatctgtgatttgtagaccttcgggaatactcacagctggtgtgccaatcgttggaaaatacatctg

SEQ ID NO: 68842 - DNA, 351 bp, Zea mays
  unsure (1)..(351): unsure at all n locations
agcttcngtcatcgcacgcggacagcttcatctgtagctgcttcttccttcaagaccttcggcgcgacgaagcatattcccaacaccaggcttcgctcctccagaatgcgaagacaccataaaagatggcgatatcataggaatatcagccgaagatcagttaaaactgcaagccctacgcatcaagaacaaccaccttcaaaaacaaaaagagatattcgaagccaagcgccaacgcgtcaccatgcaagctaaagtgcgacaaatgatactggataaggaataaaaagctcgggagctcgagcaagaaatcacacttatacaaggcgaaggccctaacaacctgcagcg

SEQ ID NO: 68843 - DNA, 391 bp, Zea mays
  unsure (1)..(391): unsure at all n locations
tgcaagcttaatatatattntgtggcgctcccttattatcttctttcgctagattcacattatcctcagtggcattatgttccacatctacagatccacactgaatatcatctgcttcagcaccaattatacttgcagccctctcaaatgcagcctgcaagagttnttgcatgtcatccaatcttccatcctggcggtgtcgtattggacctgaattagtcaaatttgcactgatatttggtacatcaccaagttctatatatggactgtcatatttttcaccatgatgaacccagatagtgtgaccttttataataccatcacatctcagatgtgtcctgacctcatcacaactgtgggtgtatctattatttgcagttatgcatggaca

SEQ ID NO: 68844 - DNA, 349 bp, Zea mays
  unsure (1)..(349): unsure at all n locations
ccttctccaattctgtataggttgtcttttataaactgagaacttcggagacaaagtacactggggcttgctttttagtttgtccttcaagcttctcctggacaagcgccgcactcactgtagagtgcgaagctgccacataagcagcatatgagcccctggcgctggtggagttagcatcggtagatcgatcagatactgcttcagctcttcgaaggctatctgctgaactgatccccattgaaagacttcggccgacttcagcacttcaaagaatggtaaatntctctcttgtgatctggatataaatcgattcaaagatgacaatcttcctgtcagccactgagcc

SEQ ID NO: 68845 - DNA, 296 bp, Zea mays
gagacgatcgcagatcaactgccaggttcgaaggtagcgttaatgcaccctgcagggcgtgcaactttagtgaaatcagtcctcacggctattcctatctactatcttattgccctccagtgtcctaaatgggttatcaaagatgttgataaaattaggagggggtttctttggaagggacgcaaggacgtgaagggcggatattgcttaattgattggcaaagggtttggaggccacttgggttaggaggattgtgaattcataatcttgagactttggcgtggtccttgaatat

SEQ ID NO: 68846 - DNA, 279 bp, Zea mays
aaacctaacgggcgactacagtcccggtgaatctttgtaaaggctacgtagtgatgccctgttggaccacctatgtagtggtcaatggggagtagctctctccgggcagaaatggaatcacgacttgtgggtaaagtgcacaacctctgcagagtgttagaaaactgatatatcagccgtgctcgcggttatcaccggccaatagagctccagtgattagttggacttgatcagatatgttcggtttgcaggtgtcaatgagactgatggttcttgtgt

SEQ ID NO: 68847 - DNA, 431 bp, Zea mays
  unsure (1)..(431): unsure at all n locations
tcacaagtttattatagaatgacattaagntcaattggtcttctaagtgtaatgaagcctttgagcaattgaagacactattgaccactgcgccggtattggctcaaccggacatcactaagccctttgatgtatattgtgatgcatctggcagtgggctcggctgtgtactgatgcaagagggccgagtaattgcgtatgcttcaaggcagttgcgccgacatgaggagcattacccaactcatgatctggagctagctgctgtggttcatgccctgaagatttggcgtcactatctgctgggaaatatctgtcacatatatacagatcataaaagtttgaagtacatcttcacccagtcagagttaaatatgaagcanagacgatgacntgagcnntataaagactatgaactggagaatcattatcac

SEQ ID NO: 68848 - DNA, 408 bp, Zea mays
  unsure (1)..(408): unsure at all n locations
ttcttgngatatataaaggattttcttcacgaagcatgaatagaagggaaggtgtttcttcgcccaatgctcaaaaaatggtatgtatgcaaagattcatgcatcgtaaagaattaaactattaatagattatatattacatttaaagntacaatatattacacattttacgtttcaaatggttctataatagcattcaatcctctttaagcactatctctgcagcttcattctatagttggttgacaaccttgtccataatggcttcggccatctttctaatttcatcgtcccccttctggtgggagcccggagatgcctcaacaagttctgatggaagaaaagatacggctatattatctatacaaaccgagaacagagtctggaattataaattacagcatgata

SEQ ID NO: 68849 - DNA, 403 bp, Zea mays
cttcatccccacatgtgctaatcggctatgccacagccagcccatgctagtcttagcaattaagcatgcatctagaccggcctcttcttttgcaaaatcaactaagtaaagtttgccgtctaatacacccttaaaagctagtgaaccatcacttcttctaaagacagacacatctacatttgtaaatagacagttatatcccatattgcataattgactaaccgatagcaaattatatccaagagactctactaaaaacacattagagatagagtgctcattagatattgcaattttacctaacccttttaccttgccctgattcccatcaccgaatataattgaatcttgggaatccttattcttgacgtaggaggtgaacatcttcttctcccccgcatat

SEQ ID NO: 68850 - DNA, 399 bp, Zea mays
caagctctttcctgtatggataaacaagccaagggtgtgagaacaaagtggtggaagctgaaagagaagtcagaagtcttcatggaaaggaccatcaaggagggcactctcaaggaagaagatgacactaacaacaagtgggagaagatgacaatctgcatttggaaggtagccttagaggtgtgtggagtaactaaagggagtggaggcaaagctaaagatacttggtggtagaatgagaaagtccaaagggctattaaggagaagaaataatgctatagacgtctgaccatgacacgagtgtggattgagaagtcaatatatcaaagaagactgataaacgatctgttagtgtggcaaaaggtatggcgtatgatgacctttaccaacacttgagta

SEQ ID NO: 68851 - DNA, 418 bp, Zea mays
gcttgaagctgacatcagtcgctaccgtcttcttcttatcttcggcaatttattctattcttatttcaaggtgaaaatttttcctccgttttttattgttttacgatgaaagtgatctctgatgaaggctcgtttgcaaagtgtatgctactaagtaaatccctgagggtgcaacatgacctcgaagattaaaaaaatgaagtttaattgaaggcttggaagaaaatcaagatcatgagctgctttgaaaaaagatttgtcttcaacatggaggtattggcaaacccaaatgaattgcagataatatgactctctgaagcgaagctcgacaaaaagaaaactttgtacaacttgaccaagtcaaaaagtgattgcaaatctgatgacttagcaagttaactcgcaccgtcggcacgtg

SEQ ID NO: 68852 - DNA, 294 bp, Zea mays
gagaattctaccaacggtgaacattcatcccatttctgtgggtattccagaacgcatgctcgtaacatgtcttcaagtatttggttcactctctcagtctgcccactgtgttgaggatgacagaccgaactatggagtatcttagtacccaaagatatgtggagatcttcccacaatctatatacaaattgtggtccacggtccgacactatatgttttggaatctcgtgcacactcacaatacgagtaatatatatctgggcataaatgatgccccggtagtatgtcttgact

SEQ ID NO: 68853 - DNA, 378 bp, Zea mays
  unsure (1)..(378): unsure at all n locations
agcttgcattccttcgaagagggtgggtgtggntgtgtttatagccaccaaccacctcctagtcgttgcccttggtctgacacgtgcggacgattcgcgctcctgatcgggacggtctacccctgcacatcaatggctagatttgcaacagtcagttataacggctatatcaatggctaaaatcgcattaaatgcatcatcaaatgttagaaaaagtctgatgtggatggtccggtcgtgattctggacggtccatgtggacgctataaataaattttctgaacatgtgcaccttcgggttgtctaaatacaacaggcagatgggtcgcacacgatgtcnggcggtccacgcatggtgttggacggtctttacttatc

SEQ ID NO: 68854 - DNA, 366 bp, Zea mays
  unsure (1)..(366): unsure at all n locations
tcttcacctaaaagaaagattatgaatgctcaaggcaaaggtatggaacaaattgcttcaattggtagttgatcaatagtagttccttccaagtggcattctttcaattggtaataatatattctatggaaaggaatgtcaatatgaagggtaaattccttttggcttaaatctgtaaattagtgcatattgtgaattcactgctccatatgcattaatttaaaaggaatttaatttatgcctttacgcctcataaatgatgattngnttgccattcatatatatatatatatatatataattcattaaatacttccttgtactacttatacctcttttcaaagtgttttatcgactatgtttaaa

SEQ ID NO: 68855 - DNA, 289 bp, Zea mays
  unsure (1)..(289): unsure at all n locations
gcttatgtccgacagctgtcanggtattcttctgagataaggcggnatttccgagagtccttggtggccgtcagacataacactatttccgacggtatcgtatacagccgtctgagataaataggccgtcggatttttgtttgtttactgtagtgcggatatagtgcagatatggtttggccgtttcaaaatagtaagacaataatggatttggtgtgtgactgggtgagtgtaaccttgtgttaatcaatgctggtgaattggtgatctgaggtgctgctggtggata

SEQ ID NO: 68856 - DNA, 377 bp, Zea mays
  unsure (1)..(377): unsure at all n locations
agcttctaaagggagaacacatcttgtgactaacaaatgtncattntgagaaagacagggttggtagtgcatgtcaagcacggaagcaagttggtgttcatcatccacacaagaacatcatgacgaccgataggccacttgagctactccacatggatctattcggcccaatcgcttacataagcatcgacgagagtaagtattgtcttgtaattgtggatgattgttctcgcttcacttgggtgttctttttgcaggataaatctcanacccaagagaccttatagggattcttgggacgagctcacaacgagttcggcttaagaatcaaaaagattagaagcgacaatgggacagagttcaagaactctcaaatc

SEQ ID NO: 68857 - DNA, 259 bp, Zea mays
gtccgacgagattctgttccattccagttccggatgagagatgtgttgagcgaaccccacgttgggctggcccccggccacattccacatggcgagagtcgcggagtgcgcgccacgcgcgctccggttcggtgccctgattgcgagagatcggcggggaaccacgggcccggataccccgcgcgggtggcagctgtccccgcatgtccgcaacagcaagtgctcgctctcagtctgccccccgcgtggtcgttccatc

SEQ ID NO: 68858 - DNA, 324 bp, Zea mays
ctctatcggggaaagcaagacgcgtgagcagtgtctgaaactcactgagaaacaacatgagcaatagccgcaccagtgacgcccatattggcaacaaacatcaaaatcgggtccagtatgatgttcgccgcgtcgccaaccactgagaacaaaaaaggtgttgtaggttagcaatgccggatgaggtctatcccaaagccttgctagtacttcggattttttttttttgccagattttctgtgtgtgcttaccagtagcgtataacggtgtcttggtgtccttgaaccccctgaaaaccccttgcatgccagagacagcaacac

SEQ ID NO: 68859 - DNA, 275 bp, Zea mays
tcttgatgaagcaccatctactccgtattctattcattcccgaagcactagaaagtatcaagacttatagcaacattattggtggacgaagatgaaaaactgaaatggcccgctatgttgctatatgagacacttgtagacagtgtaaggccatacacatgaaaactgctggtccatacaatccttgccatccaacatgtgagatggaagatatcatcatggctttattgtggactgtccggacgataaacggtataatctatttggtatcattg

SEQ ID NO: 68860 - DNA, 441 bp, Zea mays
actcagcttctaagggagaacacgtgataggtctaaccaatggtcaattctaaaaagatagaccttgtgcagcttgtcaagcacggaaacacgtgggaggagcgcatcacagcaagaatgtgatgaccacttcaagacccctggagctgctgcatatggacctcttcggacccgtcgcctatctaagcatagggggaagtaagtatggtctaattattgtagatgatttttcccgcttcacttgggtgttctttttgcaggataagtctgaaacccaagggaccctcaagcgcttcctcaggagagctcaaaatgagtttgagctcaaagtgaaaaagataaggagcgacaacgggtccgagttcaagaaccttcaagtggaggagttccttgaagaggaatggatcaagcacgagttcttcgcttcctacacaccacaac

SEQ ID NO: 68861 - DNA, 91 bp, Zea mays
gtacgtggtttatgtctcccagccgggccatgtgctcttgcccccatgagaaaccggactatctggaacagtaaggtacgttttttgctcc

SEQ ID NO: 68862 - DNA, 236 bp, Zea mays
gagccatttatgataacaaatgtttcatttgagaaagacatgatttctagcgcatgcccagcagggaagccaattggtgcccaccatccacataagaacatcatgacgactgacagaccacttggactcgtacacatggacctattctgcccgatagcttacataaacatccgcgggaagaagtattggtctagtattgtggatgaatattctcgctatacttgggtaatcttttt

SEQ ID NO: 68863 - DNA, 174 bp, Zea mays
tacaatcgtcactttctcccccccgccgccctgtctctgcccgacataacactctcagtttgcaagtcctgtaagacgcgatgactatacaccaggtgcttactgaggtctcaaaaaagccttgggacttgaaacacctataacccgtatcgaaagaactgaatttactaggaa

SEQ ID NO: 68864 - DNA, 430 bp, Zea mays
  unsure (1)..(430): unsure at all n locations
tgtgaagattcttcattccaacatgtgcttgtcggcgatgccagagccagcccatgttagtcttagcaattaagcaagtgtcgagatcaactctatcaaaatctattaagtatagctgaccctctaacactcccttaaatgctattgaatcatcacttcttctaaagacagtgacacctacatccgtaaaaagacaggtgtaacccattttacataattgcgaaactgaaagcaagttgtaatctaaagaatctacaaggaaaacattggaaatggaatggtcaagtgatatatcaatnttacccaatcctttgaccaaaccttggtttccatccccgaatgtgatagctcgttggggatcttgggttttctcgtaggaggagaacatcttcttctcccctgtcatgtggtttgtgcacccgctatcgat

SEQ ID NO: 68865 - DNA, 324 bp, Zea mays
atgtgacacctctcgtttaaaatacgagattctaacatgttacaaactcttaaagcctttatggcctaagcaccccaaaacatgatgaagcctagagatttcttatattaaggttcaaagcaaaagttatcctattttgaaaccctaaaggggggaatagggatcttgaacttaactatccacaaaacttgtatgtacacataacgcaatggtaaagagttcacaaaccattcctgagacaacccagatgaacatggtatcctggtcgcaaaaaacctgctctcacttggggccacgagaggtgaaaacccttaacattaaaac

SEQ ID NO: 68866 - DNA, 414 bp, Zea mays
  unsure (1)..(414): unsure at all n locations
cccaacagaggaccttgaggttcaagaagaattgacatatattgagaagcccactcagattctggagacagcatacaaagtcacttgaaaaagcaccctccggatgtgcaaagtcaagtggggtcatcacatataggaagaagcaacctgtgaaagagaagatgatctgaaagacaagtaccctgaactctttgatagcgaaccctgaatctcgagggcgagattctttttaagggggataggtttgtaacaccctgaatatgggggtataaaaattcttctctaaatgcctaccaaattcaggtggtaccctttggctctctctagactctctctacctttgctttngagtagaattacgtcaattaagtgaggggataattaattattntatgcaaactatgtgagtcatga

SEQ ID NO: 68867 - DNA, 338 bp, Zea mays
  unsure (1)..(338): unsure at all n locations
ttttcatgaatggcgcggtaacctcacacccacccgtctgtttatataatgccgcaagtgggaaggtgaattcgcaaagtcttcaacaccgaacaaacagtcacccgcactcactgaaccgtgggccactgggtccgacaaagtgaatcgctggcgcgcacgtaattggggcaagatggggcgcgcaccacgaatattntaattggttctcgccaacgagctcacggaaggtgtgttttggatcttcggcgtcctgaaacctagaagactttttcacggatcaagctctttatgaaaaacgatctatcaccgcgaaggggctactggtgggggaatgc

SEQ ID NO: 68868 - DNA, 306 bp, Zea mays
tgggactcattgggaattctgaatttcagaattctgaaaatcacaccctgagccacaaatcaaggaaggtcaccttgagccctaactcgaatcctaatggcccccatgacaaaattgttgctaactaacccctctgtcatgtgccacaagatggcattgggacgcgagccctacacacgacaaaacctgggatatgcctctggtttgggcagggagacagaccagattatctggctccatatctctgcaatcagtatgcgaaaatctatgacctccacacaagaatggtatcttgtatggaggaga

SEQ ID NO: 68869 - DNA, 451 bp, Zea mays
tgagttattttattacagaccacactaatagtgagtgccgagtagttatattatacaaaccacaggagacacagacttctcccgataagctataaacaaaagattctaagtggaggaccgagtcctcccgcacttcaatcttgtgtttcctcgtttggtaccaccttggagcaaaagcaacaaaaatttgtcgcttcctcacctaaaaacaacaaaaggataaaccctgagtatggaatactcagcaagtcttacccgactaaggaaaagactctcaagggtatgctggataaataagagtcaaggagaagctttagcaaaaatcaacttataggtttgcagaagaagcttactaaagtgagtccttactttcaatcttttaacgccatattaagtattaatagactccatttgcatctaatctagtggcacatcacatcaagacaacatc

SEQ ID NO: 68870 - DNA, 326 bp, Zea mays
  unsure (1)..(326): unsure at all n locations
catgctagtcttagctattaagcatgcatctagaccgacctcctctnttgcaaaaacaactaaataaaagttgcctgctaatacacccttaaaagctagtgaaccatcacttcttctaaagacagacacatctacaattgtgaatagacaattatatcccatattgcataaatgactaacagatagcaaggtatattcaagagactcaactaaaaacacattagagatagagtggctctttgaaatagcaattttacctaatccttttaccttgcctttgattccatcaccgaatattattgaatcttgcgaatccttggttttga

SEQ ID NO: 68871 - DNA, 369 bp, Zea mays
tgatgaggacttatcctttatgaccttcatctaagaatcattatacccgagagggaataatgctttaaagtaccaaagtctttaatggataaaaaatatgttggcttgcctcttgaattacaacaattgagaacaagtgaacaacattggcgcccacctctagtggactcaaacgaccaccttcgacaagaagaacttgaacaactacctttgtcatgtcaccaaagaaggcagcagcgccaggggctgcccttacatcgcttgacaccaatcaaggagggtttcttctaaggaaagccttgagccagataaaaaagctattagtccaacaccacaagaagaagagttggactaagaaatcacggatct

SEQ ID NO: 68872 - DNA, 259 bp, Zea mays
agacattaattattggaactctacatactgatgtgtgccgaccaaagagtactacagctaagggaggattccaatacttcataaccttcactgatgagtttagtagaaattgggatgtttacttaaagaaacacaagtctgaatccttataaaagttcaaagaggtttagaatgaagtagaaaattatcgtcgcaagaaaattaaagcactgcgatcggatcgcggaggtgaatatttgagtcatgaggttagcaatca

SEQ ID NO: 68873 - DNA, 181 bp, Zea mays
ccctaaggatactctagcgctttaacataatgttcaattttgacaaaatgttctgcccatatctgtttttcccaaacatggtcaacaataaaatttaaatcactctatggaggtgcttccggcacatgttgtgggtttctttataaggctttcttccataagtttttctggcacaacttct

SEQ ID NO: 68874 - DNA, 294 bp, Zea mays
ttttattttatgtgggagaaaatcaaacgatgccatctgttcatgccttggtagggctgaaaacaatttgattgagacaaatggatgttggctaatgaggcagatggctctcaattggacatcaccctgctctgtgcttcaatgctttcattgaataaacttgggcttcagtagccacatttggactttctttcattttaaccgatctcctctttttgtcgtggtacattcattgcgtatattttgtggatatcactcgatcagaaaatctttgaaaattctaagcgtcacacc

SEQ ID NO: 68875 - DNA, 146 bp, Zea mays
caaaatgtgatgaccacattcagacaccctggagctgctacatattgaactcttctgacccgtcgcctatcttagcctaaggagggaggtagtatgggttaagtatatgtgatgaatttttccgcttcacttgggtattcttttta

SEQ ID NO: 68876 - DNA, 417 bp, Zea mays
  unsure (1)..(417): unsure at all n locations
catttttccttgttctcttcaaacaaccttncactcaatattactacgtttttcaatcctctgatttgcacatacaatcctacgtttttcctattcctatatttttcaattcctacatttcagaggagcccttagtccaagatctctccaatagtctagtccctcccaagccaactctgcttgactatctttccggcgctgaactaggattcataacaataactaatataccagtagaaaatagttaactgtgatactttcaagtttcaaccatatgtaaccatgaaagcctgcttattatgaaaaggtatcataaaaggacatgcatgctaccaacacaagagagagcagaaagcaataccttgatggcatacaacttcccatctttaatgtttctgtacagaacctgctcacagt

SEQ ID NO: 68877 - DNA, 172 bp, Zea mays
actcttcgtccggaacagcctggaatatctgctaatgacttgtttttttaaaatttccacaacgaataccgtttttcactaaaagacgcaattcgcaatgtatctttctccgctttcatttggattctgggcctagcccttgatacgcttgactcgtcgcgttgctgtatga

SEQ ID NO: 68878 - DNA, 357 bp, Zea mays
aactctggaaggtgcgaccaacaacaacagtgcttctgctccgaagggtccccaagatccatcgcaaaatactgtccagacttcggcagtcttactcacttcttcttcctgaacccctggcgtccagtcaaccatgaagtctgccaatgcttgggactgaattgaagatctatgctcataatcaataccaaattcattgagttccgcagcccattttccaacccttccaggagcttctctatatctcatgatatacctcaacggatgtgaagatggaacaactatatagtatgcttgaaaataatgccgaagctatctggaggccatcaaacagatacagcaacttttcaattctga

SEQ ID NO: 68879 - DNA, 404 bp, Zea mays
  unsure (1)..(404): unsure at all n locations
tttcacggagtttttaacagaatatcaacatatattttccttacattttttactacatgggttttgagaaattaatattatgctgtacctccagatgaggtttttagaggagctaccaaagacagagtggttcattaatcacaaattcacaataagatattccacaatccttccattttttctccattattctcgtttacatttcagtttaacagcacgttgttggagtctgccgcccggcggcgatgactactanggatacgatacgaaggacgcaccgtattcatggaagctttctgtgcatacgaaagacgcatcatattcatggaatggaagcttccanattaaagaaggtgcatgcatgttggaatcattgaacgtgcgtgcgtctagaattgcatgcc

SEQ ID NO: 68880 - DNA, 389 bp, Zea mays
tatttgtcgaagcaacaacatctgccagcacagttactgcagaccataccagtaacttggcctttcgcatgctggggactggatatgattggacctttcaagaaagctcaaggaggatacactcatatattggtagcaatcgacaaattcactaaatggatagagttcaagtcaattgcttctttaacctctgctaaggccgcggaattcatacaagacataatattcagattcgggataccaaacagcatcataactgacttatgatccaacttcacaagttcagagttcttcgacttctgcgagccaaagagcattcagatcaagtatgcatctgtagcacattcaagagccaacgggcaggttgagcgagccaacgggatgatact

SEQ ID NO: 68881 - DNA, 364 bp, Zea mays
agaataaagacacaatttcctgcgcaggtatcatcaaattagaatcattccatttatgcagcaccgtacattcacccgcgtatgtatgtttaatctggtcataggttcgtaagcttacttacttgtgagcgacttatgtattttgaaggtcctcatctctatgaagactgcctgcctttcagtttcagaatctcaattccaaagtgtgatcagtggcaattattacaaaccttggcacttcttctttgagctagaccatgaacaaacaagagctttgatatttttgttaagcctgcccctgttcatgatgtttcaaacaaatgtcatcctttccaatctattcaatcttcaatagtcgaagcat

SEQ ID NO: 68882 - DNA, 185 bp, Zea mays
tctgacctaatatgttcctaatttatcaacctgcataccatgatcaacctaaatgaatgactacctttgtatttaccttgtccctgaataccttatggggtattaagggtagcttcatgctattgctttactttaatcaatgaacatgatgtgaatatttaccatatgatgatgttatcttgact

SEQ ID NO: 68883 - DNA, 315 bp, Zea mays
gactcaacactgacgagctatgggtctaattctatcttgggcttgccgtccggattgccataagaatggtgtccacgccgaggtgagcgatacgggtgctgagtccccatgggagcgggggaaccatcatccaagtgacgacgcttcgcgcgctcattccgcagctgggcgatctcagcacgagccctacttagctcgtctaatgcatgggtcagctccgcgtttagcaccacagctaggttgactgtgctgctcaacctatgattgtcctcaccgataggtgaaacaatcactcctcctgtgctgctagatgaa

SEQ ID NO: 68884 - DNA, 336 bp, Zea mays
taacctgattagggatatgaaatactttggattgtcctctacttcagacctatggaacaccacagtgcctattccttttccagtatgaacttgtgacctttctctgctgcatatgtttgggatattggttctggtgttattttcccaagtgcatagtgtgaatgattggtttacgtaaacaacgagcagtctgtgttttccgaggcagttgctgaggaaagtcctgatcagcagtttggtgaaggcaagtgtcctctgtcccactatgttctattcatttataacttactaccccgcattactcacttgaaaccttatgattgactagctttacac

SEQ ID NO: 68885 - DNA, 389 bp, Zea mays
ttttgtaatgtatttcataagcctaaatttgccagggattcctacaccaatggtagacacccctcaattaaggagggacttggctaccaaagggaagcccagaacttgacaagccataaagcttccatctccgccaaggagaaagggaaggcccctatggctagtaatgtgcaaaagaaccatgcctttatgtactatgatagaagaccacctagaaatacttataggagttgtaatgcatataatgcctttgaatctcatgtcatgtttgcttctagctcttcctatgtgcatgatagaaatgttggtaagagaaatgctggtcataatatgcctaggagatatgttgtaatggtcctatgaaagataatgaaccttctacaatatat

SEQ ID NO: 68886 - DNA, 471 bp, Zea mays
  unsure (1)..(471): unsure at all n locations
ctataaaactaagcttctaaaggagatgagagcacctagagggggggtgaatatgtgatcctgtataaacttaaacttatagccacagaacttagattaagcgttagcacagtaattgccaagtggctagagagaactcaaaacacgataaccacaagaaagcaatcacagagttgacacggtggttatcctcgggttcggccaagtacaaaacttgcctactccacgttgtggcgtcccaacggacgagagttgcactcaactcctctcaagtgatccaatgatcaacttgaataccacgggggtnttctttcctttgatcttttcccgcttgcgaggaatctccacaacttggagtctctcgcccttacaattgagttcacaaagaaataccgagtaaggtggaaatgagcaacgcacacaagacttcgaaatcagagcaacaacacgcacacaagtcgccacaagagc

SEQ ID NO: 68887 - DNA, 395 bp, Zea mays
ccacatgtgctaagcggcgatgctacaatcagcccatgctagtcttagctattaagcatgcatctagaccggcctcttcttttgcaaaatcaactaaataaagtttgccgtctaatacacccttaaaagctagtgaaccatcacttcttctaaagacagacacatctacatttgtaaatagacaattataccccatatgacataattgactcacagatagcagattatattcaagagactcaattaaaaacacattagatatggagtgctcattagaaattgcaattttacctaaaccttttaccttgccttgattcccatcaccgaatacaattgaatcttgggaatacttattattgacgtaggaggtgaacatcttcttctcccccgcatat

SEQ ID NO: 68888 - DNA, 415 bp, Zea mays
  unsure (1)..(415): unsure at all n locations
caatttggaaaattctgtctacctcttnctggcacctatggctatctcttgtatgtgagttccaagggaagataaaccctacgtcagaagaaatgcggatgccaaatctggcttgtccccctgcccgctgcacgacaaaagtgatactcagacatgttaaatgtcaagggctccgtctcaacttttttcagggggtgccttacgtggtatgccacattattggtatagaacttacgtggttttggtgccatcttcaaggtaacaccgcggatctttagattangtgtagaatctgacttatagagaattagagagctctagctctctctctacttaaggaatggatntgggggttcttaacggatctcttagccaatgttcctttctatatttgtagaataataagttacctaac

SEQ ID NO: 68889 - DNA, 331 bp, Zea mays
ataaacgttaagagagttgcgtttttaaatagctttgaataaaaggtagagctttggcaaacaccaacttcttttggatgccccttttagtacgacgattcctatactcaagttgaaaaaatataatgaagaaaactcctcaagcattggtgtctcatgtgtgaattctccatggcattgtttcataaagaacacaaacatctttgtctcaccttttgaagcagacataaaataaacccagagacttgtaccataataccttatatgaggtcaaatcatggcttacagtcaacttactgatgcataacatgtttgactcttatactcgata

SEQ ID NO: 68890 - DNA, 292 bp, Zea mays
ctctcaaactcactcacagatttctctctcaagatttgaaatgtgagaggcaagatgtgtgtgatagagagtgtgaggtgtttttcacgatagaaatggaggtttgcgcgtgctcttctgtggggagagaggtatgagttgatatatatatgtggggctctcaaactagtcgcttttgacttttcttgcccaaaaccgtgtgaaccggttccaaaaccggttgaaccggtttttaaaaagctgtcccagcttttttgctcacacagcagactggcagaaaaagtgaacagtg

SEQ ID NO: 68891 - DNA, 346 bp, Zea mays
tgcaactataggcctctctgcttctattttatttgcatctcttttcaaggactgcccaacagcttgagcaacactagaaccatcaaaaatcaattcaaacttctggatggcgtcagcgatagatgaagcatcttcgcactgcatcaattgtgtacctgttgaatttgacataacagggaagtctgctagaaaaaagatcaagactgaatataaatgtcccttcctgcctttcaacaaaaaaaatgtatgaacattgtgcgtgaactctgtacttttagcaacaatcaaaactgctgaaaagcaatacaaaccttcattgacacttgttgagtcttcatctgagtca

SEQ ID NO: 68892 - DNA, 77 bp, Zea mays
tggtgtgtcttgtattgaatgctatagctcttggaggtgtagaagtgggaaaacttggatgccaatgaatgtggggt

SEQ ID NO: 68893 - DNA, 456 bp, Zea mays
gcctggaagaatcttatcccacatgggctagtcggcgatgtctgagcctacccatattaatcttagcaattaagcaagtattgagttcaggtttgttaaaatcaactaaacatagctgaccctctaatactcccttaaatgctactgaatcatcacttcttttaaagacagtaacacctatatcttgtaatagacagttgtagcccattttgcataattgagaaactgaaagcaagttgtaatctaaagaatctacaagaaaaacattggaaataaaatggtcaagtgatatagcaattttaccaaattggttgaccaaaccttgtattccatccccgaatgtgatagctctttggggatcttcgtttttcataagaggagaacattcttctctcccctgcatgtggttgtgcatccgtaatcataatcaacttgagcccccgatgcataacctac

SEQ ID NO: 68894 - DNA, 244 bp, Zea mays
gttcgatatctagatgctcaaaccgaagaggctactgcaacaattattaagacataagtctgggtctggtactgagatgcctttgccagagagggcccaccagagcaatttcgtgtcccaaggaattttgccggtcacagaacatcatcgtcttcatgtactaccagagcgaattaagaggctgatgtcgagccttaacctgtagcttcgattcttctcacacttgtagaaactggtcctacac

SEQ ID NO: 68895 - DNA, 111 bp, Zea mays
  unsure (1)..(111): unsure at all n locations
tatttactaaaacttttgagaatgacttggttgtatgccaaaattatgtngatgatattataattgggtctactaaccgagctacatgtggagaaattaatatgatcatga

SEQ ID NO: 68896 - DNA, 451 bp, Zea mays
gctgccctttatgcctacaggaagagcaaaggcctcttttattagtgtggcttaacttattcccgcggtcgatgagatttggcaattccttcaacttcctgacgaagaggagtcacccgcatctcaacctacagaagaattacacatgctgtcattatctctggccaccacatctgcgaaatatactcctagaaccatccgatctttgggtcacattggagataatgaaattctggttttattggattcaggcagctcagcgtcatttcttagctctcaagtggcggacacactacccgaggtcaggccactgtcttcacccttgcgggtacaagtcgccgatggagcccaactaacttgttctgacaacatctggatgcacttggacattgatggtttcctttctctcagatatgacggtcttccctttcaatatgaccttatcttgcat

SEQ ID NO: 68897 - DNA, 371 bp, Zea mays
tttgaaaaggggagaaataattaacaaaaagggggtatcataagaaaaacataagatgttgaaaattgatgagtgcatactatgtcatgagcatcacgtttattttatgacacattgcacctcatgaatagtatgatataagttgtctccatactttgacccacatatgtgcttttggcatttgagtacaaaagtgttattttctgaaatgcacatatttagggggaggaaactatatcataggattcaaaatcttatttatcaaatcttatgtaagctttaaatgtgttgtcatcaatcaccacaaagggggagattgaaagtgcattcatcccttttgtgagttttggtgatttggatgacaacacatt

SEQ ID NO: 68898 - DNA, 388 bp, Zea mays
agaatatattctgaccacgcctaacataagatgacttgataaccgaagtgcaattggaacatcaaggaatatgatagaatctgcaggaatagcaaccatagattttcagctcagaattatagaaattgcggaattgttaagcccaacactaatactaccattaaattctacaccatggcatatcaactgtactggatggcagaattggcccatccttcaaactggcagctataaatatttcattccttagaccccactcatgtgggagccggcaacactatggctggccctttctttttttttttttcttaacatgacctgtctaagtggttgttaaatctcctaagtgtaaggccacctgctttttgattacaggaagagagtgccc

SEQ ID NO: 68899 - DNA, 403 bp, Zea mays
  unsure (1)..(403): unsure at all n locations
gtatggcatgccaaacattgcagacgacgcccctcttatattaaaaagtctttaaacagtaattggttactcactgagtagctgagcccaccaaccagccttacccgaagtacctttcataacgagctttaagaaaagtggtttgaaccttctgcacaacactctcccaatcaatattntttgtggtctaagctcattatgaaaaacgaactaattccactaggggctactattgggggcctacattgccgaagatactcaaaacccctcattaccgagttgagaagatgtgttttaagtacaatacaaaggatcaacggagcctaacttcatcagaagaagctatgaatcataaaggggaaagtgtggccttttggtgtgcatgaatgttgcaaggcatcta

SEQ ID NO: 68900 - DNA, 409 bp, Zea mays
  unsure (1)..(409): unsure at all n locations
gaggcaagagctcgaccatatgttataatataatgggagttgtacaagcatggagtctgtgctccattactcaagtgtttatccagagccgaaggtatagaattgatgaaagaaatacacgcaggcctgtgtggatctcacattggatctaggcctttgcttggaaaagtttttcgtcaaggattttattggccaaaggcagcttcggatgcagcggaattagtccaaaagtgcgaaggttgtcagaaatgtgcaagagatcaaaaacaacctttgtctctaacctagttaatacaacccacctggccgttgcaaaggtggngccttgatttgtaggtcccgtaccaccagcacaagggaacttaagatatgttgtagtggcagtggaatatttttctaaatggattga

SEQ ID NO: 68901 - DNA, 327 bp, Zea mays
tgacgagcgcgaacctgaacccatattatacatgaggtacgcaagaagcacgggagtcgaaatattttaacaacttggcatatcactgcaagtggttctcctttggcagggtattaaaaaactccgccggcgaaggaaagaacaccctcccggtattatattaagaagagaccgaaacaatggtcccggccgagaaaatacccgaaccctagccccccatcactaacgggctggcatcaactgttcactctgcaacggcccaaccggagggtggcgcacaggacatcgtaacccgagagcggatggtgcacagcgaggggatatttt

SEQ ID NO: 68902 - DNA, 342 bp, Zea mays
  unsure (1)..(342): unsure at all n locations
accgtgacagaagtgattgaagcaacaccaccaagggcttcagctccgaaggtgccggctattgaaagcacaacagctactgaagctgcaccttcggaggccacagatgccgaagctactaaagccgaagatatcaatttggaaagtgtggctcttgatatagataaaattctgctagacatggccgcagaagaagctgctggagccaccgaagaggcttcggccctaaaggccgagaaaaagaaagaaattgtcgaagaaacactggaagatgaaatttcaattttcaaacttggttgtcaagaataacaaagccgaaaagaagaatanagagtatgccat

SEQ ID NO: 68903 - DNA, 380 bp, Zea mays
cagaccaataactcaaacccaaggaagaatattaagggagtgaagaaaaggttattaaagtgggagcaaaaggtacaaagaaaatgaccaggaaatgtcagaagtgtggaattattgatggtcacaacagtatgacatgtttgtcaatggaggaaaatagactaaggttggcaagccttgctggacgtaagagaggacgaccttcacgatctatgaacaagggtgacagtaaagctcctgattggaatgagacaacaacatcaaaaaagcacgccattgatttcgaaagtagtgagtcagatagtgattagtctgttgtatgagatacgattaatattgtttttaccataaaccctgcatgaatgacacatgaattatat

SEQ ID NO: 68904 - DNA, 306 bp, Zea mays
ttcaccaccggatagcaccacgatgggggcacgtaatgccatcaaaccattagtgaaaaggtctatcattattgggtggcccgtggatgaagtaatgtgatcttgacggctatttctttattatattctatgtagaggggggtgtgatacttgttgtggcccttgaccctaaatgacctttggtggagtggtgggaattaatcctcacaattgtttagtggtcaaactacccccttaattttcttattgttgggaaaacaatcctagcacaaaggggccaaaatcttgaaagtcgatctatgttga

SEQ ID NO: 68905 - DNA, 230 bp, Zea mays
tttaactacgtagaaccagaattctggtttttaagacaccgagaatctaatttctatttactggtggaaaaactggtttgtttggaaccaactcaatttttataagccatttcttaaatctagatgtttctaaaagagccattatctgtttgctaatagagaccatcttcttggttcttaagacactgaacatctcatttatataaactttatattaactagtgtgtttg

SEQ ID NO: 68906 - DNA, 432 bp, Zea mays
  unsure (1)..(432): unsure at all n locations
ntatgtggagttgggagaggatttgatctctttagtgtttcttgtaatgaatgctatagctcttgtaaggtgtagaagtgtagaaacttggatgccattgaatgtggggtggttggggtatttatagccttaaccaccaaaatatggcagttggaaggctgctatcgcatggcgcaccggacagtccggtgcgccaccggacactgtcagcagaccgttggggttcgaccgttggagctctgacttgtggggcctctgggctatccggtggtgcactggataagtcctgtagactgtccggtgcgccaactgcgcgtgctctgactctggcgcgcactgtagcgcattgaatgcggttgcagtcaaccattgcacgcgaagtatgtcgtgctccgctgcacaccgaacactgttctgtgcttcaccggacag

SEQ ID NO: 68907 - DNA, 428 bp, Zea mays
  unsure (1)..(428): unsure at all n locations
ntcaacataattgttccttcttcacaacctctgaaggatattattataaaccgagaagctactggaaggattggaaaatgggctgcagagctcaatggaatttgtattgattatgttcatagatcttcgattcagtcccatgcattagcagactttattgctgactggacgccagcactacacgacggttcacttacagcgacctacggttggttgctaaaacggccttcagcgacctacggttggtcgctaaaaacttttagcgacccataaggatggtcgctgtaagtgccgtcgctaaatgctttatcgaccgacatctttttaacgaccgaccgtccgttgctaatattgtatatttagcgaccaaccgtgggttgttgtactatagatttagcaaccaaccgtaagtcgtcatactatacatt

SEQ ID NO: 68908 - DNA, 395 bp, Zea mays
  unsure (1)..(395): unsure at all n locations
ttatggntttctctatttgggtcttgctctacccttttatcttgttttttgtaaaatcctaactaaggtcttatttgtaaatgccataacaaacaataggttgaaatttttacctacgaatgatcctagtgtatcaaacatatgaaatgctaatgctgatgatgactaatcatgtttaattttgcccaagttcctgagttgactttcagctgaattatacttaatacctgacagctcgatttgataggttttttccatttattatacaactatgcttacctcttaacaagtattttcttgtaagctcaatttgatgctgactaggcaaaacctaaattatattacaactccaagtgactcaacactgatttagatttctaagacacaaggggctt

SEQ ID NO: 68909 - DNA, 447 bp, Zea mays
tgtggaggaccagatcatcaaagtatatattttttgtgttatacgaggcacccaagttccgttgatgaagcacctgaagaccaatcaaggaaggaatccatgtgggagttcgcaagagaaaggtttgcgtgtaggcatcgatgcttcttcaataagctagttgccaagcgaaagctagaagcctgaagatgatcttgagtagccagaatcagcgtttgcaatcagtagccggatgctccgcaagggccagattttgttgaagttccatctcctcgaagagttgcaaagtgaagatatgtatctgaagtaaagctatacccataacccttctaaaccgaattttgaagacgaagattcctttaagtggggtagattttgacatcccaaaattcatatcttggaatttctcaactcgctttaattcatatgatgtcaatttcattcaaa

SEQ ID NO: 68910 - DNA, 388 bp, Zea mays
taaaactaagcttgtgaggttcttcatccccacatgtgctattcggtgatgtcacttccagcccatgctagtcttagcaattaagcatgcatctagaccggcctcctcttttgcaaaatcaactaaataaagtttgtcgtctaatacacccttaaaagctagtgaaccatcacttcttctaaagatagacacatctacatttgtaaatagacaattatatcccatattgcataattgactaacagataacaaattatatccaagagactcaactaaaaacacattagagatagagtgctcattagatattgcaattttacctaacccttttacctttgcctgattcccatcaccgaatattattgaatctggggaatccttattcttg

SEQ ID NO: 68911 - DNA, 431 bp, Zea mays
  unsure (1)..(431): unsure at all n locations
ctataaaactcaacttggaaggttcttcatccctacatgtgcttatcggttttgccacagccagcccatgctagtcttagctattaagcatgcatctagaccggcctcttcttttgcaaaatcaactaaataaagtttgccgtctaatacacccttaaaagctagtgaaccatcacttcttctaaagacagacacatctatgtttgtgaataaacaattatatcccatattgcataattgactaacagacagtaaattataaccaagagactctactaaaaacacatttgaaatagaatgctcattagaaattgcaattttacctaacccttntaccttgccttgattcccatcaccgaatatgattgaattttgggaatctttattcttgacgtatgaggtgaacattntcttctcccccgtcatatggt

SEQ ID NO: 68912 - DNA, 450 bp, Zea mays
  unsure (1)..(450): unsure at all n locations
tactcaagctgaaaatatctggatatggttcgaagagtctaacttttttcttagganncngncaaaaatatcccccgaggacaaaatgagcatgctgtattgttagcaaagtcagcagcacaggggctgcctctaccttcggatgtgttcttcgaaacaataaaagcaccttcggtggaacttcttgaaagagccagccttaacatatctcctgtttttagcgaagattggagaactgaaatcatctcttaccttcagggtaaattcctttcagatgacgaagcttataacaagaggatagaggcaagagctcgtccatatgtcatgatagaaggggagttgtacaaacatggagtttgtgctccgctgcttaaatgtttatccagaaccgaaggtatagagttaatgaaagaaatacatgcaggcctgtgtggatctcacatcggatct

SEQ ID NO: 68913 - DNA, 410 bp, Zea mays
  unsure (1)..(410): unsure at all n locations
ntatgggtgatagcttcggcactgcttttgagaggttctgtctaaggngnnnctttcttcaggatcttcggctacgaagcatacccccaacaccatgaaggaaagttgtattcaagatacaacttagtatgtttctattatgtaactgcatgttcataacatcacatgagcattcaagtacatgtaccgtcctgtatagaaaacgaggaagagactgtagttgaagaagttgtacctcaagctgagaatccaccagccgagaataacttctacttcgacatctgtgtaatagacccggaacctcctgcaacacaagacaagccccagtgcatttacccctttccttgttgttttaaactctntatcacttgagatgatgcattangtgataggagttgtgtgataaacaa

SEQ ID NO: 68914 - DNA, 335 bp, Zea mays
tgactcaggtatccacacattaattcttaattcctttttccgtcttatggacaaggcatcctccctggatccaagtccatagactaacatatatcccgttatcaagatgaatacaatcaattactgacctcacgcgagtgctagaaaaaccactcgacttctaccgagatcctgattagtaagcaactactcgacctagcatactagtattcatctcaaaaaggaatcctaagttcatgcaactagaggtttcaagaaactcctacacttaagtgcacattacaatcctacaagcattaagtgtagtaaagtagcatataataatacgggtatgc

SEQ ID NO: 68915 - DNA, 389 bp, Zea mays
cgggaagaatcttcatcgcaacatgggctattctgtttatccagagccaacccatgttagtcttagcaatttagcaagtatcgagttcagctctattaaaaacaactaagaatagccgaccctctaatactcccttaaatgctactgaaacatcacttcttctaaagacagtaacacatatatccgtaaaaagaaaattggtgcccatcttgcataattgagaaacagaaagcaaggtgtaatctatagaatctacaagaaaaacattggagatagaatggtcaagtgatatagcaattttaccaagcctttgaccaaatcttgatttcatccccgaatgtgatagctccatggggatcctggttttctcataagaagagaacaatctt

SEQ ID NO: 68916 - DNA, 329 bp, Zea mays
  unsure (1)..(329): unsure at all n locations
ctacaagctgcacattgttactgatgcctgagaaaatgtttgttcgagcatagcccatgaaataataaacataagagaanaagatgctcacgacgctatgtatgctaccaaagcggctgataaagctgcggaactctactggcctatagacattactgaatggcttgtaactctgatgctgattatagagacttagaactgatttacgttatctacctatgctgagctatattctgccccagacaccttccagtcatgggctgacccacaggctgaggattgagcacatattattagcatggccgagatcattgtagatgatgtcgtta

SEQ ID NO: 68917 - DNA, 460 bp, Zea mays
  unsure (1)..(460): unsure at all n locations
ggtgacgcgggccgngcatatacaaagtgagaaacattttctttatactgtcgaccatgccagtgattcagtgacccagaaaattgtggttgaatgtatctactggagtgtgaaatgattgtagctctgtttagtttaaataaatagagacgaaaagaataagcataaactgaaaacatgttctttctgaaattggtttgctgcgactcattgaagctcccatcttattgtaaacatacttgcagattcacggacagagaataagtcactttaaaaacgatccagactccaaaaagcgatgcaatcacacatattaaaatcgcaacagcatttctaacccaaccgaaactggacggcatggcgcaggcgcttaccaaattgcagcagcatgcgagaggaaacagcaccatcatttctgtatactcatcatcaagaggaaaaggataaaaaatcatgtgtg

SEQ ID NO: 68918 - DNA, 477 bp, Zea mays
  unsure (1)..(477): unsure at all n locations
tcatatcatctctaggtacctacaaaacttattaagtacattttggtacccatttttggatgggtccaccaaggttagctaataaatacttatgcacccaaatggcctttgtgctagttttaggtgaactaattacctttctagcacaagtgtcatttttgggtctcctacgtgaatatgaatgaattgacatggtaggcttgggatactcactcatgggacaatccttgcataggtgtccctttcttcggcaagtgtagcaaatctgatttttaattttgcaagactcctttttgccttgcttcttgtttgctacatggttagtgagcctctttctttctaaagttaagccactatcctttgtgtagggacatgacttaatctcatgtcccttctcatgacattgataacactttctagcgcatcttctcttatttggaagagtgacntgttttgtaccttgtgtggagcatgtgg

SEQ ID NO: 68919 - DNA, 456 bp, Zea mays
  unsure (1)..(456): unsure at all n locations
acctataaaactaagcttcanagggagaacatgtaataggtctaactaatgttttatttgataaagatagaccttgtgcaacttgtcaagcagggaaacaagtaggaggctctcatcacaccaaaaatgtgatgacgacatcaagacccttggagatgctgcatatggacctcttcggacccgtcgcctatctgagcatatgagggagtaagtatggtctagttattgtagatgatttttcccgcttcacttgggtgttctttttgcaggataagtctgaaacccaagggaccctcaagcgcttcctcaggagggctcaaaatgagtttgagctcaaagtgaaaaagataaggagcgacaacgggtccgagttcaagaaccttcaagtggaggagttccttgaagaggaagggatcaaacacgagttcttcgctccctacacaccacagcaaaatg

SEQ ID NO: 68920 - DNA, 307 bp, Zea mays
tcacggcctcctagtggagctatctaaaggcttggatctatcggatgagggcgggaaagggttcggccacggtggttgtcctcgggcggctctagcgggtcgcggggaggtcgccagagctatgggtgagctctatggagactctcacggtacagaggatgcaacggggaagatagccggacactatggcgggctttatatccgtggcgcgggcgtggtcacggtgtggccgcgggcgcgcggtggttcgcgcacgggcgtgctctgagcgccccccgagtgtcagccctcgtcgaacacgtgtggg

SEQ ID NO: 68921 - DNA, 462 bp, Zea mays
  unsure (1)..(462): unsure at all n locations
ntaccaaatggacgtgaaaagtgccttcctctatggttctatcaaggaggaggtctatgttgagcaacctcccggctttgaagatagtaagtaccctaatcatgtgtataaactctctaaggcgctttatgggctcaagcaagccccaagagcatggtatgaatgcctaagagattttcttatcgctaatggcttcaaagtcggaaaagtcgatcctactctctttactaaaacaattgcaaatgatttgtttgtatgccaaatttatgttgatgatattatatttgggtctactaacaaatctacttgtgaagagtttagtaggacaatggttcanaaacttgagatgtctatgatgggggagttgaagtatcttctaggatttcaagtcaagcaacttccagagggcaccttcattatccaaacgaagtacattcaagacattcttaccaagtttggaat

SEQ ID NO: 68922 - DNA, 427 bp, Zea mays
tcaactcttcgaaccatgtctagatatctttcaagcttctgatctttagccttgcaactcttgtcgatatgacccgaaacaacctgtgaatcagttttaagaatggcccttctgattcccattgcttttagcttccgaagacccaaaagcagggcttcgtactcggtaatattgtttgtacaactgaaatcgaaccttgccgcataacaagttttaactttggatggcgagaccaacacagcagctgctcctgccccgaaggttccccaagacccatcgcaaaacactgtccatacttcggcatctttatttgtttcttcatcctgagcccctggcgtccagtcagcaatgaagtctgctaacgcctgggactggatcgaagatctatgcacataatcaatgcaaaattcattgagctctgcagccc

SEQ ID NO: 68923 - DNA, 464 bp, Zea mays
  unsure (1)..(464): unsure at all n locations
tatgaagattcttcattccaacatgggctattcgtgtatgccagagccaacccaagttagtcttagcaattaagcaagtgtcgagttcagctctatcaaaatctaccaagtatagctgaccctctaacactcccttaaatgctattgaatcatcacttcttctaaagacagtgacacctacataagtaaatagacagttgtagccaatttgacaaagttgcgaaacggaaagcaaattgtaatctaaagagtctacaagaaaaatattggaaatagtatggtcaggtgatatagcaattttacccaaacctttgaccaaaccttgatttccatccccgaatgtgatagctcgttggggaccttggttnttctcatatgaggagaacatcttcttcttccctgtcatgtggtttgtgcacccgctgtcgagtatccaacttgagcccccggatgcataaacctac

SEQ ID NO: 68924 - DNA, 409 bp, Zea mays
  unsure (1)..(409): unsure at all n locations
tgtgaagattcttcatcccaacatgggctattcggttgtgccagagccaacccatgttagtcttagcaattaagcaagtgtcgagttcagctctatcaaaatctaccaagtatagctgaccctctaacactcccttaaaagctattgaatcatcacttcttctaaagacagtgacacctatatcagtaaaaagacagttgtagcccatttgacataattgggaaacagaaagcaagttgtaatctaaagaatcaacaagataaacattggaaatagaatggtcaggagatatagcaattntaccaagtccttcgaccaaaccttgattttcatccccgaatgtgatagctcgttggggatcttggtgttctcatagaagagaacatccttttctcccctgtatgtgggt

SEQ ID NO: 68925 - DNA, 418 bp, Zea mays
  unsure (1)..(418): unsure at all n locations
tgaagctgaagttgcaaagagttcgaacttgcaaaagtcattgtatgaacttcaagataaatgtctgaactttggcaaccgttgcgtgcaacgactgaagcaggtcttcaactcagttggagccagttctgaaaagtttaaacctttagctgaagacccgccangcatctttgatcatattgaaggcgaagttgatgctcttgatgaagtcatagatgggcatggtgacttctgcgctctgctagcttctcgcggcacagctgttgcttttatgagggctggttgcacgcacgagaatattgtaaacaggccgaacttcagcttatcaccagtggacttgaatgacatccccggcctggcccaaagcattgggaacagatttcgaactaaaaattgggcgaagggtggacgaaacttg

SEQ ID NO: 68926 - DNA, 356 bp, Zea mays
cttttctcagcaacggatagttctctttattattgagactactatcatgcgaatttgctttcataagaacctgcagggtgtatacctggaaaacaccaagcctccggctggaaacagactccggtagtgtcagcaaaaccctcaagctgcatccgctgattcggtggcaccaacctcgtgaccggcacaaacgccattgggctaagtttggtgtaatcaaaattcagggcctctgtcacttgaacaggttctctaacaattcttcccaccaagagcccctctcccaagaatgccataatcagcagcgcacacagaaacgcgcagacatatgtcagccaaagcgacccccacacaat

SEQ ID NO: 68927 - DNA, 454 bp, Zea mays
  unsure (1)..(454): unsure at all n locations
ntatatctntgttgccaatctccactcgtataagatcttacctgttttgaaaagaaaaggaaagaatatgagtacagacctcacacttatcttagtcatctaagaaagaatcagaaatgatgaaacggtgcacgcttggttgtccatccactatctgatggtatgatagaaataatctggtgtagacgacgggtgggcgatctcgtgccccaacagggaggccctgtacaaagagagagatagtagatgagttgagacagggaaaggattaacatctcaacaagaagcaacggtaatagtagaaaaatagaggcaaacatatgacatacaaacctgcactccaccatggaaggtgtggttagtacattttcagcaggagtagctaaacatagggaaatgcttcagaagatagttaactgcgatagtttcagaanaaagttggaccagcgacaat

SEQ ID NO: 68928 - DNA, 470 bp, Zea mays
  unsure (1)..(470): unsure at all n locations
cactcaagcntttggacttgattgcttcaatttgctttctaaacacttgtgctctttctcataataagagagggagntcatagcaatgtgttgagcttttaatcaccaaaacaactagaaatggcccaagggcacatttccctttcaccggtcatgcctcccgacggtccgtgtggatgctataattaattttaccgaacttggcaccttctggttggaccgagtttcaacaggcggatggtccccatatgagaccggacggtccacatgtggtgttggatggtacttctcttctcatcggatggtccgtagttcatgtggcatttttgacatggcatggtgctgcgcaaggctagcatttctggaacacagacgcaggtatggccccgcttgcgggttngctgcttcactcgtggtgggaccgagggcctctgtcggtaccttgaatatgggctacccactcctactat

SEQ ID NO: 68929 - DNA, 416 bp, Zea mays
  unsure (1)..(416): unsure at all n locations
ntttcataaggaaaaggagcccacaaaaacttatgcttctatgccaaagaggcaaaggattgttactgtgacacaagtcattgatgcaacaccactaatggcttcagcgccgaaggtgccggctattgaagttgtaccttcggagattgccgcagcagaagccagagccgaagatgcaaagtccaaagatattaatttagaaagcatagttgctgatatagacaaaatgctgttaaacatggccacggaagaagctggcgcagccaccgaagagaccacggccgcaaaacccgagaaagaagaaatgaccgaagatacttcggaagatgaaacttttgacttccaaaacttagttggccaagagctaacagaagctgaaaaagaggaactaaaagaatatgctatatcttgtgggt

SEQ ID NO: 68930 - DNA, 438 bp, Zea mays
  unsure (1)..(438): unsure at all n locations
ggcattgcatatttacatttcctgtattgcatctatgtcctgtctaacctagtcgagataaccgccaacaaagcgagtgaaaaagcttaactcgagatcaaacttgacaagtcttagttttaagcttttagtacttaaattcttacttactatgcaattgttggttcttgagacatgcacgaggcnctacacttaggaggagtattcaaaactcaaatctttcatgaaaacctctagtgcaacgccaaaatgcaaatctcaccatctgcctattttctctaaaaattatctagcctatggcaaaatatttcgaanattatgagaaaatatatgagggtgccaatacctatcccaacaagtgttattttgtgtgattataagttgggatttgggttggttgaanactagatagaaaattaaaaaaattgaaaatttctc

SEQ ID NO: 68931 - DNA, 359 bp, Zea mays
  unsure (1)..(359): unsure at all n locations
tggtcattntattgctaactgtaccgacaattatcgttatcattgaccaaggaacaagagggagaagaagaagaatcattagaaggcaaagggcgaggctcatcttggcaaggagtgggattcggactgctcctcgtccgactccgacaatgaaggactcgctgccaccgccttcaacaagtcatccctcttccccaacgagcgtcacacatgccttatggctaaagagaagaatgtatgtactcgagactgtacttatgcttcttccagtgaagacgaatctactgatgaggaaataaattactctatcttgttcaacggattggatagaaataaaattgataaaatccatgaattga

SEQ ID NO: 68932 - DNA, 401 bp, Zea mays
  unsure (1)..(401): unsure at all n locations
atacatcncgnggatcagataaaaatattacggccactatatttacatcatatgtttcagctggagcgatacctgcgagcattaaaaggctatgtgcgaaatacggctcacccaaaaggttcaatcatggacggatacactacagaagaagtgattgagagctgtgtagattacatcagtgacagaacaatgataggtgtgcctgtacctaaacatgacggtaaactatgagggagagggagaatgggcaagaaaacgtcttccattgaggattacaaactagtacattgtgctcatggtagtgactaccacatctcacgatagccgagccttacatagaggaacacctggatgagcttctgaaaaaaatcnaaaccgacagatgactggatctgatggac

SEQ ID NO: 68933 - DNA, 422 bp, Zea mays
tgccttcttggcagcgagggctgccctggcctcattgtcattcattggtgatatggggtgggtgttatttttgggaggcatcgtgggagtagtcttcgtcgcacaaatggtgggcgccaaatgtagggcacttacatgcgctggcgcactatcaggtggacccaaacactaagagacgatgggagagaattcaggtgcacgacaagacaagcggtagggaactgtagcttctcattatacgtgcttgtaccactacatgacgagggtatttatatggccatctggggttggtggtccaaagtacaccactacctccattcaactgtcatgtttttacaatatagattgtacaacggggtaattgaagcctcatatccccctctggttatgtgcacacacaaccatacccatcaattacattg

SEQ ID NO: 68934 - DNA, 410 bp, Zea mays
tgccgaggctagcgacgccttgtgtgccctctagatattattgtggctcaatcattgtctcaccgccatcgccacggtcaggacgccgctgctcgctcagccttctacttaaaggaggctcttgcgctctcccactccccagctggcgaggccccgatgcctccggtatcgccagccgcatccaagtgttggacttcgaacatcagcgagcaatgggcgtcgctgatgcaggaccttgagcagcgccgcaccgctgcgacgctcaaggtcaccccatctagaggtgagcctcatccacgagaacctctcctactttgcccgtgagctcagcgcttgctccggttcgtggtgcttgacgtcgatgccctagaccccgcggagctcgtcgcgatcaccagcggcgtcaccat

SEQ ID NO: 68935 - DNA, 456 bp, Zea mays
  unsure (1)..(456): unsure at all n locations
ggaactataaaactcagcttctaaggagaaacatttgggacattaatgttcttntgaaaacatagatttgcagcgcatgtatgcaaggaaacaagttggtgttcatcattcacacaagaatatcatgacgactgacaggccactcgagctcctacacatggatcttttcggcacgatagcttacataagcatcggcgggagtaaagactgtctagttattgtggatgattattctcgcttcacttgggtgttctttttgcatgaaaaatcccatacccaagagaccttaaaaggattcttgagacgggctcaaaacgagttcggcttaaggatcaagaaaattataagcgacaacgggacagaagtcaagaactctcaatttgaagctttcttgagaggaaggcataagcatgagtctcttcttctacacccacaacaaatggggagtggaaagaa

SEQ ID NO: 68936 - DNA, 405 bp, Zea mays
  unsure (1)..(405): unsure at all n locations
ntgagagagcaaaggcatagtggagatcccataacagcataccttgccctctatctgcttgccttggatgaaaattgtgacaagatagtcactctcttgcgggaaacaaccatgcaagagtagagaaagcagaagcccttctattgcagtgctaaaaggatctggccgatgcccgaagtcggaatgcaaccataaggaactgtttgatggcagatatgatcagggcaacacccaaaccctaatgtggtggtggctgatgttaaaatagaggttagggacgtgcacaaccactggaggaacccataattggctccaacatgatacacgggccaacagcccaacagacggtgtcccgacatcaaaacaaaacctgaacgctaacttgtttcgatgaattcccgtgac

SEQ ID NO: 68937 - DNA, 421 bp, Zea mays
  unsure (1)..(421): unsure at all n locations
gcttttgaccagagcaggaagtggcccatcagcggattcctgactctgtctatgaattaaggaggatttggttcgtctccagttcccgcgactccgcgtcttccacccacngccgatggggagcggctgcgcgcgtactggcgctgtggcgccatgcccggattccctcctgttcttgcgaccgcagtggcctccggctctcccacggtcccgattgaccgcgcacagcaatggggtcacaagtgcacgctatttatactccgaaggcgaagtccgagcccgagaaaggagattatgttggctgagatagcggcgagatttttggcggaagatttgtagtctattgcatcggatcanggtgggagatggatcagacagcgatggcccacacgccagcggctgaccagcgcgcgcaagtcaa

SEQ ID NO: 68938 - DNA, 389 bp, Zea mays
  unsure (1)..(389): unsure at all n locations
actcagcttcacaaggtgaacgaaaatggagatttggagaatggtattatgtttcaaatgagtcagggtgatgtgataaaaatcaaggaggccgcggaaaaaaggagagatgggaaggccgangccgcggagaatgaaaggagcgtaaactacagactcgtgggtatccctctgtgggacagttgtcccgtggcaaatccgccaagaacagagttcccgcggaggaagaaccccgatggagacgaggcggagaagctcagcttcagaaattacagacatgtggttacctgcgaagggtaactgactgttggggtcgattgcggggatcactgcagcagacgagttcgcagttttcctcttgggcgccatcttgcttctcactatcggac

SEQ ID NO: 68939 - DNA, 451 bp, Zea mays
  unsure (1)..(451): unsure at all n locations
cataattgtnttgaagaacttaagataaggttattttctgcaccaatattggttatgctagacatccacaagggatttgatgtgtattgcgatgcatcacaccttggacttggatgtgtgctaatgcaagaaggaaaagtgatagcttatgcctcaaggcagttgagaaatcatgagaagaattatcctacgcatgatttggaactagctgccgtagtgcatgctttgaagatttggaggcactatatgattggaaacaagtgcaaaatcttcacggattacaaaagcttgaaatacatattcactcanatagaactcaacctcagacagagaagatggcttgaattgattatatgactacgatttggaaatataatatcaccctggaaaggcaaatgtatatctgatgctttgagccgtaagggtcaagtgaacaacatcactactcatt

SEQ ID NO: 68940 - DNA, 466 bp, Zea mays
tataaaactcagcttcgcatcttacttgcttcttctccgagccccctgcgttcagtcagcgatgaagtctgctaacgcctgtgactgaatcgaagatctatgcacataatcaatgctgaactcgttgagttccgcagcccactttccaatccttccagtagcttctctgtttctcataatatccttcaaaggctgcgatgaaggaacaattatatggtatgcttgaaaataatgtcgaagctttctggaggccattaagacagcatacaacaccttctccaattctgtataggttttctttgataaactgagaacttcggagacaaagtacactggagcttgctttttcaattgtccttcaagcttctcctggacaagcgccacactaactgcagagtgcgaagctgccacatacagcaacaaatgagcccctggcgctggtggagttatgggttgtaaatctatc

SEQ ID NO: 68941 - DNA, 483 bp, Zea mays
cttgaaactacgctaccatgacaggtatgtgaccagttaaagggtcctctatcttcaagtctacatcgacacggtccttaatcgactcagacggagacactacaccgagactcctttctcgtgcaagtcaactgcctggtcttagcttaattattacaacccaaattttggtacctagcagaggtacatcttttccaaatgttgaatccatcaaggcctttgacagattcaccatcaagttttatttttgaaaacattcccacccactgaagcatcacctttgttttaaaacaaaacatttttgttttctaaagcaaggctaagcatcaaaaatctttttcgtaaaagggtatcaaggaagggaaatcaattggcaaggaaggaaatgcatcaacggtttagcacacaactcctatcacctaatgcaacaaacaaggtgataaagaatttaaaacacaaggaggtggcaactgcaccgggact

SEQ ID NO: 68942 - DNA, 447 bp, Zea mays
  unsure (1)..(447): unsure at all n locations
ttatcaaatggacgtaaaaagtgccttccttattgtttctatcaaggaagagggctatgttgagcaacctcccggctttgaagacagtgagtatcctaaccatgtctataagctctctaaggcgctntatgggctcaagcaagccccaagagcatgatatgaatgccttagagattntcttattgcaaatggattcaaagtcggaaaggccgatcctacgctctttaccaaaacacttgagaatgatttgtttggatgccaaatctatgttgatgatattatatttgggtctactaacgaatctacatgtgaagagtttagtacgatcatgacacacaagttcgagatgtctatgatgggggagctgaagtacttcttaggatttcaagtgaagcaactccaatagggcaccttcattatccaaacgaagtatactcaagacattct

SEQ ID NO: 68943 - DNA, 334 bp, Zea mays
  unsure (1)..(334): unsure at all n locations
taaaactcagcttcctgcaatcacaagattccgatgctacattctacaatnggccccangggccttcaatggtatctttgagactacattggcatcatttatatgtcttctctaatatttgattagactatatttcacatcctatacttcacatgtngctataaatgcatatgctattaaatcatattttgttacatatgcataagggaagttagactattcaaatcatgtcttgtgcatctattactcacatgctttctccttagtagaagatctctgtcaggggaagtatatcttcgtctctaaaggggaataaaattctttctaaaagaga

SEQ ID NO: 68944 - DNA, 358 bp, Zea mays
tgtgagggcatcccatccatttgacatgactcgctgtgtgctgtgctgaaaatacttgtgctcggtagtcggtacgcaaatgactttgcaattatggcccgagagagatatgctttaccaaatagtaaatagttcagattatacgcaactaaacaataatcatgatggaaaaccaccctgtgactttgtgagtgagcatcatcaacctagcagcactgctcctcaacacagagagagagagaaggaaagagaccggaaagggcgccccccgacgcccgagtcgaccgcaacaagaatcagccacgccgcgtctcacccatctcccgtagcatttccgccatctcctgcgggttgagta

SEQ ID NO: 68945 - DNA, 183 bp, Zea mays
accataccaccaaacccacttgatagctttccatggtcattacaaacattatatatagttcaacaacataagcaatgttttctaactatcgaatagtatattacataaataaagataaaaaaccctcgacttccacataagcaccataccgaaaacatagtctgcatgttcatatactacaaa

SEQ ID NO: 68946 - DNA, 409 bp, Zea mays
  unsure (1)..(409): unsure at all n locations
gctatgaagaatcntcatcccaacatgggctagaccgcgtctgcctantttnttccatgnnagacacagccaataagcatgtgtcgagtacagctctatcaaaaaccactaagtatagctgaccctctaacacacccttaaatgctattgaatcatcactttctctaaagacagtgacacctatatcagcgaagagacagttggaacccattctgcataattgagatacacaaagcaaatcgttatctaatgaatctacatgaaaaacattggatatagaatggtcacgagatatagctattntagccaatcctttgaccaaaccttggtttcatccaccaatgtgatagctcgctgtggatcctggtctttctcatatgaagagaacatcttcctcttccctgtcatg

SEQ ID NO: 68947 - DNA, 159 bp, Zea mays
aaatagctcgctaggcccaagagaattttttgtgcacgctgggcttataataatccaccaataagctcttattgctataaagaggacaacgaggacacaaacgcacaggaaatgtttatatttttaacactctttatcaaccactcatcttaccctttg

SEQ ID NO: 68948 - DNA, 426 bp, Zea mays
cacccacaataataaaggacgtctatttttttgttattcccacagaccatacgtgttacctaaaactaaccaccgtcatagaaaccactgaagtattacgggtgcggatgttgaaacgatttcatcccaaacttttctaacaaggtggtgcctgctaagttgttgaaattcctccattaattattatacgataagatcggtccaaaactacacatttaatttggaacaaattgagtcgctgggtatgatcaacctttaaaatatgggcactcatgacacagtcttaaacgaagctctcatagagttcaacatgttcaagccccatatgctcttcatcatcattctccctttcaccatattaggcagcaagcatggcatatgtatcattaactaaatcgctagctgatgagtactcaccattttctc

SEQ ID NO: 68949 - DNA, 411 bp, Zea mays
  unsure (1)..(411): unsure at all n locations
agcttgcacacatagctcantngaatacctatgaacagatcctcnttatattctaagacaaatgtgcngtcaaggctatttcaaaccaagtcatacgtatatcgaaagggaatcggagtcttcggcgaagacataggcttccactccgtaactcatgcttcgccatcactccgagcaactctctattccttgggagaaatgagcatcaaaaaaaaggactctatccttgggggagagagtaaaagctcaaaagcaaaaggaccggacctcgtctttggtataatcttaactcatttacttatgaccaaaggggaggaacttacttcgagggctctaatgattcccgttttggcgattcatgccaaaaagggggagaaatgagcccaaagcaaattgaccgcaccaccacca

SEQ ID NO: 68950 - DNA, 416 bp, Zea mays
  unsure (1)..(416): unsure at all n locations
gaactataaaactaagcttaatgtncaaataagaacttaagtgcttttgtttttgtctgaacataatgcctcatctttagtgattgaatctaagtctagctccttaaatgataatttntgcaaacattgtgccaaatatcatgcttcttgttgtctaactaaccatgcaaggaagaatatcccacaggtgaaggtcaaaggaattttgaaaagattctctagcaatgatgggttaaaaaaagttgaaccaaagttcaagtccctaaagcccaacaatggaagaaggggcttgggttcaactcatccaaggaaaaccctatcacagtgcataaggggtggagatcccccaagttcatataggaaaccaccctatatgatgccttggggaggattcactcctcatatgacaagtcacc

SEQ ID NO: 68951 - DNA, 328 bp, Zea mays
  unsure (1)..(328): unsure at all n locations
aacatagaaactcagctttaagggaaaacggaagggggactttttttaatntgttttagagagaccgggagcagcttgtcaagcaggtgaacaagtgggaggagcacatcacagcatgaatgtgatgaccacttcaagacccctgtagctgttgcatatggacctcttctgacccgccgcctatctgatcataggagggagaaaatgtggattaactattgctgatgactatggccccttcacttgggtgtgctttttacacgataaacatgaaacccaaaggaccctcagacgcttcctcatgagagctcagaatgaagttgagctc

SEQ ID NO: 68952 - DNA, 438 bp, Zea mays
  unsure (1)..(438): unsure at all n locations
tctnagggagaacacgtgataggtctaactaatgtttctttcttataagatagaccttgggcagcttgtcaagcaggtaaataggtgggaagctctcatcatgccaaaaatgtgatgacaacatcaagacccctggagttacttcatatggacctcttcggacccgtcgcctatctaagcataggaggaagtaagtatggtcttgttatagttgatgatttttcccgcttcacttgggtattctttttgcaggataaatctgaaacccaagggaccctcaagcgcttcctaatgagagcccaaaacgagtttgagctcaaggtgaagaagataaagagcgacaatgggtccgagttcaagaaccttcaagtggaggagtatcttgaggaggaaggaatcaagcacgagttctccgctccctacacaccacaacaaaat

SEQ ID NO: 68953 - DNA, 320 bp, Zea mays
  unsure (1)..(320): unsure at all n locations
tctatagggagaacacgtgatatgtctaaccaatgtttatttcgaaaaagatagaccttgtgcagcttgtcaagcacggaaacaggtgggaggctctcatcacaccaaaaatgtgatgacaacatcaagacccctggagctgctacatatggacctcttcggacccgtcgcctatctgagcataggaggaagtaagtatggtctaattatcgttgatgacttttcccgcttcacttgggtgttctttttgcaggataagtctgaaacccaagggaccctcaagcgcttcctaaggagagctcanaatgagtttgagctca

SEQ ID NO: 68954 - DNA, 405 bp, Zea mays
  unsure (1)..(405): unsure at all n locations
ntgccaaatagggcgcatgattatacccttgatatcttctcgcattgtcagatcattcttcacatagaaccattctgtcatccagtctccaggccatctcttccgaaaggttggcacggggcagcttgacccggaccgagaaacaaaactgtagcagccaaaattgttgtgatactgttccttaccccaaggttttgtttcatatgataattcatgtatattgcagaagctttttgcgtcaggtttcagaccttggcttctcacggcccacacgaagatatttagccttataattgcctcgggggtaagttgatggagatagacttcgaatattttcagtacctccacaacgaagctgctcanaggaaatcgcagtccagctttcaaaaagcttcggtacactac

SEQ ID NO: 68955 - DNA, 403 bp, Zea mays
cttaaaactaagctaagtcctcgaataaaatttcgatagatattgtaagtctacatataatgttatgtgcaaaaggggtgaataaatcatagacgaattatattatatttacttaatatattaaatcattgaatacaataatacctctgccttggcaaaggttgaattccagaatatgcgattgcaatcactagaatgcgtgaacagtaaaggaatactgttcactatttatatgcacaggacgcagcctgtgaggaattacaagtatgcccccttataaaagcttacaacattgactcagacctttatggactaaaaggtcattctatctttaagtcggtttgtaataccaaagcttcacgaagaggaaccttcggccatcttatacaaacagcttcagccg

SEQ ID NO: 68956 - DNA, 441 bp, Zea mays
  unsure (1)..(441): unsure at all n locations
tttggtcagggaattgctntagaggctagcgttcctgtcgacctttttttgggctctgctgatgacactgaattggttcctgctggttcattgcaaactgctccggatggtgaccctacgccaagccatcaattgatttctcatgattttggaatcccctcattcttctccaacctccaggtactatgatctattctagtctgatttatacaccagatgaaccgctgtcattgcactcatctgctctcaatatcaggcattggtggacggaatggctaatcagctgaagttgcaaggtgcttctgttccagaaagagcttcgtctctggcacgttggaatccggtgctgcttcaacagcgtgtctctaacttataggcgacgaattgctggtagtgcttttcttgcctccttcgtctaccttattaaactgcttctcaatt

SEQ ID NO: 68957 - DNA, 443 bp, Zea mays
  unsure (1)..(443): unsure at all n locations
aaaactaagctnttaaagatatttaaataagacatcntatggatgatttagattttaatatnnncaaaactattaaatgtctctatctctactatattaaagcatcagtttcaacggtcgtcccgtatcattttcttataaatacctcttaaaattctacaaatcaactcgatgtcctacacacttctatgtcccgcctccctccccacgccgctgtcccgctgtctctcttcccacacctcctccgccacgttttcgctcgtccagatctccccgtgacctccctcccaacttcgctgctccgcccgtcacctccccgcgacctctgttcccacgacgcctccgccacgcctncattaccgtggagcttgcaactggctcgagcgccccgaaaatatcgcaacccctccgctcggcatgaacccacccgtaaccacgggagc

SEQ ID NO: 68958 - DNA, 444 bp, Zea mays
tcatcaacatcactcacatctatgtcatctgttggatcatgctcaatggcatcatcagtagaatcatgtgcttcttctccatcttcttcaacttgtgtcctcattcttgcatgctttgtgtaggtttggtctgcctatcttgcgttggaaggttgcgccctcgaagtgagtttgatgctccagcagcaacatgaacatgaccccatgtttaatcattaagaccatcattatccctgcccggatgtaccactgatgagtctatccacttattgtcccaatcaaagtctttaataactaacgagtcataacttgagccggctttctcccttctcatttggaacctactttccatcttccaattgtatgaaacatagaccaagtcattcaacttcttgtgtaacaactgatttctcttctttgtatgcatctataaatgttaaaaac

SEQ ID NO: 68959 - DNA, 478 bp, Zea mays
  unsure (1)..(478): unsure at all n locations
gaactataaaactaagcttgggtcnctggcttgaacttgtccaatatgatttaaataactngggaatcagntttaaggatggcccttctgattctcattgcctttaattccgaagacccaaaagcagagcttcatactcggcgatgttatttgtgcaactaaaatcaagttttgccgcataacaagttttaactttggaagatgaaaccaacacagcagccgctcctgctccgaaggttccccaagacccatcgcaaaacactgtccatgcttcggcgtctttatttgtttcttcctcctgagcccctggcgtccagtcagcaatgaagtctgcttacgcctgtgactgaatcgaagatctatgaacatattcaatacaaaattcattgagctctgcaggccattattcaatcctttcagtagcttctcggttgctcataatatccttcagaagttgtgaagaaaggaacaatatgtt

SEQ ID NO: 68960 - DNA, 438 bp, Zea mays
  unsure (1)..(438): unsure at all n locations
tctaaaggagaacacgtgataggtctaacttatgttcttttcgaaaaagatagaccntgtgcagcttgtcaagcagggaaacaggtgggaggctctcatcacaccaaaaatgtgatgacgacatcaagacccttggagatgctgcatatggacctttttggacccgtcgcctatctgagcatatgaagaagtaagtatggtttagttattgttgatgacttttcccgcttcacttgggtgttctttttgcaggaaaagtccgaaacccaagggaccctcaaacgcttcctcaagagagctcaaaatgagtttgagctcaaagtgaagaagataaggagcgacaacggatccgagttcaagaaccttcaagtggaagagtccttgaagaggaagggatcaagcacgagttctccgcttcctacacaccacagcaaaatg

SEQ ID NO: 68961 - DNA, 381 bp, Zea mays
  unsure (1)..(381): unsure at all n locations
tgccagaagttntctccccgctcgggcaacccttcgtagttcaccaagctgattgcccacacatggccacttcaatgttgggggctggatattgtcggaccactacctacggctcaagggaacctcaagttcaccttcgtcgccgtcgaatactttaccaagtggatcgaggctagggtagtatccacgataacgtcgaagactgactagaagttcttctggcaaaacattgtttgccggttcggagtcccgttcgagctcacagtcgacaacggcaagcagtttgacagccaggacttgagggatttctgcctatccatcggcaccaagctcgccttcgcctcggtgtaccacccgcaatccaacagcgtcgtcgagcac

SEQ ID NO: 68962 - DNA, 415 bp, Zea mays
taaaggatactattcaactaatgttatattaagttgtttatatgccaaggtatgaaaacttcctctcctttagttgttttagtattctatccttagtgggatgtaccatagtataggttaatttccttgtaatataaaacgttcaatagtgcatataactttgacatcaactatatgtttgcactaatttaaaggaatttaatctatcctttttgggtttcaataatgatgattcatttgccatccgtatataaggatcatcatttgtgaaaccctcccttgtgtttctaatgctctcttttctaagtgtctcaataaggtccttccaagtgctttcaagatggattcaaaatctacggatataagagtcttggttgtttcaatcattgagtttcaatgggtctcatatcaagta

SEQ ID NO: 68963 - DNA, 405 bp, Zea mays
tctctcaacaaatagaattcagacaagtgattttcttattaaccccacccaagtataagagaaccaaatcctgagttttttttttgcctgaaaggcatttaaatagtccgtgtgattcaagcactgaaaacccttctagcagtaagaccttccccgctctcatggtcatgggcatctgctaacaagttaaagtactaggcagactacagctatagaggaaaacagccaaacaataagaatgggttacaggtaggagtggtaatggactctaaattttacggtataaaatttaaggatcgaatcagattaggatcggactctattcctatttattttgaggtggactccaagctcggaaatattcagatcccgtaagtctcggtgcagcagtcgcctacatctact

SEQ ID NO: 68964 - DNA, 471 bp, Zea mays
  unsure (1)..(471): unsure at all n locations
ntgtagccatcttcgaaactctgtgagacaaaaattgtatgctatgagtccaatcagcacttcgccatacattccttggaatttcgctcaatccaaacccaagcagaaaggcacctgtcactaagccaaaggtatttgagcatgccatggaaaagcccaagataccacggaccctgccaacagtagcattatgtaaagttaagacagtgaagcaataattcaaacaaacccctccctaaaaatggtttctaaaatggactcgacacaatcaagaaaatattgtcaagaaatattcaaggaagtgaatgaatttttataaaattaaaattaccatgttaaggaaaaagttaacttaagtgcattctaaacatatcaattacttgtgcccaagttgcataaacatattagatcaatcaagaattatacaagatcacttgacaatcgaagcataccaatcatggcgcattatta

SEQ ID NO: 68965 - DNA, 437 bp, Zea mays
  unsure (1)..(437): unsure at all n locations
ggacctataaaactaagctttggttcnactgaattaaataggaccttcatttttctttttacttatgggggtntatatttttcttagacaggttacattatttagagtctggcaaaattagtttgaccaaatttgggtaaaccaaacagaagttatgggtttttaaagnttctgtttgaatctaaatcaagttttaattaagtttttctgaaagagtagtttgcgccaaggtccctatgtttaaaccgaatcaaacctcgcagatctaccctcgggccactattcactcgggtcattgacttttcacttaaccccctgactgtctctccctctcacccgcagtcctttcctcaactgaaacagtaaccgcgggaaatgaaatggtggcgcggcttaccggcggcgagggatgtccggcgaggtggtctgtgatgttc

SEQ ID NO: 68966 - DNA, 350 bp, Zea mays
tcaagacataacgtaaattattataccctcttccttattttcttgaattaagctcatagggctcacttaaggtttttattacggatgcacattcttacctttttaatagactcaattgatttgatcatgatacttttaagcatatacttggtgaactctttattacttaagataatttgatgctcatgcttactttggttcacatgaaataatggatcttggtttggcattttgagagaaaccctacgtgacactggggtgtcacaagtaaagcatccataattaaatggattagtcgagagagcacatgaaattatattgacacgaattatgaatttaatcttcaatca

SEQ ID NO: 68967 - DNA, 423 bp, Zea mays
  unsure (1)..(423): unsure at all n locations
tctaagggagagcacattgtacgattaacaaatgttcattnttgttaaagacaggatttgtagcgcatgtcaagcatgaaagcaagttggtgcccatcatccacacaagaacatcatgacgaccgacaggccgcttgagctactccacatggatctattctgcccgattgcttacataagcatcagcgggaagaagtattgtcttgtgatagtggatgattattctcgcttcacttgggtgttctttttgcaggaaaaatctcaaacccaagaaaccttaaagggattcttaagacgagctcaaaacgagttcggcttaaggatcaagaaaattagaagcgacaacgggacggaggtcaagaactctcaaattgaaggcttncttgaggaggacggcatcaagcatgagttctcctctcccta

SEQ ID NO: 68968 - DNA, 356 bp, Zea mays
cactaagcttgcgatgtctactacattgcggtttgcgtgttcttttctttggactgaaacgccaaccaaccctttgagagtaaaatgatactatttacccgggaaggtgttgaacataatctgcaaccgtcctctaaggaaaaatggccaagagtatgatctatattaaaaatgaattgtccgtttctgtcccttcctttttgcgtgagatcgtttatatccaaatagtgccatctagttaaaatattaaacgaataaatgactagcctgatacaaatggactacaaggagtgatcgtttcctttttttttcttctctgatatgatacatatcaaaaacatcgatgatacattgtg

SEQ ID NO: 68969 - DNA, 374 bp, Zea mays
  unsure (1)..(374): unsure at all n locations
actcagcttctactggagaagggactagaagaaaattctctttttctcaactattgagctncgaacgggaaacaatattactcacaaggggggaaactcaaaatcgtgtcaatcaaaatgagtactcgagtcaagcgcctaaaatccaaatattctaagaccggagctatgtccatacggtggatcgaacaatatgcagcggataaacccaaataatactttacagagaacatttcccaaatcgcgccaaagagagacaatcggggaccaggacagggtcgagacacgcacccacagtcgccgcgccttcggatcgagccaaaccaatgccgatgctgacgtcggcagcgccctccctgtcagcgcggcggatc

SEQ ID NO: 68970 - DNA, 350 bp, Zea mays
tggataagcgaaacgcggaatacgtctagcttttgttctgatttcttaagaatgacctagtgcaagttgattaacattgctacctgaattcagctctaatgaaaccattaatgcctctctctttctaccctttatacgctgatgtgggcttaactacccgatagctttctgaacatccgaagattctgcgaacgttacagtggcttcgtataggtgtatcactatccatctcagaacgttgggcttgaaaagtgaggggctctctgtgcctctaatcatcaagtcttaagaccgaaggggtgttttgaactacaacattcttttatcaggagcttattctctaacactta

SEQ ID NO: 68971 - DNA, 443 bp, Zea mays
tctaaagggagagcacattttgtgactaacttatgttctttttgagaaagacaggatttgtagcgcatgccaagccgggaagcaagttggcacacatcatccacacaagaacattatgacaagtgacaggccactggagctccttcacatggatctattcggcccaatcgcttacataagcatcggcgggagtaagtactgtctagttattgtggatgattattctcgcttcacttgggtgttctttttgcaggaaaagtctcatacccaagaaaccttaaagggattcttgagacgggctcaaaatgagttcggcttaaggatcaagataattagaagcgacaatgggacggagttcaagaactctcatattgaaggcttccttgaggaggaggagggcatcaagcatgagttctcttctccctacactccacaacaaaatg

SEQ ID NO: 68972 - DNA, 383 bp, Zea mays
  unsure (1)..(383): unsure at all n locations
tgttcccatggcgccctagccgccaacgccgatctcttttctgccctctgccatgcgtctggccgtcgctgctccatctcatgtcgcgctcgcctatctctattcgccgcgcccctgtccctgctcccagctccctcgctggcgttgatttgcttgcacgtggccgtgagttcttccctgtgcgcgagcgcgagcatctctgcttggaccgacgtcgntctctatctccttaccatgctcggctgttcgtcgtcgtcacccgatcgcgcgacgatttgacagccccgacactcgtcctttgtgcatgtcgtgtgcccatgtactatgtcctcgccgtcgcgtcgagcccgtcaaaccccatactcccctgctcgacctcgtct

SEQ ID NO: 68973 - DNA, 286 bp, Zea mays
  unsure (1)..(286): unsure at all n locations
tcgtccggctgcacccttangtttctgntgcacggattgtcttcgcggaagaattcgaattttcgcgcttgttgcgctagcccggctgcacccttatgcgacttctgcatggatagtcttcgcggaagactacgatttttcgcacttgttgtgctagtccggctgcacccttaagcgacttctgcacggatagtcttcgcggaagactacgatttttcgcacttgttgtgctagtccggctgcacccttatgcgacttttgcacagatattcttctcggaagactg

SEQ ID NO: 68974 - DNA, 454 bp, Zea mays
  unsure (1)..(454): unsure at all n locations
tccttcatcanaagatggcattgatcaacgtanagtctgtgtttatcccagcggctgcttgaagctgaagacttctcggcagtacctgataaaggagttcagtgctcgatcaatgggaagcatgttttggttagtcataggtgaatgtcatgcttctatatcccttttaatttacattgtctgggctgctgtatatggaatgttatggtaccttccaattttcctccaaaatactccctctgttccaaattgtaaggcgttctagctcttctagatatgtagctatcactatacattgtgtctagatacaataacaattgctatgtatgaatgcagtacaattggtatctaatgttgatgataatctggacactgctatgaatatattttttacgctcatatatccgcagccgttgatgttagtcggcataatacatatatcgcatagacagtg

SEQ ID NO: 68975 - DNA, 290 bp, Zea mays
ttacttcccatcacttggattgtcaaataaaagtttaaataatgcgttcttacaactctccccccataccattgtttccacgggcagatcttttacaacaaagcagtgtgtaagagataatcaaacttttcatgccattgcttaagtgctcgttttatggcatacaacgatattatcaacctggcaccttgtctctgaccatcacattgacccttctggctgatccatatagatatcctcatccaactctccactttagaaagctgtctttacattcacctgatgaatga

SEQ ID NO: 68976 - DNA, 296 bp, Zea mays
  unsure (1)..(296): unsure at all n locations
tcccaaacggcgcttgaacaggggcagaggcaacgggaacacgtgttcgaccgcggctgacacccctggttcacgcccgttcgcgcaccgcgcctttccagtgtacgcccgcgcgcactcgtcggtgcacgactggccgtgcaccgcgccgtgcctataaagacttcccaggcgcgccccacttcggcccgcactcaccctcaccgggcagacccttttccttatctccggcgagctcaattccgcccgccattgtcgncagagcttcgggcatcgtgggcagcccactccagcca

SEQ ID NO: 68977 - DNA, 448 bp, Zea mays
  unsure (1)..(448): unsure at all n locations
taacaacagggttaatagcctcatgtgtnttgcaagtattttgtcattttcaacaagaagattgtcatgatcaaatttaatttgagtatagtcttccttgatcttaactaggctattttgcaactccctattagcttcatttaattagtcatatttctccttagcatcttttagggagtctgtgagctcatttacagttgatgacatagttttattttcttcttttatttcatcactagcctttataactatgtcatacttggcatttaaagattcattttcatttttcaacctatcacatttagcttttgactttctaatgatttgagtatattctttaagtaagtcagctaactcatcatatgaaggtgaagcagaatcttcatcactatcactatcactatcatcatcaatattaatatcattttgtacctttcgttcaccctta

SEQ ID NO: 68978 - DNA, 397 bp, Zea mays
  unsure (1)..(397): unsure at all n locations
gcttgggcacacattngaagntcaggtcagcttatcacctctcttttttattgtcnaactgagagaaccagccggatcattgtatacatgttgatggcttgtgctttgcaagacaagttatgttgggacaaaaagctaccttatgcataacaacaagagctaccaggtcagtttgaagatgtcaccgttccaaacactctatgggaggaattgccaaactctgttgcacttggaccatcccggtgaaaggaaggtgttcggtctatatatttttcatgatgccgaagataatatcagaattgctcgagagaatctttagacaacacagatcacgcagctaagttatgctgacaccagtagaaaagatctgtagtttgatatgggaaactatgtttac

SEQ ID NO: 68979 - DNA, 428 bp, Zea mays
  unsure (1)..(428): unsure at all n locations
ntggatctcttgccttgcaactcttgtcaacatgtccataaattttttgggagncggnnntaaggaccgcccttcttatccccatcgcccttaacttccgaagccccaaaagtaaagcttcgtattcagcaatattatttatacagctgaaatcaagccttactgcatagcatgttctgactttggaaggtgcaactaagacagcagccgcacctgccccgaatgttccccaggaaccgtcgcagaacactgtccaagcttcggcatctttatatgcttcttcttcctgagcccctggcgtgcagtcagcgatgaagtctgctaacgcctatgactgaattggggatctgtgcacataatcaatgttgaattcattgagttccgcagcccactttccgatccttccagtagcctctctgttcctcatg

SEQ ID NO: 68980 - DNA, 405 bp, Zea mays
  unsure (1)..(405): unsure at all n locations
ttccagaatgtatgtaaacttcttaatctgtacatgttatgtatccgnggnggcaaaaatgaaccagagatgtttatggtgatggtggatctcgcggtgaccaaaacgtggtagaactcaaaactctaaaggaataaactaagaccatcaactcgacacaaccgatgcaaccaaaaactcaacaagccctagctaagtagtactagtaaatgctcaatggtttatatgattgcggtaaaactaatctactatttttttggctttttctggactataggagataagaaaacaacgaagaatagtaaatctctcaccgattaaccttgctctgattaccaactgatgtgcacccgttgggtgattgcccgatcttttgcaccggaaccatttcttcgttttttgcaa

SEQ ID NO: 68981 - DNA, 451 bp, Zea mays
actaagcttgtgcgccctcggcgttctgccgcagtcttttactaattctcccacctggaagactcggggctgaatccctcgggcgtggtagcgtcacagagactgctgataccgcgccgagtgtagtaaggccatgtcccgagcctcttccagctggtccagcgagtcttctcggctggtctggctgcttcggtcgtcgtacgcctttgtcctcggggaaccgtattctaagtctgtgggcaagatagcctcggtcccatagactagaaagaacggcgagaaacccggggcttggcttggcgtcgctcttagactctagaccaccgagggtagctctttcatccatcgcttgccgaacttgtgaggtcgttgaaatcctcggcttaagccctgagaatatgccagtggacgctcaactgcctattgtatgggtgagctcgactgccagtca

SEQ ID NO: 68982 - DNA, 414 bp, Zea mays
  unsure (1)..(414): unsure at all n locations
aagctttaagaggagaagcgctatctaacccatcttcgactcctttttanacnacacccacncaagtgtaagaaatggttaataaaatcatcctcttatataatatagatataatagtactttatttagatttcttgaattgttagggtgattgtataatttaaagaaaataagtgagttcatcctctcatatgtgttgtaatatgtatgaaggtaatataatttaaggaaaaatcataatagtgaaaaaatatgatgaaagtatgtttttaaaaattacattcataaaacatcgcgtaaaatgattgttcacataaataatatacgcggatcgctaatggatgtacaacatggagcaacgcttgaaataatatatttaacgtgaaattattttctcatatgatgagggcacac

SEQ ID NO: 68983 - DNA, 385 bp, Zea mays
  unsure (1)..(385): unsure at all n locations
atactcagcttatngggaggagaacatgccaacctagagctgttgactacttttactcagcactcgctgatattctctggtctgtaataaccaacttgatcttactttttaataaatgtaagtttatgttatcacttccgcatttctctatctccgatgttctgtaatgtctgcaaaacgggtgaaacgctccttgtgaggtaaggaaagatactgaacttgtcatgtagttcatgggcacctacaaggttgtctgacgtccgttggacaaagacaactgtatgtgggcctatatacttgggagggtccgtcacaatcaccgacggtcggttcctcctctcgggcgaaccgcctgtttcccttctggacaccattttgttccctc

SEQ ID NO: 68984 - DNA, 414 bp, Zea mays
ctcaagctggggaagggtcttcatccgcacatgtgctatgcggtgttttctcttccagcccatgctagtcttagctattaagcatgcatctagaccggcctcttcttttgcaaaatcaactaaataaagtttgccgtctaatacacccttaaaagctagtgaaccatcacttcttctaaagaccgacacatctatatttgtaaatagacaggtatatcccatattgcataattgactaaccgattgcaaattatattcaagagactctactaaaaacacatcggagatagagcgctcattagaaattgcaattttacctaacccttttaccttgccttgattcccatcaccgaatataattgaatcttgggaattcttattcttgacgtatgaagtgaacatattattctcccc

SEQ ID NO: 68985 - DNA, 419 bp, Zea mays
  unsure (1)..(419): unsure at all n locations
tggaggcgtctattgggtgacgacttggtgtatacttcttcttcattncttccgtcgccttgaatgcaacgggttgagcttcggatggttcgccaagctcgttgattttcctcgagccttctatcatgcactcaaaacttacaaaatgcccgataacttcctcgggggtcattttagtatatctaggattaccacgaatcaattgaacttgagtgggatttagaaaaatgagagatcttaaaataacatttaccacttcgtggtcgtcccacttcttgctcccgaagttgcgcacttggtttaccaaagtcttgatgccggtgtacatgtgttgtggctccttccctttgtgaagcctgaaccgaccgagctccccctcgatctgttcccgcttggtgatcttggtgagctcatctccc

SEQ ID NO: 68986 - DNA, 438 bp, Zea mays
tgacactataaatctatgcttcatacacggattaaacatcgccatatctctgatctgtttaagaccgagggtatatggagactgtctggttgtcattagccagataaacaaagaatgggattgttcaagtgactcattgggataatactgcgctgccgtccgaaagctggatgataagctcgaacgtctggaatttcatcatgtggaaagggatcgtgacatcagcacctgatacattatccaagctcggatccggtcgaactcatgtcccacccggagtttttgtgcaagaaattacacggacgagtatctctatagatcaaacagaagagtgcgacatcgtagatcaacccgagtcatactctgatgactggaggaggccgatcattatgtcatactgaacgatgaataaccagacgactagaactctgctgagcg

SEQ ID NO: 68987 - DNA, 450 bp, Zea mays
  unsure (1)..(450): unsure at all n locations
agcttctgatgcgtcctgggtagtaccttcagcctcagaaatgatatgcagtgctctcaaagcttgtttagtagccctgctaccctagtcctgcatattaaattcaaccccagcaccagcaatacttcgacttcgcctaggtgcagctacccgagaagattgtggagataataagtcattcatatcttgcttcggtgccggcagtaattgttcagttgttgtactgatttttctgaagaactcgtccttcttccgtggaggttgattcgtagtcctcaaggccgagtgcaaggtatcaattatctgaaatgagccttcctttgtcccctcattctgactgaattgaaggagaattgctntagttcttctgcgaaaatagaccttgagagccttngntgcttcatcgcttgttgctgccaccgtcccagccatcccagtcagctgatgagt

SEQ ID NO: 68988 - DNA, 462 bp, Zea mays
  unsure (1)..(462): unsure at all n locations
agcttctcgttcagatagtcccggatggactgccgaccggaggttcgacgggtagggaaacgaatgccaccgaagccatcggcctagagaataggacggggagttccgaaaagtcggcttcctccatgactaggaagtcgcttgtcgctccgcctcaaaagatcgagtcggaatcagatgtcgacatagcaacggacgtatccaaaatggcccggaatccggaacctgcacttgtgtcatcatctttgtcctcgccggtcgagtcagcctccgtgccatggtccctgcgcatctgacactcacacttattcatttaagcaatgtccatcttacttgtgatgtccattatctatagatattccagtctttggaccatcacacttgttcacttgtgttgaaccctgtaagctttgcattaagcacctattcaacacttagcacacctgttagntctttaattgg

SEQ ID NO: 68989 - DNA, 421 bp, Zea mays
tcacgcttgagtcagtcatcttgcaaaggataattgatgctcaaatggataatgagggtatgaagcacatttgtgagaagataagggctggaaaagccaaatgtttcaaagaagatgatcaaggcattgtatggtttaataaccgcatagtggtgccgaagaatgaagaggtctgccagcaaattcttgatgaagcacatcttagtcgctattctattcatcccggaagcactaagatgtatcatgatctgaaacaacattattggtgaacgaaaatgaagatcgagattgcacgctatgtggctagatgtgacacctgcagacgtgtcaaggccatacacttgaaagctaccggtccattacagtccctaccaataccaacatggaaatgggaagacattagtatggactttattgtggg

SEQ ID NO: 68990 - DNA, 369 bp, Zea mays
  unsure (1)..(369): unsure at all n locations
agcttatcaaaaccacctttgctaagcctgtcacccctgtgagagacggcgtgattgatgaacctatgagagatcctcctcagaaacaagtgtggcttccaaaacctaaccatcttatgaacacacttgacacctttcccgacatctctagcgatccccttcctagaacccctcagtcatctaaaaataaaatcctctttcacaaacaaaatccaccccaagagagaggtgaggtaccattgtgaatattgtgagagggatgggcatctagcttctttntgctttacgaggaagagagatgagcggtgggtttctgagtcgagcaggaaggacatgaactcgccctctcatggtgttcatgctcagcct

SEQ ID NO: 68991 - DNA, 375 bp, Zea mays
atgacgactcctttacgaggaaagacttttgtttattatgctcagacacacccgggtgtagaaggcaaaccgaatgcgaaccatgtacgtgccacgatcagttattcacgtacacagcagttacataatatggacatcatcacacagtgctcaaaatagtattaataagggaaatagtcgattacatcatacgtctgagacgtccatataagtcttacaataaatcaaagtgcggaaaagaaacgtagataacacggtcttcacaggcagccgactgggggttgccgctaacccacacctagaactcgatgtagacttggaactcctggaagtctcctttcacggcttcatcttcgtctgagcaatggttgcaat

SEQ ID NO: 68992 - DNA, 432 bp, Zea mays
agcttaatacccctcctaaaagattgtcattctttgttaagggcaaagctcccatgcctcaggataacgagggttacattttataccctatcggttatctcgagcacaaaattaggagaattcattctaggaagtctcactctggctctcatcatgcttttatttataagagtgaggcatctagttctaggcaatcaaacccgtgctaaattgcctaagaagaaaactcctattgcatcaaatgaacataacatttcatttaagacttttgatgcatcctatgtgcttactaacaaatcaggtaaagtagttgccatatatgttgggggcaaacacaagagctccaagacttgtgtttgggtacccaaggtgcttgtttctaatgtcaaaggacccaagaccatttgggtacctaagaacaagggctaaatt

SEQ ID NO: 68993 - DNA, 392 bp, Zea mays
  unsure (1)..(392): unsure at all n locations
actacctttcttttcttttttgttctatatcttgagaccataatatttttaagtgatcttgagtgagaaatatagtctatgtgaggtgctctaattatttcaagtgtatgcacatgagaaggggttctaagggtagagtttaagggagaaaaataaaataaggaggggatttggaggttagggtttcaaaccttggttgggattttgggatgttacagctcccgaggtaccctaggacatttccgagacccacgggaacgattttgtaacggaatcccaccagagggaggcatcgagccctcggaccccgtcaaaaggggaccgggtccagcaaatcacgcgcgggtacttntggagcgcgccttcgggccactagcggacccctaacaaat

SEQ ID NO: 68994 - DNA, 462 bp, Zea mays
agcttagacagcgttctacgatggttcttggggaaccttctgtgcaggagcggatgcagtcctagtggcaccttcaaaagtcaaaacatgttatgcacccaagcttgatttcagcttcacaaataatattgctgagtactaagcacttatgttggggctttggaagttaagggcgatacaaacaagaagggccattctgaaaactgattctcaagttatttctggccatgtggacaaaagtagctaggtaagagatccgaagcttgaaagatatctggatacagttcaaaggttggaggcttctttcgaaggtttttctgttaagaatatcccaagaggtgaaaatgagcatgcagatttactagccaaatcagtggctcaggggctccctctaccttcggaagtatttattaaaacaataaaggcaccttcggttgaactcttggagagagcagtgcttac

SEQ ID NO: 68995 - DNA, 398 bp, Zea mays
  unsure (1)..(398): unsure at all n locations
ctcgncgacgatgagcgacgcctacgcgaacgccttctgccagtggtgtttgttcggggtttccaagtaagaaacatggattcatctttagcgttggtttatgaaaatgactcacaagtcagatccatggaaaaaatattacggagaataaatgtcacacatataaaaaagaatttaagttgaaaagattattcaaacaaaagaaattgcatgcaaggctcttctttaaatactactccctccatccaaaaatataattcaggaatctcgttgataattatctactactacacattgtgcaaaggtagcaggtagactttgggagagatgtagtagatanttttactgtaacagatattgacataaacatacatgtggtgtagtggtagctataagca

SEQ ID NO: 68996 - DNA, 463 bp, Zea mays
  unsure (1)..(463): unsure at all n locations
tgcaagcttgagaagattcttcatcccaacatgtgctaggcagtgatgccagagccagcccatattaatcttagcaattaagcaagtgtctagttcagccttgctatcattaaaatcaactagatatagctgaccatctaacgctcccttaaatgctattgaatcatcacttcttctaaagacagtaacacctatatcagtaaaaatacaatagtagcccattttgcatagttgagaaatagaaagcaaattgtaatctaaagaatctacgagaaaaacattagaaatggattggtcaggggatatagcaattntaccaaaacctttgaccaaaccttgatttccatccccgaatgtgatagctctttggggatctccatnttttctcgtatgaggagaacatccttttctcccctatcatgtggttcgtgcaccctttatcgattatccaacttgatccacc

SEQ ID NO: 68997 - DNA, 405 bp, Zea mays
  unsure (1)..(405): unsure at all n locations
gcatgtntaaatttcttgtattgcatctagggtttgtctaacctagttgagataaccgccgacaaagcgagtgaaaaagcttaactcggatcaaacttgacaagtcttagttttaagcttttagcacttaaattcttactttttatgcaattgttggttcttgaaatatgcatgaggtactgtacttagggggagtattcaaaactcaaatcactcatgaaaacccctagtgcaaggccaaaatgcaaatttcaccatttgcctattttctctaaaaattatctagcctatggcaaaatattttgaacattatgagaaaagtatatgatggtgcccatacccgtcccagcaagtgttattntgtgtgtctataaattgggatttggtttggttgggaactagata

SEQ ID NO: 68998 - DNA, 444 bp, Zea mays
  unsure (1)..(444): unsure at all n locations
agcttccactgcaaatctacaagaattcttatgtctcacaagcctgcctttggtcttcaaatggtccgccattgattttcaattggtatctttgagactacatttggtatcatttacatgtcttcttcaacatttggttagactatatttcatatcttatactttccatgttgttatacatgcataagttgttaactcatatctattacctatgcataagggaagttagtctaatcaaattatgtcttgcacctctatttctcacttgctttttcctaagtagaagatctctgtcagggggagtatttcttcgtctctaagggctggtttggcagcccaaaaccccactagtttcctgaccttttctttgggaaaaaagcccacacggattatttcgttgggtttgtccatttgtttgttnggaagcccatcatccggctgata

SEQ ID NO: 68999 - DNA, 309 bp, Zea mays
  unsure (1)..(309): unsure at all n locations
ttcgcctcagtatatcacccgcagtgcaacggagttgtgttacgcgccaatggaaaaantttcacagctgtcaaaaagatgctcctcgacgaaaaaaagggcaagtgggccgatttgctaccttatgcggtctggacgctaaacacgactgagtgcaggccgaccgggttcacccctntccgccttctatatggatcggaggccatgaccccacacgaaataaaacatgggtccccgcgaacaggttcgtcagcctgtctcgacgtggacgagcccactttgaaggatctcatcgatggagaccgagta

SEQ ID NO: 69000 - DNA, 454 bp, Zea mays
agcttgacaacgaggagatggttctcattatcaagagcttccgccaaatccttaagcaaaggagggggaaggactacaagtcccgctccaagaaggtgtgctaccgatgtggtaagtccggtcatttcatagctaaatgtcctatttctagtagaagtgacagggacgacgataagaaagggaagaacacggagaagaaaagatattacaagaagaagggcggcgatgcccacatatgtcgggaatgggactccgacgagagctccaccgactcctcctccgacgaggacgccgccaacatcgctgtcaacaagggactcctcttccccaacgtcggccacaagtgtctcatggctaaggacggcaagaagaagaacgtacactctagagccacccctaaatatacaacatctagtgatgagggtagctctagtgatagtgaagataatttaat

SEQ ID NO: 69001 - DNA, 382 bp, Zea mays
  unsure (1)..(382): unsure at all n locations
agaaactcaagcttgaatgtgtctntggttgaagtgaatgctcttgtattgttatgagagtgaatgagaggcttggatgaagtgaatggaggtggttggggttgtatttatagcctccaaccacttcctagccgttgctccaattctgtcgaccgcggacggtccgtgcccttggtccggacggcacgcccctgcacatcaacgactgaaatcacaacagtcagcaataatagctatatcaacggctatattgcatttaatgcgtcgtcagaagtcagataaagcagtcgcggacggtccggccgtgcgccccggacggtccgcgaggaggctaaaaatgcattttacttaaccagtcaccttcggggtttcatggtttttc

SEQ ID NO: 69002 - DNA, 447 bp, Zea mays
agcttatagaatttatgagatgactatgggcttcggagggagaatccaccctaggcatgtcagatcaatccatagctctagtcagaatgatgacaaaggaagccagcttcagaggccacagcacacctcatagtcttcgggacagcatcaaagctccttcaggccaccagctccaaggggcaaaggcggcaggggcttcggaggaagatatggggaccagcccaggaaaatatactgcttattcggtggagaggacaagggtcatactacaagaacgtgccagatcactattctgaagcaaaaagagattgccaaaacagaagctcggcagaattagccgaagcaggttttacatactacttcgtgccactctccttagatactagaatatgtgggcaaccaacctgtagcctccgttgcttcggcaagccattcacaagcttcttg

SEQ ID NO: 69003 - DNA, 364 bp, Zea mays
  unsure (1)..(364): unsure at all n locations
agcgaatcaggatgccaattcggctatgctactctattcttggcgcatgaatgttatcttttgcctggacggtggtggtgttgccaaatgcgatggtaaagccaatcttcccaccacatgcatggctgttacatcgttttcttgatgtggatccaagagaagcggcaccacgttgggccatggtcaacagccgaccaatccgcgcagcacgacgtaagcgagcgaaaggaaggagcagtgttcccatgcaccgcagctgtatcagacagcgacactggactaattaaactgtgaccaggtgcctctcctctcttncgcgcgctaagctcctgccgtcgaggtcaattataatcctgaacaagtt

SEQ ID NO: 69004 - DNA, 452 bp, Zea mays
agcttacccatgacgaggcatatggccagttaaaaggtcctcggtcagcaggcctacattggctcggtccttaagcgactcagacggagacactacaccgagactcctttctcgtgcaagtcacccgcccggtctcgtctttattacttaaaacacaaagtttggtacctgacagtggtatatcttttcagatgttgaacccatcatggccatgatggattcaccatcacaagtcttttctttgtaaaaattcccatccagcgtgaagcatcaccttttgttttaaaacaaaacattttgttttctaaagaaaagctaagcattagaaaactttaagcaaatcaggtaacaaggaatggtaatcagttccaaggaaaagaatgtagcaattgtttagcacacaactcctatcacctaatgcatcatttcaagtgataaagagtttaaaacag

SEQ ID NO: 69005 - DNA, 358 bp, Zea mays
cgccaagccctaggacccggccggacttcaccggaggttcgagatcgacctcaccggacttcgttcttccgccaccgcgcgtggaccgagctatttagtgagtccccacccaattccttgcgctcatatcttctctggcatcccgtggacctccctgacccatctgattgaactatctcgccatgaccaggccggtctcctcgccgccgacgagcatccccgcctgcgcgcgtggaccgaccgactccggccatctccgacggcgtcccgcacaccgttgtgatccccgagacctccccttcgtcctcgaccacttcactggagcaatctcgccgccggtaagccccttcaccctttc

SEQ ID NO: 69006 - DNA, 391 bp, Zea mays
  unsure (1)..(391): unsure at all n locations
actcagctggcgcgcggagacggtctcatagcgggcgtaatttcgtgagccaggngagtccaaagaggtcacggcgacacggtgaaagggttgagccacgcggcgcgatgccgggaagcggcggtcaccggcgaggtaatccactcggccgcaaggaagaagagagagccacggaggtcaccggagtgattgccagcgcacgggcggtgaagatcttttaacgccgcaaagttatccacatccccgagcacgaatcgtgacgccggcgacgtgaatcacggcggaggagtgatcgacggcggtggaaagaaacctgagaatcttcttcagttactgtaccatcagaagttcaagtttcagttcttgctacatgcctgacagagcaacttca

SEQ ID NO: 69007 - DNA, 467 bp, Zea mays
  unsure (1)..(467): unsure at all n locations
agctntatatggacgacagtgtcgaactcctctaaattggtatgaacctggagaaagatacttctttaggcctgatatggtgaaagaggccgaggataaggtttagaaaattatttataatatgaagaaggcacaaactcggcagaagagttatgcagacacacggcgaaggcccttatatttcctggaaggagactatgtttacctgaaagtcgcaccaatgaaaggtgtatcgcgttttggggttaaagggaagcttgcacccaggtacattggtccattcctggtgcttgagcaatgtggaccagtggcataccgacttcaactacccgaaacattgtctgctgtgcataatgtgttccacgtgtcacaattgaagaagtgtcttcgggttcccgatcgaaccattgaagtgactgatgttgtcctggaaccagaattaacatactcngaacatcctattcgag

SEQ ID NO: 69008 - DNA, 380 bp, Zea mays
  unsure (1)..(380): unsure at all n locations
atnttaaactaatgtgtatattgagtttatactaaacaactgaattctgaatccgatggaaaacataaagtgcattggaacgtgtacgattagagtggttgatagatacagaagaaagacagagctaaaaagcactcgcgccactatagtatgtatgttcatatcacaagactgtctggaatgccttagccttttctggttattcctcttcacatgcagcaagcatgccctgtgtcaaaactagatcaagattcaagatccagaccacagatttgctttcaccccctattaccatcataaaaatctagtgacagaggaaaactcataggtttaactagttgcactgagactggatatgtccggtggctggcacaatgtgc

SEQ ID NO: 69009 - DNA, 411 bp, Zea mays
  unsure (1)..(411): unsure at all n locations
agctngcccgagctcgagccgaggaccagtcccaccttattcaaagaatcgcgctcgccggagttcgtgaaccctccggagcacgtggactgggtaaccttctgcgccatttctcgattccttgcgcacatggcctctacatcacccagtgtagcccctcatgcactttaattgaaccccgccgccatggtttagccttcgcaggtggctaagtagttaaataggtgcaggggagtttgtaaattttgtctacgtgttactgaacctcggttgctgcgcaggttcaaggttntgggcctgcgcacgcaaccgctactgacaatgctaatgttgtggcggcttccaccgtggttgctgaaaatgcttcggatgattccgtaagttttttgagtctgatgatactgggagttc

SEQ ID NO: 69010 - DNA, 389 bp, Zea mays
gctctggaatctgacagatgcacaaacaacatatcattatactaagctgtcatcctcggcctccgcatataaagagccctcggtgtcaccacctgtatagtccgaatagactccaaggtagtcgccggccaagtcgagaaagactatgcagcaaaggaccccgcacttatgcagtacctcgcggccatccgaagtctcgagaaacaattcaagggattcacgttgcagcatgtggaccgggccaagaatgaagaagctgatgcattggccaaggcagccgccaggggtgaagccctctatcacgtcatcggcacgccagccgtccgcagccctgaaagcttcaaataaccaacgacagcgagggccaccgcatgatcaatcttattatg

SEQ ID NO: 69011 - DNA, 463 bp, Zea mays
  unsure (1)..(463): unsure at all n locations
agcttgcatgaagtattgtacataatgaatatataatatttatgtaataagcaaataaaattttgtaggattcgcataacacctggactggatgtgaacatgcgttaacaataataacaactggtaaccaggtacatattaaaataatattgtttatttgtctaaaatgaaaatatatatttatgctgcatgtaaatgttgatgtatttgggttgtgctctaaaggaggacaacatgagattttcacatgaggttggtgatacaagttcttcgtgtcacgtagcacatgaacaaatggaacatattgctgcatcctcagaagctaaaaaggtgagcattgataaatgattctactgattggtataaatatatgtaaatatgcgtatactaaatagtaacgtatattattatgcagaggttgaatcntaatgtggatgttataaatctgagtatgccggatcgc

SEQ ID NO: 69012 - DNA, 366 bp, Zea mays
gagaacacgtgataggtttgactaatgtgcatttcttaaaagatagaccttgtgcagcttgtcaagcagggaaacaagtgggaggctctcatcacaccaaaaatgtgatgacaacatcaagacccctggagctgctacatatggacctcttcggacccgtcgcctatctgagcatagggggaagtaagtatggtctagttattgttgatgacttttcccgcttcacttgggtgttctttttacaggataagtctgagacccaaggaaccctcaagcgcttcctaaggagagctcaaaatgagtttgagctcaaagtgaagaagatcatgagcgacaacgggtccgagttcaagaaccttcaagtgg

SEQ ID NO: 69013 - DNA, 410 bp, Zea mays
tgaggcatgcaagctgggcttcggctcatcctgcctgctcatctagattgttgataacccgagtcgcagcccaataaactcatgagttctgaagaaggtgctgcttctacaagggaatctattcttgttaatgggaattcatccttcgaacatgccttattgagatctgtgtaagcaatgcacattctccatcttacattagctttctttaccataacagtgttggccaaacactctgggtatgttacttatctgataacaccggcacttagaagtctcttcacttcatttcgtgcaccttcggctttatcatcggacattctctaaagcctctactttcttggtctgaaggacgggtgcacattgagtgaatgctcaataacttctctattgacaccacagagatcatt

SEQ ID NO: 69014 - DNA, 323 bp, Zea mays
  unsure (1)..(323): unsure at all n locations
tgcacgcaagatcacgaagaatacctccagtcgtatgtctgaangttcttgcgtctgagggcacaagcgccaatagtgcccaatgaaattgtcattgaggccatgatcaaggggcttcggctaggacctgcggcccaatacttcgccaggaagccccctcagaccctggagaaattgcttcagaagatggatgaatacatccgcgctgataatgactttcggcagagaagggaagaagcttacaggttctccgaaatgaccaagggcttccgaggaagagtccaccaaggcacgtcagatcaatccactctactcagaatgac

SEQ ID NO: 69015 - DNA, 464 bp, Zea mays
  unsure (1)..(464): unsure at all n locations
agcttatgaagattcttcatcccaacatgggctagtctacgatgccagagccaacccatgttagtcttagcaattaagcaagtgtcgagttcagctctattaaaatccactaagtatagctgaccctctaacacacccttaaatgctattgaatcatcacttcttctaaagacagtgacacctatatcagtaaaaagacaggtgtagcccatttgacataattgggaaacagaaagcaagttgtaatctaatgaatcaacaagaaaaacattggaaatggaatggtcaggagatataacaattttaccaagacctttgaccaaaccttgatttccatccccgaatgtgatagctcgttggggatcttggtttttcacatatgaggagaacatccttttctcccctgtcatgtggttggtgcacccgctatcgagtatgcaactngagcccncggatgcataaac

SEQ ID NO: 69016 - DNA, 356 bp, Zea mays
  unsure (1)..(356): unsure at all n locations
tactcctcnctgngaagggcccttcatcatcgccaagattntgaagcccgagacatacaagctggccaacggtcaaggcgaggtctacaacaacgcttggaacatccaacagctacgtcgcttttacccttaaaatgtttcaagtcgttcatgtatctcgctttctttacatgcataaataaagtctaaccatcaaggaaggatcaaccttgcctcggcaaagcccgaccctccctcgggggctagaagggggcaaccccctctgcgtcaaatntttcctcggaaaagtcttttattagaacatctttcgtgcttttcgactacgtcgataacagaaatcctaagacaaccgagag

SEQ ID NO: 69017 - DNA, 470 bp, Zea mays
  unsure (1)..(470): unsure at all n locations
tcgcctgcggcatgaagcttcacaagaagagtatgtctcttattatacgatcgcaatggccatgtgaacaaactgttgaaaagaattaacagttccaacacattntactttaaaagaaataataaaaaaatatgctgcgtcgtgcggtgagaaaacgctttcggattctaacattttgtccatgtgaaccaaaagatgaaccattgcattttgttcatgagggcgtccaactattgcaaatcatcaaacaaaaatgacagcttaagctgagctataaaaacactacaaaagcatcaatactgcaaacatctcaaccctaacgagaaggcgctgactttctttatataataaaaagataactaaggactgtctagagtctatttccagatattatcgtgcacagtacanaccatattcagcataacgtcacacagggagtgagtggtaggcagcacgcctggacaaagagg

SEQ ID NO: 69018 - DNA, 308 bp, Zea mays
  unsure (1)..(308): unsure at all n locations
gagaacacgtgataggtctaaccaatgtttatttcttataatatagaccttgtgcagcttgtcaagcagggaaaaaggtgggaggctctcatcacaccaaaaatgtgatgacaacatcaagacccctggagctgctacatatggacctcttcggacccgtcgcctatctgagcataggaggaagtaagtatggtctagatatcgttgatgactttctccgcttcacatgggtgttctttttgcaggataagtctgaaaccaagggaccctcaagcgctttctcaggagagctcaaaatgagtntgagc

SEQ ID NO: 69019 - DNA, 444 bp, Zea mays
agcttctaaagggagaacacattttaggtatttataaatgttcattttgagaaagacaggatttgtagcgcatgccaagcagggaagcaagttggagtccatcatccacacaagaacatcatgacgaccgacaggccacttgagctactccacatggatctattcggcccgattgcttacataagcatcggcgggagtaagtattgtcttgtaatagtggatgattattctcgcttcacttgggtattctttttacaggaaaaatctcaaacccaagaaaccttaaaaggattcttgagacgggctcaaaatgagttcaacttaagaatcaagaaaataagaagcgacaacggaacggagttcaagaactcacaaattgaaggctttcttgaggaggagggcatcaagcatgagttctcttctccctacacccctcaacaaaat

SEQ ID NO: 69020 - DNA, 318 bp, Zea mays
  unsure (1)..(318): unsure at all n locations
agaaccggacgaagctcctgtttgaaatctgtttcttatgaagaaaatnttaaagtttcacaagttcataattaaatggccagagtccgctctaccgctagggttgagcgcgagggggaggagactgaagcttcngagatcgttcctatctccgaagccatgcaacgatccgggctagtgacttcggaaaagactcctattgatgatgcagaacaaacaatcgctgaagcagaagatgctgaggaaactgaccccgaagatgattatcaccttgctacaccaagcaaacccagccatttggacttcgggaaatctact

SEQ ID NO: 69021 - DNA, 458 bp, Zea mays
agcttgtagtgcatgtcaagctggaaaattatttgctaacacacatcctacaaaagctttcatgtcaacatcaaggccactagaactgcttcacatggatctatttggaccaacaacttatgcaagtgctggtggcaacctctactgtctggttatagttgatgacttttcaagatacacttgggtgttctttctccatgataaatctgaagttgcatctatattcaagaagtttgccaaaaaggctcaaaatgaatttgattgcaagatcaagaagattagaagtgacaatggaaaagaatttgataacaccaacatacatgaatattgtgatgagattgggatcaagcatgaagtttcagcaacatacacacctcaacagaatggagttgttgaaaggaagaacatgaccttgatcactcttgcaaggacaatgattgatgagtataacacaccgg

SEQ ID NO: 69022 - DNA, 324 bp, Zea mays
  unsure (1)..(324): unsure at all n locations
tacaaagaaatgaaagtcattcttgttttgntactttagaaaaatataagccttataaaaaactcgacctacagggtaagaccgcccccacggtattatattaagaacaacttctcacgcaggtcgagaaaacccctgaacccctgccccagcggcaccgtagcccatgtgagaacgaccgcgaccagggccgagccttagacctgtgctttgacgtgagacagacgaggggattttttaaccacaacatgaaaattcgctctcgcgaggagtcaaacccaggaactcaaaccacctaaccaactcggctcactcttctgcttt

SEQ ID NO: 69023 - DNA, 455 bp, Zea mays
  unsure (1)..(455): unsure at all n locations
agcttgtataatgttctcaagctngtttttttatcatgtagacgagctggtcacttcaaaatacaccatcgacatcgtaggacaccaaatgcttgttcaatattctccctttcgccttcttgatgattagcaaactcctgatctttgtcattgataggcatggatattgacttaacaaaaatagcccattccggatatattccatcagctagatagtaaccctggtcgtattgattcccattaaccatatattgcactcgaggagcttgccctttgagttcttggatgaacaatgatgattgttgcaggacattgatatcattattagaaccagcaacaccgaagaatgcatgccaagtccaaagatcatgtgaggccacaacttcaagaatcagagttggtactttntgatcacctcaagtgaattgacccttccatccaacaggacatccttc

SEQ ID NO: 69024 - DNA, 421 bp, Zea mays
  unsure (1)..(421): unsure at all n locations
ntaaccnctgcgagacccttccncgtttctttctaaccttgtgtaatgtaatatcgtatgtcatattctatgcatgtttaatcgacttgttctcttgtatggtgtactgtttgtttcctaatttgaatggataaatgtatgtatgtctgcactcgcatagagaacgattcggtcgaggagcccgaagaactcgcaagagaagtccctgagcagcagtcggttggtggaggcaagtgtcccttgacctatctctgtcctatacattctttaattcacctcccgcattacacatttatacctaaggattgactagcttttgttatctatgtccttgttacctatctgggttggattattattgcttagtcttatgttattgctcaactctaatcaatgaacatgatgagaattatcaatgata

SEQ ID NO: 69025 - DNA, 462 bp, Zea mays
  unsure (1)..(462): unsure at all n locations
agcttcgaccacagcattacatgttcaatataacacattgggattcaaaggctcccgatcaacatatttgcctgagagttaaataagagcaacatgactttaatttggcgaatgtaaaaaaggaacagaaacttctcttaccttccctgaatctttgatggaaccctttcctctaatgaaaacacgacacccagtggatgcttctactcgctttagagaattacctctaggtcctaaaatgcgccccacaaaattgaactgggaaagaagagaagaatatatcaacaaaaaaaaattaaaacagctcaatggttctttcgtgtgaacttcaagagaaactgcacaagttggagggcatacattcggataagaatcaactggaacctccagacgaagaatcttctttacaacatgggagctaggacttgnnggtgctccctgccagtccatgctggttccttg

SEQ ID NO: 69026 - DNA, 261 bp, Zea mays
  unsure (1)..(261): unsure at all n locations
atgtgnggtactagtggtacgctatgcggtgtccaaataaattaaccggtcgatgtggtagtggtcgtgcgtgatttattgttagtgagtagttggaattccgagctatatgaagattatgttaaaaactagtaggcggcgtgtaactgcattcgtatggtgaataataggtcggtgggtattgttgatgccagtagcaaatgtagtcttatggagttttacgccatgtgtaaatgcctccatgatagaccccaaaaatgt

SEQ ID NO: 69027 - DNA, 416 bp, Zea mays
agctgtagctattcttgttcgaaattttctgattgagaaagaagcttcaaatttaattctgttattttggcttcagcatccgctaataagccttcggttgtttgaagctcaaagtatttcttttcgatggcagctgattgctcttttatcttgttctctaagctctcaattataacttcgcgctttttgtcctctaagtcctgctgcatttttaaagccttgctcaacagcatactctatggacaaataaccttcattagaaaacatttatgttattacaaataataaaggttagacaaaagttgtttaccttaaaattggaataaaataagctaccgacaatgtgttgtcgtccgtagcgactgatatctgcttcgagcttcggaaaaccgatactctttgatagagtaccgata

SEQ ID NO: 69028 - DNA, 400 bp, Zea mays
  unsure (1)..(400): unsure at all n locations
ccttattgcctanaatagcaactactttactagacaatgtatttgctataacattaccggacactaggtcaaatatgaacaagctagttttagggagttgcaaaccaatatgaacacatatgttgacatgatgatttttcttccaaggtttggtggtttgccaaccacttacttcttatcaaggcaagtccaaggttgtcatcgatcctcatgctagtggtgacccatgagtcacaatcgagctctagcatttgatctagtcataccacttgatgctcttcacaccttgctctactcgtgttgctctttgtgtaccatgtggggtcagcttggtacgcccatagtgacttttatagaggcatggaaaacttcatgccacgcttcactaagcacaactttt

SEQ ID NO: 69029 - DNA, 445 bp, Zea mays
  unsure (1)..(445): unsure at all n locations
agcttatgaagattcttcatcccatcttgttctagncggcggggccagagccaacccatgttagtcttagcaattaaacatgtgtcgagctcagctctatcaaaatctactaagtatagctgaccctctaacacacccttaaatgctattgaatcatcacttcttctaaagacagtgacacctatatcagtaaaaagacagttgtagcccatttgacataattgggaaacagaaagcaagttgtaatctaatgaatcaacaagaaaaacattggaaatggaatggtcaggtgaaatagcaattntacccaaacctttgaccaaaccttgatttccatccccgaatgtgatagctcgttggggatcttggtttttctcatatgaggagaacatncttttcctccctgtcatatggttcgtgcacccactgtcgagtatccaacttg

SEQ ID NO: 69030 - DNA, 383 bp, Zea mays
taaagccatggtaagtagcataggccaattatattctaattgactcaagcctagctacgggtgcataggtttcaccgaaatccaaaccttcgacttgggagtatcccttggccacaagtcgagctttgttccttgtcaccacaccatgctcatcttgcttgttgcggaagacccatttggttcctacaacattttggttaggacgtggaactaaatgccatacctcattcctagtaaagttgttgagctcctcttgcatcgccaccacccaatccgaatcttgaagcgcttcctctaccctgtgtggctcaatagaggaaacaaacgagtaatgttcacaaaaatgtgcaacccgagatctagtaggtacccctttatgaata

SEQ ID NO: 69031 - DNA, 469 bp, Zea mays
agcttgtgaagattctttatcccaacatgtgctagtctgcgatgccagagccagcccatgttagtcatagctattaagcaagtgtcgagttcagctctatcaaaatctactaagtatagctgatgtaacaccccaggtgttaccaaggtgctggcttcctaatggcacatatacctattatcacatgtggttaaaacttggaggagagggagcacttaagaccttggaagcatgagtgagttaagaaatgccaaggaccaaaacattacccaagcttttaggcaatatcaccttgggcaaggtaggattgaaccttgggtcctctcccttgaagcctttagttgagagaaagatcaagcaaatgcacatttcataatttaaaccttaaccaaagtttaagaataccaaaatgtttacaaaagacagtaaaggaactttacaaaaagacccctataagacccctaaatca

SEQ ID NO: 69032 - DNA, 333 bp, Zea mays
  unsure (1)..(333): unsure at all n locations
tatcaagattcaaagactctgtttgcagaagagcttactatgagtggatcctccttaaaattcgttttacttatcatgttaagtaattacctgcatttagatttctttctattctagatcaagcacttggcctatactagccatcttttatcatcccttcggntcacttgttgctacgtgtaaggcagtgaccaagtcttcatgtccgagaagtaacgacgatctgaatcgattaatacctagctagggatctccaaccacacgacataagtatcactcaccccttacatatgtcaactcgcacccgggtttctcaactagaatgggttcatg

SEQ ID NO: 69033 - DNA, 472 bp, Zea mays
  unsure (1)..(472): unsure at all n locations
catgcaagcttgggactctatgattgattgggcatttgccatatatntgatatccatgtactcatcattcttcccttcttggttttgagtcatcctcgactcaaagtcggtggtgcctgcaaaaggtgttgatgtagtgcttgatgttatccaactttgctccccttcttgaagttgaccatgttgttgtaaaacataaaagaaggatgtgtgaaactgttcaagatattgttagatttaacacaacctctaatttatcatgttgtttcatgacaaaaggagatttcatatttgaacaaatatatactcgatgtaccatatattcttcttttcaattatatcttccaatagcatgatatgtatgtttagataaccatggcaaatcggcactaaaagaaagtttctcctctaaattatctagattacatagaacatcaaattcaatatagcccacagtatttaaagaataaaa

SEQ ID NO: 69034 - DNA, 330 bp, Zea mays
  unsure (1)..(330): unsure at all n locations
ccttcngccttcgcaggccgaaggttgaaataaatgatgctgtctaagaatgccagagagccttcggcgttgtctgctcttttatagggacaagggacttagtacaagagcatatcgccttcacggtgtggccgcttgcggagaaatgggaaatgccacaagataccataaaagaggccgacgaaggtggacttatcaggtttaagtacactttcaagtttggagataaatttattgagccagatgatgagtggttgaaaagcattgacaatttaagtgatgagctgcttgtgacctattcgaaagccgaagatactgcaatgtcagcag

SEQ ID NO: 69035 - DNA, 455 bp, Zea mays
  unsure (1)..(455): unsure at all n locations
agctntaccaaatggacgtgaaaagtgcctttctcaatggaccaatcaaggaagaggtctatgttgagcaacctcccggctttgaagatagtgagtaccctaaccatgtttataaactctctaaggcgctttatgggctcaagcaagccccaagagcatggtatgaatgccttagggatttccttatcactaatggattcaaagtcggaaaggctgatcctactttatttactaaaactcttgaaaatgacttgttcgtatgccaaatttatgttgatgatattatatttgggtctactaacgagtctacatgtgaagaatttagtatgatcatgacacaaaaaatcgagatgtctatgatgggggagttgaagtatttcttacgatctcaagtaaagcaactctaagagggcaccttnctaagccanacaaagtatactcaagatattctaagc

SEQ ID NO: 69036 - DNA, 436 bp, Zea mays
  unsure (1)..(436): unsure at all n locations
atctggatatggttcgaagagttgaagctttattcttggattttctgtcaaaaatatccctcgaggacaaaatgagcatgctgatttgctagctaagtcagcagcacaggggctgcctttaccttctgatgtgttcttccaaacaataaaagcacctttggtggaacttcttgaaagagcagtcctcaatatatctcctgtttatagcgaagattggagaactgagatcatctcttaccttcagggaaaattcctttcagatgacgaagcttataacaggaggatagaggcaagagctcgtccatatgtcatcatagaaggggagttgtacaagcatggagtatgtgctccgctactcacgtgtttatccacaaccgaaggtatagagttgatgaaagaaatacatgcangcctgtgtggatctcacattggatct

SEQ ID NO: 69037 - DNA, 450 bp, Zea mays
  unsure (1)..(450): unsure at all n locations
agctntggaaaaagataaaattctacttacattggtggacaaggtaaagggggatgaagctaactacaagacccaatctgaaatccaaaggaacgagattgaaaacctccaaaagcaactggccgaagccaaattgaaatgcgttattgccgaagctgaccgagatgccagtgattactggaaaaattattgggaaaaaacagttgcagaccttcactcatcaaaagaaagatgttatgaaaaatctttggaatgtgtgaagaagataaaaactagcttcgctaacgttggcgcatattcaagcgaagataacttcatacggngcgatcccgaaggcccaattgaatggatcagcagtgaggccgaagcctttgaggagattttgagtgaccgtggggacgtctgtgccttctctggtgcgaggggtattgcagctattntggagaagtc

SEQ ID NO: 69038 - DNA, 349 bp, Zea mays
gtctacttcatcatcactagactcatcatcacttgaagattcatatgtaatggtacttaccttcttctcctttgccatgaggcaggtgtgatgctcgttggggaagagagccgacttgttgaaggtcgaggcggtgagtccttcgttgtcggagtcagatgaggagcaatccgaatcccactcctttccaaggtgtgcctcgcccttcgcctttttgtaggccttcttgttttcccacttttcgctctttccttgttcctggtcactatcattatcaggatagttagcaataaagtgaccaatcttaccacaggagtgctttcccttcgtcttgctcttgttgggatgc

SEQ ID NO: 69039 - DNA, 410 bp, Zea mays
attagctacacagggtactatgctatatccagtgcattcatgaacgacatgaggaactagacatggactggatctttagcacgaatggcaccaaacagtgggaattccctggatcatcgatgacctaatacgttaccgcgagctagttatagtatatgagaaaacttctattccagtatcctctctatatgaaagaactgagcggataaggtgtacaccaactatccaccttatgtaaggacccttgaaggagacggcaatattctctccctatgtgtgctgacttgccacaacataaagagtgccttttcccaatccctggaacatagagcatctccgcaagttctatacataggagcaacgtctgtggggttaaggtttcttcttcatgtaactaggttgggcatacg

SEQ ID NO: 69040 - DNA, 351 bp, Zea mays
  unsure (1)..(351): unsure at all n locations
acatgtgctaagcggcgatgtttttgncagtccatgctagtcttagctattaagcatgcatctagaccggcctcttcttttgcaaaatcaactaaataaagtttgccgtctaatacacccttaaaagctagtgaaccatcacttcttctaaagacagacacatctacanttgtaaatagacagttataccccatattgcataattgactaacagatagcagattatatccaagagactctactaaaaacacattagatatggagtgctcattagaaattgcaattntacctaaaccttttaccttgccttggattccatcaccgaatacaattgaatcttgggaatcttta

SEQ ID NO: 69041 - DNA, 360 bp, Zea mays
tatcacccgcagacagacggtcagactgaaataactaaccagatcttagaagatatgttgagagcctgtgcgttgcaagacaagtcaggatgggacaaaaggttaccttatgcataattcttctacaacaatagcttaccaggccagcctgaagatgtcaccgtttcaggcactctatggacggagttgtaggactccgctgcactgggaccagcctggagagagacaggtgtttggccccgacatcttgcttgaagccgaagaaaatatcaaaatggttcgggagaatctgaagacagcccagtcaagacagtgaagctatgcggaccgaaggagaagagaactgagttctgaagtggg

SEQ ID NO: 69042 - DNA, 309 bp, Zea mays
ggagaagcagaaatccctgaagtcttggttgtcatattgcttgccattgtcaactgtgagctcggacgggactccgaaccggcaaacaatgttttgccagaagaatttctgggcagtcttcgatgttattgtgatactgccctcgcctcgatccatttggtaaaatactcgacgacgacgaaggtgaatttgaggttcccttgtgccgtgggtagtggcccgacaatgtccaggccccagcgctgaaggggccacgtgtgggcaattagctttgtgaatcgcgaagggctttcagagcatggagaaaac

SEQ ID NO: 69043 - DNA, 455 bp, Zea mays
cttcggttcttagcttaataacctctgttcgtagggtggtaaaagcaatattatagctctcgtcttcagcattcttttgcgctctcaaagcattgctaagtattaaaccctatatgaaaagaattagtataagaataaaagaataattcaaaaattataaatttccaaatatacaatttttataccttcagactattatatgcaaggctatctacaagatcgtcctttgtcatagcgcagaggccagcttcaagcttcgggaaccccatactcctggccatctcccggcagacagataattctttgttgtctgggaggcagtataagaagtcatcttcgtctgtgccattgaatactaaggccccctttggatacttcaattctcgagcataatgattagcttcaaaaatctcttcttcagataatctttttcccgaagcatgtcgtacaatata

SEQ ID NO: 69044 - DNA, 461 bp, Zea mays
  unsure (1)..(461): unsure at all n locations
tcaccaattgctccttaagaaaccagaacctatacctgatggctgtatagactttagatggaagcacttcaaggtaacaaacttgttaatagaaatctatctaatagattttagtaataggtgaacaatattaatactatttgttatttggattataatagagttgcttgggtgcattggatggcacacatgtaaaggtgactgtcccaactaagttgaaggggagatataggtcaagaaaaggagaaattgtgacaaatgtgttgggtgtttgtgcaccgacatgcagtttatatatgtcttacctgcgtgggagggttctgcacatgacgggcgtgtgcttcgagatgccatctcgaggccggatggattacgtgtccctcaaggcgaagtatgtcccttcatattgaaaaacaattattangcatagtaatggtgtaaactatactttctttttcatg

SEQ ID NO: 69045 - DNA, 456 bp, Zea mays
  unsure (1)..(456): unsure at all n locations
agcttgacaatgaggagatggctctcgttatcaagagcttccgccaaatcctcaaacaaaggagggggaaagactaccagtcccgctccaagaaggtttgctacaaatggggtaagcccggtcattttattgctaaatgtcccatgtctagtgacagtgaccgaggcgacgacaagaaggggagaagaaaggagaagaaaaggtactacaagaggaagggcggcgatgcccatgtttgtcgggaatgggattccgacgaaagctcaagcgactcctccgacgacgaggacgccgccaacatcgccgtcaccaagggactcctcttccncaacgtcggccacaagtgcctcatggcaaaggacggcaaacggaaaaaggttaaatctaactcctccactaaatatgaatcttctagtgatgaacatgctagtgatgaggaggataatttgcgtattc

SEQ ID NO: 69046 - DNA, 380 bp, Zea mays
  unsure (1)..(380): unsure at all n locations
aagccatggtaagtagcataggccaataatatacgatttgactcaagcctagctacgggtgcataggtttcaccgaaatccaaaccttcgacttgggagtatcccttggccacaagtcgagctttgttccttgtcaccacaccatgctcatcttgcttgttgcggaaaacccacttggttcctacaacattntgattaggacgtggaaccaaatgccttacctcattcctagtgaagttgttgagctcctcttgctcgccaccacccaatccgaatcttgaagtgcttcctctaccccgtgtggctcaatagaggaaacaaaagagtaatgctcacaaaaatgtgcaacacgagatctagtagntacccccttatgaatg

SEQ ID NO: 69047 - DNA, 441 bp, Zea mays
agcttcaagcccacgcgcccctcgaggtatggctacgacaaactattccgtcgcctagccgcaactgatttagacgcagatggaagcgtcggcggcctccgacgaaaccctagccgacgtgctcgaccacctcaagccccacactatcgctctcctccaccttctctacaaccgctgcccacctctagctccgcctcctccctacgcgaaatgggtgggcatcgcgtgggcacagctccatctccgggcacgcagggtggcggcgcgtcgcggatctggagctggtcgatcatcgcgtgtcgtcggtagccaggtaaatctgactgattcttcttcttacctgcttctcccagtgtggatctcggctctcgacgagtttcaaggatccgtagcggcggcgacggccatggacaagagccctggtgctgcttctcacttacg

SEQ ID NO: 69048 - DNA, 363 bp, Zea mays
  unsure (1)..(363): unsure at all n locations
tagattagtttgacaattacgctatacatagaatatatttatgttatanttttaattattataaacaattcaaggtaaatttaaaagggttgtcgcgcggcgaaacacacgatggcacatacgaactaaatgaaaaataaaataaatcgtcgtgcgacgaagcgcgcaatgagacacttgaattaattatggaagataacgtcaaatgtcgcgcgacgaagcgcacgatagcgtacatcacttaaactgaaattagaacaagacatcgcgcgactaaacgcgcgacatcacacattaaataacctaaacttaaattgaatcgttgcgcgacgaagcacacgacaacacattaataaaatcttg

SEQ ID NO: 69049 - DNA, 415 bp, Zea mays
agcttattcaccttttacttaggttgtattttagctctgcatccccgtaggaacgactttggggctaagctctgcatccccttaggaacgactttggagcttgttcaccttttacttaggtggcatttaagctctgcatccatgtaggaatgactttggagctttttcacccttactgttacactcgatggtgtaatcacatatttattacaacatgtcgaaggttacaccttctcaaattgtatctcaggcaagaacctgaaattgagagaaatgaaaggtacaataggtgtatatgaaaatttttaacccaacccctttgtaggtttagtaaatgtgccttgactctggaacagtgctattaactgtatgagctttggactcttctcttgcatcacgttgttgctgaatttga

SEQ ID NO: 69050 - DNA, 394 bp, Zea mays
  unsure (1)..(394): unsure at all n locations
ttaatgaatgaaattagctaatttttgtagataactgatgaaaattaataacattcatcggctagcagtagcaaacagaaattagttaactgactaaaatctgcctagacagctgcaagtaaattatttacgtatgtccatcaacttttatatttatatatattataggggtcttcttctctatcgaaggtactcaagacaataacgccttcggcaaaataacacagaggcccgccgaagctgccatcagcttcggttcggctccttaaggcgaagaccctacgtagaagcaacgatgcagaatgccgaagctatcatcagctttggttcggctcaagcagaagaggaaaagaccatttanacccttgataacccagccatctgtaataaatgt

SEQ ID NO: 69051 - DNA, 426 bp, Zea mays
  unsure (1)..(426): unsure at all n locations
agcttgatgtagcaacctcatgtgatgatttgattcaagaagagcaaaccagtctacatgctgaattgactgaaaaagttgaagtcctgactttagacaaccaaaaattgaagaattatttgactgatgcaactactagaggaaaagttgctattgagaacaatgatttcaacaatgagttggcagtggataatcaaaggcttaagaatgaggtcaagacactaaaaagtgaaaatgaacatcttgcaacaagtgtgcaaaagttcaacaagggtcaatacctccaaaatgagctgcttatgaacactgttatgaaaaataacaagagtggtattggatacaatgcttttgtgcaaaagaaatctatcactcaatacaagccaaagcagactcacaagcctatgaaatgctntgagtgtggaaatg

SEQ ID NO: 69052 - DNA, 375 bp, Zea mays
ggacctatgatactccgcttaagtgatttgaagttccatgctgaatcattcccaggtttagcttttccatttcttggcataacgtaatgtcagaggtcttcatggtaagacaatgacagaaagccttatgacttaacgcatctgccactacattagctttgcttgggtgatagtgaatctctaattcataatcctttatcagctcgagacatctcctttgtctcatattaagctctgactgggtaaagatgtacttcaaacttttatgatctgtataaatgtgacaaacattccccagcagataatgacgccatatttttagggcatgaaccaccgcagctaactccaggtcatgagttggataatgttcctaat

SEQ ID NO: 69053 - DNA, 445 bp, Zea mays
  unsure (1)..(445): unsure at all n locations
agcttcggaagattacgttctcatcttcttctgcggtggnggtagtcttttctccagcatcagccctcacaatagttatatctcgaaagtatcgccccctcatattatcaatatggctctgtttgatggcagttttcccaaaaaccgcgtgacttggtcgccacggtcgatcttcggcctcttcctcggcactcttcacactaaaactgtcgctgtcatcagtgtcttcggacagaccttcaaggatttccttggtgattttctctgtattggtttccgccattgccataataaaccctaagttcttctcctcctcgagactcagcttcgtttcagtagggatcttcttgcctttagacatcttccgaaacgctaaaaaaattattcccgagaccggagcttcaaaatcaaaaagaccagcaaaacttggtgcacaagagctaaa

SEQ ID NO: 69054 - DNA, 299 bp, Zea mays
  unsure (1)..(299): unsure at all n locations
tgcattacggacactataaaactacgcttaacaacttaagcctgtggagaaaatatattntccttgtggcaaacaacgaaactattacatgaaatttaaaaaatgtcctttattacacagaaaataaaactgaatggaaaagactactatcaaggtaggatatttgtcaatagatgtgcttcgactctggcacagtgctattgactgtgcgagcttcggactgttctctgaagtccctttggtgttgagcatattggcccccttctggctgctggccttgttgcaacggtggtggaggc

SEQ ID NO: 69055 - DNA, 467 bp, Zea mays
agcttatgaagattcttcatcccaacatgggctagtcggcggtgccagagccaacccatgttagtcttagcaattaaacatgtgtcgagctcagctctatcaaaatctactaagtatagctgaccctctaacacacccttaaatgctattgaatcatcacttcttctaaagacagtgacacctatatcagtaaaaagacagttgtagcccatttgacataattgggaaacagaaagcaagttgtaatctaatgaatcaacaagaaaaacattggaaatggaatggtcaggtgaaatagcaattttacccaaacctttgaccaacccttgatttccatccccaaatgtgatagctcgttggggatctttgtttttctcatatgaggagaacatccttttctccccggtcatgtggttggtgcacccgctgtcgagtattccaacttgagccccggatgcataaaccta

SEQ ID NO: 69056 - DNA, 247 bp, Zea mays
  unsure (1)..(247): unsure at all n locations
agctntacaaagcacttgagaaatggaatgataaatgattaaggcaatccaagcaacaagagtgcaaatgaacacaaaaactctctctctctctctcaagccactaagtggtggagttgattttgggacttggagaagaattttgatctattgaatgtgtcttcgagtggagtcttttgctcatgtattgaatgttgaattcagaacacttggatggctttgaatgaggtggccccccnnccctctt

SEQ ID NO: 69057 - DNA, 437 bp, Zea mays
  unsure (1)..(437): unsure at all n locations
aagattcttcatcccaacatgggctagtctgtgatgccagagccaacccatgttagtcttagcaattaagcaagtgtcgagttcagctctatcaagatctaccaagtatagctgaccctctaacactcccttaaatgctactgaatcatcacttcttctaaagacagtaacacctaaatctgtaaaaagacagttgtagcccattntgcataattgagaaacagaaagtaaattgtaatctaaagaatctacaagaaaaacattggaaatagaaaggtcaggtgatatagcaattntacccaatcctttgaccaaaccttgatttccatccccgaagtgatagctcttggggatcatgttttctcgaggagacatcttctctcccctgcatgtggttgtgccccgctatcatgatccacttgacccccgatgcataa

SEQ ID NO: 69058 - DNA, 454 bp, Zea mays
agcttgagaagatatttccacctggcttctttattccaatgcaacatttgattcttcatctcccctatgaggcacgaatggggggccccgtgcagggacgttggtgctatccaatcgagagatctctaaagactatttgaaagaaatgtaaaaataaatacaaaatcgaggcttccattgcagaggcatacattctataggaggtctcaaacttcacaacaacttattatggtgacaaactgccgagcgtgcataatccaccccctcattacaatgatggcgacaatgaatcgaaccttagcatatttcgaggccaactcggaagcgcaagtggctcgaccaccaagaccctggcacatgaagagtggtggcatatcatgctatacgtattgaccaaccttgaagaggtgacgccatacatggaacaatttcttcatgaattctggcgtcgatc

SEQ ID NO: 69059 - DNA, 375 bp, Zea mays
tttgcgggcccatttgatttgaagtgctttcttctgatacaggaagacgattgattgtaaaggtgcaccacaaatcttatcagttatcaacatttcatgatttttactggtttgttgctagatgagatatagttaccacaactagtctgctcaaacacttcgacatgagtgctttctttctcattatccttttcactatttcatggtaaaatgccactcatagtgagccatttccatgtttagtgcatccacgtccaccagagatcagtttcacagtcttggctagttgctttgcgattttgtttggtcccacttaaattattgtcctgctttcgccactgacaaaggctttgttgttgctgcatgatgaatagt

SEQ ID NO: 69060 - DNA, 447 bp, Zea mays
agcttgggatctactacgacgctgggttctagacctgcgccaaagcccagcccgagcccctcgatcatgaggagcaggacgtctgcattcaacaatcttatttatgggaatgcaaaaggaaggctgcaggcagcacgggaggttcatgccattatgacatgccgtgaggtcccaactgactctgaatcacatgagctcctagttgatagctttctgaacaagaacgagcatgctcacgcaaagacgacattggacagcatgatgcaacagggtcatctgccaagcctagctctgttcaagtctgttatggaggacgccgcgaaggtgttcgacgaaatgctgattaaaggagaggtgtcaccatcaacggtgatgtacactgctctgatcaatacctactgcacgggtggaaatctggaaggcacatatgagatcatggtagagatg

SEQ ID NO: 69061 - DNA, 401 bp, Zea mays
  unsure (1)..(401): unsure at all n locations
attcttcttttcttgctcgaagctttctgacttctagaggagttcactgcttaatctggtaatttcagcttgggcctctaccagtgaaccctccattgtttgaagaacaaaatctttcttttcaagagcagcttcatgatctttgattttactttccaagccttcaattataacctcattnttcttatcttcgaggtcctgttgcatcctcaaggatttgcttagtagcatactctgtgcaaaatgaccttcatcagaaatcaccttcatcgtaaaacaataaaaagctgagggcaaaaatttaccttgaaattagaatagaataaactgccgacgatatgctgtcatcggtagcgactgatgtcagcttcaagcttcngaaaaccaacactcttcgacag

SEQ ID NO: 69062 - DNA, 359 bp, Zea mays
  unsure (1)..(359): unsure at all n locations
agctngacaacgaggaaatggcactcattatcaagagctttctccaaatcctcaagcaaaggagggggaaggactacaagtcccgctccaagagtgtgtgctaccaatgtggtaagtccggtcatttcatagctaaatgtccaatttctagtgaaagtgacagggactaagataataaggggaaggagaagaaaagatactacagaaagaagggcggcgatgcacatatatgtcgggaatgaggctccaacgaaagctccaccgactcctcctccgacgaggacgccgccaacatcgccatcaataaaggcctcctctctcccaacaccggccacaagtgcctcatggcaaagaacgat

SEQ ID NO: 69063 - DNA, 264 bp, Zea mays
  unsure (1)..(264): unsure at all n locations
actcgcaggtttagtccgggtggccaagttgcgtgtctggacccccttgggttgcggctctagatactaagacacttgtcgcangtccgtggagtcngtggagcgtgcaggcccacggtacgggaccaggctgagcggctacacaggctccggaccaccccaggagactaatgtccattctctagctccggtcccgaggttgtcggacccgcagtacttatagccccaaatactaggtacccgtcacggagtggtggagtgtgc

SEQ ID NO: 69064 - DNA, 439 bp, Zea mays
agcttcttgaccaaatctgatctcaccattttattgtagcttccaccatcaataataacacgtgcacgccgattctcgatggcgaagaaagtctggaacaaattatggcgttgctgcttctctgatgattcaggctgagcactaagaacacgctgcaccatgatgcttcgaaggttcaccgtagcatcagcaccaagcatagcatcatcatcagcaacatcactggagtcatcatcgtcattctcaccgtcggaagcactaatgtagccatcatccgtagcaatgtatgttcgccgactcgggcaatccttcttcacgtgaccaatcccatgacagcgatggcaaacaatacccgaagaacgaccactggaaggtgctgcaggtgctggtgaattctgtttcttagcgggtacctgccaaggaagttaccaacatgtgc

SEQ ID NO: 69065 - DNA, 334 bp, Zea mays
  unsure (1)..(334): unsure at all n locations
gatgantcaaaatcaaacgaagtgaattttctatcataatgaagcttcttcatgcgattctcacttatatgacccaaacgacagtgccacatgtaggtaggacttaaatcattaggccgaggccttttagcactaatattacagataggtgcatcatcaagatttaagatgaataacccattcataatggatgcaaaagccacaaacatgccattcttagagatcacacaaccattgttatcactcgcaaatgaataaccatgctttatcaaacatgatagagacataatgattcgactcatactatgaactagataacaattatttaacttca

SEQ ID NO: 69066 - DNA, 404 bp, Zea mays
agctctcatccttcttcttcactaacagttctgtacatccccaaggcgaagtgcttgggcgaataaaacccttatccagcaattcttgcaactgcttcttcaactctgccaactcagcgggtggcattcggtacggcctcttggaaattggggccgttcccggttgcaactcgatggcgaattcaatatccccgtctggtggcattcctggcaattcatcagggaagacatctgcatactcacagaccactgggatcttcttcaggggtaactccgtcatagagaaggcacatgattgagaagaaccctgactaggcagaattaaagtgaaattcccgcagaatggagaattaacttccacggtacggctggctacatccaacacaacctggtgcaaggtcatc

SEQ ID NO: 69067 - DNA, 384 bp, Zea mays
  unsure (1)..(384): unsure at all n locations
atattnnccttaatagtgcgaccttgtctattctcatattcaagacattaaataaatttagagatgcttgagtcaattctcgtgtccttttagtaatttggggctccatcatattgtatattatctctctttttgacctgctagttaactcaatagatctcattagttatgtaattgcacgccattaccactaaaacccatatttagagtttgattgcacttacatctatcagcgtcgagacaaaattattagtcaaaaagattgcatcagtccaacaacaaagttcaataatatgaactgaatcgtgaacgatcgaatagacgaccggaggggagtaaatgagagtgaattaaaatcttgtgtgaagcactctagcttgattt

SEQ ID NO: 69068 - DNA, 452 bp, Zea mays
  unsure (1)..(452): unsure at all n locations
agcttgccacgccgttgccactaactcatcgcgccagggattcttccctatctccggccgccagtactgctcggtcaaattcgccaccgccgcttaccctcactataaattgaccgtacccccagctccgccatgcattcaagcatctactgcacccaccggcatcccgaaacccccaccagagcacgtgaatttgggatttccccaaaaccgttgaagaacaccgcgaagagcaacctcgccgtggccagctcgattccggttagctcgcattcctctggtgcctgttctagcgtccttaggccctcctaaagctcttagacccgcccaattgaactggaccgccctccctcgccgagaatgcgtatggtcatccgcctcatncgcggtcaccgtggtcagggcgtctcggtgtgtcattcntgaacataacctacgggaaacatcgaata

SEQ ID NO: 69069 - DNA, 386 bp, Zea mays
cgcacctctgaactaactcggctgcatcaatcttcgtttttggccaatagaatcctgacctgaaaaccttccctactagtgtcttggatactacatgtattccacactgcccagcatggacctcatccagaagttgcttcccagtagacgagagtatgcacttcatgaggacgcctgatgcacctcttctgtataatgtctccccaatgagtgtgtagtgagccgactgtctggcaatgcgctcagctgcatttttatcaactggttcctcttcattctttatatacctgatgattggccttctccagtcatcagagtctgactcgggttgatttataatattacactcttctgctggtccattgagatgctcggctgtagtattt

SEQ ID NO: 69070 - DNA, 451 bp, Zea mays
agcttgtttcacggtggcggaaagagatttgggggaaaacgcgaattcgagctcacgggtggatgattgtggccgattagcggtggctagttagctgacgatctcacggagctagtcacgggctcaatttatagggaggacgggcggtggtggtcaattcggccgagccgtgttggcggccggagctgaggaagaaggcgctggccgtgtgagtacgtgtccacagtcgtggcgagctcgccggcaacgatttgacggcagtaagaagccacgacgacgcgatgggaagtttaagccacgcggcgcaaggctaggaggcggcggtcaccggtgttcttatcgatctccgccgcggtgacgcatgtacggcggccggacttgtttatggccgaagttatccacggtgaggatatttacgtgacccagagtgttatccagccaagccgagctt

SEQ ID NO: 69071 - DNA, 354 bp, Zea mays
  unsure (1)..(354): unsure at all n locations
ngctacattcacatgccttcttctttgtctccatggcatgaaccttactggaacactaccccacttaagaagaatgagggtagaactcttgaatcttggggatttgaactccttgaagtacctcataacaagggtgttacggngctttcttctgctgttgctgcttgaacaagctgcggagagatgactgacacaaggttgattctaggagaaccttcttcctatcttctcttcactatcttcttttcactaaccctttctttctcttttctcttcccactagaggattctatcaaagagtattaccatcatacagaggaggaaaccgaagactatgaaccatgtacaacagtc

SEQ ID NO: 69072 - DNA, 444 bp, Zea mays
  unsure (1)..(444): unsure at all n locations
agcttctaaagggagagcacattntaggactaacaaatgttcattntgagaaagacaggatttgtagcgcatgccaagccgggaagcaagttggcactcatcatccacacaagaacatcatgacaagtgacaggccactggagctcctacacatggatttattcggcccgatcgcttacataagcatcggcgggagtaagtactgtctagttattgtggatgattattctcgcttcacttgggtgttctttttgcaggaaaaatcccatacccaagagaccttaaagggattcttgagacgggctcaaaatgagttcggcttaaggatcaagaaaattagaagcgacaacgggacgtagttcaagaactcacaaatagaaggctttcttgaggaggagggcatcaagcatgagttctcctctccctacacaccacaacanaatg

SEQ ID NO: 69073 - DNA, 353 bp, Zea mays
  unsure (1)..(353): unsure at all n locations
tctttaatgctctttctatatgaaacatccacctatactgaatatgaccaccgaccttagcctcatatggaagatgtataaagagatgctgcataggattgaagaaacccggtggaaatattttttccaatttgcacaaaagcaccggtgcctctttctccagctgttccatcacatctcttctgatatctttagcacacaactgtctgtagaaatagctaacttcagctaacgttttacacagcttcggaaatgtacccacgaaacattacaggcatgagcctctccataattatgtggaagtcatggctcttcagtccattcatcttcatttgcttcaagntcacagatct

SEQ ID NO: 69074 - DNA, 443 bp, Zea mays
agcttgtcaacatactaacacaaaagagtgaaggatgctttcggagaccagccaaagcctatgcttttatgtgaagatatagtagatcaaagggtactgctgggatctcagttatctgatgagcaggaaaaaaccttgataagatttttattcaacaacaaagatgtcttcgcttggacaggtaatgatctatgtgttgtcaacagagatgtcatcgagcattcacttaatgtggacccatctttcaggccaagaaagtaaaggcttcggaagatgtctgatgataaagccgaaggtgctcggaacaaagtaaagacacttctcagtgctggtgttatcagagaagtaacatatccagaatggctagctaacactgttatggtgaagaaggctaatggcaagtggagaatgtgtattgacttcacagatctcaacaaagcatg

SEQ ID NO: 69075 - DNA, 378 bp, Zea mays
caggagctggaggctgctcaacttgctatcattaccttggagaacaattgtgttgttctgaaggatcagtgtgataaggccatggacaaagccattcgcgctgggcggatcctgatgaggagacccagagtcgtagtgcccgacgatattgtcgctgatgttagggccacgcctgatgctgcaagtcgtccatcctcttatgttgcccctgtgaaggatgttgcaggcaaggacacttcgacgaagtgatttcctgtaaaacacttatttatcgagtttgcatcctttagaagaaagatgtaatgtgaattctgaatgtgtacaacagctatgttaggacttgattattccatgggtagggtgctagaaagcaacccc

SEQ ID NO: 69076 - DNA, 383 bp, Zea mays
gcttcttgaccaccttaacgttcaccaatttggtgcagctaccaccgtccatgatggtatgtacacggtagtccttgacgatgaggaacatgttgaagaggttgtggcgctgcttgttgtcgtcgtcactagccgtggcactcaaagctcgttgcacaatcaaggccttataggtctcggtcgctgttgtaccaagaacctctttatcaccatcataagtctctgcaatgttagctccaacagtatcttcatcttcaacattagaagcactaacatacccaccataaccagtagcaatgtatgcccgtttgctggggcaatctcgctgaatatggccaagtccctggcagcggtggcacttgatgtcggaggagtggcctgtg

SEQ ID NO: 69077 - DNA, 367 bp, Zea mays
  unsure (1)..(367): unsure at all n locations
gacacttttagaaactcncgcttctaaagggagaacacgtgataggtctaactaatgtgcttttcgaaaaagatagaccttgtgcagcttgtcaagcaggcaaacaggtgggaagctctcatcacaccaaaaatgtgatgaccacatcaagacctttggagatgcttcacatggacctcttcagaccctgcgcctatctaagtataggaaggaagaagtatggtcttgttataattgatgaattttcccgcttcacttgggtattctctttgcaggataaatctgaaacccaagggactctcaagcgctctctaaggagagctcatacgaggttgagctcaaagtgaaaaagattaagagcgacaat

SEQ ID NO: 69078 - DNA, 409 bp, Zea mays
agcttgagattgactcgccgaagcaacagatactgcatggtggttgcctacatactctgggatgtatggcgagtgatacgaagctgtatgcatgacctgcttcagctgagcttgttgagctgacgctccagctatttccttttgcttctggatggatacatgacacatcctgcgagtacggcccttgctctcaccacagaataagcaaaagatgcttctatgatgatcgacagatcttcctccgaagcccctggcacctctgcctcttggagctggtggtcggaatggagcttgatgtagccccgaagcctgggaagaatagagaggcctttgctgtcggctccccttaacatcgctttgtgtagagttatgaatggaactaacatgcctcggggacatacctccaccg

SEQ ID NO: 69079 - DNA, 376 bp, Zea mays
  unsure (1)..(376): unsure at all n locations
ntataacacctagtggcacctattgttatcttctgatgcctgangggctaaaaatgctggaggaagcttcagcagaattactgtcaaagttcttcattccgagattggtagaaatgtgctaacatatgtcgatgatatcatagtaaagagcacgaaacaagagaaccatgttgttgatttacaatagacatttgctaatttcagacaggctggtcttaagctaaatccagaaaaatgtgtctttggagtgaagaagggcaagtttctcggctgcttggtatcgacaaagggtattgaggccaacccaagcaaaatcgaagctatgcttcggatggaaccaccaaaattgagaatgggggctcagagattaacacga

SEQ ID NO: 69080 - DNA, 464 bp, Zea mays
  unsure (1)..(464): unsure at all n locations
tgcaagcttgtgaagattcttcattctaacatgggccaatctgcgatgccggagccaacccatattagtcttagcaattaagcaagtatcgagtttagttctattaaaatcaactaagtatagctgaccctttaatactcccttaaatgctactgaatcatcacttcttctaaagacaataacacctatatctggtgttggggacttgttctcaaatgctatgaatcaagaacaaggcaacacaaagtgttaaatgttaaagtccttcgtccttcgaagcattatttcccttaggatataacgatcttcggacgaaggtcatgaaggacataccttcatcatcacgggtataagataatgaaagatgaaacatatgaaacatgaaagattatatgaacagacatataaagttattcatatattatcattatgtaaacctggacattaaatataatatntaatta

SEQ ID NO: 69081 - DNA, 443 bp, Zea mays
agcttctaaagggagaacacgtgataggttttactaacgtgcaattcgaaaaagatagaccttgtgcagcttgtccagcaggtaaacaagtgggaggagcacatcacagcaagaatgtgatgactacttcaagacccctggagctgctgcatatggacctcttctgacccgtcgcctatctgagcataggagggagtgagtatggactacctattgttgatgacttttcccgcttcacttgggtgttctttttgcaggataagtctgaaacccaagggaccctcaagcgcttccttaggagagctcaaaatgagtttgagctcaaggtgaagaagataagaagcgacaacgggtccgagttcaagaaccttcaagtggaggagttccttgaggaggaagaggtcaatcatgagttcttcgctccctacacaccacaggaaaat

SEQ ID NO: 69082 - DNA, 387 bp, Zea mays
  unsure (1)..(387): unsure at all n locations
ggaccttagaatactaagcttctaaagggagagncacatttgngactaacaaatgttcattttgagaaagacagggtttgtagtgcatgtcaagcagggaagcaagttggtgttcatcatccacacaagaacatcataacgactgacaggccactggagctactccacatggatctattcggcccgatagcttacataagcatcggcgggagtaagtactgtctagttattgtggatgattattctcacttcacttgggtgttctttttccaggaaaaatctcaaacccaagaaactttaaagggattcttgagacgggctcaaaatgagttcggctngaggatcaagaaaatagaagcgacaacggaacggagttcaagaactctc

SEQ ID NO: 69083 - DNA, 452 bp, Zea mays
  unsure (1)..(452): unsure at all n locations
agctnttagggatttctgtgatcaaattgtgttctaatatccatnttgcatcagtcagacatccggagtcaaatggactcgttgaaagagcaaatggcatcataatgacaggaataatgaagttaatcttcaatcaacccaggggaaagtggccagatcagtcaaccaaagtggtgtggagccacaatacaacaacatcaaggtctacaggctttactccattcaagttattattcggtgacgaagcaataactccggaagaagctaaaaccggatcaataagggtagtagcttcggcagaatcaggtcccgaagctgcttattttgtggaaaaagatgctttagaagggatcaggctgcaagccgtggaaaacatcaataaatatcaagccgaaacaattaaatggcgagatagaaaggttcggctaaagaatattgagccaggacacttg

SEQ ID NO: 69084 - DNA, 400 bp, Zea mays
  unsure (1)..(400): unsure at all n locations
tcctttcgccttgagacaccggaatgtcacttcaatgtcttatatgaggttgggagccttccgtgtcttgactacgatgtcatcgacgtaggcctcgaccgtgcgaccgatgtgttcgccgaacacatggttcatgcaccgctggtacgtcgcgcctgcattcctcaggccgaacggcatggtgacgtagcagtacatgccgaacggcgtgatgaaagaagtcgcgagctggtcagactctttcatccggatctggtgataccccgagtaggcatcgaggaaggacagggtttcgcacccagcagtggaattcacgatttggtcgatgcgaggcagatggtanggaaccttcgacatgcttttgtgagaccattgagtctacacacattccgcatttccc

SEQ ID NO: 69085 - DNA, 449 bp, Zea mays
  unsure (1)..(449): unsure at all n locations
agctntagggtgaaagtcataaaatgacccctagaatatacttgaatcacatttatacccttgggataccagaaaccctaattggaaccctggaaaaccctaaaactaaaccctaggggcttatgtgcaaaagtgatgaacctttggactaaagtgtaaaaactactatgtttaaacatataaagtcatttggttcacaaatatgtggacttgcaagctaaaccctaagctttggactcatttgcaaaaaggaccttgattttgattcctatgctaagtctgaaatcggggttataggcccaactttggggctgtgtagctttcaaaataatgagaattcatgttaagtgaccacatcaaagttgaagacctaacataggagaacaactntgcttaagaaggaaagcatagttgttaagagaagtttggagataatcaggcctcaagtt

SEQ ID NO: 69086 - DNA, 369 bp, Zea mays
gaggaccaggtcatcgaagcttataagtttctagatgatatgtggtcacccaagtttttgttgatgaagcaccagaagaccaatcaaggaaggaatccatgtgggagttcgcaagagaaaggtttgcgtgttggcatcaatgtttcctcaataagctagctaccaagcgaaagccagaagcctgaagatgatctttgagtagccagaatcatcgtctgcaatcagcaaccggatgctcctgaaaggccagattttatttaagttccatctcctcgaagagtctacaaagtgaagatatgtagctaaagtaaagctatacccataaccctttctagccgaatctcgaggacgagattccttttaagtggg

SEQ ID NO: 69087 - DNA, 451 bp, Zea mays
  unsure (1)..(451): unsure at all n locations
gagcttcaaaattctcgcattcttcttttttagacattagtgcatatctcgggttaccacgaattaattgaacttgagtagggttaaggaaaataagtgatctcaaaataaccttaaccacctagtggtcgttccactttttgctcccgaggttgcgcacttggatcaccacggctatgagccggttgtacatatcttgtggctcctccccttggcgaagacgaaagcgaccgagctgcccctcgatcgattcgcgcttggtgatcttggtgagttcatcaccctcgtgcgcggtcttgagaaagtgccatatctgctttgcattcttcaacccttgcaccttgttgtattcctccttacttagagaggctaagagtatggntgtagctagagagttgaagtgctcgatttgggccacctcgaacgtatcataatcctcatcccctatgga

SEQ ID NO: 69088 - DNA, 296 bp, Zea mays
gagccatctacatccgaagctcaacccgtcgcatttatggcgactgacgacaagaaggaggaggctacactaagttgacaaccaatagacgcctccaagctcgacaatgaggaaatggcgctcgtcatcaagagcttgcgccaaatgctcaagcaaaggagggggaaagactacaatgcccgctccaataaggaatgctacagatgaggtcagccccgtcattgtattgctgaatgtcccatatctagtgacaatgacacgacgcgacgacgagaatgggagaagaaaggagaaga

SEQ ID NO: 69089 - DNA, 413 bp, Zea mays
  unsure (1)..(413): unsure at all n locations
agcttatgaagattcttcatcctaacatgggcttgtcggcggtgccagaggcaacccatgttagtcttagcaattaagcaagtgttgagttcagctctatcaaaacctaccaagtatagctgaccctctaacactcccttaaatgttattgaatcatcacttcttctaaagacagtgacacctacatcagtaaaaagacagttgtagcccatttgacataattgagaaacggaaagcaaattgtaatctaatgaatctacaagaaaaacattggaaatagaatggtcaggagatatggcaattttacccaatcctttgaccaaaccttgattntcatccccgaatgtgatcgctctttggggatcttggtttttctcataagaggagaacatcttcttctnccctgtcatgtg

SEQ ID NO: 69090 - DNA, 355 bp, Zea mays
  unsure (1)..(355): unsure at all n locations
tagtatatgttattgctttatgtggctntggttataaagatattcatcactcattgttatacttttttattatctgtttattattattcatgataagatcattatgttaatgggaacatggagaaccacccgggaaaacagtgctaccacaagggtataatgggacgcccttggctgattaactaggaaagctagtggatgactaccttacctgaaaggggcaagggcagtaggggagtggtcagtgtanggaggtccttgggttgattntgctgcgatggcggtcaggcaagaaccctgcattggagcttcctataaacttgtagcgggtttctgaagctagtggaactttgta

SEQ ID NO: 69091 - DNA, 381 bp, Zea mays
agcttcgggaaccccatactttttgtcatcttccggcagacagataattctttgttgtctaggagacagtataagaagtcatctttgtctgtgccattgaacactaaggcccccttcggatacttcagttctcgggcatagtgtttagcttcaaaaatctcttcttcagataatctttttcccaaagcgtgtcgtataatataatcaagagcttcggaaggcttttcgggagtaggagtggtagctttttcaggcagaatttgttttacagcttctttatccgctgccttttctctggtttccaaggatttctccttggtgggctctaaaggcccagcctcggggttggtctggctctttgtagcttccgcttcggtcagc

SEQ ID NO: 69092 - DNA, 355 bp, Zea mays
gaagaagaagaatgaactcgttcgtgttgtttatcatttcaagttcaagaaacacttcagaaaaccctgccaagaatggttggatacaattgaagttatgtgcaacgagattttgagcaattatacgagaaaagaagatcagttgatgactgcagccttcggcacccgaccgaagcgaagattgaatcgggtaatggatgccctgaattttgaatatccagactatgagcgattgaacaagggcgccgaagggcagaaaagaaaaagaattgttagtgttgtgggcagacaggctgctagaatggtgaaagaagatgaagaaatcctgaagaaaagaaaattgagccctgagccg

SEQ ID NO: 69093 - DNA, 418 bp, Zea mays
agcttgtgaagggtcttcattctcacatgtgctaagcggcgatgccacagccagcccatgctagtcttagctattaagcatgcatctagaccagcctcttcttttgcaaaatcaactaaataaagtttgccgtctaatacacccttaaaagctagtgaaccatcacttcttctaaagacagacacatctacatttgtaaatagacagttataccccatatgacataattgactaacagatagcaagttatatccaagactctctactaaaaatacattagagatagaatgctcattagaaatcgcaattttacctaacccttttaccttgccttgattcccatcaccgaatataattgaatcttgggaatccttattcttgacgtaggaggtgaacatcttcttctcccccgtcatat

SEQ ID NO: 69094 - DNA, 324 bp, Zea mays
  unsure (1)..(324): unsure at all n locations
tgagaaatatctcgatacaatccgaagaatggaagcctctttctaaggcttcgctgtaaagaatatcccaagaggagaaaaagaacatgctgacctattagccaaatcagcggcacaggggctcccattaccttcgaaagtattntttgaaaaaataaaagcgccttcagccgagctcatggagagagcagtgcttacgatctcaccagtgcacaatgaagattggaggactaagattgtatccttcctacaaggcaactatccttcggacgatgaaacttatatcaaaagaatagaagctaggacaaggccttacataatcat

SEQ ID NO: 69095 - DNA, 446 bp, Zea mays
  unsure (1)..(446): unsure at all n locations
agctntacttagttgattntgcaaaagattaggccggtctagatgcatgcttaattgctaagactagcatggggtggctgtggcatcgccgcttatcacatgtgggaatgaagaaccttcacaagcttctaaagggagaacacgtggtaggattaactaatgtgcaattcgaaaaagatagaccttgtgcagcttgtcaggcaggtaaacaagtgggaggagcacatcacagcaagaatgtgatgaccacatcaagacccctggagctgctacatatggacctcttcggacccgtcgcctatctaagcataggaggaagtaagtatggtttagttattgttgatgacttttcccgcttcacttgngtgttctttntgcaggataagtctgaaacccaagggaccctgaagcgcttcctcaggagagctcanaatgagtttgagctc

SEQ ID NO: 69096 - DNA, 332 bp, Zea mays
  unsure (1)..(332): unsure at all n locations
ccccgcccgctacgcagcccgagaagctgtgtgtatgtttgcgtgtatggtttttactttctatgagattttggtttgggtagaagcagcttgaaatctttntacagctacatgcggtcataagtttatgttctaaaactccattactttatgattgtagctcttatcatgtcgctatttttttagtctaggtattttgtcagatactgtatctccttctcagtatgaataatcttttccctaatttaattacaggcacaatctattcttgcactctgccctggtactctcaggaacactccgtcatcagtaagaggaataatgtgagtata

SEQ ID NO: 69097 - DNA, 453 bp, Zea mays
  unsure (1)..(453): unsure at all n locations
agctntaaccctcgcgatacctttccccttctctttctaaccatggtaaattcattattgtatgtgatattctatgcatatttactttatttgntctcttgtatggngtactgtttgtttcctaatttgaatggatggatgtatgtatgcttgcaatcgcatagagaacgatccggttgaagagcccgaggaactcgcaggagaagcccctgagcagcagtcggttggtggaggcaagtgtcccttgacctatctctgtcctattcattctttaattcacctcccgcactacacatttatgcctaaggattgactagctntgttatccatgtccttgtttacctatttgggttggattattattgtttagctttatgctatngctcaaactctaatcaatgaacatgatgagattatctatgatacgctgttctcccttctcttattatgatg

SEQ ID NO: 69098 - DNA, 467 bp, Zea mays
  unsure (1)..(467): unsure at all n locations
ntgtaggagaaggagatgatatgaagtctttggggtgcttgatagagttcattcaattcttatcaactcaagctatcaatcttcaatgatctatatacatgattgacccaaggttatttttcaaattgctgtgtcttaaactcatatcatctcggggaagatattatatgttgtaggaagtgaatagatatcatacgcgaaaaatcaaggcctacagcatggaggaaagccaaaggatggtaacacttatcttttaagtgcaagtatttaaaatatcatttcttatgtgtcttgtgtagtcacatagaanaattgaagcacttcanatgtctttaaaattgatattaccatttctttgaagaatntcctctcatatggtagtttgcaccattcatcgttccatactatggcaatctacatgctttaatttattgctaagatggcatggcataatccttctctaatta

SEQ ID NO: 69099 - DNA, 450 bp, Zea mays
  unsure (1)..(450): unsure at all n locations
atgcaagcttgagtcattntattacagaccagacttaaattgtttgctgagtagtaatattatacaaaccaagggaggcacaaactcctcccgataagtttaataaacaaaagatcctaagtggaggaccgagtcctcccgcacttcagtcttgtttttcctcgtttggtaccaccttggagcaaaagcaacaaaagtttgtcgcttcctcacctaaaaacaacaaagggataaaccctgagtatggaatactcagcaagtcttacccgactaaggaaaagactctcaagggtatgctggataaataggagtcgaggagaggctttagcaaaaatcaacttatagttttgcagaagaagcttactaaagtgagtccttactttcaatcttttaacgccatattaagtattaatagactctatntgcgtctagtctaatttcacatcacac

SEQ ID NO: 69100 - DNA, 336 bp, Zea mays
  unsure (1)..(336): unsure at all n locations
taccgcatntgaagcatgatcgcttcctcttggtcttagtcttgctcggctgtccattgcgaccctttagcaccgtcttgaatctctngataacgagggccatttcttcatcattaagaccggccgcctcaatttgcgccaccttgctggatagcgcctccttgttccttgtggctttgagagcaaaaggttgcggctcgttgatcggtccattcaaggcgtcgtccacataccttgcttccttgatcatcattcgcccgctgacgaattttcctaggacttcttcgggcgacattntggtgtacctgcgattctcacgaatattattcaccaaat

SEQ ID NO: 69101 - DNA, 461 bp, Zea mays
agcttcgggtctcttgctttacaactcttgtcaatattaccagaaataacctgggaatcagttttaagaactgcccttctaattcccattgcctttaacttccgaagacccaaaagcaaagcttcgtactcagcaatgttatttgtgcagctaaaatcaagtcttgctgcgtagcaagtttaactttggagaatgcaaccaacacagcggctgctcctgccccgaaggttccccaagaaccatcgcagaatactgtccaagcttcggcatctttactcgcttcttcttcctgagcccctggcgtccagtcagcaatgaagtctgctaacgcttgggactgaatcgaagatctatgcacataatcaatgcaaaactcattgagttccacagcccattttccaacccttccagtagcttctctatttctcataatatccttcaatggttgtgaagaagggaca

SEQ ID NO: 69102 - DNA, 445 bp, Zea mays
  unsure (1)..(445): unsure at all n locations
tgtgccttanaacaagaggatacaagaagttggtgtgtttttgtgaaggcttttgcgaatcacttgaagcgttaggacttttgtgaatgattttgtaaagtgtttgcaaatatgtgcaaaacatataacatgtgtaggttttgtgaatgattttgttgtggtgcttgttgatggtttatgtgatgtggatctatcattgtgcaatactaattaaacttgtatatctatgtgattatgtgtataaaaatttgtgatttgtgattcttttgtatatataacagttgttgaatgctaattaatggtatattatcattattaacgactataactgggggcaacttttctgtggttgctaaatgtatagtataacgactcacgattggttgtanatctatagtacaacacccacggttggtcgctaatatacatattagcaacgacagtc

SEQ ID NO: 69103 - DNA, 451 bp, Zea mays
agcttgcttacttggtaagatgaccaatgttctctttacgggtttaccggagaggacattagatttattggaactcatacatactgatgtgtgcggaccaatgagtacgacagctaggggaggattccaatacttcataaccttcactgatgattttagtagatatgggtatgtctacttaatgaaacacaagtctgaatccttagaaaagttcaaagagtttcagaatgaagtagaaaatcagcatggcaagaaaattaaagcactgcgatcagatcgtggtggtgaatatttgagtcatgagtttagcaatcatctaaagagttgtggaattgttccacagcttacgccgcctggaacgcctcagaggaatggcgtgtctgagtgacgtaatcggactttattggatatggttcgatcaatgatgagccagtcggacctacctttgtcg

SEQ ID NO: 69104 - DNA, 429 bp, Zea mays
  unsure (1)..(429): unsure at all n locations
cttcattttganaacaccccatccactatgaagcatcaccttttgttttaaaacaaaacatttgtttttctaaagcaggactaagcatcagaaaaccttttagtaaaataggtaatcaaggaatggtaaacagatccaagaaggaaatgcagcaattggttttacacccaactcctatcacctaatgcatcattcaagtgttaaagagtttaaaacagcaaggaggtggcaaatgcaccggggcttgccttgtgttgtaggagagtcgggctctgttccacaaatatcaaaatagaaatagttcccggcaggtggattttctgtcgattgagcagtctcctcttcttcaacagtcacttcttcttcgttntctatatataaccatatataaccatgaatgctcatgtaatgcttatgaanatgcaaaat

SEQ ID NO: 69105 - DNA, 439 bp, Zea mays
  unsure (1)..(439): unsure at all n locations
agctngtctctaaaaaagcattgaaaaggatcttcctcatcaaaatatgaatccataaaaacaaaacgcttattcttcaaatcaacaatgaacaaaaaccaatggttcgcatggcacactggaaaatacagctgaaaaaacagattgaggtaaaataagaacaagacataaatgtatggcacattaaggctgctgtttggaccaaaaaaattacaacaaactaagcaaacaaaaaaccttgttagagcggtgcaacttcaaagcaaaattagcccctagaaacgatttccttagatcttcaacttcatattggctattgtattccatcatcgaatgctgtagtaacaatagaaatttttaaaaaaatgaaaaacaataaaaaaaattacaaaataacaaaacaaaacccaataaaaagttgaagaataattacccccac

SEQ ID NO: 69106 - DNA, 496 bp, Zea mays
  unsure (1)..(496): unsure at all n locations
gcggacctatgatactaagctcgctgacagaaacgtgaatgccataaatctgcctatcttaattattacagaattcaccattttattacacacatcatgcagtgataagcggaacaagccttcgcagtcatatcctttaccaacaaaagtaccatgttttgacacaacacatttatttgactcaagaacaactttgtatccatctcgacatagcatagaagcactaacgagattcttcttgatagagggcacatgatgcacgctcttcaatggcaccgtctttcccgaagtagatttcagaatgaccataccaacaccaagaacatgagcacatgactcatttcccattaacaaagtgccagacctcccgacctggtaggtagagaacatagagacatcagcacacacatgaatattggcaccattgtncatccaccactcaggtgaattacaaacttaaaagacanatgggtaagaattaacatactcagatgtt

SEQ ID NO: 69107 - DNA, 459 bp, Zea mays
agcttcttctcatcgtcgatgagcgatgccaacgtgttcggctcctgctagtggtgtttgttcggggtttccaagcaagaaacatggattcatccttggcgttggtttttgaaaatgactcacaagtcagatccatgggaaaaaatattatgaagaataaatgccacacatgcaaaaaaaggaatttaagttgaaaacattattcaaacaaaagaaatttcatgcaaggctcttctttaaatactactccttccatccaaaaatataattcaagaatctcggtgatacttatctactactacgcattgtgcaagggtaatatgggaggcttggagagagatgtagtaaatgtttttcctatcatagatgtagacataaacacacatgtggtgtagtggtagttactgctcgcatttgtcttataggtcgcgggttcaaatccccttggggtcatttatg

SEQ ID NO: 69108 - DNA, 474 bp, Zea mays
  unsure (1)..(474): unsure at all n locations
ctaagcttctccagtgttcctgagtgtctgatataacctgtttcaaagttaccttttacatctgccatgtagcaccatagatcaactcttgtttgctgcggccaccacaattaagattggcaacgggtcgaagatccttttttggagtgatgcttggatgcaagggctgagaccaaaagacatggtgccatccatttccaaatctctagaaggaaaaacagaaacttgcgggaggcattaacggataataactgggttagtgacatcgaccttcgacacccctctttctcggctcagtgctttgtcaaatttgcctatctctggagtgcagtacaacaaatccatttaagtccagacatccgtgatgaaattgagtggaaacttagcgaatccaagcagtacattacaagctcagcctatcatgcccaaattcttgngtcagccagcacaaacttcaatgaactcatatggtcc

SEQ ID NO: 69109 - DNA, 455 bp, Zea mays
  unsure (1)..(455): unsure at all n locations
agcttagtaagctaattggtatgtctattttgttgttccactgatttctttttgatgtcttagtgagagtttattaatatttctagctgaacttattggagtgaggtttatttttccctctcttccttactaattctttttatgcttttaaggtgggtttgaattacaagacagcttaataaattttcaaaaattctgcaaaaattacagtggcttcttactggtgtatagttctctgtctcaaaatttggggcttaaacagtgaggggttctctctgtataaaattatcaaatgttagggcagagggggtgttttgaactacaactcctttttaataatgggttattctctaagacatatttttgctggcatttagatgttataacatgactntggacaaatntctagccactaatacttattagttattttgctataattttctaaagtttct

SEQ ID NO: 69110 - DNA, 339 bp, Zea mays
  unsure (1)..(339): unsure at all n locations
gcgaagagtattgtggtcgttgctgttggctccctctattattattntgagtggagttatgaattgacctgacatgcctcgtatgaaatcttcctccgaagcccctggtcattttagagaacctaaatgcctcctcccttctttggcggaagtcattgtcggcccggatgtactcgtccatcttctggagcaacttctccaaagtttgtggtggcttcctggcaaagtattgcgctgaaggtcctggccgaagccccttaatcattgccttaatgaaaatttcattgggcactgttggcgcttgtgccctcagacgcagaaaccttccgacatacgcct

SEQ ID NO: 69111 - DNA, 438 bp, Zea mays
  unsure (1)..(438): unsure at all n locations
gagctntgcagcaaacttggagagcattattcttctacatctttgctatatggtgttgtcacaaaaagccagcagatcaggcataaacttgggcttgaagttgatgtcagtccactgtcagcctgattttcagacttaattagcctgacagccaaacttcaggcttaattatctctggatttttcttaataactgagcttacaaccttaagcaaagttggtctccttagtttgctctataattttgatgtggtgacctagggcaaaaacccttttgtttagaagttacaagatcacaaagatgagcacattacactgaaattcagacttagtcaaaagagttcaaatgtggctcttttgaaaataagtccaaaactcagggtttggcttgtaaattcacatatgagtgacccaaatgacttaagacacttatttaact

SEQ ID NO: 69112 - DNA, 359 bp, Zea mays
  unsure (1)..(359): unsure at all n locations
taagcttcgaatacaaaccgacttanaagtagaatgaccttttagtctataaatgtttgagtcgttgttgtaaacttttatgaggggcataattgtaattcctcacaggctgtgtctcgtgcctataaatagtgaacagtattcctttactgttcacgcgttcctgtaattgcaatcgcatcattcgggaatcaatctttgccaaggcagaggtataattgtatctaatactcgaatacattaagttgatataacataaaagtaatgttgttcatttataatttatttgtctttgatgcttcatatttcgtattactttatataatctgttagaagtcgattacgaagaattaaccttt

SEQ ID NO: 69113 - DNA, 432 bp, Zea mays
agcttgtgtttacaagaaagattgtgggatcgctgttgcatttccgagcttgtatgtggatgacatattattgattgggaatgacattcctatgctggagtccgtcaaggcttcactgaaaaagagtttttctatgaaggacttaggggaagcagcatatattttgggcataaggatctatagagataggtcgaacaggcttataggattaagtcaagatacgtacattgacaaggttttgaaacggttcaacatggaacagtccaagaaagggttcatacctatgtcacatggtaaacaccttatccagatgcaatgtcctgcaacggctaatgagcacgagcgcatgagtaaggtaccatacgcctcagcaattggttcaatcatgtatgccatgataagtacacgcccagatagttcatacgctataag

SEQ ID NO: 69114 - DNA, 389 bp, Zea mays
  unsure (1)..(389): unsure at all n locations
gacccgtagcctatcaactggaagtgtcacctcttattgtaacagntcacaacgggttccatgtatctcagctgcggaaatgtgttcgcctacccactgaagtgctgccagaaccagatattgagatagaaccagacttgtcctaccaagagtaccccgtcaaggtattagatcaaaaggagagatcaactcgggcaaggtcagtcagaatgtataaggttcagtggagtcaccattcagcagaagaagccacatgggagactgaggattttctacgctctcgcttccccgactttctgcccaaaggagtcggtacgtaaccccaggaccccacccncacctgccctttgaattcaattataagaagagcttagataacaaggatagtc

SEQ ID NO: 69115 - DNA, 434 bp, Zea mays
  unsure (1)..(434): unsure at all n locations
agcttctaaagggagaacacgtgataggtctaaccaatgttcatttcgaaaaagatagaccttgtgcagcttgtcaagcagggaaacaggtgggaggctctcatcacaccaaaaatgtgatgacaacatcaagacccctggagctgctacatatggacctcttcggacccgtcgcctatctgagcataggaggaagtaagtatggtctagttatcgttgatgacttttcccgcttcacttgggtgttctttttgcaggataagtctgaaacccaagggaccctcaagcgcttcctcaggagagctcaaaatgagtttgagatcaaggtgaagaagataaggagcgacaacgggtccgagttcaagaaccttcaagtggaggagttccttgaggaggaanggatcagctctagttcttcgctcnctacacaccac

SEQ ID NO: 69116 - DNA, 392 bp, Zea mays
  unsure (1)..(392): unsure at all n locations
actaagcttctcaggattntttactgcgctaaaaacttatatatatatataataaaattactgtccattatttaggaaaagaagaagaaaaacaagtaaagaagagggtaacacctgaatttggtgaatatcagaaaaaaattatacccccaaattcaaggtgttatagatgcaaactctcgtggatgacgccgatatttttactgaggtatccagaaccacgcaaagtcccgactaatcctcgttggtgcccctacacaaagggaagctcacgcgagggccaagcaccttggtcgggtaaatccatagagagccaccgaccttctccacacacaagtggtcctccgcttccgactcctctcggacgctccctgctgtctncactatcgagc

SEQ ID NO: 69117 - DNA, 342 bp, Zea mays
  unsure (1)..(342): unsure at all n locations
agctntgcacttatattatgcaaactagttcaattatgcacttctatatttgctttggtttgtgttggcatcaatcaccaaaaagggggagattgaaagggaattaggcttacacctagtttctatataattttggtggttgaattgcccaacacaaatctttggactaactagtttattctagtgtataagttatacaggtgcaaaaggttcacacttagccaataaaaagaccaagtattgagttcaacaaaagagcaaaggagcaaccgaaggctcctctggtctggcgcaccggaactgtcggtgtgccaccggacagtgtccggtgcaccaccggac

SEQ ID NO: 69118 - DNA, 328 bp, Zea mays
  unsure (1)..(328): unsure at all n locations
cgtgacctataaaactcagcttctnagggagaacacgtaataggtttgactaacgttcaattcgaaaaagatagaccttgtgcagcttgtcaagcaggtaaacaagtgggaggagcacatcacagcaagaatgtgatgaccacctcaagaccactggagctgctgcatatggacctcttcggacccgtcgcctatctgagcataggaggaagtaagtatggtctagttattgttgatgacttttcccgcttcacttgggtgttctttttgcaggataagtctgaaacccaagggaccctcaagcgcttcctcaggagagctcaaaatg

SEQ ID NO: 69119 - DNA, 439 bp, Zea mays
  unsure (1)..(439): unsure at all n locations
agcttctgccatgacgtgatagtccctggtcaaagagaagaataccatgtttgggctacattctggactgccatgacgaaggacttcgccatgactgcagtattgccccaatacgaagatatagttgcttcatagctcatcagaaactgctttggatctaagtgcccatcatacatgggaagatgaggtggcttgtatgatgggggccatggggtagcctgcagttctgctgccaagggagaagcatcatcaaaagtaaaagcatcatgattaaaatcatcataccatccatcctcgttgaataagccttcttgacgaagctccctgtgttggggccttcgattttattaatcttgagcaagatgacgcacttctttagtggcttcgtcgatcttcctttgaagatcagccagtcacgccatcttnctcttctttcttt

SEQ ID NO: 69120 - DNA, 332 bp, Zea mays
  unsure (1)..(332): unsure at all n locations
tcggcgacggttaannaatntggcagcaaaacagtgcatatagcaatgaatgctgtggtaacttcacacctactcgtctgtttatatagagcggcaggtaagaaggcgaagcgccaggatttttacaccaggcggacacccgctcgcactcgctgcgtggtggaccgcaaagaccgaacagtaactctgaaaggtggggccgatacacgctgagaaattgaatcgtttctcgacaacgagctcagggaaggtgttttttagaccttcggcgctctgaagcttaagagactnttttcacggatcaagctcgttacgaaaaacgatctagcacc

SEQ ID NO: 69121 - DNA, 341 bp, Zea mays
tgatttcccatcggtgcccatgaatgtattaattaagctttcgctcacattctttcctatgtgcctgaagtcaaaattatgtcgcaacattaaatctttcccatatggtagcacgaaccaaatagatctccttttgaaaatgactaatggttcccctttcttgcgtctcttgcttggtggtttcttcccagatgggtccttgccaaaaattggattaagatgtttagtgcactccaatatttcctctcccgatagtggagtaagtgcttgcctaaactcagtacaaccaaatttgtcaacatcaaatctaaatgggtgggtttcattcacaaatctgcgat

SEQ ID NO: 69122 - DNA, 304 bp, Zea mays
actaacgctgaggcatcattgggagtctacaatagtgtttctcttccttatttcttccatgcttaaagtgcaacaggttgcacttcgggtgtagaggtggcgccttgctccaagttgacaatatgtttggagtctttgatcataagttcaaatctcacaaacttaccaattaccttctcgggagacatcttgttatatgtaggatcaccatgaattaattgaactcgagtgtgattacgacagacaagagatcttagaataaccttgaccattgcatggtcatcccacttggtgcttcccgaga

SEQ ID NO: 69123 - DNA, 462 bp, Zea mays
  unsure (1)..(462): unsure at all n locations
agctngacattgtctccctgttggaagccaatgccattcttgatgccagggcgtcgcccattatagagcatgcttctagcaaatttaatttttttcattctctatctcatgctcattaattttagcagttagttgagctatgtgatcattttgttttttaattaaagctaggtgatcatggatagcatcaacattaatatctctacatctcatgcaaatagaaacatgatcgacaatggatgtagagggtttgcaagattttaattcatctatcttagattttagtatggcattttcatctctaagacagggaatagaagcattgcaaacatttaaatccttagccttagaaattaatttatcattctcaatcttaaggctagaaatngattcattcaatttgtcaatcttagcaattaaactagcattatcaattntaagaatggcaattgaatcatcaca

SEQ ID NO: 69124 - DNA, 384 bp, Zea mays
  unsure (1)..(384): unsure at all n locations
ntatatggaaggaagtgtagaacccctttgtattgtgaccagactggtgacagacaaaaagcggctgcagggtcgccacgaacgatgtcaacgagaattccaccggcacgcgagaacctcggcgggtttttgttccgcgcaggttcgtgccaaaatctgtcgggcccaggggcgttgcgatgccggtggctcggctgaccgaggccccgctctcgacacgatgaactctgttgtccatgtttcccactcgggcatggactcggatcactcggcgaagagaagcgagcaccactgggtctggagcgaccccaaaggtaccgncgacaacccttctgaccactccacccttcaaggagaagganggagtgtgtagcatgacaccct

SEQ ID NO: 69125 - DNA, 456 bp, Zea mays
agcttcggcccaacagcagagttcttttcggtcgccatctgccaagggcagaggcgccaggggcttcgggggaaggtttggagaccagccgagaaaaatatattgcctattctgtggagaagacaagggccatactactaagatgtgccatgttaccatccagaagcagaaggaaatagcggaagcagcagcgcaacagagtcagccgaagcaggttatgcatactgcttcgtatcactcaccttatattccagaatatgtaggcaaccaccctgctgcttctgttgcttcggcgagccaaccccaagcatcttggcagcaacctccaccgctaccgccgatccagcgaggacaacagccagaagggagtcagcacaatcatcttcagagggatttcagagaggagtccgaagctcgcacagtcaacaacactgtgccagagtcgaagcacattta

SEQ ID NO: 69126 - DNA, 392 bp, Zea mays
ctgcggcacattcgctacgccttgcctctgcagctcgcttatgacactgtctaccgaagggggcttcagtcctaggggcagcggcagccacggcttcgttaagacatcacctattgctgcatctatgctctcgcttgactgaaaaatacagaaaggaaaacagaagggctgagttgagagtgctgcagaatacatgattgttgttgcatgaaaagaaacatgaatgtcactacagctagctatacacttactggctgtatctgtagctgaaacagcgcgtcttgctggctcttgcctgcgagtgctggaggaacgagaggtctgtacatcggaggtggccatggcaaagaacccctcacgtgtggagcatggaaacgctgaaaatcacgaca

SEQ ID NO: 69127 - DNA, 449 bp, Zea mays
agctctaaccctcgcgagacctttccccgtctatttctaaccatggtaaaatcattatcgtatgtgatattctatgcatatttactttatttgttctcttgtatggtgtactgtatgtttcctaatttgaatggatggatgtatgtatgcttgcaattgcatacaaaaagatcctgtttaagagcccgacgaactcgcacgataatcccctgatcagcagttggttggtggacgcaagtgtcccttgacctatctctgacctatacattctttaatttacctcccgctttacacatttatgcctaaggattgactagttttgatgtacatgtccttgtttacctatttgggttggattattattgtttagctttatgctattgctcagactctaatcaatgaacatgataagaatatctatgatacgttgatctcccttctcttattat

SEQ ID NO: 69128 - DNA, 398 bp, Zea mays
  unsure (1)..(398): unsure at all n locations
tcgggaaccccatacttctagccatctcccagtagacagataattctttgttctctgggaggcaatacaagaagtcatcttcatctgtgccattgaacactaaggcccctttcaggtacttcagttctcgggcatagtgtttagcttcaaaaatttcttcttcagataatctttttcccgaagcgtgtcgaataatataatcaaggacttcgaaagacgcttcgggagtaggtgcgacagctttttcaagcaaaatctggtttatagcttcttctcccgctgccttttctccagtttccgaggatttctccttgacggactctgaaggcccagcttctgcattggcctggctcagtgtagctttggtttcggntacctttgcctcggtttcaatctgc

SEQ ID NO: 69129 - DNA, 459 bp, Zea mays
  unsure (1)..(459): unsure at all n locations
agcttcgggaagccgaaggtccaaaaaacaccttccctgagctcgttgtcgagaaacgattcagtttcccagcgcgtagcggtcccaccttgcagagttaccgtttggtctctgcggtccaccacgcagcgagtgcaagcggctgtccgcctggtgtaaaaatcctggcgcttcgccttcttacctgcagtactatataaacagacgagtaggtgtgaagttaccacatcattcattgctatttgcactgttttgctgccaaaatttttaaccatagccgaagcttgactctcggaatcgaacgaagctccagcttgaagcttgcttcgtcagacgaaaaacttcggagaaaaaagtatttaattgccgcanattcagaattaaatggctagagtgcgctctaccgctagggttgagcgtgagggagacgaagctgaaggtttggagactgttcccatc

SEQ ID NO: 69130 - DNA, 402 bp, Zea mays
acgtgacctataaaactaagcttctaagggagaacacgtgataggtctaactaatgtaactttcgaaaaagatagaccttgtgcagcttgtcaagcaggtaaacaggtgggaagctctcatcatgccaaaaatgtgatgacaacatcaagacccctggagttacttcatatggacctcttcggacccgtcacctatctaagtataggaggaagtaagtatggtcttgttatagttgatgatttttcccgcttcacttgggtaatctttttgcaggataaatctgaaacccaagggaccctcaagcgcttcctaaggagagtccaaaacgagtttgagctcaaagtgaagaagataaggagcgacaatgggtccgagttcaagaaccttcaagtggaggagta

SEQ ID NO: 69131 - DNA, 257 bp, Zea mays
agcttgccaagcgtctcggcgagctaggcgagccaatctcttgcgatggctgcgcacctcgtgggctacctcgccgggacaggagctatgacgatgacggaggcaccaatatacctgacctcagctaatgaacacgcgctgggcgccttaaggacgtgcttactgaagactcccactcctgtgagggcagcaaccgctgcgagaagttctacgtcatgtgcggagggagctgtgagctcacctccccctgaacatga

SEQ ID NO: 69132 - DNA, 345 bp, Zea mays
ggctacatttaccagtcgagtcaaaatatttatctgtgagttaccgctaatatatcgtgtaaatctagctgactgctgaataacacatgcgtgtacttgttcaaaaagtatgatcgttatgaattgcttgacaacgacagcttacaactgaagtaaagtggagaaaagaatgcacagatagtaaaatgcacgagtaaacctcatactgtttgtgacaaaaacagctggaatagcacaaaatagacaaactgcttacacctatagctgctgaaaattctctttattatgtcaatgatgggagtgataacttgattgtttcatgagcatgaggcataaactccttat

SEQ ID NO: 69133 - DNA, 451 bp, Zea mays
  unsure (1)..(451): unsure at all n locations
agcttccatgccctgtgcactttagcacaatatagtgccatatcatatttttgtcgttccagcagaacttgtgctatctttggatgtgtttccttgctagagattttgggaagatgagagtatgcctcctgcaaaggaagcagggttgcatcacaaacataagataatgaagacaaaatccatgaaactcaattaaaatggcactgcatacatatacagacgagattcaaatctgaagtcaatggtaccatgaacagaaaaaacaaatcattgttacatagcagtacgtaacacaaactataacacgattccaataacaaaacactacaatgcaaatgtgttcaggtaagtgcaggcagccaacaaaaagaatgtctgcaattcaaagaanaagtaaacacagcacgcctgtgatccttgcaatngctatgctcagntaaaaaatctcctc

SEQ ID NO: 69134 - DNA, 385 bp, Zea mays
tctcaacgcgcgcaacataacttattacaaaacttgtaatgtagaaacattcccaaaagttcatgcgtaaacatcccatcctccaaaagctgcaacaattttcaactaacaaaagtaaaaagtatcgatgacctctcctgcaaaaacataagaataaaactctgagtagtcacttggcctaatctagctttcatttaccaactttagtttcactttttaactacgatgcatagcagtgatccagtctttatttcgaagtaacgacaatctaaatcgattaatacccaactgaggatctctcatcacaacctttgcatatgtgaacttgcctttgggtgttttcaagactaggactggttcacgcgagccgagagcacaaaatgga

SEQ ID NO: 69135 - DNA, 438 bp, Zea mays
agcttcggcagagaacaacttctttctcctcatgggcaggggccgtgttgtctccaccaactcttacgatatacatgtcatgagagtaccttcccctcatattgtcaaggagactctgtttaatagtctatttcccgaagacagtatggcttggtcgccagggacgatcttcggaatctttgcctccactctccacatcataactatcactatcatcagtatcttcagacaaaccttctagaatctctttagtaatcatctctgtgtttgttcttgacatatattcatcaaacccggcgataaaaggatccgcagttttcctttcttcaaacaccttcgtctcctcagagagtttcgtgtctgcagtcattttcttttacttcgacatcttctccgcagacatggtgaaacacgtcttttaacctaagctcaaaaagc

SEQ ID NO: 69136 - DNA, 333 bp, Zea mays
  unsure (1)..(333): unsure at all n locations
tcggcttatggttaaattttcaacagcacaacagtgcaatggaaatgaatgttgtggtaacttcacacctacccgtctgtttatatagtgctgcaggtgggaaggtgaatcgccaagccgctcacactcgttgaacagtctcccatacccgctgaacggtggaccactaccccgctgcgtggtgggccacctcgcgcccgaaatactttaatcgtttctcggcaactagctcaaggaaggtgtttttcggaccttcggcattccgaagccttgaagatttttcacggatcaagctcattacgaanaacgatctagcactgtgaaggggctaat

SEQ ID NO: 69137 - DNA, 432 bp, Zea mays
agcttgcagccatcaggtagttcagccttatagactagaccataaccaccacacccaatgatgttttccttgttgaagttatttgtggcttttacaatgtcagagaacgtgagcttgttttcatttccctttccttgtggcaccatgatcactccatgctccaagctggagttgaatgtgcttgtttcaagatatccgttgtcctcccttctaccttgggccgttaaacggtttatcctgatggagacaaggagacgccacagcaacaaaagaatggcaatcattgcaaagaacacaccaaatgcaattgcgagaatggccttcttatttcttcctcctgtggataccagaggcacatcggctgaatcgcatcgacgaccgatcataaagccgcacagcttcggattccctagaaagctggagttctgaaat

SEQ ID NO: 69138 - DNA, 358 bp, Zea mays
  unsure (1)..(358): unsure at all n locations
tctaaagggagaacacattntaggattaacaaatgttcattttgagaaagacaggatttgtagcgcatgtcaagccgggaagcaagttggaacccaacatccacacaagaacatcatgacgaccgacaggccgcttgagctactccacatggatttattcggcccgattgcttacataagcatcggcgggagtaagtattgtcttgtaatagtggatgattattctcgcttcacttgggtgttctttttgcaggaaaaatctcaaacccaagagaccttaaagggattcttaagacgggctcanaatgagttcggcttaaggatcaagaaaattagaagcgacaacgggacggagttc

SEQ ID NO: 69139 - DNA, 311 bp, Zea mays
gattaagttaactaagtggatgctccctagaaacctaacttgggcgtgcagaataactagcgatatgaaaaggatagctagctagcttaacggagctcaggctttaaacaaattgagcagtcgagcggaaaagcatttgtctttcgttcgcgctagtggtttggctttcgcggtttgctttctttttaagggcacgtacaaccacaataattagagagattttgtaggggtttttagagggctaaatgaaaaaaaaaataagagacctctctcttcgtgaggagatcgtctcaacacaactctctatatat

SEQ ID NO: 69140 - DNA, 358 bp, Zea mays
ctagacatgaatttcttgaagccaggctgttcactaaaatcaaaaggcagctcatcttcaataatcatctcagcgaaggcctccctaagtgcatcttgatcaaacctccaagtagaaacaccttccccttgaattgcttgtaaatatccttgctttccatctttttcaaacttgttaggattgtgcttgcaactttgtaggtgtctcttcaaggcagatgtaccatgtcccttagagtctgctttcatgttgtgatggcagtacttgcattttgcagctgtcataatgcctttatcatctttgatcttggtgaaatgggtccacacatctgatcttggtgccatcttcttcctttcat

SEQ ID NO: 69141 - DNA, 358 bp, Zea mays
ttgtaatttacgaatcaaacactgctttgtaaacttgtccataccctgtaacatatttttaccttttcacccccgcatgaatttctttgatgcggaccaaactcgtattttatgaacccaacgcgaaaaacaccctcccttcttttcgacacaacgaaacataaacttgtttcttttatactcattgaagccttgtcatcagagccgaagcaactgtttatactctatgatatgacgatgatgatcctcccaatcgctaaatgaatgtgtctgaacgcaatgaatgatgtgatgtaatgtgcctatgaatgtcccaacacacgcttatgaagccccgccacactctgatccccttaag

SEQ ID NO: 69142 - DNA, 396 bp, Zea mays
tgccagtattcgcccgaggcgctcttgccgagccagtcatcctgatccttctgctgatgagcagaaaaagaaaaagagacgcctccggcgagtatccagtttggatcgggacgttggtacctcggttcctgctgctgaagaagtgcctgtgactgaatttactgacgctgaccccaatgggtgtacccaatctattgctaatcccaatgtgggtgctccatctgttgctgatcccaatgggggtgctgcctgtgttgctaatgtagacgacgaggaggaagaggatgaagttcctttgactcggaaaacagtcgacagttcatcgctagtggtgaaagtagtggagttccttcatctgctttgtctgctctcattggtctgcaagaactgttcctg

SEQ ID NO: 69143 - DNA, 421 bp, Zea mays
agcttgcattgcatgtttaaattccttgtattgcatctaggacttgtctaacctagttgagataaccgccaacaaagcgagtgaaaaagcttaactcgggtcaaacctgacaagtcttagttttaagcttttagcacttaaattcttactttctatgcaattattggttcttgaaatatgcatgaggtactgcacttagggggagtattcaaaactcaaatcactcataaaaaccccttagtgcaaaccaaaatgcaaatttcaccatttgcctattttctctaaaaattatctagcctatggcgaaatattttgaaaagtatatgagggtgccaatacctgtcccaacaagtgttattttgtgtgattataagttgggatttggtttggttgggagttagatagaaaaattcaaatctta

SEQ ID NO: 69144 - DNA, 358 bp, Zea mays
  unsure (1)..(358): unsure at all n locations
tcggatctttagccttgcaactcttgtcaatatgacctctaacaacttgngaatcagttntaagtatggcccttctgattcccattgcttttagattccgaagacctagaagcaaggcttcgtactcggcaatgttatttgtgcaactaaaatcaagttttgccgcataacaagttttaactttggaaggtgaaaccaacacagcagccgctcctgctccgaaggttccccaagacccatcgcaaaacactgtccatgcttcggcgtctttatttgtttctttctcctgagcccctggcgtccagtcagcaatgaagtctgctaacgcctgngactgaatcgaagatctatgaacata

SEQ ID NO: 69145 - DNA, 268 bp, Zea mays
agcttgcactggaaatcttacagaattcttatgtctcacaagactgccattggtcttcaaacggtccggcattgattgtcaattggtgtctttaatactacgtttggcctcatttaaatggcttctccaatattttgggtagactactatttatatactatacttcgcatgttggtatacatgcctaatgatatggactcctatctattactctgcatctgggaagtaagcctaatgagcacttgccctgcacatctattttctacat

SEQ ID NO: 69146 - DNA, 280 bp, Zea mays
  unsure (1)..(280): unsure at all n locations
gacacttttagaaactcacgctntgatggtcagcagagcgatctgttactactagtattattatagcggcggcaggctgtcaacgagatgtgtgcggatatgattctcagtcatgctactaacagcattgcggtacgacgaactgtatatgtagtttaggacgctgtgccatcaccctctagcgtaaggtaacgtctactttactgtggtatggaagatgtgaacttcatgaatggccttgtacccctgtactgaacatgcttggacatgatctcctggg

SEQ ID NO: 69147 - DNA, 409 bp, Zea mays
catgcaagcttgtacttcgcctcaacatggcctgattgatgattggcgcgccgtttcagcgcgtctgctgacgcacccaccgtcaatccaccttaggtcatgccaactgccatatctgtcctcgcgactgactggcccgcggcccccacgcctggtggtttcgtggggccacacgcgaggcgccttgttgctgccgcatcagtttaaaatattaccttctgtcttctgcagcggccccaaggaggcgcactacaggcgcgcgcgcgacggttcgctctttccgcacccgaagtccggcacacaaactgtatgacttgtggaccagggcccccatgtcatagtctgggtttgtcttctgcagcggccccaaggaggcgcactacatgctgcatgcggggttcgctctaca

SEQ ID NO: 69148 - DNA, 391 bp, Zea mays
acactatcaaactaagctataagatccatgttgacttagcacttcgtagttctctaaaagactcactaatcaacaatttagatagttaatataaaaactcctctccaacagttctttaaataaacttgctaaatttagcaacttctcgtgtaatcgtattttctttctacatttggcaactatttaataacttcctaaacaaacaatattgactgcattatgtagttaatggagatgattgttgacatttgtaactcttttatgtggatagataaaaaactactaacctatatttaaagaactattggataactcaccaatttttactcccggagctatttagcgacttcttaaatttgtgatttagagagccaaaattacataactattg

SEQ ID NO: 69149 - DNA, 448 bp, Zea mays
agctctgagtgtatgatgttcttctattgaaggaatcctttttccactagagaccgccaatgtcttctagtcaacaacagagacctcgaactcatgtgggttagagtggctccagcaagagcctctaaaggctcctgtacgataaatatagaggatcaaacggtcctctacgctttccaacaacgtcttttaaacggtcctctaaatttagaggatgctgctggattctctatatatatagagtttatctaaatagtcgtatatccatttgaatactttaaataatcggtttaacaaaactaaaatatatacaatatatttgagagtatgataaatacttatttaaaaaaataaaaaaaaatgactctaatataggcatttgcgtataaatgacgtgatttaaaggacgttgttggaggggaaggaaatatagagtatggaatttttt

SEQ ID NO: 69150 - DNA, 356 bp, Zea mays
taatgcccctaaacattgactaactatgtaaatttcatttcacccatggttcaggatagagaggggggcattttatatcctgcagactatcctgagcacaagattaggaaaattctcatgctaagaaacctcataaagtttatcatcatgcttttatgtataagaatgaggcttctagctctacgcattccactcatgtttaaatgcctaagaagaaaattcctaatgcattaactgtacataatattttcattaaaactattgatgcttcttatgttttaactaacaaatcaggcaaagtagtcgccaaatattgtgggtgcaaacacaagagttccaagacttgtgtttgggta

SEQ ID NO: 69151 - DNA, 461 bp, Zea mays
  unsure (1)..(461): unsure at all n locations
agcttgccaagccctcggacccgaccggacttcaccggatgcccgagatcaacctcaccggacttcggtcttccgccgccgcgcgtggaccgagctatccagtgagtctccgcccgattcctttcgctcatgtcttctctggcatcccgtggacctccctgacctatntgattgaactatctcgccgcgaccaggccggtctcctcgccgccgacgagcatccccgcctgcgcgcgtggaccgaccgactccggccatctccgacggtgttccgcacaccgttgtgatccccgcgacctccccttcaccctcggccacttcaccggaacagtctcgccgccggtaagcccctccgcccttttcttcgccgcggctactgtttaaggtagaagaaggacctcgggttaggttctgtagaacccgaggggtttttcgtaatgtcagcgactcatgtgaatagt

SEQ ID NO: 69152 - DNA, 410 bp, Zea mays
  unsure (1)..(410): unsure at all n locations
ctaagctncagctccatctatgttatggatggctttggagtcggtctattttccttcggcccttctggcagcttggtgacttccatgaatggcaatgggtccttggtctgaaggtatcttcatgcaaagatatgctggatgaagaattgctatgaaggcattgagagtaccacgaccaatgattgcattgtaaggggttttcatgtcaccaatatcgaacacaacttgttcagtccttgtgttgtcgataaatccgaaggtactggcattgtgattttccgagtgctacaatttgccttcctccgaagccacaaaggggatgtgtggcataatggattctgtcttcggctcttgcatctgtctgaggccttagcgaatatgatatagctgcactgctgtttaaccaaaca

SEQ ID NO: 69153 - DNA, 462 bp, Zea mays
  unsure (1)..(462): unsure at all n locations
agctntgcacaatgtcgcaagtttgaatctgaaagtccgaccatggcttagtcctatcagatttttgcagccaaggccacctagcccgcagcgcccagctcatgatccgaagatcactaatacccagaccccccaggtccttgggtctagtgactttgggccaagtcagcagacaatggccaccattcacctccttcctccctctccacagaaagcctcgtctaagcttatcaattgctttaaaagcccaggaagggatgtccaacgccagagcagcataaatcattcttgatgtcatcacaaattgaacataaatggctctaccagcctttgtcatcagatcagctttccacccaggtaactgtgctgcagttttatcgacaattgcttgaatttgacttctcctaagctttccaagagaaagcgggaggccaaggtactgacagggaaattccgaaatgg

SEQ ID NO: 69154 - DNA, 296 bp, Zea mays
ttcctacaccatgggggtgaggacgtggaactgaataacatacctcattcctcatgaagttgttgagctcctcttgcattgccaacacccaatctgaatcccttagtgcatcctctaccctggatggctcaatagaggaggcaatagagtaatgttcacaaaaatgagcgacccgagatcgagtagttaccaccttatgaatgtcgtcaaggatggagttcacgggtgatctttttgaattgcttgggggactcttcggtggcgcgggcttcggacctgaatctcttgaccatctt

SEQ ID NO: 69155 - DNA, 314 bp, Zea mays
actcaagcttaatgatgaactggctagtcttaatgcttaacttaacactagcaagaatgatttcgacaagctaaagagtgcaagggatgcctacacaatcggtagacacctcctcagtaaggatggacttggctatcagagagaagctaagaacttaacaagccataaggcgtctattctcgccaaggagaaagggaaggcccctatggctaccagtgctaaaaggaaccatgcatttatgtatcatgatagaagacaaactagaaatgtaacgcatgatgctcatgaatcatttgataatgatctcaaaccat

SEQ ID NO: 69156 - DNA, 454 bp, Zea mays
  unsure (1)..(454): unsure at all n locations
agcttattaatcatacctgtaagtattactcgtggtccttcaggtcccatgcacgttttgaatgcattgaaaacccactcaaatgtgtctacattttcgtctcccaacaatgtgaaaccaaatacagtgcactgcagatggtggttacaaccaacaaacattcccaggggtttatcatatagatttgtcttatgagttgtatctataacaccccaaatctcattttgagaatatagtaaaattttttcaaatatcttgaattataatacatttttctttctttctttcttctttagaatccccataacgtttgaagtcacatcgccttaaataaaagttctaaaaaaagaatttcaataaaagattcttatataaactaacctctattgaagtttataagtattaatgtgagaacattnttttagagatcacacaatataaactatttttctta

SEQ ID NO: 69157 - DNA, 377 bp, Zea mays
  unsure (1)..(377): unsure at all n locations
tgatnggcacgatagcaattgatgtttgaatatatgtgttgtattttaaggtagacttgatcacccagcttagactgacgatcagaacggttgttatctgctcgctgtttcatgcgagcctgggcgcgaagtagatgttgcttgacaattcttgacatcagttcatgcttggacagtcaaactgcttaatcagcatctgtaatagtgtcctctggagtgactccaaactgttgaggagggcgtccatatagaacttcacatggagagtgacctaagatagagtgaaaactggtattataccaaattctgcatctacaccagctggtcacttagtacgaaggcgtgcaaaaacacccagaaggttcctacattgtttt

SEQ ID NO: 69158 - DNA, 440 bp, Zea mays
  unsure (1)..(440): unsure at all n locations
agcttccatacgaattttccaatatggaaaatcatcaccatcaaaaacgggaggaggtccatccccgccggacatcgctactctagcggttaagctaatctaagagcaacaaggctttaatacccattgaaaggatcacgatgcccaagaggggggtgaattgggattttctaaaaatcaacaacaattaaaccctaagcaagagtccaacttcacccaacaactagcaataagagaatactactagaaatacaacaatactaagacattgcttcaactacttgctaaacaaataaacaaggtaaaattcttgaattaaatgtggaatgtaaagcaaggtttagaagactcctccaattnttcccgaggtatcgaagagtcagcactcttccttagtcctcgttggagcatccgtgcaagggtatcgctcccacttggtc

SEQ ID NO: 69159 - DNA, 256 bp, Zea mays
gtattcaaaaagatggagccacagctatgattttattcaatgcaaggaggtaactgaaatgggtcctaaaggcatgtcagatacagaaaacaagaatctcaatcacgtacgcgattattagctatggatctacggaaaaatcctacaaattttacacagaaatggatgtgataaatagattctcagccagaaatggactcgtttgagaagttgctccatcttgcttggttgaaaccttcctgaaaaactcttgcat

SEQ ID NO: 69160 - DNA, 453 bp, Zea mays
  unsure (1)..(453): unsure at all n locations
gcttgcggactgtccgtgcgtctcttctcttctccatccgcgcacaatcgacgaaagtgacctntctggcgataggggagcgagagaggagatgcaatgagcagaaatgacaagtttgctgcctctgcccggctttactgcctgtcgcggacggtccgcgcatggttggcagacgatccgcgccctaatgcattcagactgtctgcacttctgaccggactgtccagttcctgatactgcggacggtccgcggtccatgggcggacggtccgcggcctgatactcagttntccaaattctgtccactttctaatttngaatttcaaatctgaattgatgctcatatatggacatttcgaccaatccaagggttagtatgcatgcataaacacatcatgtaattgaggaatgcaatcttgtcatatcacacttcttagatcaatttaacatgaa

SEQ ID NO: 69161 - DNA, 459 bp, Zea mays
agcttcgggacaacaacaaagctctggtctgtcgccagcgccacagggcagaggcgccaggggcttctggggaagatttggggatcacccaaaaataatttactgtctattctgtggtgaagacaagggccataccaccaggatgtgccacgttaccatccagaagcaaaaggagatagcagaagctgcaacacaacagagttagccgaagcaggtcatgcacattgcttcgtaccattcgccttacatcccagagtatgtaggcaatcactctgcagcttctattgcttcagcaagtcaaccccaagcatcttggcaacagccttcaccgccaccaccaacacagcgaggacaacagccagaagggagtcagcacactcaccttcagagggacttcagagaggagtccgaagctcgcacagtcaatagcactgtgccagagtcgaagcacatttactg

SEQ ID NO: 69162 - DNA, 333 bp, Zea mays
tagtcgttgatgagtctatgcaggaacaactatggcgtgaggacatggactttatcgacgagcgcaaatggcaagtaccaatctgaaatgcatggtacaacccagtgctcaggcgttaccaccaccggttcgtgaatagtaagaaactccgggtcggggacctaatcctaagcgagtactgaaccgagaagggctccacaaactctccaccagttgggaaagacccttcaaggtgacagaagtatgcccacccgggtgtgtctgccttgccacaacttaaggagtgcctctttccaatccctcgaacatagagcatctccgtagttctatcat

SEQ ID NO: 69163 - DNA, 189 bp, Zea mays
atcaaatctgaagctgacattctgttagtttggtctgtttacaatcgctcccatgtgtggagacagttcttaaaaatgcgcgagctgtaccacaagaagctaccagtgcgcagaactacgcgtgcccaccataaacttcgataacggcgtcaacttagcctttaacatatcctaatggtctgggagatt

SEQ ID NO: 69164 - DNA, 423 bp, Zea mays
  unsure (1)..(423): unsure at all n locations
agcttcaaggaatcgattatcaaacttctttaccaagagaacaagctctttgagttctacaagattgaatatcctgagcatctgtttgatgaaggcaagagcnctctgacctattatgtctcatttactttataaatcatcaaccctcataccatgagtaacctaaggattgactagtattttgttttcatgtccttgattaccctttgagaattgattattatgattagttctatgctagcactttactttaattaatgaacatgatgagatacaatgatgatactatgattctgttctggatatgatgatatacttgaggcattttaagcgacataggcggtttctcgagtgtctctcgcgaaggacctgttcgttggatgactcacccgggaaaatagtgcaaccatgagggtgatatgg

SEQ ID NO: 69165 - DNA, 427 bp, Zea mays
acaatgaggaaatggcgctcgtcgtcaagagcttccttcaaatcctcaagcaaaggagggggaaagactaaaagtcctgctccaagaacgtttgctacaaatgtggtaagcccggtcattctattgctaaatgtcctatatctagtgacagtgaccgaggcgactacaagaaggggagaagataggagaagaagaggtactacaagaagaagggcggcgatgcccatgtttgtcgggaatgggattccgacgagagctcaagcgactccttcgacgacgaggactctcgccacatcgccggcatcaagggacttcttttctccacgacggcacaatgccttatggaaatgacggcataaaaaggtaatttaattcctccttaatatgattccttatgatacatgctctttcatgaagaaatttgctt

SEQ ID NO: 69166 - DNA, 238 bp, Zea mays
cttagacagagaatgattcatactaaattgggggagccatacaatgctaccccctcatgtagaggactggttcacagaaagctagacttacaggcataagtcccattccgcaaggaaaaggaagcccttggtagtatggcgaaaaccatgcttttgtttatgatggaacaactaaaagctatagagtatatgctttgtgatttgctctatgcctgttgctctactctttatggatgaa

SEQ ID NO: 69167 - DNA, 301 bp, Zea mays
  unsure (1)..(301): unsure at all n locations
taatatacgtattgactcaagcctagctacgggtgcgtgggttttaccgaaatccagagcttcnacttgngagtatcccttggccacaagtcgagctatgttccttgtcaccccaccatgctcgtcttgcttgttgcggaacacccatctgtgtcctacaacattctgattaggacggggaaccgaatgccataccttattcctagtgaagttgatgagctcctcttgcatcttcaccacccaatccgaatcttgaagtgcttgctctaccctgtgtggctcaatagaggaaacaaaagag

SEQ ID NO: 69168 - DNA, 482 bp, Zea mays
  unsure (1)..(482): unsure at all n locations
tctaaagggagagcccattntattgatgtcttgcatacatttcttatatgtatacacttgatcatctctttcatgtgctatgactaatgtgttctttcaagtccatttcatgctaagtcatagattgaaagggaaattggagtcttcggcgaagacaaaggcttccactccgtaactcatccttcgccgtcgctccgcgcatctctccatctttatgggagcgagcatctcttctactttggtataatcttcactcatgatttaatttaccaaaggggagaaagttacttcaagggttctaatgattctngtttttggcgatttatgccaaatgggagagagcatgagcccaaagcataatgaccgcaccaccaccacaccaccacctaattttaaaactaanggttttcaatttggtatctctttgtgttcaataaaggggagaaagtagtatttcataacttgatatctcaaaaccctct

SEQ ID NO: 69169 - DNA, 302 bp, Zea mays
ttcttcacttcttccgtcactttgaatgcgacaggttgcacctcgggtgtggaagtggcgccttgctccaagttgacaatgtgtttggagtctatgatcataaattcaaagctcacagacttgccaatcacttccttgagagacattagttgatatctaggatccgcacatattaattgaacttgagtaggattacgaaatacgacggatctaagaataaccttgaccatatcatgggcattccatttggtgcttccgtggttgcgcactcggttcaccatggtcttgagccggatgtacat

SEQ ID NO: 69170 - DNA, 467 bp, Zea mays
  unsure (1)..(467): unsure at all n locations
tatgtaagggatacataaaacaatgagaagttgatgacctattgtattttatcctaatattntgtggtttaccaaccacttaatctccgttgaggcaagtctaatgttgccatcaattctgtaacacctcgtccactctcgggccggtggtacttactcctgacagacctataagatcatagatcatcctcatatacacaagtctttttgtgcacactgtgtcctcactcatgcgcacgcgataagacttcccggtcaatcacccatcccataattgctctagaccaaacacgaataaaccaaaggatcttttgagatatgcttccgaaaagaacatacaccttgttggtatgaatattctatcaattctattaagccttgggcatggataccacanattctctngctagtggtggctcaaaagcccacacacnccaccttatattcattaagactagacctcatat

SEQ ID NO: 69171 - DNA, 396 bp, Zea mays
  unsure (1)..(396): unsure at all n locations
tgcatgcatgcaagctctatatggacgacgatgtcgtactccgtttatttgttctttatctgnggaaaggtgcttctttatgcctaatatggtgaatgaggccgacgataacgttcagaaaattattcataatatgaagaaagcacacactcgccataagagttatgcagacaaacggcgattgcccttgtattttcatgatggagactatgtctacctgatagattcaccaatgaatggagtatcgcgtttcgctggttaatggaagcttgcacccaggtatattggtgccttttcctgtactctagcaatgtggaccattggcattccgactctcactacacgaaacattgactgctgtgcataatgtgtacccgtgtacaattgaataatagt

SEQ ID NO: 69172 - DNA, 394 bp, Zea mays
  unsure (1)..(394): unsure at all n locations
tgccgatggataaacaaaaatccttgaaatcttggctgtctatctgtttgccgatgtcgactgttagctcggacggtactcctaagcggcaaacgatgttctgccagaggaatttntgggcagcctttgatgtgattgtggaaacagccctcgcttcaatccatttggtgaagtattcgacagctacgaaggcgaacttaaggttcccctgatcggtgggcatgggcccgacgatgtccattccccatcgctggagatgccatgtatgggcaatcatctttgtatattgcgaggggttgcctgaccgatgggagaacttctggatgcttcgcatgacctcgtgacccgatttgcggcgcatatcattgctggccagtataacccttgacggatc

SEQ ID NO: 69173 - DNA, 470 bp, Zea mays
  unsure (1)..(470): unsure at all n locations
tgtggaagctcataactcatctattgtgcatgaagttgtggtggtctccgaggatgttggagtcacttgtgacttacttgatagtcctacatgtgaaccacaacctactaactctagttgtgataaatgcaaaatttctcttatgaatgataattactcgtgatgaatcacaaatcattgttgagaatgaagtattagtagatagagtgaatgctctaacccatgacctagagaaggcatatggtggaaaggctaaattggatttcatattgggaagtcaacggtgctcacttaatcgtgagggtcttggatatgttcccaagaaaggaaagaatgcttttgtaaagcaaaagacattgtttgtgaaagaatgtgacaaagtgtgtcacaagaagggacatatcaagaagaattgtcctatgctcaagaatatatcctncacttggtttgagcatagttatgttctttct

SEQ ID NO: 69174 - DNA, 404 bp, Zea mays
  unsure (1)..(404): unsure at all n locations
cacctgagctgcagctgcagngaaaataattaatcctctatttgtctccgtgtcatctcgactatggactgtngaataattggtctccagtcgagtgttcgaatagcgagcggaattcgtccgaaatcaactgaatcaaatgctgattaaatatcgaagctaaaatctgtctaatttggtccaattacaacatgcccgaaataaatcagaccaccgtaattagtactgacagcaagtaattggtaaatgatttagctggctaaatcattagactgaaatgtgtagccgtatagctgtgcaacctaggttacattggtaaaaattgagatctaaaatatctatgattctcctttataagaagatctcgagagagatatctctaccaccattcctgatcttatcag

SEQ ID NO: 69175 - DNA, 482 bp, Zea mays
taatctacaagctcatattaccggtccatcgtactctgtgtcatatgaagtttgtttaatgtgaaatagtttgcggattactagatcgtgttgttcttgacagaaatggtcatgaactaattgaaagaaatggtaccatagcaagttatcgatacctcaacacatagaacgccacggcacacctcaacacacctagtccgcgccacatacacgcacattggctggaccgcctcgactgacacgacgacgggtaggggttggtgcttcacacttgtggcagttcttaatgctccaccctctctacagggctaacaatccatcttcactgccttatctgccatgctcaccgcctagcccactatttgccgttttcaggtggttcctatgtaatctgtgataattcaaatattacttaattccttcatcttaatctataatttatttaactgttttactaagttagaatggctcgtcttatttaa

SEQ ID NO: 69176 - DNA, 476 bp, Zea mays
  unsure (1)..(476): unsure at all n locations
tcatcggcgtcgtctcaattgctcatcggtcttcgttctgtttaccatgccgagcatctccgtggtcagaccctccacagcttgatagccggtgagtaacatcccatcacatctgcaatcctcttctccatgcgtagcgctgntctgggagtcngatggtgcacggatgtactgtgtcgtcgcgcacctgcggtgttgccaccgtgcatgactggcggcgctaccatcctgcgtcggcgaagtagagatgaaccttggtcgtgagatcccaaatctaatgatcggattatatcccgtgccccgatcggcctgtttttggtgggctgacgatcgggatctagggccagcaacatatcatatgtacgtataacccgaaccataagattagcatcttatagcaactccagcagttctctaaaagacttcctaaatcaataatttatgtagttaacatacaaactattctccaatagttc

SEQ ID NO: 69177 - DNA, 451 bp, Zea mays
  unsure (1)..(451): unsure at all n locations
acctgaggcatgcaagcttactcatcaatagagtaagcaatgtctttgnttaatagaatatagagggcactagtgcattttttgtgggagaagatatcgtcgtggatgagtgcatcagttataaaagtaaaggagaggaaatgctcacccaacctctccaatatttgaacaaagagattccttgactaccttcgatgaaagtaaagaagagggtagacgtatgggttgttcacgtaggtgtgcatcaaccagtcatgattgtcttcatgatctcgaccaatgtagctctgatgggtacatttgtctcattacagaccccgaggcaagctatatcgtcacatctatgatgcagcatatcgagtatgtcgtccttagtcatctcgatgtgcaagttggatattggcatgacgacaatgatgtagtagagtgagagaagagtaatatattatgg

SEQ ID NO: 69178 - DNA, 447 bp, Zea mays
  unsure (1)..(447): unsure at all n locations
actttgctgatttcagccaagattagtgttacttttatctagttcatgtggactggtattgtaatatggactgttattgtaatatggactgtggacattaaaactttatccgatctgtactcttttccttacagagggagccccacactggggtgtaagatttttaacgaggcagatcgaggaataaaaacattttccctctaaaatttgtttgtgttgttattgtaatatggactgttattgtaaggttgtttcatgtgtaatatggactgttattgtaaggactgttattgtaatatggactattattgtaaggttgtttcatgtgtgctgttatttcccactgttgtgtatttaaatttatctagttcatgtgtgttggtgtttttgttgcatgagagatttngaactggttatgtatctgacctggtcatatgatgcttaatt

SEQ ID NO: 69179 - DNA, 424 bp, Zea mays
tctatagggagaacacattgtgggactaaccaatattcattttgagaaagacatgatttgtagcgcatgccaagctgggaagcaagttggcatccatcatccacacaaaaatgtcatgactaccgacaggccgctggagctactacacatggacttattctgcccgatcgcttacataagcatcggcggtagtaagtattgccttgtaattgtggatgattattctcgcttcacttgggtattctttttacaggaaaaatctcatacccaagagactttaaaaggattcttgagacgggctcaaaatgagttcggcttaatgatcaagataataagaagcgacaatgggacggagttcaagaactctcatattgaaagcttccttgaggaggaaggcatcaagcatgagttctcttctcactac

SEQ ID NO: 69180 - DNA, 432 bp, Zea mays
  unsure (1)..(432): unsure at all n locations
tgtgaagagtattgtggcctntgctgctggctccctcgatcatcattttgagtagagttatgaattgacctaacgtgcctcgggtgaaatcttcctctgaagcccctggtcatttcatagaacctgaatgcttcctcccttctttggcagaagtcattgtcagctcgaatgtattcgtccatcttctggagcaacttctctatacgttgtggtggcttcctggcaaagtactgcgctgaatgtcccggccgaagccccttaatcatggcctcaatgacaatttcattgtgcactgttggcgcctgtgccctcagacgcataaaccttctgacatacgcctgaatgtattcttcgtgatcctgagtacactggaatagagcctgtgcggtgactggctttgtctgaaatccttggaagatggttatcaacata

SEQ ID NO: 69181 - DNA, 406 bp, Zea mays
  unsure (1)..(406): unsure at all n locations
agctntaccacggcgaggaagccacttattttctagttcgtcgccggcaagcctgccacggtgaaagccacgcatctcttgcgccatggctctccactctctccggccgccagcgcgccattccaaattcaagagccaccgccctcgggccctataaattaagcgtggtaatcacgaagccagagcacccgctcctaccaccgattagccaccagagaactccaagttctcttttccctcgatgtggatttacgcacaccgagaactatcggatcgaggctagccctctacaggctagctcgagcctcgttgattgatgttctagctcacctcatgtcccctgttgctcacagaatcactcaantgaactagaccgtctggatcacacgaacacgtttaagtgtct

SEQ ID NO: 69182 - DNA, 411 bp, Zea mays
acggaacttaaaactaagcttcgcgagatttacatgtccactgtaccgcaatttcatctgtgaagcccggtgcgccatccacgccacatggagaatctccatgggctggttccaggggtcatagcgaggcgaatcacgtgatcaacaacggcggtaatcctctcagtttcaccccaaattccacccattgctggtggcttgcttggtttgtcgtttgaagaaaccggacattggcggccacatatatatgcgtgagatgcgtgtccacgagttcgcgcgacgccagcggaatcatcccatatacacggcggcgacacggtggaactattgatgtttgaggtcagcgtgggagatggtcctgcctatggggacccacacgcatatgatatgcgcgcgtctgcgcctgcggat

SEQ ID NO: 69183 - DNA, 415 bp, Zea mays
  unsure (1)..(415): unsure at all n locations
agctttcctgctcaacactcttcttttctgtatataactacgnattattccggnctactgcaatgccgactatattccgagggtacctgttcacacatttgtctacaaaaatactgttaaatcctgttcttgaggaccttcggacgccgaagttcccaacagtagcccctcgcaatattaatttgtgtgaaataataatattcagattgcgatatggacgaatgctttactccgaatgtccgataaaacaccttccctttgcttaaagagcaacattcaatgacatgtggggtctttcaactttcatcgcaccgagcgtatatatactgcataccgcatactcattatgcacgctttctggcaaccactccgctcactcattttactcttggcgctngattgctaactttcactt

SEQ ID NO: 69184 - DNA, 435 bp, Zea mays
taaagccatggtaagtagcataggcaagttaaatgcgaattgtttctagcctatctacgggtgcataggtttcaccaaaatccaaaccttcgacttgtgaatatcccttggccacaagtcgggctttgttccttgtcaccacaccatgctcatcttgcctgttgcggaagacccacttggttcctacaacattttgattatgacgtggaaccaaatgccatacctcattcctagtgaagttgttgagctcctcttgcatcaccaccacccaatccgaatcttgaagtgcttcttctatcctatgtggctcaatagaggaaacaaaagagtaatgttcacagaaatgagcaacacgagatcaagtagttacgcccttgtgaatatcgccgaggatggtgttcacggggtgatctcgttggatttcttggtggactc

SEQ ID NO: 69185 - DNA, 441 bp, Zea mays
  unsure (1)..(441): unsure at all n locations
gatcctctnagtcacctgctgcatgcagcttagcngtcagagatatctccctggtgttctgacactagccgggggcacaccgggcagtccggtgcgccacactanggcagccttcggttggatttgctcctttctttttgaaccatatcttggacttcttattgtgtggcgctgaacttttggcacctgtagaacttattatctagagcatactagttagtccaattgcgtgtgtggtgcaattcatccaccataatcatttttgaaaaggtttgaccctattttcctttcatcntccgctttcnggaattgatgccacgcgaaccaatcgaaatttatgtgcagattgactatttgctatgtagtgcatgggttggaataacattacatttcaaaatagctgatgcttcttcttacattggacaccgtgccactgttgtt

SEQ ID NO: 69186 - DNA, 444 bp, Zea mays
  unsure (1)..(444): unsure at all n locations
cgcttctgccatggttcaacggcggattagagcaccatatcgtgcgtatcttggcaaagtcactgtgtacggtcgcttctctgctccaaatcctatctttttgctgtgagttccaagtcgagatatggtcggggtagggagatagagaggggagaagtttgctgtgtcagctatgcccaaaccgagacaaaagtggtgtcaagtcgtgtctagcttcctagggtaggtgtcatctctttccagggtgttctanggtaaatttggcgccactttgtcaattgggtcgaagggttttgaaaattggattaaggtgaacatgtggaatctttgtgcaagggttagtgttttgtacttangcaaaaactgaatttttccttgtgctgaaccttangtgagccttttatgactcttctgaaaactntnntggggtacttccttactatt

SEQ ID NO: 69187 - DNA, 457 bp, Zea mays
  unsure (1)..(457): unsure at all n locations
tcacctgangcatgcaagctaaggatatgctaatcactagcttccatagctttcatactataccagncgctgctcaagctttgttccagtgcacgcaagaccatgaagagtaccttcaagcgtatgtccgaatgttcttgcgtctgatggcacaagcgcctacagtgtccaatgaaattgtcattgaggccacgatcaaatggctttggccaggacctacaactcagtattttgccatgaaacccccacaaaccctggaaaagcttcttcagaaaatggatgaatacatctgggctgataatgatttccgccaaagaatggaataagcatacacagtttctgatatgaccagtggcttccgtggaagaatccaccccacgcacgttagatcgatccataattgcagcctatgtgatgatgaggaagccagcttatatggcacatcacagttcctatc

SEQ ID NO: 69188 - DNA, 442 bp, Zea mays
  unsure (1)..(442): unsure at all n locations
taagctcagatggctcagtactagcgtcttgagcttctccctcttcttctcatcagccttcacataaaaccactcattcttccgatcagttggccacttggtgcgatagctaaccaccgaagtcttcatatctttgcggtaagcgaagttgtagcaaccaaaattctcatgaagaccatcttctctggccttcgtctaataatgaagctcgtgcactcggcaaaaggactttggcattgggtctattccttggcttcagagagcccagatgaagacgctgagtctaacgatagcgttaggagtcagctgatgaagatagattgtgtaattntccaaaacttccccaatcatttcattcaaaggaaacctcaaccccgctctgaagaaactcctgaaaactaccacctcatcattttccggtgtcggagtggttcttccctgc

SEQ ID NO: 69189 - DNA, 509 bp, Zea mays
  unsure (1)..(509): unsure at all n locations
tcacctgangctgcagcttgaaagaattaccattatgcttgcttctctcttatatcangnactgggngtaatgttgataaaagatggaatatttaatttctattgctttgcatgtctttgttatgatggtgcagccccatatgcacgtaatattgacacatatttctttctcgagaaaaaagagctgttagagcaactccaatagttctctaaaagacttcctaaatcaataatttatgtagttaacataaaaactattctccaacagttctctaaatgaactctctaaaattaacaacttgtcatctaacctcattntctctctacatgtggcaaccatttaacaactccctaaacanaaatattgactgcattatatagnttntgtgacgtaattnttatgtggatagatacaaaacanaattacaacctatatttagagaactattggagaactcacattttgttacttcagatgccattcagcaacttcttaaatctatgattta

SEQ ID NO: 69190 - DNA, 422 bp, Zea mays
  unsure (1)..(422): unsure at all n locations
ngagggagctaggcgagctgcacgggaggagcacgcatggatgtactccggcgagggagcatgagagaagaaggagtggctgcgcgcggcgatgaagctctatataactgccatgggagctcatcagagatgaaacacaggggatgggagatgcgctggcatgggaggaaactgggggtcgcggcatgggtgatctggaacaagcgaacatatgggcgtggtcctagcgccgggcgccgggcggagtctagggcgtgacccatggcgagcgccggctggaagaatatcatcgcgcactggaaataacgacggccgggcggtgggatttttcttcacacgttgagcggcacggccaggaagatcatcgatcggcggtgggagacaagctccatggctgaatccagagcacgctggagattcac

SEQ ID NO: 69191 - DNA, 412 bp, Zea mays
  unsure (1)..(412): unsure at all n locations
acctgangcatgcaagcttgcacangccttcttctatatctacattctttgtcccttctggaacactaccccacttagaaagaatgagggtagaactcttgaatcttgctgatttgaactccttgaagtaccacataacaagggtgttacaggtccttctgctgctgttgctgcttgagcaagctgnggagagatgactgacatagggttgattctgggagaacactacttcttatcttctcttcactatcttcttttctcttctcactttgcactgttcactgtcactttgtttctttttgctcttcccactggaggattcgatctaagagtatgactatcatacactggaggaaaccatagactatgatccatgtgaacagtcttcatccaagaataccatcattgtatc

SEQ ID NO: 69192 - DNA, 436 bp, Zea mays
cacatggatccattcctagcaaccatgccaatgtatcttgttttgactcctgcctcttctacgataggctgattcatctcattacaattaactacaaccctatggcctcttggaatgttccaaacattaataatgttttgtcttcccacgccttttaacctcttcaacctcatcagcgccatcaagatggtcctctgcatttatgttattctacatatgtatgactcgtataaaacaatttcgagtagtgagaatgacatatgcaagtatccataatgacaatgtgcggtattacaaagtaatgtgtgcataccttgggactcattatcgcttctgctatctaaatggccttatttattacttatgttttgttcgatgatgcggcattttttggggactctttctccatatggccccataaagtactctcattgct

SEQ ID NO: 69193 - DNA, 470 bp, Zea mays
  unsure (1)..(470): unsure at all n locations
agctntatcaaatggacgtgagtagagcctcctgctatgtaccaatcaangaagaagtctacgttgagcaaccttccggcttctaagatagtgagtaccctaaccatgtttataaactctctaaggcgctctatgggctcaagcaagccccaagagcatggtatgaatgccttatagatattcttatcactaatggattcaaagtcggaaaggccgatcctacactcttcactaaaactcttgaaaatgactngtttgtatgccaaatttatgttgatgatanttatattgggtctactaacgagtctacatgtgaagaatttggaggatcatgacacacaagttcgagatgtctatgatggtggagttgaagtacttcttaagattccatgtgaagcaacatcaagacagcaccttcctaagccaaacaaagtatactcaagatattctaagcaagtttgcgatgaatg

SEQ ID NO: 69194 - DNA, 439 bp, Zea mays
ctaagcttcacatgacgtcggcatttcacccacagtctgatggtcagtctgttgcggccaacaaggtcatcgccatgtacctccgctgcttcacaggagaccggccgcgcgagtggctcatgtggctgccctgtgcggagtacacgtacaacacggcgtaccagtcttcgctccgcgacacaccgttccatgtggtgtacgaccagcatcccccctccatccgctcctatgagatgggtgacacccgcgtggccgctgtggccaagacgatggccgagcgggaggcgttcctggaggatgtgcgcctccgcctcgagcatgctcatgctgtgcagaagaagttttacgacaacaagcacagggcggtgtcctataccgttggggactgggttctgctgcgccttcgcaaccggccggtggcctccctatccctggcact

SEQ ID NO: 69195 - DNA, 361 bp, Zea mays
ctgcagctgcaagctgtgaaggtcttcattcaacaagtttttatctttattctacagccagcccatgctagtcgtagcaattaagcatgcatctagactggcctcctcttttgcaaaatcaactaagtagaggttgccgtctaatacacccttataagctaatgaaccatcactccttctaaagacagacacatctacgtttgtgaataagcaattgtatcccatattacataggtgactctcagacaataagctatatccaagcgaagcaactaaaaacacattataaatagagtgctctgatgaaatggcaatcttccctagtcctttgacctctgcttgatttccgtcaccgaatatg

SEQ ID NO: 69196 - DNA, 488 bp, Zea mays
  unsure (1)..(488): unsure at all n locations
ngaagccatggtaagtagcatatgcaagtaaaatgcgaattgatttcatcctatctacgggtgcataggtttcaccaaaatccaaaccttcgacttgtgaatatcccttggccacaagtcgtgctttgttccttgtcaccacaccatgctcatgttgcttgttgcggaagacccacttggttcctacaacattttggttatgacgttgaactaaatgccatacctcattccgagtgaaattgttgagctcctcttgcatcgccaccacccaatccgaatcttgaagtgcttcctctatcctgtgtggctcaatagaggaaacaaacgagtaatgttcacaaaaatgagcaacacgagatcgagtagttacccccttttgaatatcgccgaggatggtgttcacggggtgatcttgttggattgcttggtggactcatgggtgtggcggtcttggaacttgttcatcttcctcatcttgatcatgggca

SEQ ID NO: 69197 - DNA, 345 bp, Zea mays
tgaccaggtcgtcccatttggagatctgcacatgatgcttatgctccatccaggctcgggcaacgtcgaagaggaacatggggaggttgcggatgatgaggttgtcatcgtccgttccacccatctggtatgccatccggtagtccgcgggccacagtttctgccttgtttcccccgagtacttagtgatggtagttgaggctcggaaccgggtcgggaacgacgcctgtcgtatggcccggctgatagcttgcataccgggtggttcgggtgaggggctctgatcctccccactgtcatatcgccccccacgcctggtgtggtagcctcggtgcaccttctcgt

SEQ ID NO: 69198 - DNA, 343 bp, Zea mays
gcagcttttggaaaacagataagcgtttttattccgtgttcttgcggcggaccgtccgcagggccaagatgaccctctgacatgaacactgcaaaaacacaagtctacactactgaccgtccgacggagaatcgagcaccgttcgagaccaagcgcggaccgttcggtctcatgcgcggaccgtccggtcgatgaaaaccagataaccctgaacgtgactggttcggtaaaatgtaatattatcgttctcgcggaccgtccggtgtgcacaaacagaccgatcaagactgctttatctgacatctgacgacgcatttaatgcatagtaggcggtgatatagcc

SEQ ID NO: 69199 - DNA, 484 bp, Zea mays
  unsure (1)..(484): unsure at all n locations
tctactgaagcttcggctcaacaagctaaagctgaagctgggccttcagagccctgcaaggagcaaccttgtgaagccgaagcaataaaaattccagaacaagtatcagttgaagaaactgacaccgccatccccgaagcacctgccagcatgcgtgattacatgatacgacatgcttcggggaagaagctatctgaagaagaaactcatgaaggcatccattatgcaaaggaactaaaatatccgaagggggcagtaatattcaatggaacgaatgaagatgacttcttatactgcctgcctgacaacaaagagctatctgtctgccgagaaatggccagaagtattggctttccgaagcttgaagctgggttaagcgccatgacgaaagatgatctcgcagacagcctcgcgtacaacagcctgaaggtatanggaataaacacttganaaatccccttatttttacgcaactcattccttt

SEQ ID NO: 69200 - DNA, 278 bp, Zea mays
aacctaggtgagagaaccgccaacaaagcgagtgaataagcttaactcgggtcaaacctgacaagtcttagttctaagcgtttagcacttaaattcttacttttcatgcaattattgggtcttgaaatatgcattacgtactgcacttagggggagtatgcaaaactcagatcactgtggaaaacccctagtggagccaaaatgcaaacttcaccattcgcctattgtctctaaatattatctatcctatggcagaatattctgaatagtatatgagg

SEQ ID NO: 69201 - DNA, 447 bp, Zea mays
  unsure (1)..(447): unsure at all n locations
cgcagatcaccgattntgatcttctgttcggttnttcttttcatatcttttagttgcccctgatctaataactaatcccatcaataatcgacacataaaacatttcatccttcgtacaataattctttcggcaaatacatttttagctcttttttcgaaagctgttgaatctatagtaccagtagctcacgggctgaatatttgcagtgggccgtttcatgcttgatgggcagaagtcctttgcagaacagaacgcgttggacctcacttccgagctcccattaaaacccaacataccgagtgatgcagctacagactacagtgcctatctctactactccttaaggccttagtgtatgcgtgcacaacgcactgttctgccaagcccccgcctgcctccaccccgcgacaccccatcccccatacgacgcccgctccccgcgcgat

SEQ ID NO: 69202 - DNA, 496 bp, Zea mays
  unsure (1)..(496): unsure at all n locations
attacgtgaactattatactaagcttgtaacatagagttagactcatatatgacttggtagattatttgtatttaattgtctatttacctcatgaagtgaccattttacccatttaagtagttgtttagccagaataggatctaaatggtaatggtcaattgtttagcgtttgtgcactgcgagtatgccaacattaaaaaaaatctccacttgaaaatcctggatcatcaacatttttcatcgcatccttctccagaagcacaaatctaatctaacaatgccacgccacacgggtcatagccatcagcaaaatttggatgcttagtttaagtaacttaattctagatgaggtgaggtgatgtatgatgagtccattctaattctaattgattgcttgtgaggaatgangtgaccatggatcaactcggtttaattcacataccatacaaaaatattgattagtgaaaagatgacatatcaactcgaggaaaccaa

SEQ ID NO: 69203 - DNA, 351 bp, Zea mays
  unsure (1)..(351): unsure at all n locations
taagtcacctgcggcatgcagctnggaccaacagaggcttgaattcttatttaccagctcgagatcatcggctcttgagagcaaacaatggaagcgccagtggatagaattgtatgccttacgctttctctcttagcatgggcgttcaacccccgcacattccaagagaaaatagtgcatttcggattcataaagataaaaaaaccactctatatgagacagaatgaagccaccaaacatatcccatccactaaccctgctgcagcgaaccaccagtgaaagataatttcgaacaagggatccgccaactagaacatagcccagatccatacgacaatctgagtatacatg

SEQ ID NO: 69204 - DNA, 376 bp, Zea mays
  unsure (1)..(376): unsure at all n locations
ggctcgccagtaaccttcttcctctccggccgccagcgcgtcttcgcgaaattggatgccaccgctgatggagcctataaattgccgccccgcctgctccactaagtaatttgcacctagtaaaccaaccctcacctcagatcgtccaccagatctccccaatttgggatttcccccaaatcaaccaagaacacagtactgtttgacctcgtcgtggccaaagtgtttcatgtccgttcatgtccactgtcctcttgtttcagcacccttacttgctcctgatgctcgctgacccatccgatttatctatgcggtcctggatcaccangaacacgtttactcatccgatggtctgcgctgtctccgtggaccggat

SEQ ID NO: 69205 - DNA, 94 bp, Zea mays
tctaactgaacggattatacgagacactaaatggtttttattagcaaaacgaactacacaaaaggctaatatccttaaaggctaaggataacca

SEQ ID NO: 69206 - DNA, 428 bp, Zea mays
  unsure (1)..(428): unsure at all n locations
tgctttatcccagtgtcaatattgggacattattaatattcgcaaanatcccatgacatgacagatgaaatgataataactcatactaaaatagctatcacttgttcatctatgcaatctatctagaattttgtttgattgatctattgttgaatagcatgaattactattctgctgggacttttgtggattatgataaatttggtggccagatctttcccgattctctatcagcggtatgtatttctattaagcangagtgtgattgtcgaatgacaggtctagtgtactagtgagagttgtctcactgagttaccatgtcacatgttctctccgcatttgcatggggaggcttgtctcggtttatcccttccctagatctcactcatttgtgaggctccgacactggtcctgtactttatgcatgt

SEQ ID NO: 69207 - DNA, 455 bp, Zea mays
  unsure (1)..(455): unsure at all n locations
agcttatactgtgtgaaagaagattatatgtttaatatgacnacnagnnattaatacactgtggatgttatgtctctcttatgtaccacacagctattgaattattgttatgccagaggccagagcagtgcattgattcggtgcattaggcaaacattataccttgtgcatcagttattataacccactttctgtagacatatggttctttgatcggaacatgtgtttggaccatgccactcacttgtctgtcatatgcatacaatacacaataactaatgcgtagctgccgtcttggcattggtgatagcaaaacttttgactaaggggtctgttgatgagaccctgagtattttgcctgataggtcttgcctggctccgatgatgacctgaatgctctgaacaccagcatccttgtaggcaccaatttagcgcaggtagacacatagtgctaa

SEQ ID NO: 69208 - DNA, 481 bp, Zea mays
  unsure (1)..(481): unsure at all n locations
tgagcacattatcctccacactactgaatgtaccatattttcttacaatgatgattgtttgtcttggtattcataatgatatccataatggatatgacgaatctgtgatagattcgaaaattttagatcgttcatgaccatcagtaatgaattgtcacttccaactagttatggttggagtcaggaagttttgcacgctcctgacttgtgatgaactacatgtactgcatgtacaagttcccctatagttttggtacatgggaatccatgaaaaattccccatgcgtacattgggtatgtttttccaatctcatcaccgcagcgtacatgtatgggcacatagaaagctagggatctgtgtcagaattcattctccatcgatcattaagtatgtagaatctctttgtgagaatatatttacgtcccatacactagcttgaatcgtgagctnttccaggcatcanggggagatttcaagtat

SEQ ID NO: 69209 - DNA, 531 bp, Zea mays
  unsure (1)..(531): unsure at all n locations
acctgctgcatgcaagctagaatggttgatcttatgatactcgtgtgatttgtatctttgattgagagagattaggcggggagtaatgtccacaatcacatctgcatatacatatagaaaaaaaacggttataaaaatatctaaatgaactatgctatccctcatcaaagaatctagcctagcaaaatccatcttatcttgagaaagtctatcctacactcatagatccatcttatcctaaaaaaatagattctcatcttatcttgaaaagatttatcttatcctaatagatctatgtgacctcaaaagattctaccttacccttatggattcatcttaccccaataagcatatntatcccacgctagtgtaacaaccatgatctatcctacaataaataagatcctatctagtcaaactagtcacaccaatctaacctagatctgatctaatctagagtgacttatcaaacatggtagataatactgatgatatagattagactctactncgatagatcgggtctgaact

SEQ ID NO: 69210 - DNA, 484 bp, Zea mays
  unsure (1)..(484): unsure at all n locations
ntaactctcgcgagaccttntcccatttctttctaaccatggtgagttcattatcgtatgtgatattctatgcgtgttcactttatttgttcccttgtatggtgtactgtttgtttcctaatttgaatggatgaatgtatgtatacttgcaatcgcatagagaacgatccggttgaatagcccgatgaactcgcatgataagcccctgatcagcagtcggttggtggatgcaagtgtcccttgacctatctctgtcctattcattctttaattcacctcccgctttacacatttatgcctaatgattgactagctntgttatccatgtccttgtttacctatntgggttggattattattgtttagctntatgatattgctcaaactctaatcaatgaacatgatgagattatctatgatacactgttttcccttctcttattatgatgttgtacttgtggtcttcaatgtggctcgagcggtt

SEQ ID NO: 69211 - DNA, 469 bp, Zea mays
  unsure (1)..(469): unsure at all n locations
ctgcagcttgcctctgcagactataccganatgattttcacaatgggagnggagagatggggagagtatcatgtaccctccgtggcaagaggctggacggtggtgtatctgtgctctcgtgtggcatgaacctgatctggtcttaagaaccctggtggcgagttgacatatgcaagggttatgtgctacatatgtcgtgtgattggagatcctcaactgagtattaatcgattcggatcaccgctacttctccgacatgaagacttggtcactgacctacacgttacaatccactgaagatgaatggntgttaatatattggctagtataggtcacgtgaatgaattagggtataaagaactctagctgtcacgtaattcacctaacctgacaattatactggatatttatgatcactgtattatccattcagcaacatagtctgtgttattgataaccttacttgatt

SEQ ID NO: 69212 - DNA, 478 bp, Zea mays
tttgaagatgacaacctcgtccttctctggcttcggggtggtctcttctcctccgaagcggagtagcttcttctgatcttcactgaaaaaacctgctttcaccatcttggcgagatcaacctttgaaacagtcgattttccgaagtctatgtggctgggtttgctgggcatggcaatacggtagtcatcttcggagtcggtttcttcaatgttcccttctccttcggcagctgtcgggtttgcttcgacagcaggcatttcttccgcagtcaccagtccggagcgctgcatcgcttcggagatgggcacagtctccgaagcttcagtttcgtccccctcacgctcaaccctagctgtagagcgaactctggccatttaattacgaacttgtgaaactttaatacttttttatccgaagcaggcttcaagatggagcttcgttcaaacctgacaaacaagcttcggtgatgggtaaaaa

SEQ ID NO: 69213 - DNA, 496 bp, Zea mays
  unsure (1)..(496): unsure at all n locations
agcttgggaagaattttcattgcaacatgtgttatttgcgattctctaccagcctatgttagtcttagcaattaagcaagtgtcgagttcagctctatcaaaatctaccaagtatagttgaccctctaacactcccttaaatcctactgaatcatctcttcttctaaagacagtaacacctatatccgtaataagacagttgtaacccattttacataactgtgaaactgaaagcaagttataatctatagaatctacaagaaaaacattggaaatagagtggtcaggtgatatagcaattttacccaaccctttgaccaaacctagatttccatacccgaatgtgatagctcagtgtggatcttggtattctcgaggaagagaacatttttcttcgctgcatgtggttgggccccactatcgatgaccaacatgacccncggatgatagacctaaaaacagattagtctggatttatgacccaacggctttggtc

SEQ ID NO: 69214 - DNA, 470 bp, Zea mays
  unsure (1)..(470): unsure at all n locations
tgatgtttgagagccctatattgcatatgaccagtgactctctctatttatgactttgccacccagatttgtctaggtctactcttatttggtggacctaggaatgtaaccttaatctttccatttgcaacctttcttagaacatagtgagcattgaaagcaaatggtcttgagtgcttangcaagggagttggtggtttagctttgcagttgtgggcaaaatgaccttcatttccacactcaaagcatttgataggcttgtgagtctgctttggcttgtattgagtgatagatttcttttgcacaaaagcattgtatccaataccactcttgttatttttcataacagtgttcataagcagctcattgtggatgtattgacccttgttgaacttttgcacacttgttgcaagatgttcattntcaacttttattttcttgacctcattcttaagcctttgattatccac

SEQ ID NO: 69215 - DNA, 284 bp, Zea mays
  unsure (1)..(284): unsure at all n locations
ttaagtcacctgcagctgcagcttacttagtgaattgagaagaagattgtttctanatgcatggtcaatggctaagactagcatgggctggctgcggcatcgtcgcttatcacatgtatggatgaagaaccttctctagcttctaaagggagaacacgtgatatgttcaactaacgtgcaattcgtagaagatagaccttgtgcagcatgtcatgcatgtaaacaggtgggaggagcacatttcactcagaatgtgataccacatcaaagcccctggagctgat

SEQ ID NO: 69216 - DNA, 475 bp, Zea mays
  unsure (1)..(475): unsure at all n locations
ngagataagataaactgcagcaagtgtcaagctcaataatataagtgttcctaaagatgaagaaatcaacatgagcttggaaaaaggtaaagattcaattaatcatgttgtatgcactgatcatctctccatgtcattcaagcacaaaaagggaagagggaaaaggaggtgcttcaaatgcaaggagataggccatatcatcgcgtcttgtccatacaaaaacaaggatgaagggacaagaagttgttttggatgcaacaataatgaccacacgatcacttcatgtccggtcatgaagaatcaaagacatgcatcctccaaggtgaccctcaccaatgaaaataacacacagcaagcgtcatgtcatgttgagcgacgcttctgctacaagtgtggtgagcatggtcatctatccaaggtatgttataaaggtaagattcctatgcaagtgaatgtgtgtcaatcttattcgcgt

SEQ ID NO: 69217 - DNA, 404 bp, Zea mays
acctgcggcatgcaagcttgcccagctacacacacgcgaagagacttgctttcgtccattagccgatcttgcttacccacggcagcaagaggaaaacttgcttgcacgagcttccaggtgaatagcaagccatccaacacgccttcgctcgcttcatttccttgccggcgaggaggcaagtattctgaacggaaccaaagacacttatgccagggcccttattggaagtgtgagatttgtgatacaatactatggtatttgacaatactatagtattggaacttaaaagatggttggatcgtacagacaacagatagttcttaataccatggtgtatccaaaaccgcggtatttgtggagactccactcatgacctcagatgtatctctagtctctatatatac

SEQ ID NO: 69218 - DNA, 478 bp, Zea mays
ctgaaactaaagctgggcctccagagcccgtcttgtgaattccttggaaaccaaagaaacagaagcatcagaacaaattttggctgaagaaactggcactgccgcctgcaaagcattttacaaagctttcgattatattgtacgacatgcttcggggaaagagctgactgataaagataagcaagaggcttagttttatgcccaaaaactgatatatccaaagggggcgttgatattcaacgacagcggagaagaagatttcttgtattgtctccctgacagcaaggaaatctctgtctgtcgggagatgagcaagagcttctgactcccaacattataagacgggctctcggtggtgcaaataacaagctggccgacagcttggcgtacaatatcttaaaggtgcataaatgagatctttgtattatatgttgaaaccaaaatttgtcatttgcttaaacgtattgacacacatttt

SEQ ID NO: 69219 - DNA, 55 bp, Zea mays
cacgccgcagaaaaaagacaaagcaagcacagcgcaaccgagaagaaccagggga

SEQ ID NO: 69220 - DNA, 466 bp, Zea mays
gtatattgcgaggggttgcctgaccgaggagagaacttctggcatgcttcgcatgaccttgtgacccgatttgctgcgcatatcattgcgggccagtaaaacccttgtcggatcaccttggcagccatggcccttggccctgcgtgcgatccgcacgtgccactgtggacttcgcgtatgatctgcatgccttcggtttcggtgacgcatttaagcattggctgactgacccctttcttgtataattggccctcaatcagtgcgaagtcccggcttcgatgtctgaggcgctttgcctcactgacgtcagttggatgatagtacccctgtatgaacaaggttattagtgcccgccaatcttcggtcatgattatgttgactatacggtggccctcgctatcattagttatttggagcccttctgggctccagacggctggcgtgccgatggtgtgaaagaacacgt

SEQ ID NO: 69221 - DNA, 75 bp, Zea mays
aggcagatcctattaatcatctagaatgtatgctatgatgaagatttaacagagagctggggcgacatagatcct

SEQ ID NO: 69222 - DNA, 74 bp, Zea mays
acgagacggaacagccgaatgaaagacgaaacaacaagtaaaggggagccaagaggaaacacacacgcagcgca

SEQ ID NO: 69223 - DNA, 482 bp, Zea mays
tcttctcgtcatcgatgagcgacgacaacacgagtgcctcttgctcatggagtttgttcggagtttgaagtacgaaacatggattcatgcttggcgttggtttatgaaaatgactcacaagtctgatccatggaaaaaaatattacgaagaaaaaatgtcacacatgcaaaaaagggaatttaagtataatgcattattcaaacaaaagaaatagcatgcaaagctcttctttaaataatattacctccatccaaaaatataattcaagaatctcggtgatacttatctactactacgcattgtgcaatggtagtgagcttggagagagatgtagtagatgtgtttcctgtcatagatgtagacataaacacatatatgtgggtgcccgtgcgttgcaacagatacatttaatatcatgacaacttatgaacaaatgtgtgttatactgttatgtgaaaatgtttcgtaattaatttgtgat

SEQ ID NO: 69224 - DNA, 309 bp, Zea mays
aatccatacaacacccttcagccctgctggcagcttcttgactcccgtgtacagagatgggcccttgttccgtaagtatcttcatgcatagatatgctggatgatatattgcttctaacgcattgagtgttcctcgaccaataattgcattgtatggatacaccatatccacaatgtccaagataacctgtactgtcctaggttaatgacatagtcgaaggcaactgacattgttatcttgccaagtgccacaacctgtcttcctccgatgccacaaagattgagtgtcgcatcatgtatattatcctc

SEQ ID NO: 69225 - DNA, 358 bp, Zea mays
ctcagctatcatgtctactttcatatggatccggaattatagtcatatctgttccgaggccgccgtaatcattgttttcttaccgagacatttactgccttttctgcccatggtgctgcgtcaccctattttggcccaatgggtcgtgtatcaagttatgtccattatggacgcatcctatggttgcagcacgaccccaatacccttgtggtcgtcctcccatgtttataaaccccctagccgccaccaagaacagcgggttttgtttagatcaagtttagctctcgctacttgcttgcaagcgcgcgtgctagttcatccagccgtcttcttgtcttctgaaccccaccatattgga

SEQ ID NO: 69226 - DNA, 335 bp, Zea mays
  unsure (1)..(335): unsure at all n locations
acttgagaatggattcgaccatgatccagtaattgtttgactatggttgctatagcaagattgtagctggatcatatggctatagctntgatacatatggattaagtagttactacatgaaattcaaagatcctggcacctgaaatccctctgttagacaccctgatggtgatcgccatggtacagtactaaaaaagatctccaagttcatcgctcgtcgtcaccggtgatctaacgcccatattctctccggccactgtgattcgtgctagcgcaagtggataactgagaggagtaaagatcttatcgctcatattgggtcgggctcgctcacc

SEQ ID NO: 69227 - DNA, 223 bp, Zea mays
tcccgaagtctatagaagacagatccttgcgtaatcagttgtatagaatcccacggcctcttctaagatcagctgtcgaccgactaagactacagccattccccctaaggccgatcatgtgcagtttcattgggcatcttgcattctacatgctggcctgtgctatataaggaacatattgcgcctgtccgcatctatttgcatccattgctggacaccttgt

SEQ ID NO: 69228 - DNA, 427 bp, Zea mays
ttactcgtacttccatatgacctccagcaactgtgatcttttatgcttcgacccacgcagcatcgtgctgcgagatttataccgtgaatccaatctgcgtgttcgatccctctagatcacatgtgccactactatgacacgcgtaccatagttgttgtgcacctgcgcttatggtatgggacctggattaacgacctcacaaatccgtaccacgctaagtgataggcggttggtctctaaatcctcacactcggttgacggtgccaacggactgtcattctgattactttggtgtaacacccattagtaacggcagatcaatgtgatagcatatgtgtgccaacatctacttccaaacatatgctgacgcctatgatcgtacctatggcgataacaatgcatcactgcgtctatgacgatgatatta

SEQ ID NO: 69229 - DNA, 289 bp, Zea mays
  unsure (1)..(289): unsure at all n locations
gcacccaagcgtgctgaaaagcaccaaagactaatcatgaaagaaccatgtggagctcgaagagaaaggttgcggttgcataatgcttcttcataagctatctgcaagcgaaacttaagcctgaaatgatctttgagttccataatcagcgtngcaatctggaaccagatgctcctcataggccggattttgttgaaggtacatctcctagaagagtctgcacagcgaacatatgtagctgaagtaaagctattcccattacccttctaagcgaaatctcgaagacgag

SEQ ID NO: 69230 - DNA, 455 bp, Zea mays
  unsure (1)..(455): unsure at all n locations
tgtacattacaacaaatccaactcttgagaagtgaataagttattgtttatcanaaacatatatacatcttgtgaatctctcacttactcaaaatataaatcctgccatttgctcttgcatagttgtattgctctgagctatttcgatctcatgggcccattcttctttcatttaagcttcacatgatacgaaaaatgtgaatgtaccattagtgtgtgtataaatgccaaacgggttcgagccaagatacaaacaaaaaattaaagttgtctcgtgccaccccgaaatgtgaaaacagtaactaggtctgggccaaaatcacgtcgtacctctcttgggtcgtgcgtccatgccgacccaagcacgacccatatattggaacacatataatcaaaatattacaccatataaagttcatatcttactaaattaaagatattacacaattatagca

SEQ ID NO: 69231 - DNA, 438 bp, Zea mays
  unsure (1)..(438): unsure at all n locations
agcttctaaagggagatcatgtgtgaggacnactcgatgttngttttgagaaagacagaccttgggcagcatgtcatgcagggaaacaggtgggaagcactcatcacggcaagaatgtgatgacaacatcaagaccactggagcttcttcacatagacccctttggacccgttgccgacctaagcatcgggggaagtaagtatggtcttgtaattggtgatgatatttcccgcttcacttgggtgttctttntacaggataagtcagatacccaagggacactaaagcgcttctcaaggagagctcanaatgagttngagcttaaagtgaaaaagataatgagcgacaatgggtccaaattcaagaatctagaagttgaagagtttcttgatgaggaatgcatcaagcacgtgttctctgctccctacacaccacatc

SEQ ID NO: 69232 - DNA, 351 bp, Zea mays
tctgcgcgtcgatccgtcctccgtccgagcatgcgctgcgcccttccactggatcatccctgtgaagcgcgttcagcccctctggcgactcgacctcccagtctgcttcgggacaccctccaacttccgaatggagaccctgacgttcgaagtggtcgggttccgaggaacctaccacgccgtgctatggaggccatgctacgcgaagttcatggtcgtccccaactacacctacctgaagctcaagatgccgggccccaacggggtcatcaccgtcggccccacgtacaaacacgcgttcgaatgcgacgtggagtgcgtggagtacgccgaggccctcatcgtcgacct

SEQ ID NO: 69233 - DNA, 411 bp, Zea mays
cctgcggcatgcaagctcgcccaattgggcctcgggcgcgccgttggtgttccctctgcctgaggaggccctcgggcgagacgtatcgttatccgggactatagttcccgcccgaggctgggctcgggcgatgcgagatcgtgccccttgggtagacgaagccttgacctgaatcgcacccatcagtctttgcggtttgtgctgatggtggataccagccgtgcttaggagtgttgggggtacccctaattacggcacccgacaagctgtgagtttttgtcagaaatttgtgtgaactctattaggtcatgtgcaccatatatgcactaaagtctcatgtgcgccgcatatgttcatgattccttaatgctatgcaatgattgacatgacttaattgagatatggacactc

SEQ ID NO: 69234 - DNA, 447 bp, Zea mays
  unsure (1)..(447): unsure at all n locations
ntatcaaatggacgtgaaaagtgctttcctcaatggaccaatcatggaagaggtctatgttgagcaacctcccggctttgaagatagtaagtaccctaaccatgtctataggctctctaaggcgctttatgggctcaagcaagccccaatagcatggtatgaatgccttagagattttcttattgccaatgggttcaaagtcggaaaagccgatcctacactctttactaaaactcttgaaaatgacttgtttgtatgccaaatttatgttgatgatattatatttgggtctactaacgagtctacatgtgaagagtttagtaggattatgacacagaaattcgagatgtctatgatgggggagttgaagtatttcttaggattccaagtaaagcaactccaagatggcaccttcattatccaaacgatatacactcaagacattct

SEQ ID NO: 69235 - DNA, 349 bp, Zea mays
  unsure (1)..(349): unsure at all n locations
agcagcagcnnnaaaggagaacacgagaaggactttcctttgttcactacgaaaaagatagaccgtgggcagcgcgtcaagcaggtaaacaagcgggtggagcacaccacagcaagaatgtgatgaccacgccaagacctctggagccgctgcatatggaccacaacggacccgacgcctatctgagcacacgaggaaggaagcatgggctagctactggtgacgacaacacccgcctcacgcgggagagcctctgcaggacaaggctgagacccaacggaccctcaagcgcttcctaacgagagcgcacaacgagtttgagctcaaagtgaagaacacaaggagcgac

SEQ ID NO: 69236 - DNA, 476 bp, Zea mays
aagcttatatggaatactcggacgaccacatcagatctatctggatgattttgaccaggttcaaaaaagcttttttgaatttcaggccagcttgcattgcaggtgaaagtgataaagaaatctggtggtccgtgaatacgacagatggctatactatcatgataattttgtatcatatatcgtctgccaccgatatgtgatgcaggtaaaataattgttttacccatctcattgccacttgtgtatccatgactaatagcatccgttatgccctgaatagtctccatgcgtaaatttttttggttttgtagtatgtattctaatctgctctcatcaatacaagctcgggcatcaacctttgcttgacttgatagtaatccataacatatatatgggttgggctgattctttcggtaatgaaactgatggcaataatactcttgcatagtcatgtgagtatgtttacctttatctga

SEQ ID NO: 69237 - DNA, 497 bp, Zea mays
  unsure (1)..(497): unsure at all n locations
acctgaggcatgcaagctttgnnggccttgcaattaatcactacggcgtcatctatgtatatatacgngncgcnacgaagacatgcacatatatacaacgatacacaccatgttttatgagcaccttcgaatatatggttggcccgaccgcccgagaaggtctcgagttagcaaattaagtcactacatgaggatgcaatgcatgcgctgctagtgtttaatttgtctacaaactctatcagcaggacctgtgagaccgccaattaagcaccggattaaatctaattttgtaataaccaaacctgtacccctaatcagaaattgntataaagatatactgaatctacgggctagattatgaccagaacatatgggaattctttgtgtctatggcactaatagataaggccgcctgcatgggtgttctgccgtctctggaactgtctctgtcgattaaagagagcacatgacagcttatcatgaatggtgtgatactc

SEQ ID NO: 69238 - DNA, 145 bp, Zea mays
tcacgggcacgaacgtagatcatctggtgcttcatgcatccatgcgaatcatcgaaggaatatgcactgcggccttcatttgttcactctcactgaccatggaaacagataatttataatatgcacgataagacgagaggatggg

SEQ ID NO: 69239 - DNA, 418 bp, Zea mays
  unsure (1)..(418): unsure at all n locations
ttctgacactgtgaagtaagttattcatattctcacagttggttatgcatagttacacagttggttactcatagtaactaaattttatttctagttccgaagctcgacggagacatgctatgcagttggacctaagattgatcgccaatctgaggcaagtttatgatgtactatatacactgtgtatgatgatttattgaacaaatagaatacgaaggtggacatggattcttactattttttgctgaacaaccagccggagtgcaggaccaatattttngatgcaccgatcccttgccccatgcctcggccaacttttaacatcaaacttacatctatgaaagagatgatggacagttagatcaacgatctgccccatcgtcatcgatctatattcacaagatattcttgctgatat

SEQ ID NO: 69240 - DNA, 369 bp, Zea mays
gcccaccagaatgaagcttcttatgcgattctcacttatatgacccaaaccacagtgccacatgtatgtaggacttatatcattatgccgaggccttttatcactaatattacaaataggagcatcatcaagatgtaatacgaataacccattcataatggatgctaaagccacaaacatgccattcttatagatcacacaaccattgctttcactcgcaaatgaataaccattcttcatcaaacatgaaggagacacatatgttcgactcatactatgaactagataacaattatttaactccataataagatctgatgtgaggtggagttgcatcgtcccgacagtcatcgcaacaactcttgcata

SEQ ID NO: 69241 - DNA, 326 bp, Zea mays
  unsure (1)..(326): unsure at all n locations
tggggcattttatgtatntgttcattgataaatacaggattgtctgtgctatcaaaatgcattccattgtcaacaatttcccaaatattaggatggagagaaaataagtgactgcgcattttatgactccaaaatgaatagtcctctccatcaaagtgtgggggttttccaagtggagtagatagtaaatggacattcgaattataagggatgcgagaataatcaaaagaatagttgtgattaaccattttctttctcgacgaagagtcttcgtcgtcgtcatcccttggtgaagaggaggangcatcgctgtcgtaatacatgat

SEQ ID NO: 69242 - DNA, 301 bp, Zea mays
ctctgaaagccgccttgaatgctgcccattccaccacatggctagctcgctgcatgacgaggaacagatctcaccatgtgcgcgcgggttctcgaagctgctgggtggcaaaacgaaccttggccgcatctgatcaaatgccattaagttgtgggaatttggattccactaccctaagccatacatcagcatcaagtggatcctctgccacagtgaacaaaggcggctgagtgctgatgaatacctgataagtggccgatgctgggggacgctgatggtgatcaccaccaccataatgctg

SEQ ID NO: 69243 - DNA, 415 bp, Zea mays
  unsure (1)..(415): unsure at all n locations
tgtgaaggttcttcatccctacatgtgctaagcggctatgctctcagccagcccatgctagtcttagctattaagcatgcatctagaccggcctcctctttttcaaaatcaactaagtaaagtttgccgtctaatacacccttaaaagctagtgaaccatcacttcttctaaagacaaacacatcaatgtttgtaaataaacaattgtatcccatattacataattgactcacagatagtaaattatatccaagggactcaactaaaaacacattagaaatagagtgttcatttgagattgcaattgtacctaacccttttaccttgccttggttcccatcaccgaatattattgaatcttgggagtccttgttcttgacgtaggaggtgaacatcttcttctcccncgtcatat

SEQ ID NO: 69244 - DNA, 472 bp, Zea mays
tggacgtgaagagtgccttcctcaacggaccattctatgaagaggtctatgttgagaaacctcccggctttgaagatagtgagtactctaaccatgtctataaactctctaaggcgcttatgggctcaagcaagccccaagagcatggtatgaatgccttatggatttccttatcactaatggattcaaagtcggaaaggccgatcctactctattcactaaaactcttgaaaatgacttgtttgtatgctaaatttatgttgatgatattatatttgggtctactaacgagtctacatgtgaagaatttagtaggatcatgacacaaaagttcgagatgtctatgatgggggagttgaagtatttcttaggatttcaagtgaagcaactccaagaatgcaccttcctaagccatacgaagtacactcaagatattctgagcatgtttggaatgaatgatgccaaacccatc

SEQ ID NO: 69245 - DNA, 404 bp, Zea mays
agcttcttcaccatgtggtcacggttatctttatattgtttagcaacacacttccctttaaggtgtgtcaagctcatctttagcctctcattatcttctatgagctcttgatatgtatcatcatttgtttctgcaagttctagctcaaaagaagattcgcgtgtctacggacaacaagcattatcacatggttatatagtatcaatatgaacacatgtgcaagagtgatggtgttggaattctaagttttctatcacaacctcatgagcaatgtttaatatgatatgatcatccataagattttcatgagagcataggagcatatcatatcttcctagacatgctatatttcaacttctagcttatctacatggtcctcaagcacaggattcctatttactaat

SEQ ID NO: 69246 - DNA, 439 bp, Zea mays
  unsure (1)..(439): unsure at all n locations
tcttgtttcaggacccaattattggaggaagtttattgttgtcttacacaacgggcaatgttgcacgtcttcctactatagcttcttttgctagagcactgcaggtaatcaagttgtcttttatttcattagttaatttgttttcttgagagcttcatggtgggtgtcttaaccaattgaaattttctaaacaagatgtggtcgatactcttaataatagaataatctaaaaaacctttgatgtgatcagatttgtgtcgacacgagttatagtagcctttgagcgaaatggttaggattgagatttatattaacatgttttaaagttttattaggtaggaccttacagtgcgttgaacaactgcaagtctgtaccttcaatgtaccttcaacattngaattccttctttataagtccagtccagttctcagcttcatg

SEQ ID NO: 69247 - DNA, 332 bp, Zea mays
  unsure (1)..(332): unsure at all n locations
cgtggtagctgtcgcagagactgctgatatcgcgccgagtgtagcaaggccacgttccaagcttcttctagctggtccaacgagtcttctcggctggtctgggtgctctgtgcgtcgtacgcactcgtnctctgtgaacacgattctaagtctgtgggcaagacagcctctgccccatagactagatagaacgatgagaaacctgtggctcggcttggcgtcgtctagactccagacaccgatggagttcttcatcaccactgcgacttgtgaagcgtgtaaacctcgctaagtcctgagatcatccgttgtcactccacctgcatttgtat

SEQ ID NO: 69248 - DNA, 369 bp, Zea mays
  unsure (1)..(369): unsure at all n locations
tgtataatgttctcaagctgttgnttttatcatgtagactatctggtcacttcaaaatacaccatcgacatcgtatgacaccaaatgcttgttcaatattctccctttcgccttcttgatgattagcaaactcctgatctttgtcattgataggcatggatattgacttaacaaaaatagcccattccggatatattccatcagctagatagtaaccctggtcgtattgattcccattaaccatatattgcactcgaggagcttgccctttgagttcttggatgaacaatgatgattgttgcaggacattgatatcattattataaccagcaacaccgaataatgcatgccaagtccaaagatcatgtg

SEQ ID NO: 69249 - DNA, 347 bp, Zea mays
  unsure (1)..(347): unsure at all n locations
agcttacccatgacaaggttttttgttcagttttattgtccncgaacatcaatcctacatcgggtcggtccttaatcgactcagacggagacactacaccgagactttcttctcgtgcaagtcactcgcccggtctcgtctatatcattttcgacccacagattggtatctgacagaggtacatcntttcatatgttgaacccatcatggccatgatggattcaccatcaagtcttttccttgaagatttcccatcccatatgaagcatcaacttttgtttataacaaaacatttgggtgtctatagcaaagcttagcatcagataacgtttaaagtaaacatgtat

SEQ ID NO: 69250 - DNA, 458 bp, Zea mays
tctgtacaaaaattcacagaaagttaattggtggttatttatttgtgatcttgtaaagtttaatgtcaaaaaggaactttctactttcttgttatttgaaaaacgccaaacaacaaatttcatatttttcctatgttcttaataacaaatcattaattatcccaaggtttggggtgttttcactttggggttatttttctagggttttttaagttttccttgttttcttaaaataaaaggtatcccaattattgtacactaaaccaaggtataataaatttttctagtgaactatactgaataagtagactaacaaaaatacgggtgctccctgtgtctttatttaaacctccattaatattttctctaactttaggctaaaaaggatttaaatagtaaactctaccttaactgggtatacagaggggtgtattatttttaaacaggttacgaagtaa

SEQ ID NO: 69251 - DNA, 441 bp, Zea mays
  unsure (1)..(441): unsure at all n locations
agctngaacagcggttntactgttcatgcagttttattatggatttggtcacggctagcattgtntgtaagcttaaactctggtagtctggtgcccttgtgccgtctgatgtctcaaactggcgatataaatgggtgtccaattttcgctcgttcacttaatgcaaaacagtgtttacaaggcgattaacatctatgcaattgctgggtccgcctggacgcctatgcgacaaggtgccactgtttcccatggtgagctcgctgggtacgcctaggcggtgcctttgaaacaccaatgcacaacacanacttctcttgaagaagtttgtctgggtgtcgagaatatgattctaagctgcatcttaatggaataaatgcacatccgataatcttgtgggggtggtggatgaaccataacagtgattcccatcttgaaaactgt

SEQ ID NO: 69252 - DNA, 336 bp, Zea mays
  unsure (1)..(336): unsure at all n locations
acacttatatactaagcttggtgctgaatgngagcctttggtggtgaggctctttttcttttntccacgccttgaatgcaactggttgcacctctgatgtggatgtggcaccttgctccaactgatagtgtgatggagtctgtaccttaagttaaagctacatagttgccatcacctcctaagagaatttgcttatcctacgattatatgattaattgcacttactgggttataaaacatagatcttggaatacctggacattatggcatccacttgtgctcctagttgcggcttgttaccatttcttatacgttgtctagttgtgctttctctta

SEQ ID NO: 69253 - DNA, 477 bp, Zea mays
  unsure (1)..(477): unsure at all n locations
agctntgacatgatacaatctgccggctagtttctcttcttcttgcctttgccttcaccggggaggcttaatggaccgaatcaacggagaatgcgtctaaagaacatgtccatcatcactttggtcctgatcatgagccagctgtatcatacaggtgttcttgcttttggcgaaagttntattttttttattccangtgtgtgtgaatgggccangcgtctccggactctccggctagacattcttttaatctgagatctgcaggcttggctactacagctcgccagtgcatgagcttgcctgactggcctgctctgttcgggaaagatgtgtggccagaatcataatatatagaccgccgcactgcgataactgctcctccatgtgcacatttaactctgcaacctgattatcaatanaaaaaaatccatagttaactgtggctataccttggacagattgcatcacatgtcatgt

SEQ ID NO: 69254 - DNA, 444 bp, Zea mays
  unsure (1)..(444): unsure at all n locations
tctaaagggagaacacgtgatatgtctaaccaatgttcatttcgaataagatagaccttgtgcagcttgtcaagcatggaaacatgtgggaagctctcatcacaccaaaaatgtgatgacaacatcaagacccctggagctgctacatatggacctcttctgacccgtcgcctatctgagcatangaggaagtaagtatggtctagttatcgttgatgacttttcccgcttcacttgggtgttctctttgcaggataagtctgaaacccaatggaccctcaagcgcttcctcatgagagctcaaaatgagtttgagctcaaggtgaagaagattatgagcgacaacgggtccgagttcaagaaccttcaagtggaggagttccttgaggatgaatggatcaagcacgagttctccgctccctacacaccacatcaaaatggtgt

SEQ ID NO: 69255 - DNA, 397 bp, Zea mays
  unsure (1)..(397): unsure at all n locations
agctnttgaacgtactaagcacatgccgggattattttaaccttttaacctagnacctgagggaagccagacgcagactntatccctcatgcgacctgagactgggtctcccatgctagctatggtgggtacaagtgcggtcactgcacggcggcagccggggtcagtggagcattgtatgccaaggcagtgaggcctgtacgcggacggtgaatcaatggggacggttgtcatgtgtggagtcggagtaccctgacatgccatgtgtgtatggtaccttgcatggtaaaactcgattcgaatcgttgcttctcgcactaatgagactgcttgattccttgtctgcatcatgtagaagtgaaaagggtacatgagaaacttgtgattgactaattga

SEQ ID NO: 69256 - DNA, 461 bp, Zea mays
  unsure (1)..(461): unsure at all n locations
ntaganatatgtagaaaaatgtatgatactgctataattgttattctattcttcctaggattattattttccctagaatttagtaaaaatagttctatgatttttagtggaaataagaaattttagggtatttaaagtagttaaaaatattggttatagatttttagaaaataattggtaagtctaaaaatgcccaaactttntatgggaacttaaaacattatttagaagccttgggtagggtttgaattgatttggaccttgtttgatcaccataccccaaaacacccccccctgccctatgaactcctttaccgactccggaaaccctaagttcccggaactccgtgaaggaaagttatattcaagacatcaataataagtttatactatctttgcatccacatgagcatcccatggcatccattcttatacctatgtatggttatgattagaacgtg

SEQ ID NO: 69257 - DNA, 473 bp, Zea mays
tatagctaatacttgtcttgtttgacccgagttaagacttttcactctctttgttggcggttatctcaactaggttagacaagtcctggatgcaatacaaggaatttaaatatgcaatgcaagtgacaacaccatttgacattttacataaaatttctgagatcaaaaatatttagttcattcctcaacatgcaaaagcgggtcttatcaagtggcttagtgaaaatatccgctaattgatcttccgacctcactccttctaaaataatatctcctttagcaacatgatctctaaggaagtggtgacggatatcaatgtgcttggtgcgagagtgttgtacatgattattagcaattttaacagcactctcattatcacacaacaaatgtaccttgtctagaactacgccatagtctagaagagtttgtttcatatataaaatctgtgtgcaacaagcacctgcggcaatgta

SEQ ID NO: 69258 - DNA, 377 bp, Zea mays
  unsure (1)..(377): unsure at all n locations
agctntaatgcacanactctccgcgcttgacttctttctccanaaccatattcaagcaagaacataggatgatgtcaagggacagcatggtattaatcacggaaaatgcaacactctaacattactcccccttacacattaaacatatgcaacacaagcattggagaaaaattaatgtacaaatacgcaaaaaggtcaatacctccttttgtacctttaccatgttatggtgtactttccatctaagtaggcggagttgcttttgtcatcaattcaagatttccatcttgaaagttttatctctatggagctcccttacacttatgtctgatcctttatcctgaccttttcttgttgtaagatacaaaacttagaac

SEQ ID NO: 69259 - DNA, 478 bp, Zea mays
tcttcacactaaagaaagattaggaatgctcattgcttatgtatggaacaaattgcttcaattggtagttgatcaatactagttccttccaagtggcattctttcaattggcaataatatattctatggaaaggaatgtcaatatgaaggttaaattccttttggcttaaatttgtaaattagtgcatattgtgaattcactgctccatgtgcattaacttagaaggaatttaatttatgcctttatgcctcataaatgatgatttatttgccattcatatataaatatcatcattcattaaatacttccttgtactactaatacctcttttcaaagtgctgtttgactagttttaaaaggaaaagagataacaagctaaagaaggaagtctccacgaatgaagacaagaagaatacttatatgacaccatctcatatagcatgacctttcaattggtataacaaatggtacattcta

SEQ ID NO: 69260 - DNA, 329 bp, Zea mays
agaccacctctgctcactgagtaatggattattaaatataagatgaactatttatgaatatggagaaatctgtttggtgtctatgtctgacaatttcctgttgcttgcgctggtgaaggtattattttccctctcagttctgatttttcctgctagttaccttcagctaagctgctctatgatctagattgtggcttgatggaatgtgatgttgaagcctcttcgaggcctgtattgatacacttgatcaccatgtcaccaactgaagactcagacattatcgatctctgtagtgcttggtgatcagtactttacacaagtcatcaact

SEQ ID NO: 69261 - DNA, 207 bp, Zea mays
gcatttgcgttatgaagactctcaggaataacctcgtattgagaccctcgccattcacctctgaagtgaatactggtctagcttaccccggctaggatggaagtcgcactcatgggtaaagatgtggcacctttgcggagtggaaactgattattagccatgctcacggttataacaacctggactcctacatgatattgacctgag

SEQ ID NO: 69262 - DNA, 477 bp, Zea mays
  unsure (1)..(477): unsure at all n locations
tctaaagggagagcacattttatgactaaccaatgttcattttgagaaagacagggtttgtatcgcatgccaagcaggaaagcaagttggtgcccatcatccacacaagaacatcatgacgaccgatatgccactggagctcctacacatggatctattctgcccgatcgcttacataagcatcggcaggagtaagtactgtctagttattgtggatgattattctcgcttcacttgggtgttctttntgcaggaaaaatctcatacccaagagaccttaaagggattcttgagacgggctcaaaacgaagtcggcttaaggatcaagaaaattagaagcgacaacgggacggagttcaagaactcacatattgaatgcttccttgaggaggagggcatcaagcatgagttctcttcttcctacaccccacaacanaatggtgtagtggagaggaagaatataactctattggacat

SEQ ID NO: 69263 - DNA, 453 bp, Zea mays
tcatcattatctattgagcttcggctgtgtgctcttcttctttatcaacttgttactcagctttgtcatcctgtacatattaaagtattgtaaggaaaattcaagcttaaaggaaaaggtaagcacaacgtatgattttgttaccggcttaagatgacttcgagcttcatccacccttcgttcatactaattttataaatctgtttcctatgcttcgggcaatactgggaatatcaaccagatctgctggtgacaaactaaaattgggtctgttgacaacctttccatgtgtgcaaccaagatttatgaatgcgatagctgtgccccgatattctaccattgcacagaaatcaccatgtccggctataatttcatcaatgtcatcaatcttaccctcgatgtgttcaatgcccctgcaagtcttattcgaatactaaattttcacactggctc

SEQ ID NO: 69264 - DNA, 458 bp, Zea mays
gcgcatgaatatacctgggatatcttctctttctgtcagaacatttatcacatgataccattctgtcatccattctccggccatctcttacgaatagctggcactgtacaaattgacccggaccgtgaaacgaagctgttgcatccaaaattattgtgatactgttccttaccccaaaggtatgcctcgcatgataatccatgtatattgcagatactttttgcattatgctgcaatcctttgcttctcaccgcccacacaaagatattcagctttatgattgctccaggggtaagttggtgaatatagacttcgatgattttcatcacctccacgacgatacttgtcaatagatatcgctaaccagcttgtaaaaagcttcggacactacgacttcattttcttcacggtgtgtgcacagtatttcacactcgagcggccctcacaatggataaatc

SEQ ID NO: 69265 - DNA, 376 bp, Zea mays
agcttcggctttgaaaacacgaaatattgtgtttctctaattatgtctgaagctgctcaagaaggctgctgctgagatgaagctcgagtcttgatgaagagaagaacttatggtttcttatatcgatgtcgaaaaccaacacagaaaatatcaccaatgaaattctggaagggctgtccgaagataccggtgacagtgaaagttatgatgtggacagcggtggtgaagactccgaagatcgtccctggcgaccaagccattcagtttatggtaagtcaaccatcatagagaatcatcttgttaacatgaggtgaatgtatttcccggatttgtccgttgtgagggccgacgaaagggagaagacttgtcacaccct

SEQ ID NO: 69266 - DNA, 430 bp, Zea mays
  unsure (1)..(430): unsure at all n locations
acttggatgtttcttggcgacttcaatatgattagaacaccttataaccgcaacaaatcatgatgagacactcatagaatactgaactttaatttggcaatcagtcaactgggcattcaagaaatccccctcaatggacaagcttacacatggtcaaatatgcaacgccatcctttactataaaagcttgactagtgctttgtcttgcatgcttggtctaccaaattccctgctacttctgctcactccctatcaagaggagcctcggattatgtcccttggattatcaatgtccaaattaacatcccatagccgcccattntcatgttcgagaatntctggctccaacatgaagaacttcatacagtctttcaagactcttgagctcagcccttgtttcatccagatcctgtgaaaaggctcataagct

SEQ ID NO: 69267 - DNA, 334 bp, Zea mays
  unsure (1)..(334): unsure at all n locations
agcttcgaacatagactttataacaattgtttataatggagtaagggtttagatgaaccaacttgatattgngataatggaggccacgaaagaatctataaatagggacactaaacctatgcattatgaaattgagcaatgagaaaaatcacttcctgggtcagtaatgggtctagttccatgcgatgcatgtaccaaatagatctcatcaattgctttagtaatggataggtgggattagcgatggagtctcaatatctactactctataagcctatatcgtgngcgttcacaatttcaccacatacctccgccaccgtgcgtgccctctccc

SEQ ID NO: 69268 - DNA, 452 bp, Zea mays
tgcttcgtccgatgtgtccttcgtatcatcaatggagagggcagctttggcctgtgccaatgtttaacatgttcacaacctaccttctctagaatggctgcaactcccctagcaccagataaagcacatacgtccccgcggtcactcaaaatctcctcaaaggcttcggcttcactgctgatccactcgattacgccctcatgatcacccaatatgaagttgtcttcgcttgagtacgcgcccacgttggcgaagctagtctttatctttttacgcactccacagatttttcaaaacatctctcttttgatgcgcgaagctctttcaactattttttcacaataattgtttcagtaatcactggcatctcgttcagcttcggcaacagcgcattttaatgtggcttcaaccagctatttacgaaggtcttcaatttcacatttctgggcttt

SEQ ID NO: 69269 - DNA, 442 bp, Zea mays
  unsure (1)..(442): unsure at all n locations
tgtaatcacgatgaatngattgttgtggtctaattgcgcatggttatggtcgtggataaaaagtaattgtgcgaagagcgcattgatgtgtgtatatatatatatataccaggtatgattattgtggtgaatacgttcgttaaatgtgtgtggtaattctagcgcacgaaatgacttgaataaaatttgtaagtcgacttgtgggtcctcctttgattgtttccactcaaataaatggtaaagtgttatagtaattcaagtctctagaacttggccattcttgaagtaaataggagctaaaacttattagttggtgttttgggctgcacgctctgttttcgccgagctgtctgtttaatgaactaaattatgttgtatgaagaaacgtcatatagaaaggttgtagataactttattatcttgcttgcgctaaaatttgaca

SEQ ID NO: 69270 - DNA, 454 bp, Zea mays
  unsure (1)..(454): unsure at all n locations
agtgacctgcggcatgcaagcttgagcaacanataccgattgtggatgttttcttgattaaatatttccaccaggtttcttcaatccgatgcaacatctacttgttcacctaccctacgaagctaaggtaggaggtcctgtgcaatatagatggatgtatcacatcgaaaggacactaaagaagctacgtgcaatggttggtaataagagacgagttgaagggtgcatcgctgaagaattcatatacaaagagatagcatcgttcacgggcctgtactttgcagaggaacacaatgtcaatgcccatacgttgcggtatcatgtcgacgagcccnctattagtgatattgaaattnttcaatggaggggcanaactgtangtcccagcacaacatactgtttcaccaacgacgaatggaagactgctttactctacatgtataacaacatggaa

SEQ ID NO: 69271 - DNA, 454 bp, Zea mays
  unsure (1)..(454): unsure at all n locations
ggctaactngccagcagaggtgggactatgtaagtgcactcattcacatatgcatcatccctttgttctaagggtttgagaccccttccaactatgctgatcatagacgtggtcacccgcctttacagacagtatcttcgtgccgcctctgatatacgcagtgatgggcagctccagtgatatagccatcggtccggtggccgtggtgtcgctgttgctcggtactctccttcagaatgagattgaccccaagacacacccgcttgagtacaggcggctagcgttcaccgcaaccttcttcgcatgggtcacgcangcagcgctcggattcttcaggtgagcggcgtctagcttatctagtggctgttaacctcagttcgtagctcctttggcacgagcatctcatatagtctgaagtctgaactcgactctgccacaggttagggtttatcat

SEQ ID NO: 69272 - DNA, 446 bp, Zea mays
agcttgaagccatggtaagtagcataggctattattattctattttgctcaagcctagctacgggtgcataggtttcaccgaaatccaaaccttcgacttgtgaataccctttggccacgagtcgagctttgttccttgtcaccacaccatgctcgtcttgcttgttgcggaagacccacttggttcctacaacattttggttaggacgtggaactaattgccatacctcgttccttgtgaaattgttgagctcctcttgcatcgccatcacccaatccgcatcttggagtgcttcctctaccctatgtggctcagtagaggaaacaaaagagtaatgttcacaaaaatgtgcaacccaagatcgagtagttatccccttatggatgtcgccgaggatgtgtgcgacggtgtgatctcgttggattgcttggtggactcttgagtg

SEQ ID NO: 69273 - DNA, 469 bp, Zea mays
  unsure (1)..(469): unsure at all n locations
tcttgatgcatagtttccttgaagaagccttggattcagtactgttgcatcacacgtctccacgtgatgtacaaggcgtgcgtgcgaacaccatgcacgtattggtccagtcgtcggtcggtcggtcggtcggtcggtctggtcctgacttctagtcgtccactggtgctcttccgtttggtcacctgcgtctacactttactaaacaaattgaagttggttttgctggaactgtcacaagcgtgtttctttcaatcgtccatacatggtagtggtaccgtatcatgatccgtcagaccctgttcgtttatgttggattgcatctagaatcgtttcacttaatcaaaatttatataaattagagaagcaatccggttaggatatcgtccgatccaccataccggcagaaacgaacaatgcctcactntggttcgttcagaaatgtacttatgtgtacacgacagtcagc

SEQ ID NO: 69274 - DNA, 293 bp, Zea mays
cttgggcagaagagggagacataaatatcatgtggaggaagatggcggtgtgcatccgaaagatagcttcagaagaatttgggttgagtcacagaaacagaatggaagttatagacactcggtggtggaacgaagatgtccaaaatgctatcaaggagaagaaagattgctacaaacgcttacatcatgacaagtgtgcggataacatagagaagtatatgatagcgaagaagtcttcacagcgagcggtagtagagcccggtgttaacctttgcaacctttataacggtgga

SEQ ID NO: 69275 - DNA, 494 bp, Zea mays
  unsure (1)..(494): unsure at all n locations
tactaagctggggaggcgctgcggttgccaccaggattcatgaaggtggtggctaagcaccctgggattttctacatatcgcacaagctgatgacacagacggtagttctcagggaatcataccggatgcatatgcttgtggacaagcaccccatgatggggataaggtatcagtatatgcatttgatgcatatggggaaggaggaagttggaaagggcaagggcaaagatcgaaggagtagtcgcagtgaacaaatcatcggggaggagtttggtgccacagtggatgatgatgaaaatgaggagtatgatgatgaagacgacgtggctgaagatgacatggaagtgggtgttgcttctgaggatcangacagtgacgacgatgttgatgaagatataaaggaacaaatttctcattgatnttttgagttgggaagtgtcaaccacacttcaagtggtggtgctcgtacatctctttgttggactgcatgaat

SEQ ID NO: 69276 - DNA, 486 bp, Zea mays
  unsure (1)..(486): unsure at all n locations
agcttctaaaggggagagcacatgtgtgggactatctcttttgttcattntgagaaagacatgattgggagtgcatgccaagcatggaagcatattggtgttcatcatccacacaagaacatcatgacgactgacaggccactggagctactccacatggatctattcggcccgatagcttacataagcatcggtgggagtaagtactatctaggtattgtggatgaatattctcgcttcacttgtgtgttctttgtgtaggagaaatctcaaacccaagagaccttaaagggattcttgagacgggctcaaaatgagttcggcttgatgatcaagataatatgaagcgacaacaggacggagttcaagaactcacaaattgaatgttttcttgaggaagagggatcaagcatgagttctcttctcctacacccacaacataatggtgtagtggagaggaagaatataactctacttgacatggca

SEQ ID NO: 69277 - DNA, 477 bp, Zea mays
  unsure (1)..(477): unsure at all n locations
ttaccttgattcccgacaaaccagcatacccttgagagtcttttctttagtcgggtaagtcttgttgagtaattgcatacttanggatttattcccattgttgctgcaggttacgagtcgctttgattgtgattgatgttaagtaccggtgggctcggccttcttataaaagtatatcccatccttagtttctttattgaggattgtcacttaagctagcatgtattataaaacttataaatgttgtatacattaaaattgtaatctttttgaatcaatttattttgtaatcaattccgatgatatatattataatcttgtttaacttgtaaatgttgtaacttgtaaccaattggtaataaagaatntatttccgctgcaagtgttggtatgtgagttgtgcttacttaatcctatgatcttggcggtatgtcgtttatccgatgtcctcggtgcactcggacagatcctgttaag

SEQ ID NO: 69278 - DNA, 339 bp, Zea mays
  unsure (1)..(339): unsure at all n locations
agcttctaacagatctttcgccaatanngtagaatctcgcacaccaacgngcaaggttgctggaacaaaaatatgacactgttcttagtgagagttctacaggcattaataataatatgagaaataggtttatttctgttgaccagcgtgcaagattgctggaacaaaaatatgacactgttcttagtgagagttctacaggcattaataataatatgagaaataggtttatttctgttgacgccgtttcggagcgcctaacactcaacaagaactgtggcggagctctctggttaggcgcggcgcgacatggcgcatgggctatggttctcttgctga

SEQ ID NO: 69279 - DNA, 368 bp, Zea mays
  unsure (1)..(368): unsure at all n locations
tctanagggagaacatgtgatatgtctaaccaatgttcatttcgaataagatagaccttgtgcagcttgtcaagcatggaaacaggtgggatgagcgcatcacagcaagaatgtgatgaccacttcaagacccctggagctgctgcatatggacctcttcagacccgtcgcctatctaagcatatggggaagtaagtatggtctagttattgttgatgacttttcccgcttcacttgagtgttctttntgcatgataagtctgaaacccaatggaccctcaagcgcttcctcaggagggctcataatgagtttgagctcaaagtgaacaagataaggagcgacaacaggtccgagttcaagaaccttc

SEQ ID NO: 69280 - DNA, 358 bp, Zea mays
  unsure (1)..(358): unsure at all n locations
atgccagagccaacccatgagagncttggcaattaagcaagtgtctagcttagcttggttatcattaaaatcaactaagtaaagctgaccatctagcactcccttaaaagctattgaatcatcacttcttctaaagacagtaacacctatattaataaatagacagttggagcccatcctgcataattgagaaacagaaagcatattgtagtctaaagaatctacaagaaaaacnatggaaatagaatggtcacgagatatagctatnttacccaaacctttgaccaaaccttgatttcatcctcgaatgaatagctctttggggatcttattttctcatagatggaaacatcttttc

SEQ ID NO: 69281 - DNA, 462 bp, Zea mays
  unsure (1)..(462): unsure at all n locations
cttgcagggganaggagatgatatgaagacttggaggtgcttgatcgggttaattcaattcttattaactcaagctatcaatcttaaaatgttatatatatatctaagattgacccaaagttattttgagttattatatctaaaattcatatcatctcgagcaagatattgttgttgtagggaataaaggattatcctgtgtggaaaatcaaaacctacaacatggaggaaagtcaaaggatggtaacacttatgtctttaagtgcaagtatcttcaattatcatttctctggtgccttgtgtagtcacattgaaaaatgaagcacttaaaaatgtttttaaattatgtcatcattctttggagaaaaattcctctcataaggtagattgtatttttcatcacttctatattatggcaatctacatgctttaaaantggtataactaacttatggtatccta

SEQ ID NO: 69282 - DNA, 469 bp, Zea mays
cttaactcgagttaagttgtacccctttaatcactatttatggttaagtccattaaccagggttctatttgcaaaaacattaaacaacacaacttgtttgaaatttttacctactgaatgcactctacgtgtgtcaaacatatgcaatgccaatgctcatgatgccatgctcaagttttagttatagtaacaccaggggtgttacatacttccccccataaaagaatctcgtcccgagattaaaatcctatggtaggtaatggtaaaggaaacacatcacatttttatttcctaaattttggtacaatgcaggggtaatgtgggggttacttctttattacaacagctatacaggctgtacaatttacaagaggctaagaagcctgtgaaattcttattcaagaagtcttgggtttcccatgtggcctcatcttcagaatgctggttccactgtatcttataaaacttg

SEQ ID NO: 69283 - DNA, 358 bp, Zea mays
  unsure (1)..(358): unsure at all n locations
tctatagggagaacatgtgatatgtctaactaatgttcatttcgtaaaagatagaccttgtgcagcttgtcaagcatggaaacaagtgggaggctctcatcacaccaaaaatgtgatgacaacatcaatacccctggagctgctacatatggacctcttctgacccgtcgcctatctgagcataggaggaagtaagtatggtctagttattgttgatgacttttcccgcttcacttgggtgttctttntgcaggataagtctgaaacccaatggaccctcaagcgcttcctaaggagagctcaaaatgagtctgagctcaaggtgaagaagataaggagcgacaacgggtccgaattc

SEQ ID NO: 69284 - DNA, 482 bp, Zea mays
  unsure (1)..(482): unsure at all n locations
agctngaacccggctattccatacatgttatagtctatctttcactggngcgcggagagatggcgagagtggcacgtaccctcctggcaacggatcgcctaataggggtggtgtactctcgggtggcgcggacctgttcatgcagtggaggatccgtgggaatagtagacatcaaggtttacaagaaacatatgtcgtgtggttagaaatcctcagctgagtaaatcgattcggatcgccgctatatccccggagagtggagacttgagctccgacctacaacctaagtcaagatgtgaacactatggataaaaatgatgttgtattgatgagatgatgaaattagactagatgcaacagagtctataaatattaatctggcgtaaatatgaaagaatgactcacttattagctattttgcaaagatctaagtgattcttgctaagctctctgattccaatcaacatatctgtagctttctt

SEQ ID NO: 69285 - DNA, 433 bp, Zea mays
  unsure (1)..(433): unsure at all n locations
ataatggaagtgaccactataaggggaacaaaagggagaagaagaagcacttctataatgccaatggcgaggcgcatctatgcaaggagtgggattcggattgctcctcctccgactccgacaatgatggactcgctgccaccgccttcaacaaatcgtccctctttcccaacgagcgtcacacgtgtctcatggctaaggagaagaaagtaagtactcgaaactctacttatgcttcttctaatgataatgattctagtgacgatgatgaaatagactattctagtgtatttaaaggtctagatagaattacaattggcaaaattaatgaattaattgatgcattgaatgagaaagatagactcttatagaaacaagaagatntattgtatgaagagcactgataattttagaagctcaaaatctcatgctc

SEQ ID NO: 69286 - DNA, 366 bp, Zea mays
tggccgcatcggccaatgcctgtggcgcccggcgctgttattggataccacaaatggatacgatggcctgccgatgaccaccgaataccgccgcatcctgctcgatggctaccccatcctcaccacccgccacggcgacgagctcgtcaccaatgatggccgaatcgtgggcatcgacgaagccgtccacctcgcgccctgcaatccagccaagatcatctgcgtccatttgaactacgaaagccgcgtgaaggagttcatcacaaagctcccgcccgcgccgacctacttccacaagccgatcaccgcgctcaacacccacaatggcgccgtcgtccggccggaacgctgcaagtacctcaacta

SEQ ID NO: 69287 - DNA, 341 bp, Zea mays
agcttggcacgtgtcttactgtgtagacttattactacaaacgagagctcaccggggcaggtggtaccgatggctcattccgtgtctacgaagtcacttagataaaggtgagacctgtatgttgctggctgaatcatacaccccatggcgactccctcatttgctatcgcatgacttgccgactttgctgtcgatggacggattgttcttaatggaatgaatggatgctgaacataatactcatgggcatacatgatttcctttcatgccgatttctgcccggtaacttatgggcttcttacaacactgtcacgccttatgattctgaatcacctctcatg

SEQ ID NO: 69288 - DNA, 495 bp, Zea mays
gacacttagatactcagcttcattagatgtcaaatatgacggcgctatctgatctatcctcactaaatgatcccacaactgcagctgcgagttgtaataaccctactatattccattgtgcgtcactcacaaattaatcaattcctttcgatgacacgctgtaggtgaagagagaccacatatagcatacggactgatatcaaaacatggaaaatctctcatctcagacggaaataggatattatcgtgagaacaatactaacgaatgagacattgcgagatcacatcttccatttggcctgatgcggcggagaaccttccatccaccatgatatgcatgatgcgacacgatgggtcttggtgtgcataccactggctcccccggatacgctattgttaatggctgaacatagaatggcgcatcatttgcatattgaggtgctccttatcccttggcagatgtggtactcatgctctgtacaacacaagacatat

SEQ ID NO: 69289 - DNA, 429 bp, Zea mays
agcttcagagggagaacacggataggttgtctttgctcatttcgaagaagatagaccttgcgcagcgtgtcaggcaggtaaacaagtgggaggaacgcatcacagcaagaatgtgatgaccacatcaagacccctggagctgctacatatggacctcttcggacccgtcgcctatctgagcataggaggaagtaagtatggtctagttattgttgatgacttttcccgcttcactcgggtgttctttctgcaggataagtctgaaaccaagggaccctcaagcgcttcctcaggagagctcataatgagtttgagctcaaggtgaagaagataaggagcgacaacgggtccgaattcaagaaccttcatgtggaggagtttcttgatgaggaggtgatcaagcacgagttctacgctccctacacacca

SEQ ID NO: 69290 - DNA, 482 bp, Zea mays
taataaattatgagaaaggctaattaattaattatctttagattcaaattaggaacaaatgatctagttcattactaaagaaattatgtttcaacaatatataagctatccttttctttatcattataaaaatatgagcactcaattaagccattccaacattattagacaatcctgtttttttagtgggaataaataatatttatgcataaaaacatatgactctttaattataaatctgaatcacactttatgagcaaagataattgtataattatttatgtaatgtttttatgaaaagatggtctcaattctttttaatttcatatttagaaatctatgtataaattgattataacaacataaatcaaataaatttactaaatcatttaaactgtaaataaccatgatttaaactaaattatgaaaatatgaaactgcagcaaacactaatttaagcaatttatcacacaattatgaat

SEQ ID NO: 69291 - DNA, 349 bp, Zea mays
tagcttgtggcgccctcgggcgtctgtccgcattcgatttaccaagtctcccacttggaagcctcggagccgaacccttcgggcgtggtagcgtcgcacggactgctaatactgcgccgagtgtagtaatgccacgtcccgagcctcttccagttggtccaacgagtcttctcggctggtctggttgctttggtcatcgtaagcctttgtcctcggggaaccgtattctaagtcagtgagtaggatggcctcggccccatagactagaaagaacggcgagaaacccgtggctcggctcggcgtcatcctcagactccataccaccgagggtagttcctttatccaccgc

SEQ ID NO: 69292 - DNA, 433 bp, Zea mays
  unsure (1)..(433): unsure at all n locations
gtangttntcttaacttgggttaagttgtacccctttaactactatttanggttaagtccattaaccagggttccatttgcaaaaacattaaaacaatataacttgtttgaaatttttgcctagtgaatgcactatatgtgtgtcaaacatatgcaatgccaatgctcgtgatgtcatgctcaagttttagttatagtaacaccaggggtgttacacttagtacattgttttatggactaatgtattgtgtctaagtgctagaaacaggaaaaatcggatcggaaataagttggctcgagcagccaataacatgcccagtctgggagcaccggacagtgtccggtgcgccaggctggcttgcgtgaagtagctgctctcgggaattcaccggcgacgtacgactataattcaccggactgtccggtgtgcacc

SEQ ID NO: 69293 - DNA, 411 bp, Zea mays
  unsure (1)..(411): unsure at all n locations
acctgaggctgcagcttttcaccatatattgatgcttaatttatctcttatattgatgcagnttaatacgaaaacttggtcatcaagctgactgttgaccttctgaccagtcggcactaaagtaggtcggctgcctttctggtagatgtggttaagtcggctttagaagcattggaaactagacttcaagagctttccgaaaagtacttatggaccttcatagcttttgggaatcaaaagatatgactgtttcttctggacggttctgtagcgctggactgactcggacatagctcctcttgctgattcgcctctgatatgttttgtcctttctctttggtgacctaagtattataacatacacgacttngtagcatanattctattagtgttaattgaattcataaagag

SEQ ID NO: 69294 - DNA, 442 bp, Zea mays
  unsure (1)..(442): unsure at all n locations
tttctatcgttcacgtgccctctagttcacgtgccctctattcctctnttggattgacctaagtagtaatttctgtcgttcacgtggtttggttcatgggaatcagtggtgaagaaacccaagaaaataagtaatttcgtcggtttgtttagtgcagccgacaaaattgttttcgtcgctttttttgtcgaagctgacgaaaatcagtaattttagtcggttctatggttctagccaatgaaaattgttttatttctatcggctaaccttgaccgatgaaaaatatctaacttttatacgttgttataaaaactcataagagcttgttcggttctacctaaatccatatggattgaggaagattgaggtagtttcaattcctagtaagtcaaaatctgtctcaatccgtatcaattccctctaatctatatggattgaaaat

SEQ ID NO: 69295 - DNA, 477 bp, Zea mays
  unsure (1)..(477): unsure at all n locations
tgtgaagccaatcacgagtntgttgaagaatgacattaagttcaattggtcttctaagtgcaatgaaccctttgagcaactgaagacactattgaccactgctccggtattagctcaaccggacatcactaaaccttttgacgtatattgtgatgcatctggcagtgggctcggctgtgtactgatgcaagatggccgagtgattgcgtatgcttcaaggcagttgcgccgacatgaggagcattatcccactcatgatctggagctagctgctgtggttcatgccctaaagatttggcgtcactatctgctgggaaatatctgtcacatatatacagaccataaaagtttgaagtacatcctcacccagtcagagttaaatatgatgcaaagacgatggcttgagctcattaaagactatgaactggagatccattatcacccatgcaaggccaatgtggtggcagatgcattgag

SEQ ID NO: 69296 - DNA, 352 bp, Zea mays
  unsure (1)..(352): unsure at all n locations
gcgctgncgcatacaaacttcgtttgccggaatcttcgtcagttcacccggtgtttcacgtctnccaactcaagcaatatattaaactcaattgtactgtgagtagcactccaccagcagctcctactttgtgttacccagtgcaggtgatgcaacggcgcacaatcacatgtggcagacgtcaagtggctcatgtgttaattccgtggtccggttgcgatgctgccttggatacctangaggatgaacttttcctgcgccgtcagtattcatctgctactgctngtggacaagcagcgtctaaagaaggtgggaatgtcagcagcaaggaagactatacgggtgaatacca

SEQ ID NO: 69297 - DNA, 471 bp, Zea mays
tctcgcgtcatgcttcataccttggctcctcgcggcccactcttttattttagccttataattgcctcaggagtaagttgatgaagatagacttcgaagattttcaacacctccacgacgaagctgctcaaggggaatcgcagtccagctttcaaaaagcttctgtacaccacaacttcattttcttcatggtgtggacaagttttttgcccttcgtccgtcctcacaatggacatatcccggaaatacctccctctcatattaacaagatgtttctctctgatagttgatttaccataaactgaatggcttggtcgccaggggcgatcttctgagtcttcgccaccgctgtccacatcataactttcactgtcaccagtatcttcagacagtccctccagaatttccttggtaatcttttctgtgttggacttcgacatggctataagaaaccctaggttcttctcttca

SEQ ID NO: 69298 - DNA, 397 bp, Zea mays
ttggacaaactcttcttattccagactaaataattctcgtcttgaatcaacctgagagcttgaaaggagaggaagattttcacgcagcaaacatctgagcatctggaaaaaagtatgaattcagctcatggtgtctaattcatcattagtttgcactgtccagataaagaacaacacccagattggcctattgctatggccaccacaataagaggtcagagctgactttctatgctaatattgtgcatgccaaacatttcttagatattttgggaatttatacttggacactacgatgggcctgggcgggctagcaatatatgctgaacttgaagacaccaaagtgtagctgctccctcgaaattcatcaattcaacatgctgcttcaattggtatg

SEQ ID NO: 69299 - DNA, 429 bp, Zea mays
tatctccaccatagtcagctgcaccgaccacacctctttctcttgacaagcatcgtgagttcatgagtcacaagccaccactttctccagctccccagatcctctatagttgatgattggttgaagctagtggataagatgctcatcaacgcccaatgcactaacaaagagaaggtattatatgcattgggttgccttactagcctcactgctgactggtgggattcttactgtgctgctcgtgccgctgttgacaccatcacctaagcagagttctcagctaatttcagaaactaccatattcctgtgttttgtgaagattaataagagttcctttccctcatgatggaagcatgtcattggtgagttagagataaattaccaactgccaggatgctcgatgaagtgtgaaatgaaaaaccgaatatt

SEQ ID NO: 69300 - DNA, 494 bp, Zea mays
  unsure (1)..(494): unsure at all n locations
agctnctanagggagagcacagnntattgatttanctatgttcaccnngagaaagacaggatgtgtagcgcatgccacgcatgatagcaagttggagtccatcatccacacaagaacatcatgacgaccgacaggccgctngagctactccacatggatctattcggcccgattgcttacataagcatcgacgggagtaagtattgtcttgtaatagtggatgattattctcgcttcacttgggtattctttttgcaggataaatctcaaacccaagagaccttatagggattcttgagacgggctcaaaatgagttcggcttgaggatcaagaaaattagaagcgacaacgggacggtagtcaagaactctcanatatgaggctctcttgaggaagagggcattaagcatgaattctcttctcgctacacaccacaacataatggtgtagtggagaggaagaatcgaactctattggacattgcaagaaccat

SEQ ID NO: 69301 - DNA, 438 bp, Zea mays
  unsure (1)..(438): unsure at all n locations
ngccaatacttgtcataacaacaacatctgccagcacatcttctgctgaccataccagtaacttggcctttcgcatgctgtggactggatatgattggacctttcaagaaagctcaaggaggatacactcatgtattggtagcgatcgacaaattcactaaatggatagagttcaagcccatcgcttctttaacctcagctaatgccgtggaattcatacaagacataatattcagattcgggataccaaacagcatcataactgacctatgatccaacttcacaagttcagagttcttcgacttctgcgagcaaaaaagcattcagatcaagtatgcatctgtagcacatccaagagccaacgggcatgttgatcgagccaatgggatgatactggaggcactcanganaaaggtctttgataagaatgaaaaattc

SEQ ID NO: 69302 - DNA, 351 bp, Zea mays
attatactatcatgcttataatcggcctaacccatgaatatatatttttcataatcctttgcaccttctcttcaatttgacttcaagagctcaattatggttgatattacgagcgtaacattacgctcttttgacaaactcatttggtttgcacatgatgctctatagtactaactcttgggatcctatagtctcaagtcgacttgatgctcatgcttagtctggctcacatgaaatgctggtcaatgcgtttcactgaataaccctgtggacactgggtgcacatttatgctccgaagaattcaatgcaattcgttcatatacgatcatatattcccatcaatttacaac

SEQ ID NO: 69303 - DNA, 445 bp, Zea mays
aatatttcagagacaaaatatactgtgatttgctttttttttgtccttcaagcttctcctgtacaagcgccgcacttactgccgagtgcgaagctgccacatacaatatcagaggagcccctggcatgggtggagttacgttgttagatcaagtattgcttcagctcttcgaaggctttctgctgagctgatccccattgaaagacttcggccgacttcagcacttcaaagaatggtaaatttctctctgctgatcaagatatgaatcgattcaaagatgccagtcttcctgtcagccgttgagcccctactttgtgcttggcggttccatccgaagaatagcttcgattttgttcggattagcttcgatccctttcattgaaactagacaaccaatgaattttcccttctttactccgaagaacacatttttggatataattta

SEQ ID NO: 69304 - DNA, 448 bp, Zea mays
  unsure (1)..(448): unsure at all n locations
gtgtggaattgngagaggatttgatctcttcggtgtgtcttgtattgaatgctccctcttgtaatgtgtagaagtgggaaaacttggatgacttgaatgtggggtggttggtcgtacatctacatacctatccgcattatacttatccctatttcatacaaccccttatgtaatactacccaacacttcctaacgattacgcatccttcatcgcctctcacacactttatgacttttttctataccaaacacccctacctcattttcataaacactgaatattatcctcatacatactggtctctatctaaacatacacacaaacgttatcttttatctccgtctccgatcattaccacgcatttatataccgccctaccctatcctattctacaattcgtcatatcttaatctacccttgattttaaaccctttcctttttttctac

SEQ ID NO: 69305 - DNA, 431 bp, Zea mays
tctatcaccttagtggagtcatcttatcttgaacagatattatgtcatcctaatagatctaactcaaccagtagagtcatgatgaattacataatcggactatccaaacttttgaccaacatcatgtagtctatctcatccatatctatcctaaccatatgccccaacctcgatgatatgcactcaccgcgaatcaatgggaccaagatcggaggagaaaagaccaacctcatcaatggaggagagaagtcaaactcaatcttcagatgcattaccacttaacatggagttctttctcaccataaactatcttaccctatgctattcttgccctaacataacccatctttgtaataaattgactatacatatagatacccatgcgttcataatcactttctaaattacatgaaacttcttattcttaaact

SEQ ID NO: 69306 - DNA, 437 bp, Zea mays
  unsure (1)..(437): unsure at all n locations
tatccgacagaatatgttgatggctcaacaactgatgatttcacatgccgacaaaggacgtacagaaagagaatttaaagaaggtggcatggtatatctcaagctacaactctatgtgcaatcatcagtggctcgtcatgctaatcacaagctaagtttcaagttcttcggtccatacatggcgcttcagcgtgtcggaaaagtagcttacaagctatagttaccatctacttcaactattcacccagtggttcatgtctcccaactcaagcgttcagtgggtgatcgaccggtcggtgcagttttaccaaatgatttggaacatcttcatgtgccattgcatgcaattgatcgcanggtggtggtcangggaggtaaatctgttcaacaagtgctgatcatatggtccaacaatgatgcaacattagctacatggg

SEQ ID NO: 69307 - DNA, 400 bp, Zea mays
  unsure (1)..(400): unsure at all n locations
agcttcgacagttggagctcttattgtactttttcttttangcatgggatcagacattacctttaaaatttcatccacgtcgctggtagaaagcggtgtggcggacccctcttcttcgggtgatatgcgcttccgagcggatattgctcttttcttgataattctcttattctttgctggtccttcttcatctctgatcagagttgcgggttcggctactctttttcttttatggccctcggcacccttgttcaactgctcgtagtctgaatactctaagcccatggcatcaaatactcggttcagtctttgtttcagtcgggcaccgaaagctggtgcattaattgatcgcttttttggagaattccccaggatctcattggcatcacctcaattgatc

SEQ ID NO: 69308 - DNA, 415 bp, Zea mays
tgtgaaggttcttcatccacacatgtgctaagcgacgatgccacagccagcccatgctagtcttagcaattaagcatgcatctagaccggcctcttcttttgcaaagtcaactaagtaaagtttgccgtctagtacacccttaaatgctagtgaaccatcacttattctaaagacagacacatctacatttgtaaatagacaattatatcccatattacataattgaatgacagatagtaaattatatccaagagactcaactagaaacacattagcgatagagtgctcattggatattgcaatcttgcctaaacctttcaccttgccttggttcccatcaccgaatatgattgaatcttgggaatccttattcttgacgtaggaggtgaacatcttcttctcccccgtcatatg

SEQ ID NO: 69309 - DNA, 307 bp, Zea mays
cagggagctaatgttggtccatatgcactgcatctcacacttagccatatgatgggtgtagagtggctttttgcaaataaacccaaatctcatgtgttgctttgcaaatcctcaattatgtgaaccatatgatctgaggagcccttataccttggtttttgcactctagtccaaaagtgcactagttgtacacttagccccctatggttctattcatggttttcagtggcgagttaaggttctgcactttatggttaatgccctaattcataatgggatatctagacacttctatggttgagtctcc

SEQ ID NO: 69310 - DNA, 456 bp, Zea mays
  unsure (1)..(456): unsure at all n locations
tactaagctaagtaaagataatttaatgcgtctgtcatgtcaaaatatagacattaggtgataaacattaatattacaattttagaaattggaatggatcgatttggagttcatatgaattttctatgatttatacaagttataagaattgtttttatattaaaaactcatttatgtaattaattaactcattcctcgggtttctagattgggcgccaattttctaaaaggttatgggcctcggtgcaagaaaccatatacccatcgcacagtggccatggaccatgggttggtttcctgaatacagatgggccttttaataaaacgtgcacagtgaangggtatcgtgtgatctgcgtcgtcggatcaatatccaacgcatatgattataccgtgcctatcccggatccatattcaacggagtccgtcagatctggaatctacagcttgggattt

SEQ ID NO: 69311 - DNA, 434 bp, Zea mays
tacggacactataatactcagcttacggcctctatggaagctatccgatggcttggaccgatcggaggatggcaagataggggttggccacggtggttgccctcgggcggctctggcgggtcgcggtgaggtcgccggagctatgggcgagctcgggggagttaggcgtggtacggatgatgcaacggggaatgcagccgggcactgggacgggctttatagccgtggcgcgggcgtggtcacgggcggccggggtgcgcggtggttctcgcacgggcgtgctctgagcgcgcccccgagtgtcatcccgcatcgaacacgtgggagctcgcttctgccatggttcaacggcagatttgagcaccttagtgtgtgtatcttggcaaagccactgtgtacgttctcttccctgctccatatcctacactttttct

SEQ ID NO: 69312 - DNA, 441 bp, Zea mays
  unsure (1)..(441): unsure at all n locations
gcttganaatatctggatatggttcgaatttttgtatcttccttcgaaggattatctgtcaaaaatatccctcgatgacaaaatgagcatgctgatttattagctaagtcagcagcacaggggctgcctttaccttcggatgtattcttcgaaacaataaaagcaccttcggtggaacttcttgaaagggcagtcctcagtatatctcctgtgtatagcgaagattggagaactgagatcatctcttatcttcagggaaaattcctttcagatgacgaagcttataacaggaggatagaggcaagagctcgtccatatgtcatgatagaaggtgagtngtacaagcatggagtgtgtgctccgctactctagtgtttatccacaaccgaatgtatagagttgatgatagagatacatgcangcctgtgtagatctcacatt

SEQ ID NO: 69313 - DNA, 458 bp, Zea mays
tgcgagaccttttcccgtttctttctaaccattatgtatgcgatatcgaatgtcatacttgatgcatattcactgtatttgttcccttgtatgatgtactgtttgtttcccaatttgaatggatgaatgtatgtatgcttgcaatcgcatagagaatgatccggtcgaagagcccgaggaactcgcatgataatcccctgagcagcagtcggttggtggaggcaagtgtcctttgacctatctctgtcctattcattctttaattcacctcccgctttacacatttatacctaaggattgactagattttgttatccatgtccttgattacctatttgggttggattattattacctagctttatgctattgcttaactctaatcaatgaacatgatgagattatctatgatacgctgttttcccttctcttattatgatgttgtacttgtgatcttc

SEQ ID NO: 69314 - DNA, 356 bp, Zea mays
  unsure (1)..(356): unsure at all n locations
acctgangatgcaactgttcttttgttggtagaccttgttatatgatacttatgcatgncaccatggtaggagtaatacatacacttttatgcataaagataaaaacattactttgctacctttgactcttgctgaaattgtacaagctgataaagatagagctgcaaatacccataaggaaccaactaatgagacagaaattcagcaacaaattaaattgaaagctcatgtcatgcttgctactaaatctgatcttcttgaaactcatgctactgatgcttgttgctatgccttggtttgcaaagatgctttcttttgtattgatgatattgctagcactttgcctgcatatgtg

SEQ ID NO: 69315 - DNA, 381 bp, Zea mays
tcgatatccttgcttgtcccttcttcgtgagcccctgtcgtccagtcttcgatgaagtctgctagcgcctgggattgaattgaagatctgtgcacgtagtcaatggtgaatttattgagctccgcagctgtcggcgtttcgagacaggggggtcccatagccgacgagtgattgtgctgcgtgccccatcccatatgggtctatcgcgtgtgcgatcgcgaatgggggagaggcgatgtggccggagtcgaacgtgatataagtggaagtcccgcggccttcgtgttcgtcccgcgcccatgtcgggtgcgcttgcagtatgggggttacaagcgtccacgcgggtgatggaatcgagcggtcccaatggagcgcctgtcc

SEQ ID NO: 69316 - DNA, 461 bp, Zea mays
tctgacttctgggcccgcctggctgtccggtgtacaccggacattaattgtagattgtccggtgcaccgtctcccgcgtgcctgacttctgcgcgcttctggcgcgcattaaatgcgcctgcatgtgaccgttggcgcgaagtatccgttgctccgctggctcaccggacagtccggtgtacaccgtacatgtccggtgaattatagcggagtgaattcccgaagctggcgagttccatatgcgctcttccttggagcaccggacactgtccggtggcacaccggatagtccggtgaattatagcggagcgactctggtttttcccgaatgtgaagagtttggcctgaagtcccctggtgcaccggacactgtcatgtggtgcaccggacattgtccggtggcacaccggacagtcctgtgcgccagaccatggctgccttcggtatacctttgctctctt

SEQ ID NO: 69317 - DNA, 351 bp, Zea mays
  unsure (1)..(351): unsure at all n locations
tacatagnacacacaatgcttacagcacatgtcacatcctagactatcactgcatgacctacatacgatactgccttaccactcgccgacttaggatcaacgtaccgtgcggttgcctgaaacaatctcttctaacatcggcttagtgcgccaaggccacatctgttgtcccacaagtattgatcaagcggacttcgctttcagatgatgcagcaacatgggaggactactatgtcgacaccaagcaatttcccgatgcggttgctaggggacaagcaaccttctcctgtggcggtgagatgtcacacccagtgtgtccaggagagagatggcgagccggattcacacata

SEQ ID NO: 69318 - DNA, 457 bp, Zea mays
  unsure (1)..(457): unsure at all n locations
gacacanatgaaaaactttgatttcaagaaataatactattacctcatttntgcacctttaagctattgtacgccaagctgtcggctatctcatcttttgataacaccgagagcctattttctaatgttgggaatccgaagctcttgcccatctcccgacagacagaaatctccttgctgtcagggagacaatacaagaagtctccttctccgctgccgttgaatatcaatgccccctttgatatttcagcttttgggcataaaactgggcctcttgcttttctttttcagtcaactttttccccgaagcatgtcgaaaaatataatcgacggcttcgaaagatgcttcgggggcagcagtgccagtttcttcaaccaaaatttgttctgctatttntgattcttccgcttacaaggatttcacactggtgggctctgaaggcccagcttcagtctc

SEQ ID NO: 69319 - DNA, 339 bp, Zea mays
ctccctcctctactacaccaactggcgccggagatcccacttctcggcctccatagcggccaacctctccgtcagcctgcggtttatactttccgcagccgacttctcctgaacagtatccgcatgctgcgcacggagacactcaacttcggcagcaaacttcgcaggcagagcacccgacgcgacatggtcggcgaagtcacccgcctgccacaaaataccatgagactcgcaacctcataaatcaacgaactatcgaaggcaacacgacttacatgcttcagctgctgcacagctgctggacgcttgtctatgtgctggacacagaacccgcacgtt

SEQ ID NO: 69320 - DNA, 416 bp, Zea mays
tgttattactgatagatgccaacaaatatgacacttatgacagaacccactcttagttaagagttgtagtgcaaagtgaccccctttgcccaacatttgttatttttgtccaaggcatatcctttctattctgaacctcaaattcttagaataggctatagtgaccaatggcaagccactgtaatttttacagaatttttggaaaaagttaattcactgttgtagttcaaacctacactagaattcataaatagaaaataaagaaagggaaaatgagtgatggaaattagtgtcatcctaaaactctgtgtaaattgtccactgaaatatataagggaaataccaatccactatgcttatccttaacaaaacctaaacctagagtgataagcataaaccactaatagccacgtatg

SEQ ID NO: 69321 - DNA, 435 bp, Zea mays
  unsure (1)..(435): unsure at all n locations
tgcacgctaaagatacacagatctcggacgacatgtcacaatgggattgccccggcagcatatatttatagtcccaagtgttatattctctatgtccttgggcccacatgtctgggctcattgcctttgtgcatgcaccccttctgctattaaaggggagacatgcgacgttacaagacagatccaagctcagactcacaatacattacacagtggagtatggtgttactccccggtggcccgaaccactctaaaccctcgtgtgctctcgtgtgttcaaccaccaacctcgtaacaagcaagatgcttatgcccctcctcattntaggaattacggcgggtgcaatccaccacccgggcggagagatttacccttcgacacttggcgcgccangtangggctatgcttgaagttttgcttgtccctcgctaaca

SEQ ID NO: 69322 - DNA, 379 bp, Zea mays
taatgacatgctagttacaagtttccaaggctgtcaaatgaatccagtcacagctaatgccctgttccaatgcacgcatgaccatgatgaatacctccaggcgtatgtccgaatgttcttgcgactgtgggcacaagtgcctacagtgcccaatgaaattgtcattgatgccatgatcaatggtctttggctatgacctactgctcaatattttgccagatagcccccacagactttggagaagttgcttcaaaagatggatgagtacatccgggctgacaatgacttccgccaaagaagggatgaagcttacagattctctgagatgaccagtggcttcggatgacgaattcacccgatgcatgtcaagtcgatccac

SEQ ID NO: 69323 - DNA, 259 bp, Zea mays
  unsure (1)..(259): unsure at all n locations
agcttagcagaagtactactttttcttttntatttctctcaagaagnganntcanggattatctagaagtcaaacaacacacgagtttcgaaaatctgttcntgacaggtggacagatacacacgcacaccagtcttataataacttcataaactctctaaactattcagggcgctatggtgtatgataatcttaaccaccacgcaatgatatagaatatgcattctaccaactttatctntatacgatgcatgaacct

SEQ ID NO: 69324 - DNA, 408 bp, Zea mays
tattcttcgatatttagttcatacgccttacattgtgctctatcatcctaaagggtctacctttgacttaattgaatattcagactctgactatgctgggtgcaaggttgataggaagagcacattatggacttgtcaatttctgggaaggtccctggtgtcttggagttcaaagaaataaacctctgttgccctatccaccgtcgaggtcgagtatgttctgcatgtcagtgttgcgcgcaattactttggatgatgcaaaccctccggtactttggctacaatctgagcaaagtccctgtgatatcctggccctgagatggtaatatcctggcccaaggcttaatggaattaatagagtatccataccaacaaggtgcatcttatttttcggaagcctatctcgaa

SEQ ID NO: 69325 - DNA, 285 bp, Zea mays
tccaaaaaagatagacacgtgtgcaagcttgtcaagcacaggaaacatagtgggagggctctcatcacactcaaatatgggatgacaacatcaagacccctggagctgctacatatggacctctttggacccgccgcctatctaagcatatgaggaagtaagtatggtctagttatcgttgatgactcttcccgcttcaattgggtgttctttctgcaggataagtctgaaaccaatggaccctctagcgcttcatcacgagagcgtcaaatgagtttgagctca

SEQ ID NO: 69326 - DNA, 412 bp, Zea mays
tgtgaatggcttgctgaagcaacagaagatgcatgtgatgtattttgtatgtggagtgataaaatgaggcaccatctatcctcactccaataaagcatatgggacattgttgagtttggagcgctagtacaacatgtaggcaacgaggattacgacttctatgatgccgcccaaataaggcacttcaactcccaagccacctccatactcctcgcttccttgtgtcgggaggagtacaacaaggtgcaaggaagagtgccaaagagatttatgacggcctcaagacgacacatgaagggaatgatgtgaccaatatcaccaagtgcaaaacgatcgatggagaactcgatcggttcgtcctaaacaagggagaagagacacaagcaatgtacaatcgactcaacacaatggt

SEQ ID NO: 69327 - DNA, 252 bp, Zea mays
  unsure (1)..(252): unsure at all n locations
tcaagcctttgaactgtgtccagatatttctcaagcttcggatctcttgccttgcaactcttgtcaacatgaccagaaataactcgagagtctgttttaaggactgcccttcttattcccattgcctttaactntcgaagccccaatagtaaagcttcgtattcagcaatattatgtgtacagctgaagtcaagccttgctgcataacatgttctgactntggaaggtgcaactaggacaacagccgcacct

SEQ ID NO: 69328 - DNA, 226 bp, Zea mays
cacttacttcagcctatatgacatgtgtacacgctatatgactagcacttgacagcatgtacatccatctgagctttggaagagagcacactaaagacataatctcgtacctgcaccgtatgttacacaagatccgtatcaaatcactatgcgatcattcgcttcttcacttgcctcttaccactgaccgactggcatccaataatgtgagaactctgtggacatc

SEQ ID NO: 69329 - DNA, 486 bp, Zea mays
  unsure (1)..(486): unsure at all n locations
actaagctttggagaacctcgcctcacctcactgaacagggttttcagccagaatggagtcaatatgccccacaccaaagggacttcagagaacaatccgaagctcgcacagtcaacagcactgtgccagagtcgaagcacatttattgacacatatcctacctttgatagcagtcttttctattaagttttaatttctgtganacaaagaacattgttagttttcatgtaataatttcgntggttcccacgaggaaaacccattttcttcacaggcttaagtccctgaagcttaaaaatattttttgcgctaacaaggaggaccttcgaattattaaaaatccttcgaagcaacagatagtcgttctaaggaacgcagagtaagttgatgaagtcacaaaaagccgttccaaagggagcgcagtgtatagtttctgctcaaaagtcgctcctaccggaatgcagagcttacagcgaaaagtcaac

SEQ ID NO: 69330 - DNA, 374 bp, Zea mays
  unsure (1)..(374): unsure at all n locations
tcacgacttcattctcctcgtgagtcggacaagttatctatccttcttcttcnctcacaatagacaagncccaagaatatctatccctcatattgacaagatggctctgnttaatacttgatttaccaaaaaccgcatggcttggtcgccaacgtcgatctttngaaattttaccaccactatncacattatagctgtcactgtcgccagtgtctttagataaaccctctaaaatctctctggtaatcttttctgtagttggctttgccattgattgaagaaagccaacatgcatcctcttataaaggcttagcttcgattcaccaacaggcttcttatcttcagacatcttcgacaatgctgagaatgttctc

SEQ ID NO: 69331 - DNA, 286 bp, Zea mays
  unsure (1)..(286): unsure at all n locations
cgaaatccaaccttgtacttggagaatcctctggtcacaagttgagcttcgttccttgacgccacaccatgctcatcttgcttgttgtggaagacacatttggttcctacaacaatttgattaagagcgggaattaaatgccataccttattnctaaggaagatgtggagctactattgcattgccaccagccaattcgaatcttgtagtgctttctctacccactgtggctcaatagatgaaacacaatattaatgctcacaaaaatgtgcaacacgagatctag

SEQ ID NO: 69332 - DNA, 459 bp, Zea mays
  unsure (1)..(459): unsure at all n locations
ntagcacccgttcccacacccgattgcccaccagctcgcctgaatttcgcattgcccccaaatcggttctccgccgccgtagaagtgaactcaccgtcgccagcccaactccggtcagtgcccgcccttttcttcctcgtttgagcattctcatgcctctgtgatgctccccgacccctttaattgaactagaccggtgcccatcgccgggaacacaaccttattgccgctttgcttacggccaccgtggccggagctccctagtccaccaatcgtgcaattaagttggggaaaacgttcatggggactcggatttggtctcagccgaagattagcactggtcttagccccaatcggccggcgtagttgctcgccggagcgcggccgtgcttgaacgccgtcngtgactgcgagttgtgaatngacaagaacccggnggaccttttgtgaaatgtcagt

SEQ ID NO: 69333 - DNA, 398 bp, Zea mays
  unsure (1)..(398): unsure at all n locations
gcttctcctggacaagtgctgcacttaccgctgagtgcgaagctgtcacatataatttcaaaggagcccctggggttggtggagttaatgttgttagatccatcaaatattgcttcagttgctcgaaggctttttgttggcttggtccccattgaaagacttcngctgatttcagcacttcgaagaatggtaaatttctctctgctgatctggatatgaatctattgagagatgccaacctcctcgtcaatctttgggcccccttttttgtatttggtggctccattcgaggtatagcttcaattntacttggattagcttcaattccctttgttgaaaccaagcatccaagagatttccccttctttactccgaagacacactttcctggattcagc

SEQ ID NO: 69334 - DNA, 370 bp, Zea mays
  unsure (1)..(370): unsure at all n locations
actcaactcgccaacgatgaggtcgcgctaccaagtttatattatctattatatgcagcagctncgtcagagctcatgagtctactagaatgttattcacgctaccaccaaatctggatgaagaaagaagatgagccgaagactagcttcataacccccagtggcacatattgttatcttctgatgcccaagggactntaaaatgttggaggaagcttcagcagaatgacagccagatttcttcatttttaaataggaaggaatgtactgacttatgttgatgatatcatagttaaaagcacgaagcaagaaaatcacattgctgatttgcaagagacatttgccaacttcaggcaagctggtttgaagt

SEQ ID NO: 69335 - DNA, 394 bp, Zea mays
  unsure (1)..(394): unsure at all n locations
agagattacaagttccgttccaagaaggtgtgctacaaatgtggtaagcccggtcattntattgctaaatgtcctttatctagtgatagtgataggggcgacgaccagaagggaaagagaagagaaaagaagaagtattacaagaagaagggcggcgatgcccatgtttgccaggagtgggactccgacgagatctccaccgactcctcctccgacgaggacgccgcaaacatcgccgtcaccaaagggcttctcttccccaacgtcggctacaagtgcctcatggcaagggacggcaaaaagaaggtaaaatctagagcctccactaaatacgcaacatctagtgatgaggaggataatttgctcaccccttttgccaacttaaacatgccac

SEQ ID NO: 69336 - DNA, 435 bp, Zea mays
  unsure (1)..(435): unsure at all n locations
tatagcttcacatagaaggaactaaaactgatactggaagctatgtcgttgctaagcattactacttaattgccttgaaacaaaatcagcttgaacatattctcttgtgtttacgcatggaatattctgacaacattagggctgtctgttcatgtagtgcttgacttggatgagactntaatttctgcatatgaatcatctagtctttctgccattgtgcgcacacaagctgttgaagcacgattacattgctttgatatggaatgtatatcgtctgataaggtaccaaactcgtgcctttgttatatgtcacttcgntgataataatttgatcactactgaccaataagccttttcttttgttaactctataaggatgatgaaggcaaacaataggtgaatcatgtgactgtctttgagcgccctgttttgcat

SEQ ID NO: 69337 - DNA, 319 bp, Zea mays
tcggcgatggttaaaaatattggcaggattacagtgcaaatatcaatgaatgctgtggtgacttcacacctactcgtctgtttatatagtgctgcaggtaagaaggcgaagcgccagagtttttacaccaggcgcacacccgcttgcgctcgctgcgcggtggaccgcagggacaaacagtaaactctgcaaggtgggaccgctgcgtgctgggaaattaaatcgtttctcgacaacgagctcagggaaggtgtttttttggacctcggctcccccaagcttaagagacttttttaccgatcaagctcgtcacgaaaaa

SEQ ID NO: 69338 - DNA, 466 bp, Zea mays
  unsure (1)..(466): unsure at all n locations
tcgattcttcggaccgtgtctagatanttttcaagcttctgatctttagccttgcaactcttgtcgatatgacccgaaacaacctgcgaatcagttttaagaatggctcttctgattcccattgcttttaacttccgaaggcccaaaagcagggcttcgtactcagtaatattgtttgtacaactaaaatcgagtcttgccgcataacaagatttaactttggatggtgagaccaacacagcggctgctcctgctccgaaggttcnccaagacccattgcagaacactgtccatacttcggcatctttatttgtttcttcatcctgagcccctggcgtccaatcggcgatgaaatctgccaacgcttgagactggaacgaagacctatgcacataatcaatacaaaattcattgagctctgcagcccatttttcaatccggcagtagcttctctatttctcataat

SEQ ID NO: 69339 - DNA, 434 bp, Zea mays
tctaaagggagaacacgtgatatgtctaacaaatgttactttctaaaaagatagacactgtgcaacttggcgagcacgttaacaagtgggaagctctcatcataccaaaaatgtgatgaccacagcaagaccattggagttgcttcatatggatctcttcggacccgtcgcctatctaagtataagaggaagtaagtatggtcttgttatagttgatgatttttcccgcttcacttgggtattctttttgcaggataaatctgaaacccaacggaccctcaagcgattcctaaggagagctcaaaatgagtttgagctcaatgtgaagaagataaagagcgacaaccggtccgagttcaaaaaccttcaagtggaggagtaccttgaggaggaaggaatcaagcacgagttcttcgcttcctacacaccacaac

SEQ ID NO: 69340 - DNA, 297 bp, Zea mays
  unsure (1)..(297): unsure at all n locations
aagccggtcttattaagtggcttaatgaacatatccgctaattgatctttcgacctcacttcttctaaaatgatatcttctttagcaacatgatctctaaggaagtgatgacggatatctatgtgcttggtgcgagagtgttgtacacgattattaacattttaacagcacctctcattattacacaacaaaggtaccttttctagaacctaccccatagtctaaaaaaagttgtntcatatataaaatctgtgtgcaacaagcaccttgcgcaatgtattcccgttccgcagttga

SEQ ID NO: 69341 - DNA, 375 bp, Zea mays
  unsure (1)..(375): unsure at all n locations
atctttctcgtggaatacaacgacattattacttgaaaactatcaatgnncntnttnttgtgttttttgcgtgacagaaaataaaactgaataagaaagactgctatcaaaggtaggatatgtgttaataaatgtgtttcgactctggcacagtgctattgactgtgcgagcttcngactgctctttgaagtccctctgctgtggaacgtattgactcccttctggctggtgaccttgctgcaatggaagtgggggcggaagctgttgccaagaagcttgaagttgacttgcggaagctacggaagctgcanggtggttgtctatgtattgtgggatataaggcggatgacacgaagcantatgcatgacctgct

SEQ ID NO: 69342 - DNA, 479 bp, Zea mays
  unsure (1)..(479): unsure at all n locations
tctaaagggagaacacattctaggactaacaaatgttcatttttagaaagacaggatctgtagcgcatgccaagcangaaagcaagttggtgcccatcatccacacaagaacatcatgacgaccgacaggccgcttgagctactccacatggatctattcggcccgattgcttacataagcatcggtgggagtaagtattgtcttgtgatagtggatgattattctcgcttcacttgggtgttctttttgcaggagaaatatcaaacccaagagaccttaaaaggattcttgagacgggctcaaaatgagttcgccttaaggatcaagaaaataagaagcgacaacggaacggagttcaagaactcacanattgaaggcttccttgaggaggagggcatcaagcatgagttctcttctccctacacccctcaacaaaatggtgtagtggagaggaagaatcgaactctattggacatgg

SEQ ID NO: 69343 - DNA, 483 bp, Zea mays
  unsure (1)..(483): unsure at all n locations
tgaccttcgtcatgtcgccgaagaagtcatcagggctaggggctgcattgcatccactggatgttaatcaagatacattacgcgaagctaggagccagaaaaggaaggctaccagtccaacacctcagaaggagttagaccaagaaatcagggaccttgaagtcatccatcaacaggatcagaggaagaaggaaaagatgcttcgtctcaccgatcttcataagaagattgatcacgctgctgaggaaatgtgtcatatcacccaagatgaccacgaccgaaggcctcaatacagagagcttcgtcaagacaattcatacaacgatgatgaatggtatgatgatttccatcatggntaattttcttttgatgatgcttcttctctagcagtagagttgtaggctaccccatggcccccatcatacnaagccacctcagcttctatgtatgatgggtactcagacccgaagcagttcctaatga

SEQ ID NO: 69344 - DNA, 417 bp, Zea mays
  unsure (1)..(417): unsure at all n locations
taacctcactgagtggctttgcttgcaagatacctccatctatcttgcgttaataatctgaaggtatagaagttaattataagcagattacttcttgtctcttattcttgtgctgatcctttgtctcccctctnttttgtagggcttaattctgagcaacgctttgagagcacagaagaatgctgaggatgaaagctgccaaatagcacttggtaacctcagtggttatcaaattgaggaatgaagctgcagagaacgataaaattctgctttccttattagacagagtcaaggctagtgaagccaatcttgccacgcagcccgaagctcatagagccacaattgaaaactaaagaaaaccttgccgagaagataaagatttgacatggctaagcacacaggaaatagcgagtggct

SEQ ID NO: 69345 - DNA, 420 bp, Zea mays
  unsure (1)..(420): unsure at all n locations
tgaaactatttcatgatatctaaaaagtgccctttattacacagaaaataaaactgaatggcccacactgctatctaggtangatatttgtcaataaatgtgcttcgactctagcacagtgctattgactgtgcgagcttcggactgttctctgtaagtcctttgatgttgagcataatggccccccttctggctggtggccttgctgcatcagnggtggaagccgacgctgttgccaggaaactagaggttgactcgccgaagcaacataaactcgatgatggttgcctacatattctgggatataaagcgaatgatacgaagcagtgtgcatgacctgcttcggctgaccctgttgagctgcagcttcngctatactcttttgtttcctgatggtaacatggcacatcctggttgtat

SEQ ID NO: 69346 - DNA, 450 bp, Zea mays
  unsure (1)..(450): unsure at all n locations
tctaaagggagaacacattntaggactaacaaatgttcattttgagaaagacaggatntgtagcgcatgccaagccgggaagcaagttggcactcatcatccacacaagaacatcatgactagtgacaggccactggagctcctacacatggacctattcggcccgatcgcttacataagcatcggcgggagtaagtactgtctagttattgtgggtgattattctcgcttcacttgggtgttctttttgcaggagaaatctcaaacccaagagaccttanagggattcttgagacgagctcaaaacgagttcggcttaaggatcaagaaaattagaagcgacaacgggacggagttcaagaactctcacatcgaaggcttncttgaggaggagggcatcaagcatgagttctcctctctctacacgccacaacaaaatggtgtagtgga

SEQ ID NO: 69347 - DNA, 348 bp, Zea mays
aacaccggtctcaaaatgagataggagtctggagattttatataacagacataatgtaatcacaagggtgagtgatgagaagggttaatgaaataacatacaaaaacacaacatatgattgagtttaaaattcgtaggtgacaaagaagaggatatgaccaagagagaagttggttaagtacaatgcttagattgagattggaaagaggatattttaaaggctggtataagataaacctcaaggtaagatatatgggtgataatgataacggtgataatgatgaatagcataatccatggacagaatttatgaaagactcgcaaagtgactaagtggagaaaacaatc

SEQ ID NO: 69348 - DNA, 417 bp, Zea mays
  unsure (1)..(417): unsure at all n locations
ttaaccctcgcgagagcttatnccgctcttctaaccattgttatatcattatcgcatgtgaaattctatgcatatctactctatttgttctcttgtatgagggactgcttgtttcttaatttgaatggatggatgtatgtatgcttgcaatcgcatatanaacgattcggtcgaggagcccgaagaatttcangagaggcctctgacagcaatcagttggtggaggcaagtgtgccttgacctatctttgtcctattcattctttaattcacctcctgcattacacatttatgcctaaggagtgactagctttgatatccatgtcccttgttacctatttgngttggattacttattgttagaattatgctattgctcaaactctaatcaatgaacatgatgagattatctatgata

SEQ ID NO: 69349 - DNA, 290 bp, Zea mays
tggcatctaccttcaccagttaactcctaacgctatcggtaggcttagcggttatatatgggcccttcgaagcctaacaatggagccttttgctgacagtttctgttgagttcatgaattgcattattaaacaaaggccatataagatgggctttatgaaaacttctggtgggtacaatttgcctaccggaaaaccgccaaggatcctgttatcagctaccgaagcaaatggtcggcaggctataaataataatggttctatgtcaaaggtgatgaggacaaggagaaac

SEQ ID NO: 69350 - DNA, 394 bp, Zea mays
  unsure (1)..(394): unsure at all n locations
cttaaaactcaacttcaataatggcctattaataaaaatgcgctaattctaaagccgcggtcggtgtaagatatttgtcataaatatgcctcgactctggcacaatactattgactgtgcgagcttcagactcttttctgaagttctgttggaggagaatgtgctaacttccttctggctggtggacacantgcgttggtggnggacggggatgctgttgccaagatgtctgatagtggcttgcccaagcaacagaaactgttgggtggttgcctacattctctggaatgtaaggcaaatggtacgaagcactatgcatgacttgctttcactgactctgttgtgctgcagcttctgctatctcctcttgcttctggatggtaacatgacacat

SEQ ID NO: 69351 - DNA, 491 bp, Zea mays
  unsure (1)..(491): unsure at all n locations
ctcagcttctaagggagaacacgtgataggtttgactaacgtgcaattctaaaaagatagaccttgtgcagctggtcaagcaggtaaacaagtgggaggagcgcatcacagcaagaatgtgatgaccacttcaagacctctggagctgctacatatggacctcttcggacccgtcgcctatctaagcataggagggagtaagtatggtctagttattgttgatgacttttcccgcttcacttgggtgttctttttgcaggataagtctgaaacccaagggaccctcaagcgcttcctaaggagagctcaaaatgagtttgagctcaaggtgaagaagataaggagcgacaacggatccgagttcaagaaccttcaagtggaggagtttcttgaggaggaagggatcaagcacgagttctccgctccctacacaccacaacanaatggtgtggtagagaggaagaacacgacgctcatcgatatggcgagga

SEQ ID NO: 69352 - DNA, 317 bp, Zea mays
cccctgccctatgaacttcactatagactctggaacccctgagtttctggagatccatgtaggaaagtcatattccagacattaaataataaaattttaatatctttgcatcttcatgaacaatacattagaatttatgaatatatatgggtatatctaaaggacgaggaggaaattgaagttggagaagatatgactttaccaccaccacctgaagaacctcatgcctgaaactgcttttactttgatatctgtggagcagagcctgattcaactataactcaagcaagccccgatgcctttgcaccccctgtgac

SEQ ID NO: 69353 - DNA, 483 bp, Zea mays
  unsure (1)..(483): unsure at all n locations
tctanagggagaacacgtgatanggttgactaacgtgcaattctaaaaagatagaccttgtgcagcttgtcaagcaggtaaacaagtgggaggagcacatcacagcaagaatgtgatgactacttcaagacccctggagctgctgcatatggacctcttcggacccgtcgcctatctgagcataggagggagtaagtatggtctagttattgttgatgacttttcccgcttcacttgggtgttctttttgcaggataagtctgaaacccaagggaccctcaagcgcttcctcaggagagctcanaatgagtttgagctcaaggtgaagaagataaggagcgacaacgggtccgagttcaagaaccttcaagtggaggagtgtcttgaggaggaagggataaagcacgagttctccgctccctacacaccacaacaaaatggtgtggtagaaaggaagaacacgacgctcatcgatatggcgag

SEQ ID NO: 69354 - DNA, 481 bp, Zea mays
  unsure (1)..(481): unsure at all n locations
tatgaagattcttcatcccaacatgggctagtcggcggtgccagagccaacccatgttagtcttagcaattaattaagcaagtgtcgagttcagctctatcaaaatctaccaagtatagctgaccctccaacactcccttaaatgctattgaatcatcactccttctaaagacaatgacacctacatcagtaaagagacagttgtagcccattttgcataattgagatacagaaagcaaattgtaatctaatgaatctacaagaaaaacattggaaatagaatggtcaggagatatagcaattttacccaatcctttgaccaaaccttgatttccatccccgaatgtgatcgctcgttgcggatcttggtttttctcgtacgaggagaacattntcttctccccagtcatgtgggttgtgcacccgctatcgatgatccaacttgagcccccggatgcataaacctacannaacaagttag

SEQ ID NO: 69355 - DNA, 475 bp, Zea mays
  unsure (1)..(475): unsure at all n locations
tgattgtcccccaagtcatcaaccttcacagaagaagcattcaacatctgctgtattgcgtggatcccttggctgtgacgagggtgatatatctagaagctctatagaattttgtcttgtgcaggtcctgcaattaataaatgatttgaaccaaagtgttcgagatactgttctcttatattgaggttagttaattccatatttgatactctatangcctactttagttgacatcttgcttttttccacacccataatgactggtgtgatctctatttccattgatcttgtgtattacagccatgctcctacttagagtcattgttctccagtatcttgcttgtgtcaattgtctttctttcgcattaccctattggtcacagggttctcgcttagcacaaggaatctgaataattgcttacacttaccccatggtcatggactgatggtagacatgagcgtcagcgtatggtgg

SEQ ID NO: 69356 - DNA, 443 bp, Zea mays
  unsure (1)..(443): unsure at all n locations
tatttttgctggcatttaggggtaataatatgactctgtaccaagttttagccattaacacctaatggtcatttttctgtgattttctaaaattcttggccatangggtgctttctactatcactatacttgaaaaatgtcaaacaacagatttacaatttttttatctcttcctttgcaagagcaatcatttgaatttggcaactttttgcttatgggagagggtggtagaaattcttggatcatctggtctttttcatggggtagggggtaatgtgttgtaccttacctttntaaatangtttcatagttttctctggtggtctacttcatcaatagttggtaaaaatttatttgcctacggttgcacaactttaggcttcctcatgcattaattagagcatggaccaaatccatgttttaattgtttaactcacttattg

SEQ ID NO: 69357 - DNA, 435 bp, Zea mays
  unsure (1)..(435): unsure at all n locations
ggcgacagaggcgatgatggtgtgggaactctacacgctgtgtcgagcagataaaattcgtgcgcgcggcaacaaagaaagagcgagctacgcgtgagcagagagctccacacgaaaactcgacgcgcgcagggactacagcgagctagagcagacagtcatgggagatgtagagccgagctgggcgacaaagcgaaatccaagctggagcattgacgagcaaagagcttcgcgcgcgcaagaacaacagacgctatgcgcgcgacgcanaggcgagcaggacgcagccaacaggggagcttcgacggcgagcaactgagaatggctcgacgatgtcatggagcagcaggaaataacaacgccaagatggtcgaggagacaagtccagcgacaacatagacggttagcacggcgagcaggggaggagctcgggcg

SEQ ID NO: 69358 - DNA, 427 bp, Zea mays
  unsure (1)..(427): unsure at all n locations
tcctccagctgccaccacgtcagcacagactgcggtgtccttctctccaccaacgccgacagtcggcaaggcgcaccggcaggtcctcactcccgtcctcgccacgaaagcgaggagaaggacggaatgttgcatcctatctggatagcaacagttcgccttccccggcatggctggaggacgcctcctccgcanggccggaggatgtgtttcaccaccagaagctggaagaggagatgaccagccggcccgcatggggggaagagctccggctcaacccggcctccgccccagcaaggatgatgaacatccttgaagctgagggcgggaccaagatcgcagcccggcttgcttctccccactcacgggctggtggtcaccgtcttgtgtgaccatcggcgangggatacagccgcgctgcatgatg

SEQ ID NO: 69359 - DNA, 443 bp, Zea mays
  unsure (1)..(443): unsure at all n locations
tgaaactcagcttcttagggagaacatggaaggtctattcaatgtcatttctataaagagagaccttgtgcagcttgtcaagcagggaaacatgtgggaggagcgcatcacagctagaatgtgatgaccacttcaagacccctggagctgctgcatatggacctcttctgacccgtcgcctatctaagcatatggggaagtaagtatggtctagttattgttgatgactcttcccgcttcacttgggtgttcgttttgcaggataagtctgaaacccaagggaccctcaagtgcttcctcaggagggctcaaaatgagtttgagctcatagtgaaaaagataatgagcgacaacgggtccgagttcaagaaccttcaagtggaggagtttcttgaagaggaanggatcaagcacgagttctccgctctctacacaccacaagc

SEQ ID NO: 69360 - DNA, 275 bp, Zea mays
tgtaaagggagaacacgtgatatgtctaactaatgtgactttctataaagatagaccatgtgcagcttgtcaagcatggtaacacgtgggaagctctcatcatgtcccaaatgtgatgacaacatcaagacccctggagatactttatatggacctcttcggacccgccgcctatctaagcataggaggaagaaagtatgggcttgttataattgatgatatttcccgctatacttgggtattctttttgcaggataaaactgaaacccaaggga

SEQ ID NO: 69361 - DNA, 304 bp, Zea mays
  unsure (1)..(304): unsure at all n locations
cttaaaactcagcttcactccatctatntattgattgcgtctgagtctgtcctatttccctcgggccttctggcagcttcctgacttccatgaatagcaatgtgcccttgtttcgaaggtatcttcatgcaaagataagctggatgaagaattgctttgaaggcattgagagtaccacgaccaatgattgcatttgtagggtatttcatgtcaacaatatcaaacacaacttgttcagttcttgtgttgttgattaattcgaaggttactggcattgagatttttccgagtgctacaatctggc

SEQ ID NO: 69362 - DNA, 458 bp, Zea mays
  unsure (1)..(458): unsure at all n locations
actcatctattgtgcatgaagtattggctgtcaccgaggatgttggaatcacttgtgacttacttgatagtcctacaagtgaaccacaacctactaactctatttgtgataaatgcaaaatttctcttatgaatgataatactgctcttgatgaatcacaaatcattgttgagaatgaagtattagtagatagagtgaatgctctaactcatgatctagagagggcatatggtggaaaggctaaattggatntcatattgggaagtcaacggttctcacttaatcgtgagggtcttggatatgtttccaagaaaggaaagaatgcctttgtaaagcaaaagacattgtttgtganagaatgtgacaaagtgtgtcacaagtgtcacacgaagggacatatcaagaagaatcgtcctaagctcaagactgtatcctccacttggtttgagcattgttat

SEQ ID NO: 69363 - DNA, 425 bp, Zea mays
ctcccaatattggtctatggtatcccaaaggtgctcaatttgaattaattggatattcggattcggactatgcggagtgcatagttgatagaaaaagcacctccggttgttgtcaatttcttggtagatctcttgtttcatggtcttctaagaaacaaaattcggttgctctatctaccgccgaggcggaatatatatctgccggaaattgttgtgctcaactattatggatgaaacaaaccttattggactatggaattattttcaagaatgtgcctctcatgtgtgataatgagagtgcggtgaaataggctaccaatccggtccaacactcaagaaccaagcatattgatatacggcatcacttcttaagagatcatgttggctagggagatatctctatttattccattggcaccgatgat

SEQ ID NO: 69364 - DNA, 475 bp, Zea mays
  unsure (1)..(475): unsure at all n locations
tctnagggagaacacantttgngactaacaaatgttatttttgataaagacatatattgtagcgcatgtcaggcaggaaagcaagttggtgttcatcatccacataagaacatcatgacgactgacaggccactcgaactcctccacatggacctattcggcctgatagcttacataagcatcggcgggagtaagtactgtctagttattgtggatgactattctcgcttcacttgggtgttctttttgcaggaaaaatctcatacccaagagaccttaaagggattcttgagatgggctcaaaatgagttcggcttaaggatcaaaaagattagaagcgataacgggacggatttcaagaactcacaaatcgaaggcttccatgaggaggagggcatcaagcatgagttctcttctccctacacgccacaacanaatggtgtagtggagaggaagaatcgaactctattggaca

SEQ ID NO: 69365 - DNA, 432 bp, Zea mays
  unsure (1)..(432): unsure at all n locations
tatgaagattcttcatcccaacatgggctagtcggcggtgccagagccaacccatgttagtcttagcaattaagcaagtgtcgagttcagctctatcaaaatctaccaagtatagctgaccctctaacactcccttaaatgctattgaatcatcacttcttctaaagacagtgacacctatatcagtgaaaagacagttgtagcccatttgacataattgagatacagaaagcaaattgtaatctaatgaatcaacaagaaaaacatttgaaatggaatggtcaggtgaaatagcaattttacccaaacctttgaccaaaccttgatttccatccccgaatgtgatcgctctttggggatcttnggttttctcataagaggagaacatccttttctcccctgtcatatgggttgtgcacccgctgtcgagta

SEQ ID NO: 69366 - DNA, 435 bp, Zea mays
  unsure (1)..(435): unsure at all n locations
tagaacttcagagacgaaatatactggtgcttgtcttttgtcttggccatcttgcttctcttgtacaagcaccgcactaactgcagagtgagaggttgctacatatangagtaatggagcctctggcgaaggtggagttagagttgtcaagtctatcaagtattgttttaattcttcgaaagccttttgctgagtcaggccccattggaaaacttcggctgactttagtatttcaaagaatggtagatttctttctgctgatcttgatataaatctatttaacgatgctagccttcgtgccaatcgttgagcccccttctttgaatntggtggctccatccgaaggatagcttcgatcttatttgggttagcttcgattcctttcgttgataccaganaaccaaggaacttgcccttctttactctcaaaacaca

SEQ ID NO: 69367 - DNA, 472 bp, Zea mays
  unsure (1)..(472): unsure at all n locations
tgacatttgcctcctgttggaagccaatgccatccttaatgctcaggcgtctcccactatagagcatacttctagcaaatttaaattttttattttctaagtcatgctcattaattttagcactaagttgagctatgtgatcattntgttgtttaattaaagctaggtgatcatggatagcatcaacattaatgtctttacatctcatgcaaatagaaacatgctcgacggtggatgtagattgtttgcaagcatttaattcatcaatcttagcatgtaacatggcattctcatttctaagattggaaatagaaacattgcaaaaatttaaatccttagccttagaaattaatttatcattctcaatcttaaggctagaaagagattcattcagcttgtcaatcttagcaatcaaactagcattatcatttttaagtttgacaagagaatcatcacaaacatttaatttctc

SEQ ID NO: 69368 - DNA, 336 bp, Zea mays
aaggggagaaaatgagcatgcatatatattatcttagtcagcggcacacgggctccctttacctttggaagtattctttgaaacaataaaagcaccctctattgagctcatggaaagagcagtgctcacaatctcacctgtacaatagtgaagactggaggaccgaaataatatcctttctccaaggcaactgcctgttagacgacaaaggttataacaagagaatggaacccagaataagacattatataataattgaaggggagttatacaagcacgaagtttggttcccattgctcaaatgcctttccagaaatgaaggagaagaattaatga

SEQ ID NO: 69369 - DNA, 455 bp, Zea mays
  unsure (1)..(455): unsure at all n locations
ntaagtntatgtacgtangggaatgtgttctcaccagagtatgaatagtgagagtcaagaaaatcgcgttgacagatctgcctgcaaacgtgcagcggaatgtaagccaaccaaccttaagctgctagctacctcgccgccggccggccacacgtncagctcgcctccaactggacttaccagcgacgtcgacgtaaagtgccggcggacgggcggccaccgtggctctctctaaaaacaaagcttcttcacgcatcgatgntaacctccaatctctctcactacaccaaaatagtgaactttttatagcctaaaccttaagaagttaggcctaaactttataaagntggctaaactctcagaattaagtcatcccgtcgaaagtntggctctcggaatttagcttaacctcctataagcctctaggagntagctaactactacagcaaaaaagc

SEQ ID NO: 69370 - DNA, 373 bp, Zea mays
  unsure (1)..(373): unsure at all n locations
tcttgtagaaagggtggtgagcatagtattccgcacggcactttcgcactgttcgtcaatagactgcataggcgcgccgtctactggatgaccctaacaccgtctgccagcgaattggaaaggacgcattaaatgctgagagggcacgtcgtccgtcaccgtggtgtcaagcggtgcgtcctctccgtaataaatgcagaggctgcgcggctttatgggcttttcgtcaagctcggcccgttggcttatgtcacgcgccacaagccacgcggcagcagcgggtcttcgccggagtggggagcgtanggcaaggcttgaacacgtggcagaaccggacccttactcatgtcggggtcctccccgtcccgggacc

SEQ ID NO: 69371 - DNA, 350 bp, Zea mays
tctaaaggaagaacacattttgggactaacctatgttcatttttagaaagacagggtctgttgcgcatgccaagtatgaaagcaagttggtgttcatcatccacataagaacatcatgacgaccgacaggccacttgagctactccacatggacctattctggccaataagttacataagcatcggcgggagtaaggattgtcttggtattgtgaatgattattctcgctttacttgggtggtctttttgcaggataaatctcaaaccccagagaccttaaagggagtcttgagacgggctccaaatgaagttgacttgaggatcaacaagattaccagcgacaatggga

SEQ ID NO: 69372 - DNA, 335 bp, Zea mays
gagagatcttgtactccgtgccattgtcgcttcttattttcttgatccttaagccgaactcattttgagctcgtctcaagaatccctttaaagtctcttgggtttgagaattttccctgtaaaagaatacccaagtgaagcgagaataatcatccacaataactagacagtacttacttccgccgatgcttatgtaagcgatcgggccgaatagattcatgtgtatgagctccagtggcctgtcagtcgtcattatgttcttgtgtggatgatgagtgccaacttgctttcctgcttggcatgcgctacaaatcctggctttctcaaaatgaaca

SEQ ID NO: 69373 - DNA, 486 bp, Zea mays
  unsure (1)..(486): unsure at all n locations
cttatgaaggcangtcttcgattcccattgagcacaanttttggttgaagctctgattacatntgaaatcttccttcatcaaatcactcccgaagctataatcagaatgggtatttttgttttggccatgagaagccaagggctggagccgagcgtgaagtgcttttgcaacatgcacgaactactgtacgagacgaaggccactggtgaagagcaatatcacaacttcngttgttatggcttcgttcctcgttctgatgtaagttattccattccaacatttcgaaaaaggtggcccggtgcctagatggagtgaatggtttatgtcaagaataatttgattgaatgggaagacatagaggggattatccaacgtcccatctggtgtcacttcaacctccgaaggtccgctactgcgctcgagagacctagttcaagagcacatagcctacanggtatggccacttgtgtataactacgagatgc

SEQ ID NO: 69374 - DNA, 418 bp, Zea mays
  unsure (1)..(418): unsure at all n locations
attcattctcccttataaacaacagcctcgtacttattcttctctttccaaaacacacaacttatttgtacgagaactctgtaccatgccatgaccgtgcacttactgactgacgggngtcgccacgaccaatggtggaccggacaccagattcacgctgtctcgttctgcgcgccaaggtcaccctgtgcggatccgatttttgggcggcaaggcgcggaacacngtggtgaggtctcgcgactgggaaaaaagcctggcgagccggcgccgctgaagagggcggngatggcctgctgcgcttttctgctgcgcgttgcgngaggtgattctcggctggaggttcgcaacgggccggtttcaccggcctgctgcgcctgttggcggagacagcctgctgcgcttgttctgctgcgcg

SEQ ID NO: 69375 - DNA, 442 bp, Zea mays
  unsure (1)..(442): unsure at all n locations
cattacaatagttaaatggtnttggtcaaattggtggactttaaactataatttttgactctngatgtaagcaaaactccttataaaatggatcaaaggaagtaactaacaagcccctttcaacctatcaatataatagaccatacaacaatcctctttggcatataatgtattcattgatatttagaaacttcattttctcatagatctttcttgtccaatcagtcattcttgttcacagtttttatagtgttaatcaatagttttttgacaatgtaccaacaaagttcttgtgtcattttacttgggtttctctactcttgtaaactctatttgtgtacgaatcaatcaaatagaaagtgcagaataaatccaccactatggaaggtccatggggatactaaacacagttgaattaccaagtaaacaaaaacgtgtagat

SEQ ID NO: 69376 - DNA, 461 bp, Zea mays
  unsure (1)..(461): unsure at all n locations
cacacatagctcttttgaatacctttgatcatatctctttttatgctattatctaatgngnnnncaagntnatttcaaaccaagtcataggtatattgaaagggaattggagtcttccgcgaagacaaaggcttccactccgtaactcatacttcgccaccactccgagcaactctctctttcttgggggtgaaatgagcatcaaggaaaaagacttcatccttgggggagagagtaaaagctcaaacgcaaaaggacttcgtctttggtataatcttaactcacttatttatgaccaaaggggaagattgcacttcgagggctctaatgattccgcttttggcgattcatgccacaaagggggagaaatgagcccaaagcaaaaggaccgcaccaccaccaccaaattcaaaaacttagtgctttccanaagtctttatcatttggtatcctatttgtgt

SEQ ID NO: 69377 - DNA, 435 bp, Zea mays
  unsure (1)..(435): unsure at all n locations
gcgtttctgcaaatcgtcagtgactgcgtacaattgtttaatgacctttttctgattagctagaagcgcgaggccctgtctgctaaatcgcctgagcgcgggcgcgcgcgcgcgggcgcgatcgcgctgttctccctggacctgngcttggtggaccacaatcggcccagtactgttttatcgatttcctttttcttttcaggagaactttaaaaatgtgtagaaaaatgtataaaaatgctaaaattgtgaaactaattttcctagggttgttattttccatagtatctaataaaaatatagtggtgatttctagtgaaagtaagaaattttacggtatctaaagtagttaaaagtcttggttatagatttttagaagataattggtaagtcctaaaatgcccacacattttatatgaggtgtattcaatattg

SEQ ID NO: 69378 - DNA, 285 bp, Zea mays
  unsure (1)..(285): unsure at all n locations
gcatgcatccagaccggcctcctctnttgcaaaatcgactaaataaaagttgtcgtctagtacacccttaaaagctagtgaactatcacaccttctaaagacagacacatctatatttgtgaataaataattatatcccatattgcataattgactaactgataacaaattatatccaagtgactcaactaaaaacacattagaaatagagtgctcggatgaaatagcaatcttccctaaccctntcaccttgccttggttcccatcaccgaatattattgaatc

SEQ ID NO: 69379 - DNA, 377 bp, Zea mays
ctaatcacccgctcaggctcggaacagtgatcaggttcggtatcctacagttcatgtagctcggcatcgagtacgacatggtgctcatcctccatgtccatctgaatcctccaagcacctgtccccatccttctcatcgtaggaggcagagatgaaacaaccgcaatcatgccacctgtggcaccccgtgccctggtgaaactcctagactatctgatgatgcaaactcctttcaagggacctagccagcattagtgtcacgctcggagcgccaccagcagcacctacgtgccacacgtcaactctcttggtacctcctccttcggcatgggaagtgccaactcccccatgccattgagcgggccataccagccaca

SEQ ID NO: 69380 - DNA, 451 bp, Zea mays
  unsure (1)..(451): unsure at all n locations
acacttagaatactcagcttagacacancttatgcttatgtttaggattatcagatatcttcttntntatcaaattaatcaatgtcctattactagactcggcctgtccattggcctgagcataatatggagacgaattaagcagcttaattctgataattcagcaaattcacgtaccttctttgacataaaagaaagaccttgatctgtagntaaggtctggggaatgccgaatctatgaataatatgctcagttataaactcaatcacctncttgtgtgtcatgttctttagagcaacggcttcagtccatttggtgaagtaatcagtgggcactaacacaaaccgatgcccctttgatgatgaacgatgaatttctccaataaagtctaattcccatcctctgaacggccaaagcttgatgataggatgtaattctgctgcagggact

SEQ ID NO: 69381 - DNA, 457 bp, Zea mays
  unsure (1)..(457): unsure at all n locations
ttaaccccccnccccgcagaccttttccgtnctttcttccataatgattgcgatatcgaatgtcatacttgaggcatattcactttatttgttcccttgtatgatgtactgtttgtttcccaatttgaatggatgaatgtatgtatgcttgcaatcgcatagagaacgatccggtcgaagagcccgaggaactcgcaggagaagcccctgagcagcagtcggttggtggaggcaagtgtcccttgacctatctctgtcctattcattctttaaatcacctcccgcattacacatttatacctaaggattggactagtttgttatccatgtccttgtctacctatctggngtggattattattgtttagctctatgctattgctcaaactctaatcaatgaacatgatgagattatctatgatacgctgttttcccttatcttataatgatggtatac

SEQ ID NO: 69382 - DNA, 480 bp, Zea mays
  unsure (1)..(480): unsure at all n locations
caagcttctcttgacaagcgtcgcactcactacagagtgcgaagctgccacatacaatatcaatggagcccctagcacgggtggagttaatgttgctaaatcaatcacgtattgcttcaactctttgaaagctttctcgtgagttgggccccattgaataacttcagctgactttagcacttcaaagaatggtaaatttctttctgctgatctacatataaatcgattcaaagatgccagtcttcctatcagccgttgggcccccttctttgtgcttggcggctccattcgaacgatagcttccatcttgcatgggttggcttcgatccccttcgttgaaactatacagccaaggaacttgcccttcttcactctgaagacacattntctggatttaatttcatgccagcttgcctaaaattaacaaatgtntccttcacatcagtaatcgtggtttcttgcttcgcgctcttcactatg

SEQ ID NO: 69383 - DNA, 401 bp, Zea mays
  unsure (1)..(401): unsure at all n locations
actcagcttcttatgctcttttatatgaaacaccacctgtactgtttatgaccatctttcttagcctcatatggaagatgtataaagagatgctgcatangattgaagaaacccggcggaaatatattttccaatttgcacaaaagcaccggtgcctctttctccagctggtccatcacatctcttttgatttctttagcacacaactgtctgtagaaatagctaacttcagctaacgttttccacacaacgagatttatntttatactaaaaatactttccattattattttttctcattntcttttatcattggattgggggcattaataccagagaacatatggtgtttcttataaaattcaggactaaactgcaagactcttcccacagccccggac

SEQ ID NO: 69384 - DNA, 447 bp, Zea mays
  unsure (1)..(447): unsure at all n locations
gcttgagccgaggaccagccncaccagaacagtgagatcacgctctccggagttcgttacctcgccggagcacgtggactgggtaatccactgaaccatttctcgattccttgtgcgcatagcctctacatcacccagtggagctcctcgtgcaccttgattgaaccctaccgccatggtttggccgaagcaggtgccgacgacgacctccgacgcctgcgcttgtggccagagcagctccagccacctccgacgctgacccgcacaccgtcgtgaccgccgtgacctccccgacgtcaccgaccaccccaccggagctctactgtcgtcggtaagcctcgccgccgtgatctttgccccggttactggttcagccaaccaaggatcgtgggttagatataggataagtccagggggttatgcgtaaggtcagtgactcatgtgaat

SEQ ID NO: 69385 - DNA, 470 bp, Zea mays
  unsure (1)..(470): unsure at all n locations
ntatagaaaagaaaatatccactaaccatgttcaagcatgtttcaangaangaagacatcttcaaggcttgaagatcgcctatgctacatatgccgaaagaagggacatcaatgcaaagattgtcccattggtaacaaccccactcctagctngtcaattaattctcatgtaactaggcaacccaaaattgcaacttgtgctagaaaggtaatgagtttacctagtgctaacacaaaggacctttgggttcctagatctttgttgactaaccttgatggacccatcaagaaatgggtaccaaaatatgcttgacaagctttgcaggagaaagagatgatatgaagctttgggggtgcttgagagagtcaattcaattcttattaactcaagctatcaatcttcaatgatctatatatccaagattgacccanacgtatttgaatctattatattcaaaactcatatcatc

SEQ ID NO: 69386 - DNA, 419 bp, Zea mays
  unsure (1)..(419): unsure at all n locations
tctcctgtccggaataatctacggtatttcggacagtcgatttataatagttgtagatgaacttatgcacctatgaaatgatcaactaggcaaactggttagtccacaaggtttgtgatggtcgtcaaacaccaaaaacgattataggaaatattgagactatttctctttcaatggtcccctttttggtgattgatgccaacataaaccaaagcaaatataaatgtagaaatgtaactagtttgcatttagacatatgtgcataagttattttgaaatgaaaccatttctaagtatataaggttgatttgattttaacattntggaccacatttgcaccactttgttttgttttgcaattttntttggaaaatcttttcataatctttntgcanatagtcaaaggtatataaataata

SEQ ID NO: 69387 - DNA, 465 bp, Zea mays
  unsure (1)..(465): unsure at all n locations
tcagctccatctatgttatggatggcttttgagtccgctcttatttcttccgccctncnggcagcttactgacttccatgaatagcaatggatcctctggctgaaggtatcttcatgcaaagatatgctggatgaagaatagcttctaaggcattgagagtaccactaccaataattgcatttgaagggtattccatgtcaacaatatcaaacacaacttgttcagtccttgtgttgttgataaatccgaaggttactgacattgtgatttttccgagtgctacaatctgccttcctccgaagccacaaaggtgatgtgtggcgtcatggatcttgtcttcnggctcttgcatctgtctgaaggccttagcaaatatgatatcagctgcactgcctgtatcaaccaacacattatggaccataaatactctgatcacacaagagataaccatagcatcattgtgt

SEQ ID NO: 69388 - DNA, 455 bp, Zea mays
  unsure (1)..(455): unsure at all n locations
ctatcaaaaggangnaaaaagtgcattccttaatggctttatttatgaaccngcatatgtagagcaaccacctggatttgaagaccgtagatattctaaccatgcttacagggtgtgcaaagcgctatatgggctaaagcaagcttcaagggcttggtatgagccgtttcacgactttctcatcgaaaagaagggatgaaaaccgtcggaaacggtcggtaaacacaaaaatacgttctgttttcatatttttttatcggaaatgaaattggaattggtaactccagaatcaaaaacgatatctgttcttccgaaacatcgaaaacaaaagttcggcgtggaaaatacaccgcgaatggttggaatttaaaatagcgtcagttatcctaccaatataaaaatatactaatataaccaggtcacaattatcataagttgacaatactataagttca

SEQ ID NO: 69389 - DNA, 344 bp, Zea mays
  unsure (1)..(344): unsure at all n locations
cttcaaactagcttaactggctcatctctaagttgtgccaccctggccgcatctataaagcctctttctttttattcgggtctttgtgagcttcacgttcagattggccctatatgtactcttgcatatacttatagatatgtaacatgtttttaaaatcttgcttgagatggtattcattcgaagcatccctttgtctaagtccacttgtgcaccctttgaaaaaattgttagcatattatgaattgtgttaaccatcaaaacaccaaaactctattttaaacggacctaagtctatnttactttgcatgagctagcatgaggaacatggagcaccattatac

SEQ ID NO: 69390 - DNA, 490 bp, Zea mays
  unsure (1)..(490): unsure at all n locations
taagcttcgagtctctggctntacaactcttgtcaatatgaccagaaataacctgngaatcagttntaagaaccgcccttctaattcccattgcctttaacttccgaagacccaaaagcaaagcttcgtactcagcaatgttatatgtgcagctaaaatcaagtcttgctgcgtagcaagttttaactntggagggtgcaaccaacacagcggctgctcctgccccgaaggtttcccaagaaccatcgcagaatactgtccaagcttcggcatctttactcgcttcttcttcctgagcccctggcgtccagtcaacaatgaagtatgctaacgcctgngactgaatcaaagatctatgcacataatcaatgcaaaactcattgagtttcgcagcccattttccaacccttccagtagcttctctatttctcataatatccttcaatggntgtgaagaangggacaatatatcgtatgcttgaaaatagtg

SEQ ID NO: 69391 - DNA, 410 bp, Zea mays
  unsure (1)..(410): unsure at all n locations
cccataaacttcaagggattgcagcaagatgtatctgagttcttgtcatatgccaagccggtaaaaccttgtcaggagtttatgtgttaatcctttgcccgggcatacatnnaccctataaaacgaagatagtcaataacatcagtccagaagtgctcaacataatataattgagagtaaaccaaaagaataggcacaagaaaactggcaataagatatattgtgtggaaagcacattcactgatcaatttcagttaaaatggattcggtactctgcagccagttcacactacccataggtttcatattctgttctcgtatctgaacagaatgtaatatttttcacagaataatatggcctagaccacagacaccccatatgacataacacaatggcaaagatgcttata

SEQ ID NO: 69392 - DNA, 480 bp, Zea mays
  unsure (1)..(480): unsure at all n locations
gcttctgtaatgttcatgaattattatatgaaacacagccttgtttctaagaacagttccataacaactttggctgctacagcttcgtttctcggtccggngcaagctgtcccgtaccaacctttcggaggagatggcccggngattggatgacagaatggttttatgtgaagaatgacttatcagcacgagaagacatcaaaggtataattatgcgtcctatttggcaaagcttcggccttcggaggccgaaggttgaaatgaacgaagccgccgaagagtgccaaagagccttcggcgttgtctgctcttttataggaacaagggacttagtacaagaacatatcgccttcagggtgtggccgcttgctgagaaatgggaaatgtcacaagaaaccatgaaagaggccgactagggtgagcttgtgagactgaagtacaccttctaatttggagatatacttattgagccagatgatg

SEQ ID NO: 69393 - DNA, 491 bp, Zea mays
  unsure (1)..(491): unsure at all n locations
tcttaaaactcagcttaacgctgtacagggttcttgatcggatactcactggattctgcataattaatttggcctcaatgttcatcaaagttcactgacaagtcgagtattagtgcttgacttgactgatagtccaacttcatgtnccattttgctccaattttgtatgattctagggctcattcctttaatcaaacttggactactatagtagctctacaatcttgttgtggtgactcatgacaaattcctcctagattaagggatacagggacctaaagttagcccaatatcactatttttaaaagttgagcctttgggtgctctttgatctttttgcaatttaccccaattttctccacaaaacttggaaacctccaaatataaaagtttcttagtttttgttactctaccactctgctatatgcactctggtccaaaagtgcatagaaattagagtcaccttatagagcattaattagggttttcta

SEQ ID NO: 69394 - DNA, 477 bp, Zea mays
tctaaagggagaacacgtgataggtttaactaacgtgcaattcgaaaaagatataccttgtgtagcatgtcaagcaggtaaacaggtgggaggagcacatcacagcaagaatgtgatgaccacatcaaggcccctggagctgctacatatggaccttttcggacccgtcgcctatctaagcataggaggaagtaagtatggtttagttattgttgatgaattttaccgcttcacttgggtgttctttttgcaggataagtctgaaacccaagggaccctcaagcgcttcctcaggaaagctcaaaacgagtttgagctcaaggtaaagaagataaggagcgacaacgggtctgagttcaagaaccttcaagtggaggagttccttgaagaggaagggatcaagcacgagttctccgctccctacacaccacagcaaaatggtgtggtagagaggaagaacaggacgctaatcgacat

SEQ ID NO: 69395 - DNA, 420 bp, Zea mays
  unsure (1)..(420): unsure at all n locations
tgacaaaccctcatatcctcttcactgtatgtgctgctggttatccctgngctggtatatcaggcagaggaccaaatgcagtgttatgaaactgagtggcgtcatcctcggataggaaagtgccatattgtgccataacttggttccagtccgtacccatgctgtacattgaaggtactcacataaaaaaatacaagagattgaaatgaataagtgtactacaattgaggcaagcattntgtcggggaccgtaattaggggtacccctaatgctccttaacctggctggaaaacgtcttcagaacaaaccgcaaagactgataagcacgattcaagtcaaggcctcgtctaccaagggacgtaatctcgcctcgcccgagcccggcctcgggcgggaacagtagtcccggacggattcac

SEQ ID NO: 69396 - DNA, 450 bp, Zea mays
  unsure (1)..(450): unsure at all n locations
gtatctataccttagacgcaactcannatgcatgtaagcatcttacaagccaaacagtggacgagtcaatagtgaaccttaataatagccccttgaaaccaaacaccacgacttgtaccagacaactttatttaccaattggtcatttatgaggagttatgaagaatgcctacatattattattattactactactatgattaggattattattattattattattattattatcagtactattatgattattattattactattattattattatggatgtatatatgcgtatccatatcctactcacatcatgaactttatacttgttgtggatgtttgccaactagacgaccacatggtgattgattgatagtgtgaatatacacatacagaggacatgatgtacaggatagtgaagaaccaacttcttnttntaacgctagtatat

SEQ ID NO: 69397 - DNA, 435 bp, Zea mays
  unsure (1)..(435): unsure at all n locations
tgacacagtctnttcatgcccattntgttgtcatgtgagttttgtntagggccgaatgtgagtaccactctcccagctggattttgtattgcattcacaatatttgacttgatttctctcttttatccagtgacatgaagaatcatattatcgaagcttcttgcagaatctgtcaggaaaactttagcacaactgttatggttgctcctaatttaagcttctatgagctgtactcatatgctcctagaaagtttggcatcaagcaactctagaattcattttcttattattaggctgatggactaggtaatgtgaaattttcattgcacctgtgaacagaacatcacttacaaactccagagccatnntccatttcatctctaatcttggcttantataatggtggactctgtgggttagctgttcctatgtact

SEQ ID NO: 69398 - DNA, 352 bp, Zea mays
tgtgaagattcttcatcccaacatgggctattcgacgatgctctagccaacccatattagtcttagcaattaagcaagtgtcgagttcagctctattgaaatcaactaagtatagctaaccctctaacactcccttaaatgctattgaatcttcacttcttctaaaaatagtaacacctacatcagtaaatagacagttgtagcccatattgcataattgagaaacagaaagcaaattgtagtctaaagaatctataagaaaaacattggaaatagaatggtcacgtgatatagcaattttaccaagtcatttgaccaaaccttgatttccatccccgaatgtgatagttct

SEQ ID NO: 69399 - DNA, 224 bp, Zea mays
  unsure (1)..(224): unsure at all n locations
cagctaatgtaaaactacatcatcttaccggctctctttgaagacacacataagcttgcgctagtacacttgaaactatgacatactttttaagaaacactctatgttgtaataaaatattataccatattgaacaattgaataactgatagtaaattgtatcccagagactctactaataacacatgtgaaatagagtgttcatangagattgcaatttacct

SEQ ID NO: 69400 - DNA, 340 bp, Zea mays
  unsure (1)..(340): unsure at all n locations
tctaaagggagaacacgtgattgtttgacttacggcattctaaaaagaagaccgcgtgcagcttgtcaagcaggtaaacaagtgggaggagcacatcacatcaagaatgtgatgaccacttcaagacccctggagctgctgcatatggacctcttcggacccgncgcctatttgagtatangaggaagtaagtatggtctaattattgttgatgaactttcccgcttcacttgggtattcttttgcaagataagtctgagacccaacggaccctcaagcgcttcctcaagagagctcaaaatgaatttgagcttcacgtgaagaagataatgagcgacaa

SEQ ID NO: 69401 - DNA, 372 bp, Zea mays
  unsure (1)..(372): unsure at all n locations
catgcttttatgtgaagatatatcagagcaaaaggtgttgctgcggtctcaattgtctgangagcaagagaaaaccttaacaaggtttctgttcaacaataaagatgtcttcgcatggtcggccaatgatctctgtggtgtgaacagggatgtcattgagcactcgctcaatgttgatccatccttcagacccaaaaagcagagacttcggaagatgtctgatgacaaagccaaatgtgctcggaacgaagtgaaaagactttttattgctggcgtcattagagaagtaaagtacctacaatggttagccaacactgtcatggtgaagaacgccaatggtaaatggagaatgtgcattgactctactgatct

SEQ ID NO: 69402 - DNA, 476 bp, Zea mays
  unsure (1)..(476): unsure at all n locations
agctttaaaggagaacactttnggactaaccaagtcattttgtaaaaatatttttgtnacgcatgtcaagcacggaagcaagttggtgtttatcatccacacacaaacatcatgacgacagacaggtcactcgagctactccacatggacctatttggcccgatcgcttacataagcatnggtgggagtaagtactgtctagttattgtggatgaatattcttcctttacttgggtgttctttttgcacgataaatctcanacccaagagaccttaaagggattcttgagaccggctcaaaatgagttccgcttaaggatcaaaaagattataagcgacaacgggacgaagttcaagaactcacanatagaaaggtttctcgatgatgatggcatcaagcatgagttctcttctccctacacgccacaacaaaatggtgtantggagaggaagaatataactctacttgacatggc

SEQ ID NO: 69403 - DNA, 445 bp, Zea mays
  unsure (1)..(445): unsure at all n locations
tggacgtgaagagtgccttcctcaatggaccaatcttggaggaggtctatgttgttcaacctcccggctttgaagacagtgagtatcctaaccatgtctataggctctctaaggcgctntatgggctcaagcaagccccaagagcatggtatgaatgccttagagatttccttattgctaatggcttcaaagtcggaaaggccgatcctacactctttactaaaactcttgaaaatgacttgtttgtatgccaaatttatgttgatgatattatatttgggtctactaacgagtctacatgtgaagagtttagtacgattatgacacagaaattcgagatgtctatgatgggggagttgaagtatttcttaggattccaagtgaagcaactccaagagggcaccttcattagccaaacgaagtacactcaagacattctacacaa

SEQ ID NO: 69404 - DNA, 486 bp, Zea mays
  unsure (1)..(486): unsure at all n locations
actcaagcttctnagggagaacacgtgataggtctaactaatgtaactttcgaaaaagatagaccttgtgcagcttgtcaagcaggtaaacaggtgggaagctctcttcatgccaaaaatgtgatgacaacatcaagacccctggagttacttcatatggacctcttcggacccgtcgcctatctaagcataggaggaagtaagtatggtcttgttatagttgatgatttttcccgcttcacttgggtattctttttgcaggataaatctgaaacccaagggaccctcaagcacttcctaaggagagcccaaaacgagtttgagctcaaagtgatgaagacaaggagcgacaatgggtccgagttcaagaaccttcaagtggaggagtatcttgaggaggaaggaatcaagcacaagttcttcgctccctacacaccacagcanaatggtgtggtagagaggaagaacatgacgctactagacatg

SEQ ID NO: 69405 - DNA, 445 bp, Zea mays
  unsure (1)..(445): unsure at all n locations
ctcatccttcttcttcacatacagtgctggacatcctcaatgcgaagtgcgtgggcgaataaaacccttatctatcaactcttgcaattgcttctttaattctgccaactcagcgggtggcattctgtagggcctcttggaaattggggtcgttccccggtgcaacctcgatggccgaattcaatatcctcgtccggtggcattcctggcaattcatcangaaagacatctgcatactcacagaccactgggatcttcttatgggtaactccgtcatagagaaagcacatgactgagaagaaccctgactatgcagaatcaaagtgaaatttccgcagaaaggagaattaatcttcacggtacgactggctacatcaagcacaacttggtgcgaggtcatccaatttgcccctagaataatgtncacatttttcaataccaacac

SEQ ID NO: 69406 - DNA, 332 bp, Zea mays
  unsure (1)..(332): unsure at all n locations
taaagccattacatgatgtgaaaccggatttagaaagtaacactagcgtgtgatgactaacttgacatgcttctgttttgagggctcttaaccgaattgggaggaacaccgtcattattacatgaaagncatgagagttgtatgtaaataaaaacaagtcctttatactgaataaggatggtgatattggaagagaaaactgtgggcacttttgaccccacacaaacaatatgctaaatctcttgttctctctctcaactgacaagttgtagctagctggcgggaggtaaggctttcctttgccactatccactggatgaagttctcgtctg

SEQ ID NO: 69407 - DNA, 398 bp, Zea mays
  unsure (1)..(398): unsure at all n locations
ntatcaaatggacgtgaaaagtgccttcctcaatggaccattttangaagaggtctatgttgagcaacctcccggctttgaagatagtgagtaccctaaccatgtgtataaactctctaaggcgctntatgggctcaagcaagccccaagagcatggtatgaatgccttaaggattttcttatcactaacggattcgaagtccgaaaggctgatcctactttattcactaaaactcttgacaatgacttgtttgtatgccaaatttatgttgatgatattatatttgggtctactaacgagtctacatgtgaagaatntagtaggatcatgacacanaaattcgagatgtctatgatgggggagttgaagtacttcttatgatttcaagtgaagcaac

SEQ ID NO: 69408 - DNA, 403 bp, Zea mays
  unsure (1)..(403): unsure at all n locations
tctccgacggcacgacggagttggggattgctctgctagcctttctatggcggcacaagggttgggcggccgcggactctctgcgcacgggcaaactgcgacgagctaactcctgcgatgtgtggagggtgtgccgaagggtgtatccgaagcctgtgagggctttataagctcgggcgcgggccacggngcgggtttggctcgggcgcggcgcggngcatgctagggcgcgcgcgagcgtgctctggcgcgggcagaaagcgtctaacacgtggcagtgagtttcttccaatgttcaaacgcttccagagatcgcaaacgtgcgaatctcgccatgaatccggcgcagacctcctccttgcacctanggctatctcacatgtgtgagttccaagggatgata

SEQ ID NO: 69409 - DNA, 375 bp, Zea mays
tcatcatccgaaagacaattaccttggatgaaagatataatttcagtgctccaatcgtcactatggacaggggaaattgtgcgcactgctctctccataagtcaaccgaaagttcttttattgggtcgaagaatacttccgaaggtaaagggagccctcgtgtctctgatttggctaacagatctgcatgttcattttattctcttggaatattcttgatagaaaaaccttcaaaataaacctccaaccttctaactgtatcgagatattttttgagcttaggatctctcgccttactacttttgtctacatgaccaaaaatgacttgagagtcaggtctaacgatggccctctgtattcccattgtcctttaac

SEQ ID NO: 69410 - DNA, 374 bp, Zea mays
  unsure (1)..(374): unsure at all n locations
tctacacgctngccctagtgatcagctaagcatgtctgaattgtcctctaataagcngctccagcgcttttaaggccgaacgacatgaaagtatatcataaagctccaaacggngtgantaatgatgtttttcctcgtcttcctttgccaagctaatctgatgatacctagagtagcaatccaagaaagacagcatatagcattcggcggtcgatgtcaccacctggtcgattctaggaagcccaaagggatcctttggacagtgtttgttgagatccgtatagtcaacgcacatgcgccaatccactttattctttttgagtacaagaacatggttggctaaccactcaggatgtaacacctctctaatgaat

SEQ ID NO: 69411 - DNA, 72 bp, Zea mays
ttcaaagtcgggaaacaagagtcccaatcttatacaatttctatccggttctgatttgtagaactttttaat

SEQ ID NO: 69412 - DNA, 305 bp, Zea mays
  unsure (1)..(305): unsure at all n locations
cttcatgagcccctggctttcaatcgacaatgaagcctgctagcgcattgcgattggttcgaagatctaagaacataattcacggtgaattcgttcacctctgctgggcacctgccaacacctcctatagctactcggctccttatgatgtgcttccagggttgaaacgaatgtcctattatataggaagactgaaaatagtctgaagcttcctggaagccttnaatacaacatacagtaccaatttcaaccctgtgtgaattctttttggggactataaactccgaaacaactacatctggact

SEQ ID NO: 69413 - DNA, 422 bp, Zea mays
  unsure (1)..(422): unsure at all n locations
cggcttgaccacacgagagcatccncacccttatcacattcaatggtttaacaacagcggtaagttcaaggtagcaaaaacagcaagggtgcatttttctattggctcttaccatgactttgctgatttcgatgtggtgactatggatgcttgctctcttttactgggacgtccttgggagtttgatactgatgctattcaccatggtagatctaataaatatactttcatgcataagggaaagaaagttatgttgcttcctatgactcccactgaaatggtccactttgaacatgacaaaaagactaatgctaagcaaaaaagtgttttgaactctaaaaatcagcaacctattaagttaaaaactcctactttgctagccactaaatctgatcttgatgagttacatgcctctgttggac

SEQ ID NO: 69414 - DNA, 450 bp, Zea mays
  unsure (1)..(450): unsure at all n locations
nntgatgccctcaagtcgaagctcacacaagcaccactgctgcaacttcctgattntgacaagacattcgagctcgagtgtgatgcgagcggcattgggattggaggagtgctcattcaaggaggtaaacctgttgctttctttagtgaaaaattgcatggtccaactctgaattattctacatatgacaaagaattatatgctctagtacgagttttacaaacttggcaacattatctatggtctaaagaatttgtcatacattcggatcatgaatctttgaagtatcttaagggacaatctaatctaaacacatgacatgctaaatggattgaattcatagaatcatttccttacattattaagcataaaaaggaaaggataatgtaattgctgatgccttatctagacagttatactatgtgtcccaaacttaatcataaatatttg

SEQ ID NO: 69415 - DNA, 337 bp, Zea mays
  unsure (1)..(337): unsure at all n locations
tatgcactaatgaantagttacaattgggtctagcagaaagaattttttatatgcactaatggaaacctagtcattgttagctgatcaacattgaactggataaacaattgattatatgaatcaactagcgtaacggaattctaaattaagtttcctatttcaattacatgaacaatgattaacctgcctcaaatgaaataaattacagttaatgagagaacctaatataaaataaaatttaatgagggggcggggggggttctactatctcattcctacatatgattttttcctaactttcctttcacttgctttgtgactggataaaagtctcta

SEQ ID NO: 69416 - DNA, 467 bp, Zea mays
  unsure (1)..(467): unsure at all n locations
actcagctagttaatttataactntggcttcttagagattaagatgcctatatattttgtaacaaagcagtagatgtatatttattttgtaacagagtagggtgcggcgatttcaactatttgtggtaaaggttaacacccttctatcaatatcaacgatactctatcacataaaaatatcatctctactaatagtaatagtagtaatagtaataatagtaacaatattagtactaataataataataataataataataatctttactatattaaagcaataataataataataataattactatattaaaacaacagtttcaacggtcgtaccgcgtcatctttttacaaagaacctcttatatttcttcaaaatcaacctgtggggtcgttccacgtcatctttttacaaataacaactaacatctatntcaaataaagcactgcatgcccctctcctctgcgt

SEQ ID NO: 69417 - DNA, 432 bp, Zea mays
cggctgtgagataataatgaagctattaagaaaaatgagaaagaatctcacgacgctcaagaagaagctaaaagagatgaagaagctactgagcgcgcgaggcttataggtacatctattctggtctagcttcgtaatctgttttagcttttgaactaacaaacacatactacggtgcagctgaactatctccccctccggagccatacgatccagaagccaacccgtccgtcgaagaggcgctggacattatcaaaattgcaaatgacgctattgacaatgttgtcgataggcttctgaacaaagctgccgataaagtcctcaaggaggactaaaatctttgtattcttggttgtaaatgccctgtgaaatgattcttatttctgtaagaaaacagatgtaacaatttgtatttatattgatgaatatatt

SEQ ID NO: 69418 - DNA, 407 bp, Zea mays
  unsure (1)..(407): unsure at all n locations
ngcagtccataatgccagccggcatatgatttcccctcaaggttgtcttgaattcctcccaagtaactatgtgatcaactggctacatagcaaggaaatggtcccaccatgtcctagctggtccgcgaagttgctgcgtggcaaacttggtcttggcggcatcgaaacatgccccaccgcaagtagtgggaacttggattccaccaccccgagccatacgttcgcatcaagtggatcatctgcccttgtaaagagaggcggctgggtgttgaggaactcctgataagtggctgtagtcggtgggcgctgatactgttcaccacccncaaagtgccgaggttgttgctgattttgcgcaagcagtcgcagaatctcattctgatgagccatcaactcctgcatagtga

SEQ ID NO: 69419 - DNA, 206 bp, Zea mays
ccgacactcttcgatagagtgccgattatctttgtcccggcgcggtctctaatacattctaaggccccttctgcgattgcaccaaagagcataactcctggctgggagccacatgatatcccatattcctgtagctccttctttctagccttcgataattcttgatcgaccaaggtccgaaggtcgaagtctcttttttccgaagc

SEQ ID NO: 69420 - DNA, 463 bp, Zea mays
  unsure (1)..(463): unsure at all n locations
ntaccanatggatgtgaagagtgccttcctcaatggaccaatcaaggaggaggtctatgttgagcaacctcccggctttgaagatagtgagtatcctaaccacgtatataaactctctaaggcgctttatgggctcaagcaagccccaagagcatggtatgaatgcctaagagattttcttatcactaatggcttcaaagtcggaaaagccgatcctactttatttactaaaattcttgcaaatgatttgtttgtatgccaaatttatgttgataatattatatttgggtctactaacgaatctacatgtgaggaatttagtaggatcatgacacagaaattcgagatgtccatgatgggggagttgaagtacttcttatgatttcaagtgaagcaactccaagagggcaccttcattatccaaacgaagtacattctagacatttctaaacaagttgggatg

SEQ ID NO: 69421 - DNA, 463 bp, Zea mays
  unsure (1)..(463): unsure at all n locations
tacaccgtaagccacaactcttctgtgagaagccatggacttgctttccctgcacgacaaccggatggcttgtcttcgaagagtactttctttataaataccgagtgagccttgcatacttcactcaaccttgcctttacaaactccacaacaatgaacccctacttagaatcaaattttcttgttaggttgatggaagaaatggaagaggaagaagacgagttggagttggcgaggcacatgctcaatatgaggcggcgtgcacgcaacgagcgtcgtcatggtggttccattctaaggcgtgttaggattcatcgtgatcacatgagcggcgatgcaagaatccgagcggactactttggagcgcaaccggtgtacacggatgctcaatntcgtatgaggtatttcaaattctccacaattatttgccatgtacataacttcatgacccctattatgacac

SEQ ID NO: 69422 - DNA, 447 bp, Zea mays
  unsure (1)..(447): unsure at all n locations
tgtagtgaagatggcagtaggtctagcatcactgcttggatgtttgatccagaaatgcttagggtggcttttactgaaatgttaattacagatgagcttccatttgcttttgctgagcgaccaggttttagaaagttcatgtctaaggcttgtccacagtttggggttccatctagaagaacagcaactagagatgtaattggtgcctacaacaaagagaaagagaagctaaaagcatttttgaagacaaattgtcaaagagtatgcttgaccacagatacatggacatccagccatcagcaaagctacatgtgtgtgacagctcattntgtcgatgaatcatgggaactacaaaagaggataataggttttttcatggtgaagggtcacagggcacatggcatacgaaaagacatggagaggtgtctggctgattgtngattgaca

SEQ ID NO: 69423 - DNA, 470 bp, Zea mays
  unsure (1)..(470): unsure at all n locations
tctggccganacaccgcggacctctttctctctaatacactgtggtggacgcaccacacacacggttgataccgtcttgcaagactcttgtcccacttgtacaatattacaacaactcgcgcaagagccgaagggttttgggttttttctaacctcactcaactcactaggaacaacctagagcgagtgcataagtggtctaattaacttaagcacttcgcaaagcacctatgctaatcatcgagtgattctattaagcactagggtgtttgaagccttagagatgtgtatcacacgtgttggtatgttgcttgggctcccacgccttcaaatggctagctagggaggtatttatagagctcccatctaattctagccattggagggaaagcagaatttctctatctatgccacaccaggcttgtctggtgcaccaccagaccgtcagtccggacccttcaagtcagtca

SEQ ID NO: 69424 - DNA, 455 bp, Zea mays
  unsure (1)..(455): unsure at all n locations
ctcagcttcaaagggagaacacgtgataggtttgactaacgtgcatttctgaaaagatagaccttgtgcagcttgtcaagcaggttaacaagtgggaggagcgcatcacagcaagaacgtgatgaccacttcaagacccctggagctgctgcatatggacctcttcggacctgtcgcctatctgagcatangagggagtaagtatggtttagttattggtgatgatttttcccgcttcacttgggtgttctttttgcaggataagtctgaaacccaagtgaccctcaagctcttcctcaggagagctcacaatgagtttgagctcaaggtgaagaagataatgagcgacaacgggtccgaattcaagaaccttcaagtggaggaattccttgaagaggaagggatcaagcacgagttctccgctccctatacaccacagcaaaatggtgtggtag

SEQ ID NO: 69425 - DNA, 478 bp, Zea mays
  unsure (1)..(478): unsure at all n locations
tcaggaaaccaatactcttcgacaaagtactgataaccttctctccagttcggtctcggaggcatcctaagatttggtcgtcaataccgccgaagagcaacgctcctggttgatagccgcatgaagcataatctcttagctcctctttttcagccttagataacttttgacctattatgttttgaaaattgaagtccttttcttccgaaagatcttcggcgatctccttcccttttctaggcactgtggccagggtcccttcagcagctgtagcagcttcttccacggccatattcaaaagcattttatcaatatcaaaaaacatgctctccagattcgtggcttcggccgtatcagctntgacatttgctgcttcggcgggggtaccttcggtagctgtagcatcttcaccagctggtgttttaacgccgaggccggcggtggtggttcttcaatagcttcaatcacagtaataatc

SEQ ID NO: 69426 - DNA, 486 bp, Zea mays
  unsure (1)..(486): unsure at all n locations
ntacactctacagaggttgcaccttttacacacaagtcatatatctcgtctagccagagttagctagacccttagacacttttgaggtgaatggctagggatccactacaaggcctttacaaagttccactagctttagaaaaccctctacagtttctaggaagggcaatatatgaatccctcatccgaaaagtcttcgcagcatgatcgaccagagaacctccctatacgcaactcccctactgcccttgcccctttcgggtaaggtagtcctccactagctttcataattagttagccaagggcgtcccattccacccttgtggtagcacgtgttttacaagttaagctccatgttccaattaacacaatgatcttgtcatgaacaataattaaaacgacagtataattggaacatgatcataatgtaatattaatccccaaactangtagagcaatagaaaaactacccacaagttcagtggt

SEQ ID NO: 69427 - DNA, 492 bp, Zea mays
  unsure (1)..(492): unsure at all n locations
tcaagcttaatgtgttgtcatcaatcaccaaaaagggggagattgaaagtgcattcatcccttttgtgagttttgatgatttggataacaacacatttaaaggtctaacaagtttgctaagtgttgaacaggaaatttagtatgatgaacatacttgaatagtgtataatgatcagtgaacaaggttcaacacaaggtcaaataaccagtgagacaatgcanatggatataatatggtctctatattggtttgaatatatggacaagtcctgagaaatcactatgcataaatatgatcataatagaggttgaagtgattaagaggattggttaagccaaggtgaataagatatgaggaatcgtaaattggcttgaccatattactattagtccatatataaatatatgagaatcaaactagagcttgattgatcttagtagttatatctaaatgacattcaagcaagggtcacaatattgaagaaatgattc

SEQ ID NO: 69428 - DNA, 471 bp, Zea mays
tctcctgtccggaataatctacggtattccggacagtcgatttttatagttatagatgaacctttggcacctgtgtaacatataatctagagcaaactatttagtccaattgtttgtgttgggcgattcaaccaccaaaaataattatggactaggtgtaagcctaattccctttcagtagcaactagcccaacaagcgggcgtcccgatgccgacatatgggatgccgcctccggactttgcactgccaatgccaatgttggcgcctacaccttcgccttcgccttcgtcacaatatcctatggtatgtacacatatgcgtgtgtgacatgttcatagatgtcttatgtgattaaatgaacaactgagtgggtactatatcatgtgcttgcgttatatggatttcagacaccacccgcttcatttgccgcaccaggagatgggtctggtcaagagacacaacacattcgt

SEQ ID NO: 69429 - DNA, 463 bp, Zea mays
  unsure (1)..(463): unsure at all n locations
cttggacaatgagttccaataccgaaagcggtagggtcctatacataataaaaaggacatatacgaaagggttttgaactgtgatgaataggcacgtaaaaagaataaagtgcaagggccaaattgctaaatggtcatcttcaacttcaattccatggtggcgttggcttcaacagctttgggctgggctcgacgagacaagatcgagatatgggaggttgaaagggaaatgtgcccttgggccatttctataagattttggtgattaagtgcccaacacacattaacggaaggagtatatgccaaagggtggacaaagtgcaaatcaatacaaaggtatgattctagatttagtacattggnntttgtgtactattatatntgtctaagtgctagaatcagagaaaagacaatttgcaaagactcggctcgagcagccaagactctgctcaatctgtgtgca

SEQ ID NO: 69430 - DNA, 468 bp, Zea mays
  unsure (1)..(468): unsure at all n locations
tctacttacttgcgctcgtcttcagctngaacggataatcgacagatatatgcaagggactgtggtagtacaaatcatccaagtcatcatggtatgtacaaggatgagtggcgagtcttaaggggtgttctatggtctaaagttaacactactagaacaaagtactttgccgcgcataacattcggcaaaatctttatcgagtgtagcattcggtaaaaaggactcgatgaacagtttattggcaacggtctctttgccgagtactttatgtcgagcactcggtaaaaaggactcgacgaacagtttatccaagcgacggtgatgaagtctttaccgagtgactgctgacttgacactcggcaaaaggaactccagtgcccnccacgtcagtctttgtgccaagtgtgcggtttggcactcggtaaagggagcttcttttgcggagtgttaggaccataacatttggc

SEQ ID NO: 69431 - DNA, 483 bp, Zea mays
  unsure (1)..(483): unsure at all n locations
tatcgttntctagagcctgttgttcctgaggtattatggcttcatatgcaattgtatataataaatatacaattttatagtaaatttggtaaatagtttgataaatagataattttttcatacgctatgaaagtgggggccacgaggacccagcgcatgtagcgagctgcaacgtcctggcactatgcgctgggagaggcgtgggcatgtgcgggttggatggggcatgggcatgtggtgcctggccgcctcgggcgctcggcgctgggtgcgatgtcgggcggcagctangaggggcgagctgcggtggcggtacaggttgctcggtcgtgcggtcacacgaagagcaaaggctaagggattaggggcgacgtcttggtgggttggtcgtggcttaaggtgtgccgcagcccacccagaccccctttgtgggtccgccctggtcaccggcttcatacgaaagctagctctaagtgtgtttcg

SEQ ID NO: 69432 - DNA, 451 bp, Zea mays
  unsure (1)..(451): unsure at all n locations
tgttacatgcagntcatttcaactagaacatactcaattattaatattatgagacatatttataagttatttaactttagcttaaactttgttacatatagttcatttcaactaaaacatactcaattaatactattatgagacatggttgtaacttgtaaggactagtttgaaactgaaatctcctccgtgattttcggatgaaatntacgttccaaattagttctaagttatgttgatttttagggtgggtttttagaaacccatgagtttttggttatgtgtagtgcatccattgagtttccttttgaatccattaataatcgcactaggtagagaaattaggctaaaatacatacttaagggctagtttaagaactctatntttccaagagacttctatnttattaacaaaagataaactaattntccttagaaaaatgaaaatcgt

SEQ ID NO: 69433 - DNA, 491 bp, Zea mays
  unsure (1)..(491): unsure at all n locations
ntanggattattctgtggcggaactgcccgaattattccatcttaagtgcctaagtcccgccttagaggctagaacacacttaaatgggaataacccgtcaatccctcggatctagtccgacgaggccactgacaggatcaagtaccacaatctcactcgatggtgagtcacagagcaaatacaataaaacataaagccatacattaaggagtattaaatttattacatcatcatcggagtttttgcaaaagtagtcatcaatgttcgaagtgcagcggaataagactaacggtaaatagacagagagatggggaagcttgtcccatcactcctcatgctcctactcagccgaggcaggatcccactcgactgtccaacccggtggcaagatggacggccaagtcactccagcaaccatgtcctccagagaacctatataattatgccacaagcaaggctgagtatactaatactcagctagacttacccg

SEQ ID NO: 69434 - DNA, 470 bp, Zea mays
  unsure (1)..(470): unsure at all n locations
tatctcggcgtgctgccgcatttcggtttatggaagtatctgtatcactgccgtcctgggatggccggngggcaacatcagttggtcggaggtgccagtttggagatgcgtcgtgggtggaagaccgagtatctcgagatacccctcanagatagcattaaaggttggcgtctggagtggtttatagttgataattatggaaattctctccccttcccgtcaggaagacagccagacgttcgtactccgagttggactgagtctcccacggatcaagaagtggccgaggcaggcgtgttgcttactgaagtcgaattactgaaagagagaggtctgactgccgaagctgtggtcacagatttttgtttcaagaacattcagccgctgaaagacagggcctatccggcatatctgtatcgagggctggccgactcaacccgagttaccaatangagaattccctctgttga

SEQ ID NO: 69435 - DNA, 319 bp, Zea mays
gaatacactctgtaccgctggaggttatgaagctggactgtggctcatatttcgtcttcctccggatatggtgatagcctgaattacaatcttatgagactcatagttctgactaagctggtacgtctactagagaatgtattcttggtgatgggaactcatgctttggacaagcctagttcagagtaagaaaaacaatgcacattgttcatttaccattggccttctttaccataacagagttggctagccattctggggattttacttctatgatgacaccagcactgagaagtacttttacttcattccgagcacc

SEQ ID NO: 69436 - DNA, 465 bp, Zea mays
  unsure (1)..(465): unsure at all n locations
nggcctatcgaaggttatgataaggtcaatgagtgtacttaatctttcattatcatgtatttaaagtttttacccgattatcaagtagtttaagtaaaggatgcatgcatgctcgtactaaacgacctcatttcaacttagagggagatagggaaattttttcccattccttatagtagccggtagggcttactcaaatagccacctagctaccccttcattatcctaaggcttcacgtcctaggtttatccttatcgtccttacgacctatccaacatttgtttctaaccagatttacttttgaaaaggatggtatttacagtttattgattcctctgtggtggtacaagctctgatacctgctgtggcggaaccgcccaaattattccaacttaagtgcctaagtcccaccttaaaggctagaccacacttaaatgggaataaaacgtaagtccctcggatct

SEQ ID NO: 69437 - DNA, 459 bp, Zea mays
  unsure (1)..(459): unsure at all n locations
tcttcaccacgcgttcgtagatatcttgatgaagtcgagcatggtgtcttctcctcaattgtctttgtttcttgttcccaagcnaatttctttttgaccctacaacttgttgctaaatcaaagattggcctttcttggggcagtagaggtcagcacatgataatattttaactaattgatcacttatgcaagaatgtagttcacatgagtttaaactagtaattactacctcatgagcaatatcgagcatgatatggtcatcaactaattcattatgagaataagacaacatatcatacttttcacttagagcaagttgttctaaatttatcatttctacttgactcttaagcatagaattctcagttntaagttgagcaacatcagataatacatcatgattattctntgctcaaataaaacagattcataccattggaccaaatatcatgagatcac

SEQ ID NO: 69438 - DNA, 460 bp, Zea mays
  unsure (1)..(460): unsure at all n locations
ntatcaaatggacgtgaagagtgccttcctcaatggaccaatcaatgaggaggtctatgttgagcaacctcccggctttgaagacagtgagtatcctaaccatgtctatagactctctaaggcgctttatgggctcaagcaagccccaagagcatggtatgaatgccttaaagatttccttattacaaatggcttcaaagtcggcaaagccgatcctactttattcaccaaaacacttgataatgatttgtttgtatgccaaatttatgttgacgatattatatttgggtctactaacaaatctacatgtgaagaatttagtaggatcatgacacagaaattcgagatgtcgatgatgggggagttgaaatattttctaggatttcaagtcaagcaactccaagaaggcactttcattagccaaacanagtatactcaagacattttaagcaagtttgga

SEQ ID NO: 69439 - DNA, 487 bp, Zea mays
  unsure (1)..(487): unsure at all n locations
ngcatgtgcacagctgtgcaagtatgtaaatgtgaatgtcatttgaattatggttgtttgctttaaactcacatctatctagccaacatgacacacacattnttcgttttataatttataatcaagtataatatagagttttataaaaaaaaataggggaaaattaaaactgggtcgtgttctggccaaccatgatactttttacgtgagtttgctacctcgatgctctgtatgattntctttgcgtttaatatcaattataactatgataactaatttttattcgttttgtaccgtaaatatagattggtcaagtcgtttagtaaaacaacatatcacacatacttgcaaattgttttcacgtcataataaaatatatatccatatgcaaattagcaaagtcaattttagaaatagtcatagccatcggttcagaactttatgcgaaagaatgttggctctatgtctgcttatacgaaagaatgat

SEQ ID NO: 69440 - DNA, 490 bp, Zea mays
  unsure (1)..(490): unsure at all n locations
ngatggccaagtcaagaagcaggtcccagaggtatttgtatctgaagttcttagtatatcaaagaaaaactacacagaattagagaaggtattatatgctgttttgatggcatccaggaagtttcggcactactttcaagcatacaatattgttgttccttcttcgcagccgttgaaggatattatgagaaatagagaagctactgggcggattggaaaatgggctgcagagctcaatgaattttgcattgattatgtgcatagatcttcgatccagtcccaggcgttagcagacttcattgctgactggacgccaggggctcatgatgaagaaacaaataaagatgccgaagtatggacagtgttttgcgatgggtcttgtggaaccttcggggcaggagcagctgctgtgttggtctcgccatccaaagttaaaacttggtatgcggcaagactcgatttcagttgtacaaacaatattaccgagtac

SEQ ID NO: 69441 - DNA, 476 bp, Zea mays
  unsure (1)..(476): unsure at all n locations
tctanaggggagaacacatttgggactaacaaatgttctatttgcggaagacagggtttgtagcgcatgtcaagcaggaaagcaagttggctcccatcatccacacaagaatatcatgacaaccgataggccgcttgagctactccacatggatttattcggcctgattgcttatataagcatcagcgtgagtaagtattgtcttgtaattgtggatgattattctcgcttcacttgggtattctttttataggaaaaatttcggacccaagagaccttaaaaggattcttgagacgagctcaaaatgagtttggattaaggatcaagaaaataagaagcgataatgggacggagtttaagaactctcaaattgaaggctttcttgaggaagagggcatcaagcataagttctcttctccctacacacctcaacaaatggtgtagtggagaggaagaatagaactctattggacat

SEQ ID NO: 69442 - DNA, 427 bp, Zea mays
  unsure (1)..(427): unsure at all n locations
ntctcgactaagtcggggacagggcctcatggacgggtgaaagtactcgtaagcggcaaggccgaccgagccgagggattcccacgcctctgggatacggatacctcactcgtcccttccgcgagaagcaactctcgctcacacaaacatccctgttaccgacagagtccagatgctcgaaacaagaggaaaaaagacgcagcttcgcaagcacggcgagggtgtgttttctggcctcggcggccgcagaaggcacacgctacaagacgatctgatcctgcaggctcgggtcttcacgctgaagggagccgtagcaccctcggcatcgacgacgtcttcagcaaagtccgacccagcctcggacggcgacgcggtccagggacccctccgggaatccggcccgagcaggcggctcggccggttaccc

SEQ ID NO: 69443 - DNA, 469 bp, Zea mays
  unsure (1)..(469): unsure at all n locations
ngagagatctgttggcctacctgagctcagaagcctgcggagaactttcatcaagctggcagggcagtacagtctgagtgggccaccaccaccgacagatgctgacagcgcaaagaggatgtttgtcgactacttagaccgtgaacttggtgcatgataattttcattcgcctgcgttgcattaacactatgcagcatgtggttaacttgggggatagataattgaagacaacttgattgtacttgttccttgttttgtggaaatctttatatgactatcttaccgtccttgacgccttggtggacatgcaacaggatcattntttttgtctcgaacccgcaggagaggtgcacatcattatattagaaagataaaaagggtttaatatagattggacaaaaaagaggagccaccttatagtagccagtaacgaaaatagagaaatgtgtccattacaacactactagt

SEQ ID NO: 69444 - DNA, 459 bp, Zea mays
tataaaactcagctactcgtcccttgctatttttagcttcgaggttcaattccacttctctgggagcaaatagtggatttaagctacaaaccacggcttagcattattgaacatgaagaaactgtaagaatttgttacattttacgctccatacttaatatagcctgatgacttctcttaaactgattccatacagcataaggttgttcaacgccactttcatgatctttacaacgatatggcaagataattgttgctgacttgactgataaagtaagttttatatacattgatgtaacataccttttttattaagcagatggttgttacacacatatttggtgtttttctttcttttttgataaaggcaaagggggattggacaaaaattggaggaagaggcttaatcccttggttcttgcctctaataattctaacttatataggtaggatacatga

SEQ ID NO: 69445 - DNA, 278 bp, Zea mays
ggtagctacgatcgtccggcgcaagtggctccacgtttcgacgcgcacttgggccgatgattcccccatcgataccgcctttgcagccggtggcggcagtcgtgcggtgtggcagacgtgcatcggccagaaagacaaaagtctccgcgattcgcatgcatggtcagcgggctggccggttgggttgggttgggtgccgccgcggcacgcacaaaacaaaccgtgtccgggtcaaacccacgccaccggccggcgggcggccggtgtgggtgggtggg

SEQ ID NO: 69446 - DNA, 437 bp, Zea mays
acccctctaatccctatttagggttaagtcctttaaccagggtcctatttgcaaaacacttaaacaatacaacttgtttgaaattattgcctagtgaatgcactctatgtgtgtcaaacatatgcaatgccaatgctatgatgccatgctcaagttttagttacagtaacaccaggggtgttacaatgaaatccccctttattataagaatttgttcacaaaaaaatgactcttgcaatatatagactaagttgcccctatatttatgcatacatatgatgaatagcaaaccatatgcataacagaggaatgaattgaaagaatgtggaagtttaacctatataatgtacgaataaatcatgtaagagataccacatgatctcgaaataatatgcatgatattaaaagtgatactagtatgtatgataccaattggt

SEQ ID NO: 69447 - DNA, 384 bp, Zea mays
  unsure (1)..(384): unsure at all n locations
tctctactatctcttaagagaggaccgtaggcgtccacacctgacgttctgccttccatagtcccacccgacatcctcgcccagatcgcgtcgctaatctcgcggtcgcgcctcggncgatccgcgcccgcctgccgccgcctgcgattgtagctcaccccgacaccgcgccccctcctcttccctgacgtgatgcccgccttccacccccttctccgcatcgcacggatctagcgcgggaattgctcggccacggctccgcacaccctcccttcccatgagacggagccgccgtatcctgctcgcgaggcaacggaagggtacgtgatcctctgtctacatggaaggtgaggcagatcatggggagagtggctcgtggcagtc

SEQ ID NO: 69448 - DNA, 481 bp, Zea mays
  unsure (1)..(481): unsure at all n locations
tccccggcacgccgaggatacgcagatctcgggtgtaagggctcgggaagattgccccagcagcgaacattagtaactccaagtgcaatatacattttgtccctgggcccacatgtcagggctcagtacctttgtgcatgccccccttcagctataaaaggggaggcatgcgacgttataacacaagttcactcagactctcaagcttccacagcaatccaacacacagtggagcagggtgttacgctccggcggcccgaaccactctaaaccctcgcgtgttcttgtgttcatccttccatctcgcataacaggcaaaacacttatgcccctcctcatcttaagatttagggcgagtgcactccaccacccggctagagatttcttctccgacatttggcgcgctaggtagggggctaggctntangtttttgtctgtgttcttattcggcatgatggtgtggatcaacgagcaccgcac

SEQ ID NO: 69449 - DNA, 463 bp, Zea mays
  unsure (1)..(463): unsure at all n locations
ngagcagtgactggcttcgtcntgaaaccttggaagctggttataacatatccttcagcttttgccatgaggtgattgttcctggcctaagggaggagtaccaggtttgtgcaacgctcctgacggccatgacgaaggactttgccatgaccgctgtgttgccaccatacaaagatatagttgcctcataactcatcaagaatngcttcgggtctgaatgaccgtcatacatagggagctgaggtggcttataagactgtggccaaggtatagcctgcagttctgttgacaggggagaagtgtcatcaaaagcaaaatttccatgatggaaatcttcataccagtcatcctcattgtagaaaccctcttgatgaagctctctgcgcggnggcctttgattctggtcatcttgagcgagatgtcgaagctcttcagaggcttcatctatctgcttttgaagatc

SEQ ID NO: 69450 - DNA, 449 bp, Zea mays
  unsure (1)..(449): unsure at all n locations
aagcttgaaaatatctagatacggtccgaagaatagaagcttccttctaatgattntctgtcaaaaatatccctcgaggacaaaatgagcatgctganttgctagctaagtcagcagcacaggggctgcccttaccttcggatgtgttcttcgaaacaataaaagcaccttcagtggaacttcttgaaagagcagtcctcaatatatctcctgtttatagtgaagactgtagaactgagatcatctcttaccttcagggtaacttcctttcagatgacgaaacttataacaggaggatagaggcaagagctcgtccatatgtcatgatagaaggagagttgtacaagcatggagtttgtgctccattactcanatggttatctagagccgaaggcatagaattgatgaaagagatacatgcangcctgtgtggatctcacattggatct

SEQ ID NO: 69451 - DNA, 466 bp, Zea mays
taactaaagtcatctaacgagtcggctagctagagcaacgacacaatccgctagacagcatacacgtcggcttgactattattatcacaattcaagacacaacatatattacaatcacttaacacaatcaactcgtacctaacatgagttggctaatgacgtgactatttcccaattaccatcacacaccacctttcgtccatttttggataaccggcacgacacacagctattgtaatacatctcaagtttattgaacccattttaaacattgcgcctcaaaacatggtttggagcagattaatcagcgtttcgtacccatggctcaacttaatttagttaacacaccagtcacctaaaacagcacattgttggggtctaacctagatgcatctacatatggtgtaaaacttcataagacttacattggctactaaagaacctaaagcacttatgtgtatgtctt

SEQ ID NO: 69452 - DNA, 481 bp, Zea mays
  unsure (1)..(481): unsure at all n locations
tactcaagctgcgggcatggtagaatttagtgtccaaaccatagtacacattntagtccccggaggcccgtaagtctattatggcctcccgtgacacatgtttttgtcaccgaacagcgatttcgtgcctcccgttcgccacccatcatttgaccatagagactagtaaggctgttttggcctcccgtgagctatagcacacgttttcatggccgagcgacgcattttatgtccgcgttccgccacacgtgtttttgtcctcggagcaccttaaagcggttcttggcctcccacgagctatatcacacatttccgtggccaaaccgcaaattttatgtatccgacctgccaccttcgttttagaccggggaggccgctatggcattntttgccacccgtgagctatagcacacgatattatggaaacctagaccctaaatcctattcctaaaccctgaacgttaacatcgacactaaatga

SEQ ID NO: 69453 - DNA, 474 bp, Zea mays
tgcctcatcggcccatgcggcgatacgctggacctttatgtgatgctccacccagagatcctctagcgtcgtctttatcgtctctgctgcctgagaaatcggagccgcctgcgccatctgggctacctgcgccacctgcgccgcttggaaccagcggacccgctcctccaggttcttcttcttctcctccgcctcgagctcgtgctcggctagcaacttgtcccgcctttcccacatctcctccctctaggcgaggtccttctcctgtcggatgagatccgtcgcccgctcctctagggaggcatccttcgccttaaggttttcctcggcaagagagattttgccagccttgtcatcaagctcctgctacagcttctgcagtgtcgcctctgttgcgggctgcttatcccgctgcttctccagcattgcattgtaggctttcaacttctcatgaaactctgtgatgaccacctc

SEQ ID NO: 69454 - DNA, 489 bp, Zea mays
  unsure (1)..(489): unsure at all n locations
actcagcttaaatctttttaaacttaagtggtggtcgatctatttgctttggactttaacttctcccctttggcacactaaaatggagaaactagtgacctaacctcattgcctcaccaaaaaaatagcaaatgaagtgcaagggcaatgaaaatccagggtaattagtaatttggaacaaagtacattgataccatttatgtagtggaagcttcttcctttgtccaaattcacatttccctttcaatcctcctttgagactacacatactcaactcaagcaaatcattagtagcatattctccccctcaacatatacctcaatgcacttggacttgtgtggtccacgaatgtcattatacaacctgagcaccaaaataagcaataatatgaaataaagcttanagaacatgatcaaagacatataagagatgtatgctatataataatccaagttccgcgaatctaagactttagcttactacacaac

SEQ ID NO: 69455 - DNA, 403 bp, Zea mays
tctatatatgtcgaggtgaccaatgatgagggtgaactggttgttacaaaggtcgcagctaagcaacttcgtcgggtgcccatcattcctcggctttcaagggtgttcctcaacaaggaaataactctgcatatgacgtggcccaagaatggtgtatgtctcgtcactgatctagacataatggtccatccgtccgaccgtgatgcgtggaaggcatttgacgagtttgatcccgaatttgcaaatgaccctgggagtgtacggcttggtctatcaacggacagactcacacctttcaatagcagtgcaagcccttactcgtgttggtctgtcttcattgtgccatataatcttccttctgagttggtcaataaagaagagttcatgttccttgcactagtca

SEQ ID NO: 69456 - DNA, 467 bp, Zea mays
  unsure (1)..(467): unsure at all n locations
tatgaagattcttcatcccaacatgtgctagtcggcgatgtcagagccagcccatgttagtcttagcaattaagcaagtgtcgagttcagctctatcaaaatttactaagtatagctgaccctctaacactcccttaaatgctattgaatcatcacttcttctaaagacagtgacacctacatcagtaaatagacagttgtagcccattttgcataattgagaaacggaaagcaaattgtaatctaaagagtctacaagaaaaacattggaaatggaatggtcaggtgaaatagcaattttacccaatcctttgaccaaaccttggtttccatccccgaatgtgatagctcgatggggatcttggtttttctcataggaggagaacatcttcttctcccctgtcatgtggtttgtgcacccgttatcgatgatccgactngatcccccggatgcataaacctacaaa

SEQ ID NO: 69457 - DNA, 450 bp, Zea mays
  unsure (1)..(450): unsure at all n locations
tggaggcatcgattgggtgtctacttggtgtagactccttcttcttttcttccgtagccttgaatgtgacgggttgagcttcggatgtagatggatcatcaagctcgttgatcttcctcgagccttcgatcatgcactcaaaacttacaaaatgcccgattacttcctcgggggtcattttagtatatctaggattaccacgaattaattgaacttgagtagggttaaggaaaatgagtgatcttagaataaccttaaccacctcgtggtcgtcccactttatgctcccgaggttgcgcacttggttcaccaaggtcttgagccggttgtacatgtgttgtggctcctcccctttgcgaagccggaaccgaccgagctccccctcgatacgttcccgcttggtgatcttggtgagctcatcttcctcgtgcgcgggtntgagcacatccc

SEQ ID NO: 69458 - DNA, 470 bp, Zea mays
  unsure (1)..(470): unsure at all n locations
tcgggtctctggccttgctacttttgtcgatatgaccagaaattacttgagaatcagttgtaaggattgcccttcttattcccattgcttttaactnttgaagccctaaaagaagagcttcgtattcggcaatactatttgtacaactgaattcaagccttgatgcataacatgttctgacttttgaaggcgtgactaggacagcagccgctcctgcaccgaatggtccctatgaaccatcggagaacactgtccaagcttcggcgtctttatttgtttcttcttactgagcccctggcgtccaatcagcaatgaagtcttctaatgcctgcgactgaattgaggatctatgtacatagtcaatactgaattcattaagccttgcaacccattttacaatccttncagcagcttctctggtcctcattatgtccttcagaggctgtgacgaatgaacaattatgtgatat

SEQ ID NO: 69459 - DNA, 413 bp, Zea mays
tctgaacatctaagggtgtacctacctctgggagaggcgccaccaccaatgtcccagcaggagcagcatcagaagaatcctcaaccagcaaatcaagcatagcacttatctctacatcactaggatccaagggcacctcaaagtggacctgccgttcaccatcaggaacttccccgagcgaggcaatcaaggtgctaacttcttcagcacagggtcgcactctaaggcccaaactgccatcagcaacatgtggattcgacacaaaaagagtgaaggccttgggaggaggcaagttccaggctgagtatgccactggggcaccaacatttgataccttgcctctaagaatcatctcaagccggttcaccaagtctacagagggaattcttctgttggtaacccgagtcgagtca

SEQ ID NO: 69460 - DNA, 421 bp, Zea mays
  unsure (1)..(421): unsure at all n locations
tgtggtggtgtcccttcgatgactnttgtcactggaataattctttgcntttttggcttagctgccttcttcgtttttgcgggctccttttccttctgaaaaagcttcgtcagatgtggccccagtggacttagcttgacaggcaaagattcggtcattacctttagaatttcctccacgtcggtggtagagggtgttgcagcagtttcttcttctttgtcaattgccttctgcttcggagcagtagcttttctcttcttcaaagtatctatttttggcttaggcttcggctttttctttntcaattgttcttcatcgtctttattcagagcaccagccactctttttcttttctgcccttcggcatccttgtctagccgctcgtagtcgggatactcaaagtccagagcatccattactc

SEQ ID NO: 69461 - DNA, 487 bp, Zea mays
  unsure (1)..(487): unsure at all n locations
actcagcttctaagggagaagcacatttgngactaaccaatgttcattttgagaaagacagggtttgtagcgcatgtcaagcacggaagcaagttggtgttcatcatccacacaaaaacatcatgacgaccgacaggccgcttgagctactccacatggatctattcggctcgatcgcttacattagcatcggcgggagtaagtattgtcttgtaattgtggatgattattctcgcttcacttgggtgttctttntgcaggaaaaatcacaaacccaagagaccttaaagggattcttgagacggactcaaaatgagttcggcttaaggatcaaaaagattagaagcgacaatgggacggagttcaagaactctcaaattgaaggctttcttgaggacgagggcatcaagcatgagttctcttctccctacacacctcaataaaatggtgtagtggagaggaagaatagaactctacttgacatggc

SEQ ID NO: 69462 - DNA, 461 bp, Zea mays
  unsure (1)..(461): unsure at all n locations
ntnggcacttaaattcttactttcatgcaattattggttcttgaaatatgcatgaggtactgcacttagggggagtattcaaaactcaaatcactcttgaaaacccctagcgcaagcccaaatgcaaatttcaccatttgcctattttctctaaaaattatctagcctatggcaaaatattttgaaaagtatatgagggtgccaatacctgtcccaacaagtgttcttttgtgtgattataagttgggatttggtttggttaggagttagatagaaaaactcaaaattttccaaactcccctctgtctgggctcaccggacagtccggtgtgcaccggacactgcactgtgcaatgtccggtgcaccggcagccgcgcgcgaagatcctcttttcctgtgcgctgtccggtggttcaccggacatctactgtgcgctgtccgggtgcaccggacagacact

SEQ ID NO: 69463 - DNA, 485 bp, Zea mays
  unsure (1)..(485): unsure at all n locations
ngagaccgacataagccgctaccgacgacagcatcttgtctgtttcttattctattctaatttcaaggtaaaagcttttatttgacttttattgtttttgaacaacgaaggtgttttctaacgaaggttgcttgtgcacagagtatgctgctgagtaaagctttgagaatgcaacaagatcttgaagataaaaaacatgaagttaaaattgagggcttagaaagtaaaataaaagatcaagcaactgctcttgaaaagaaggattttgagcttcagacaatagaaggtttattggcagaagctgaagctaaaattgcaaagttaaatacggagcatctctcgaagtcagaaagcttcgaacaggagaagcagaagttaaatgccaaatttaagactgagggtgagagaaagtcanatctacaanaatcattgtcagatcttcanaatatatgtctggatttcaatagccgatgtgacaacaactg

SEQ ID NO: 69464 - DNA, 376 bp, Zea mays
gacgcacacataaaactcagcgtaaggggatgtggcccacactttcacggagagagttatctatgatggcccttgggcagaagagggagacacaaacatcatgtggaggaagatggcgacaagcatccgaaagatagcttcagaagagtttgggttgagtcaaggaaacagaagggaagttaaagacacttggtggtggaacgaagatgtccaaaaggctatcaaggagaagaaagattgctacaaacgcttacatcatgacaagtgtgcagacaacatatagaagtatatgatagcgaagaagtctgcaaagcgagcggttagtagagcccggtgtcaagcctatgacgacctttatcaacgattggacaccaag

SEQ ID NO: 69465 - DNA, 475 bp, Zea mays
  unsure (1)..(475): unsure at all n locations
tactcagctttgcacatcttgaaggttggattatcctttattacctgaagaggcaccagtgcatatcggaataattaggcatcccgagaatgtgaagagaggtagaggtcgaccaaccttgacgtggacagaggctgtgaagagggacctgaaggagtggaatattgataaagagctcgccgtggataggaaggggtggaagtgtgcaattcacgtgccataaccctgatttgtagtttcgcttttcctcaatcgtttgaccttttcttgtgcccctttagatcttgctggttcttgtgggttttatctctgtttatgtgtttccccgtttcgtcgtttttcggttctcctttgcctttgtctcccttttcttttctttgcgggttgagctctgaggttatcatatggggtttcatctctagcctaccccaacgtgctcgggacataaaggctantgtgttgttgtaatcagaat

SEQ ID NO: 69466 - DNA, 437 bp, Zea mays
  unsure (1)..(437): unsure at all n locations
cgccaatacctgtcaaagcaacagcacatgccagcacagcttctatagaccataccagtaacttggcccttcgcatgctggggattggatatgattggacctttcaagaaagctcaagggggatatacccatgtattggtggcaattgacaaattcactaaatggatagagttccagcccattgcttctttaacctctgctaaagccgtggaattcatacaaagcataatattcagattcgggataccaaacagtatcattactgacttgggatccaacttcaccagctcagaattctttgacttctgcgagcaaaagagcattctgatcaagtacgcatccgtagcacatccaagagccaacgggcaggttgagcgagccaacggaatgatattggaggcactcacganaagggtcttcgataagaatgaaaaatt

SEQ ID NO: 69467 - DNA, 342 bp, Zea mays
  unsure (1)..(342): unsure at all n locations
tcttgtcaaaggatgtttgtttctaactagttgtgcgcacttgataatttagctcatgctgttatggttgtcttcccattgctagcagactattaatgtctattatgttntcttatcatgatatctatttatactttgttgcttccccgtttatgtcattttcaaaggagatgctgtcgaaattttatatacgaatgttagatgtgtagtttagtagcattctggggtgtttgtggatcccggngtgttacatgaactatgccatgggtgtagggatcgtgcgcgcgatagtcgccgcattgctgaactatcagccgaagttaatcgcctgcagtatgaaat

SEQ ID NO: 69468 - DNA, 468 bp, Zea mays
  unsure (1)..(468): unsure at all n locations
tattaatgaagtagttgaagaattcatactggtgagcacatgttgtactcataatgataaatgcaagaggttacaaatacagaggtatctgaattttatttanggcccgtttgtttccttggaaatgaaactcattccatgaataacattctagatattagattcctaaagaaagtaattccttagaatttgattcaattcaatttttttgtttggatgccaatggaattcttttccatgaatcaaactcaatatcttgtttggatagttatatgtggaatttacatatttggagggaagtaaccacatcaacttgcacacaacaaaatacacaagttttcaccctacaatttatcaagcagaatgcatcacgagaatagtaataatgatgcatatttgtctcanatgtccacatatcattggaacacattacttgctactcaatgtgatgttcaattcacccaacat

SEQ ID NO: 69469 - DNA, 457 bp, Zea mays
  unsure (1)..(457): unsure at all n locations
tatcaccgcgcctatagccgtgcaacgtggtcagaccgctggtgttgccgtggaaacaccggtgacctcggttatgccacgctgtggctcgctattgtgcggtagtaaccgtggcacacttagaattacaatccttgagccattgcaccggtgaacgccacgattaagccaccagtgctgtcccctctctccggccgccaccgcgccatgctaaattcacgcgccactgccctcgggccctataaattaagcatgccatcggctctgctaggtagtcacgcacccaatacactagcccgtgcctcggatcgtccaccagaatgccccaatttgagatttcccccacatcggtcaagaacaccgcatgtgtgagctcgtcgtggtcatcccttcacaggtccgatcacgcnctcctcggtcttgttntagcatccctgtgtgcttgtgatgcttctcg

SEQ ID NO: 69470 - DNA, 447 bp, Zea mays
  unsure (1)..(447): unsure at all n locations
tgcagaccgagtggttcgggcgaggggcttcgatccttcccgccatcgtagcgtcccccacacctggggtggtagcctcggcgcaccttatcgtcgaggtgggctcgacggtcgtggtggtggtgctcgttgccgaggcatcccggggccgcagacgctgtgtcccgtgtgcgcccggtgtggaccgaggcttcccgcatgaatcgggaagtcgcggcgcgatgctctggggggtacccatgccttcgggatgcagagctttcggcccgtcggaccgcggcatcctccaggagattcttgagctctccctggatacgccgcccctcggtggtggatggttccggcatcgctcggagtagtattgctgctgcagccaggttctggccgaccccactggaagcttggggcagcctttgccctgcatcgtcngcgatgcggtgctggacg

SEQ ID NO: 69471 - DNA, 439 bp, Zea mays
  unsure (1)..(439): unsure at all n locations
tccttgatctcatagggtccaatgtagcgaggagctaacttgccctngatcccgaatctctggacacccttggtgggtgacaccttaagataaacataatctcccacttcaaactgtagaggcttccgcctcttgtcatgatagctcttttgcctggcctgagcaacttctaagttctttgtaataaccctgaccttttcctctgcctcaagtaccaaatctagcccaaatatttccctttctcctgcttgagaccaattcagtggggttctgcatcttctcccatataaagcttcaaaaggtgccatctttagactggactggtagctgttactataagaaaattctgccaaggaaagacacttgtcccaatcttttccgtagtgcagtacacatgcccttaacatatcttccaaaatctggtttaccctttttgtct

SEQ ID NO: 69472 - DNA, 394 bp, Zea mays
  unsure (1)..(394): unsure at all n locations
ggtgaaccacattaatntgactctaggccactagagaaagtgtggagtgctcaccggagcggagggagagggcggcaacgccgacttgattgagctcggnggagggatgaggggtggatgaggccggtgtgaggagaggtggagctcgatggtcccttttataggcgcccggngagggaagcggccaaaaaccagctggcaccggcgaggtgcacaacggcagcggtgatggcgcacaacgccggggacgagacggctcgaggcgggctgtcgtgtgagagtgcgagcacaatgcatagggggtgaagcggtgcctaactccactggagcangagtaatggcggcgagagagagggagggtggtggtcggcggggattacgccagtgaggtcac

SEQ ID NO: 69473 - DNA, 456 bp, Zea mays
  unsure (1)..(456): unsure at all n locations
ttgctagttattttagttggcatctatgtattatgtggtatgtcagtcctttaccttggcattgtaagactatacatgtggtatgtcagtcctttaccttggcattgtaagactatatgcctacgactggcaaaacagtagccccgtctgctaagctgctttgatgaatccagtgcccaagggaatggtatgtcaaggatgcagcttgaaatttttcatctggtattcagtatatgtgataccatgcaacacaatacctaaaattcaagagagaaatctgttttcaacacaagccacccccacaagggtttgcaaatctagatacaagtacatgttaaataataatatcacccaataaaaggagcatagaatagaccaagatgctggatgaagatcatgcaagctagcatccaaattcaaagatagggtatcagtcaataatntgatctcctcctt

SEQ ID NO: 69474 - DNA, 436 bp, Zea mays
gacctataaaactaagcttgacatgccctaatccaggaactcacgaccagcgcgccgtgtggttaatgctcctttgagtagatggctgagggcctactgtaatctttttttcttgggtttatctacgtacaattaattgctcgggccgggtagcgcgcgcacctcgatggcaccaagcaatcttaacgaagaaaacggcggtccggagccagccaacccggactggaacgtgagacgggacgcgacccatgcatgacctacacctactcaacgtacgtgtaacgtgtcacggcatgtagggcttgcaatacgaggctactagccaagggctgctactcgtccaaccagctacgggataggctcctagtagtgggtggggtgcggcagctagctgcgcgggcacccaatggcctgctgggctctctctgatcggata

SEQ ID NO: 69475 - DNA, 480 bp, Zea mays
  unsure (1)..(480): unsure at all n locations
cgcacatagtctcgatgatgtatgcctttagatagtccaagtcttctaaagctattactttttgtgaaaccgcattgaaaaagtaacacaagcgtgtgatgacaactttgacatgctctgttttgagggctcttaccgcaattgggaggaacaccgtcatcatcacatgacagtcatgagagttgtagccaaatagagacaagtccttcatcctgactagactgctgatattggatgagaaacctgtgggcactttgaccccacgcaaacatttgcaaatctttgttctctcctcaactgacaagttgtagctagctggggggaggtaaggcttccctctgccactatccactggatgaagttccggtctgatttgaagatctactagatcattgcgtgatttaagtccgtcttttgtcttactccgcatgcccaacaaggttccaatgatgctgcaaaaacattnnttgtacatgcatc

SEQ ID NO: 69476 - DNA, 409 bp, Zea mays
  unsure (1)..(409): unsure at all n locations
tcggcgtctnttattgcttcttctacctgagcctctgttttccaatcggcaatgaaatctgctaacacctgtgactataatgaggatctatgtacataatcaatagtaaattcatttagttttgcagcccattttccaattcttcctgtagcttctctgtttctcattatgtccttcagaggttgcgacgaatgtacaattatatgataggcttgaaaataatgctgaagctctctggaggccattagcacatcatagagtaccttctccaattctgtgtaattntgctttgataaactgagtactttggagacaaagtatactggtgattgtctttttatttgaaccatttgcttcttctgcactaataccgcactgactgcataatgggaggctgttgtggnggaca

SEQ ID NO: 69477 - DNA, 436 bp, Zea mays
  unsure (1)..(436): unsure at all n locations
taccctatcccatatctagggcatgtggctagataatatagtccttgatcatataggcctacatacgcatccaatccttaattaacctgcgtggagcatcacctgttcctagcccaagtctcgagttaagtacttccatccttaggattgttttgtgttccttacgatgaaaagagcattataaggaactntgcagtaagatcccactacgctcccaatgaaaatattcttgcaggtagaagccatccatcctcaggataacccctgagctatgcattaatgcaagagtcaacctctatccacaagatctaagcanggctaagcatttttgtaatcatattttgatacttcatcaaaagtatctattaaggtatgcatatcaaggtagacaatgcatnccatagtttccaagcaactcctattaacgtaatgcaca

SEQ ID NO: 69478 - DNA, 471 bp, Zea mays
  unsure (1)..(471): unsure at all n locations
ctgtcccttngaagttgtgggtagcggtagcggcggtccttctgcaatagcatgatgaaccaagagatctccgggttagcatatatcaatgatgttttccaagggctcaaaacgctatgttctttctctcgctccggtagactgcttcttctctcaattgccaaggatggtgctggtagatatcatggttttggtagaaacgatatctcgtacctgctttgctataagtgccttccctcccttttgattagggaaatgagattcaagatttcgaatagttcgatgcagatgggccacttcttgtccgaagaaggatgtntgctttgaggattcccctacttggcgccgaanaagttggcagcaatggtggtgatggtggaaaattgatgaagtggatacggatggatgacgcaatacgcggtggggtgacagacaacgtggtggtggtgggtatgatagtggtgaatatgt

SEQ ID NO: 69479 - DNA, 408 bp, Zea mays
  unsure (1)..(408): unsure at all n locations
ttagtaacataccaggactcaataatggcagcttgtaagacatgtggagggacatgacagtgggtcgacgaagggggtgctcacggcggcacggagaatagatttggggggaattccaaattatgctgctacggtggacgattgggggcaaggagttgttcactgagttcgtaacgattaggagaaacagggggtgcttccaatttatagactctagccaagcttatcacgaattttggattgagatcaaggttaccgcagccaggatattntatggtggctgactcaccatggcgtgcgggagggaattagtccagggatgataatcggtcgcttgccacgacccttatgatgcggagtaaagatcgttgcgtgtcaccgtcngacaaatggtgagctccggtgatg

SEQ ID NO: 69480 - DNA, 452 bp, Zea mays
  unsure (1)..(452): unsure at all n locations
actcagcttgaaatacagttgatgctnttatgcaagatatttgtgatgcacacctgngcctaattacatcggttccagacacaactatagatgatgctcgtccattgtatcctattggaagataaaacctgaatgaacaaattgtacactctaagttagttacagtaggtcccatcaatgaagtgattgaaaacaaaagtagagtaaatagtgacatgcagcaaagcatttaaaaatctaatcattaccataaagattgagcatagaaacaaccagtgctttgaatgttcatattttagtcttatcagtaaaaagagcaactggatgatcatagcaagagtagtcagaacataggatctgatctcaactgattaacatactgcttttgttccctgaggggctcctttggcctctcaggttgggtactaatttcgtttcttcttaatgaaatg

SEQ ID NO: 69481 - DNA, 465 bp, Zea mays
  unsure (1)..(465): unsure at all n locations
tagcctgcatctcgcggagttgctcgagctgtgaacccttactccccatgaggacctgngccacagctagctcctgcgagacctcaacgcgagacgcaggcgcaagggcaccgtcgccccctggcatgctggggtggttgtcttcgtcgtgatcttcctgatcgatgtggaagcactcgcgagttgggttgtggcggaaccacccgaattattccagcttaagtgcctaagtcacgcctcatgggccgtaacacacttaaatcggaataacccgtcagtccctcagatctagtctgatagagccacttaaccaggatcaaattccacaatctcactcgaaggtgagtcacagaagaaatacaatataacaagagacctcagattaagtacggagttattacataaatcggagtttttggagtagcaaataaagttctcaaattaagtgcagcggataatcgatgt

SEQ ID NO: 69482 - DNA, 419 bp, Zea mays
tcggggagccgaaggtctaaaaaacaccttccctgagctcgttgtcgagaaacgattcagttccccagcacatagcggtcccaccttgcagagttactgtttgatctctgcggtccaccacacagtgagtgcgagcaggtgtccgcctggtgtaaaaatcctagtgcttcgccttcttacctgcagtactatataaacagacgagtaggtgtgaagttaccacagcattcattgctatttgcactgttttgctgccaaaatttttagccatcgccgaagcttgactctcggaatcgatcgaagctccagcttgaagcctgcttcgtcagaaggaaaaactttggaagaaaaaagtattaaatttccacaaattcataattaaatggccagagtgcgctctaccgccagggttgagcgtg

SEQ ID NO: 69483 - DNA, 361 bp, Zea mays
actcagcttctaagggagaacacactcttgggactgacaaatgcgcatttttttatatatatgaatcgtagcgcatgtcatgcagggaagcaagttggtgttcatcatccacacaagaacatcatgacgactgacaggccgcttgagcttctccacatggatctattcggtacgatagcttacataagcatcagtgggaggtattactgtctagttattgcggatgataatcctcgcttcacttgggtgtgctttttgcaggaaaaatctcatacccaggagaccttaaagagattcttgagatgggctcaaaacgagttcggcttatcgatcaataaaattacaagcgacaacgggacgg

SEQ ID NO: 69484 - DNA, 425 bp, Zea mays
  unsure (1)..(425): unsure at all n locations
tccanatttcttgggtatgtgtcctatgccacgatatgagtggatgttagacccactgccaaagcatataaatatgatctactcaatgatgaaagagttaaaagttattggcctcatggttgtgcatgcatgtagtgggaaattagacttaaagtcgagttgtccctctccatgagaaggctaattacgcatgggagtacgacaaagatgttgatttttcctgatccaaggctcagcccacaaccatgccaaaggtcaaggctcaactatgtcaaatcttttcttttattgaagattggcctcaaggattcttgatataggtatattctctgcttgagctgtgttctgaggtatcttctatgaactctttacttgtactttcttgactccagcattcttgtctagagcattcttcatactaatat

SEQ ID NO: 69485 - DNA, 426 bp, Zea mays
tgttagagaagctgatggtggggtaactatgttgcaatctctttatgtggtataggtattgagtcgctttggttttagtgactgtgatcctgctccaacaccttatgatcctggtgtgctattgagaaagaatcggagaatagcaagggatcaattgacatactcccagatcattggctcgctcatgtaccttgcaagtgcaacaaggccagacatctcttatgctgtgagtaagctaagtcggtttgtgtccaaaccaggagatgatcactggcgtgctcttgagagagtgttgcggtatttgaaaggtactatgacatacggtattcattataccggaaacccaaaagtgctggaaggctattgtgatgcccactggatttctgatgctgatgagctctatgccacaagcggatatgtgtttct

SEQ ID NO: 69486 - DNA, 481 bp, Zea mays
  unsure (1)..(481): unsure at all n locations
tgtcgtatntgccatcttattaatgttgattattttcttctgatgtattaagagagatcagcagatgacttccacactttaaacaacacataataatccataactaagagaatgcaaggtttcataaataaattttgtagttggtgcagaaaacataaaatacattattcatttatactctctctgtttcaaattataagaatattcatagctnttactatacaattagatatacactatgtctagatgtggagtaaaatcaatatatctagaaaagccaaaacatattttaatttggaatgaagaggagtaccattctactatatagaaatcactaagggcttgcttgattctctctggatcgaaggggattggaagggattaaatccctccctagtcaacaatgaattgtaggggattgatctcccttcaatccctttgatccatggaagggaagtaaaaaaatagaacacgatatact

SEQ ID NO: 69487 - DNA, 445 bp, Zea mays
  unsure (1)..(445): unsure at all n locations
nntgatcaaagtttaatgtcaataattaactctactttctgcgggtggtaccagatataaacaagcatcaattaataattaataaaaaagaataaggatgaaatggttcatttgacaaaactgatttactgtaacataaaattgttattgcgccatgatacacaaggttgctttcaaggaaaaaaaggaagatttctagtactactttgttccagtgacttctaaatgatagtttcctcataatacccaaggtcatgtaggaacctgactaaactaagcaccttatgttaacacagtgaaaacaaagcactacttcaaaaaatccagcgcttacaaaatgcctgaattcatagggatatatagcataatacaatgtctatcaaaacgtagcacaacaacaaatggtgaaatactaaaatgcatcctagacaggtactgtagttat

SEQ ID NO: 69488 - DNA, 364 bp, Zea mays
  unsure (1)..(364): unsure at all n locations
tgtgctctcagacgcaagaatatgtggacatactcctggttgtattctccctggtcttgcgtgcactggaacaaaccttgagcagtaaccagctttgtctgacaccctgggaaactggtgatctgcatgtccttcagcttctgccaagatgngactgtgcctgcccgtatggaggagatccacgttggcgcatcatacttgaatgtcatgactaacgatttggacgtgactcgtgttttgcccccgtatgaagatcaggatgcgtcgcagctcataacaagatgcttagcatcatgactcttatccttcacctacacctaaggttgagtctgacagaatgtatcttgaacagcgccatgaacac

SEQ ID NO: 69489 - DNA, 462 bp, Zea mays
tatgaagattcttcatcccaacgtgggctagtcggtgatgctagagccaacccatgttagtcttagcaattaagcaagtgtcaagttcagctctattaaaatcaactaaatatagctgaccctctaacactcccttaaatgctacttaatcatcacttcttctaaagacaataacacctatatctataaaaagacaattgtagcccattttgcataattgagaaactgaaagcaagttgtaatctaaataatctacaagaaaaacattggaaatagaatggtcaggtgatatagcaattttaccaagtcctttgaccaaaccttgatttccatccccgaatgtgatagctcaatggggatcatgtgatttctcataagaggagaacatctttttctccccagtcatgtggtttgtgcacccgctatcaattattcaacttgagccccagattcataaaccta

SEQ ID NO: 69490 - DNA, 390 bp, Zea mays
ggagagatctgttggcctacctgagctcagaagcctgcggagaactttcatcaagctggcagggcagtacagtctgagtgggccactaccaccgacagatgctgacagcgcaaagaggatgtttgtcgactacttaaaccgtgaacttggtgcatgataattttcattcgcctgcgttgcattaacactatgcagcatgtggttaacttgggggatagataattgaagacaacttgattgtacttgttccttgttttgtggaaatctttatatgactatcttaccgtccttgacgccttggtggacatgcaacaggatcattttttttgtctcgaacccgcacgagaggtgcacatcattatattagaaagatgaaaagggtttaatata

SEQ ID NO: 69491 - DNA, 456 bp, Zea mays
  unsure (1)..(456): unsure at all n locations
tcttgaccacctcaacgttcaccaagttgttgcatctaccaccgtcaatgatgatatgtacacggcagtccttgacgatgaggaacatgttgaagaggttgtggcgttgtttgtcgtcgtcgtcactagccgtggcactcaaagctcgttgtataatcaaggccttataggtctcggtcgctgttgtaccaagaacctcttcatcaccatcataagtctctgcaatgttagctccaacagtatcttcatcttcaacattagaagcaataacatacccaccatcaccagtagcaatgtatgcccgtttgctggggcaatctcgctgaatatggccaagtccctggcagtggtggcacttgatgtcngaggagcggcctgtggaagaggtggtcgtagtaggttttgctgcaacacccgaaggcaccaatgacttgtttgtgtcgtgtccctgtgatg

SEQ ID NO: 69492 - DNA, 440 bp, Zea mays
tctaaagggagaacacgtgataggtttgactaacgtgcaattcgaaaaagatagaccttgtgcagcttgtcaagcaggtaaacaagtgggaggagcacatcacagcaagaatgtgatgaccacttcaagacctctggagctgctgcatatggacttcttcggacccgtcgcctatctgagcatatgaggaagtaagtatggtctagttattgttgatgacttttcccgcttcacttgggtgttgtttttgcaggataagtctgaaacccaagggaccctcaagcgcttcctaaggagagctcaaaatgagtttgagctcaaggtgaagaagataagaagcgacaatgggtccgagttcaataaccttcaagtggaggagttccttgaggaggaggggatcaagcacgagttctccgctccctacacacctcagcaaaatg

SEQ ID NO: 69493 - DNA, 321 bp, Zea mays
tcattatccacacaagaacatgatgacgaccgacaggtcactccagctactccacatggacctatttggaccgatcgcttacatgagcaacagagggagctaggactgtctaggtattgtggatgaatattatcgcttcactggggtgctctctttgccggataaatctcacaccccagagaccttgaatggattcttgacacgggctcaaaatgagatcggcttaaggatccaaaagagcagaaacgacaactggacgaggttcactaactcacgaatatacagctgtcttgaagatgatggcatcatacatgagctctc

SEQ ID NO: 69494 - DNA, 466 bp, Zea mays
  unsure (1)..(466): unsure at all n locations
tcggcatgacagcagaaaaggggaaccgacttanagatgaatagccaaactagaccctgaagagttactatagagttactgataaatgtaaagggcatcaatgtaattttacacgggctgcgtcccgtgcctataaataggtgaacagtactcccgtactgttcacgctgatttggcattcgctttttgcatcacgtctgtacctttacttttcatcaattcaaaggtacatttataatttgttattatgaatttgataaatagaaataagttgatgataatatctgtattattattcgcatttcatatatgtattcttcttcatcatctatcgaacttacgaaggtcctttctttcgtaaccttcgtccagaattcattatatccgaaaggacataatgtctttaaggacgaaggactntaacatttaacactnntttatgttgccttgtcttaactcttagcat

SEQ ID NO: 69495 - DNA, 452 bp, Zea mays
  unsure (1)..(452): unsure at all n locations
tccctgtgtattgcnttggttgtttagaataatcacttccttcttggcgagcaaatgccaacctgaatgtcagctgatcataaattcataactgatccaaaatccggatttgatcaacataagaaatcggtcgatgatgacaccattgatattgatgtggaactctatgagacggtcgacggtattggtagttatagcgatatcaacatgctatttgcacttctgatttgttttggccatctttgtcatggctattgcttactgtcatttttggcaatgcagggtgagacagagaacaaggacattgtgaaccaagatgaatcattcatggatattgacagtgcagagtgcggacttgaggaaccaacttggagtaacagaatatgctgaagagctntacaagttntacagagaagatttatttgtcagacgattcanagctatcagtttct

SEQ ID NO: 69496 - DNA, 420 bp, Zea mays
  unsure (1)..(420): unsure at all n locations
tctccttttcttgctcatatttntctgactgttcgaggaattcattcttttaactggcattntccgcttggatttcggccaaggagccttccataaactgaataatagagtctttcttttctaaagcaccttcgtggtctttagccataattttaagatcttgaatggcgaagtccttcttcttcagaacagcttcgtagttttcaactttttcttctaaatctttgatgatagctttgttcttctcctcttcaagatcttgttgcattttcagcactttacttaataatatgctctgccaaaaccaccttcgtcagagaaagacataagaaataacaataatgaaataataataatatttttaccttaaaattcgcgtagagcaagctgccagcgacatgatgtcgctggtacctgcag

SEQ ID NO: 69497 - DNA, 417 bp, Zea mays
  unsure (1)..(417): unsure at all n locations
ggccgcttacgagcgggagctgatcggctcggttcaggctgtgcgccattggcgggcctatctttggggtcgtcatttcgccgtccgcactgaccactacagcttgaagtacctcctcgaccagcgactgtctaccgtgccccagcaccagtggctgagcaagctcttcggcttcgactttgaggttgagtatcgtccgggccgcctaaatgtcgccgcggacgcactgtcccgccgcgacgccgagctacttcaaccatccgtaggggagccggnggcagcagcagccctggccctctctgggccttcgttcgccttcctcgacgacatccgccgcgccacagcgacatccctggatagtagccgcctgtgccagcagctccaggatggtaccttgaccaccccatggcgcctgga

SEQ ID NO: 69498 - DNA, 382 bp, Zea mays
  unsure (1)..(382): unsure at all n locations
taatgcccctcctaaaagattgtctaactttgttaatggcttagctcccatgccttaggataacgagagttacattttataccctgccggttatcccgagcgcaaaattaggagaattcactctatgaagtctcactctggctctcatcatgcttttatgtataagagtgaggcatctagttctaggcaatccactcatgctaaattgcctaagaagaaaactcctaatgcatcaaatgaacctaatgtttcatttaaaacttttgatgcttcttatgtgctcactaacaaatcangcaaagtagttgccaaatatgttgggggcaaacacaaggggtcaaagacttgtgtttgggtacccaaggtgcttgtttctaatgtc

SEQ ID NO: 69499 - DNA, 453 bp, Zea mays
taccctgtcccatatccagcgcatgtggccagtttttatatttcttgatcatataggcctacatacgcattcaatccttaattaacctgcgcagagcatcacctgttcctagcccaagtttcgagttaagtacttccacccttatgattgttttgtgttcctaatgatgaaaagagcattatatggaactttgcagtaagatcccaccatgccctcaatgaaaatattcttgcaggtagaagctatccttcctcaggataacccatgagctaggcagtattgctaaagacaacctctatccacaagatctaagcagggctaagcatttttgtaaacaatatttgatactttcaaagacgaagtatctataacaggaatggatatctaggtagtcaatgcatcaaatcatatccaagcaattcctataaacttaatgcacatttcactagactt

SEQ ID NO: 69500 - DNA, 468 bp, Zea mays
  unsure (1)..(468): unsure at all n locations
tgagccgaggaccagccccaccggaacagtgcgatcatgctcgccggagctcgtaaccccgccggagcacatggaccgggtaacccactgaaccatttctcgattccttgcgcgcatagcctctacatcacccagaggagctccttgtgcaccttgattgaaccctaccgccgtggtttggccggagtaggtgccaccgacgacctccgccgcctgcgctcgtggccagagcagctccagccacctccgacaccgacccgcacaccgacgtgacctccatgacctccccgacatcaccaaccaccccaccggagctctactgccgccggtgagcctcgccgccgtgatctttgccccggttactgttccagctagccaaggatcgcgggttagatatatgataagttcanggggttatgcgtaagggcagtgactcatgcgaatagtagatcgagggctgatttgtga

SEQ ID NO: 69501 - DNA, 453 bp, Zea mays
tgcagggtgcaggttcaacgaccccttgtagcacacgcagttgtgtggagccaagcccaggcatgtgctcaagcacgcaaggctttgcatccgccactagagggaacctataacatgcaacagacaaacatcgtgtaagtctgatgaccaacctagccttacaaaaaaacaggatcattagaccttgagcattggtgcgatgatgggagtcggacattctaactcttcatatatgtcacacccgggtttagaaggtaaaccgaatgcgaaccatgtatgtgttaggatcagaaattcacgttacataattggacatcatcacacagtgctcaaataatagcaaaaagaagtagtactttattacatcacgatgtccgaaacatccacaaagtcattaacttaaaccataatccaagtgctgaaggaaacgtagtacgaataggccttcacatg

SEQ ID NO: 69502 - DNA, 448 bp, Zea mays
  unsure (1)..(448): unsure at all n locations
tgcttnctncgactctnctgctgttcttccaccttctcttttctagtctcctcttggctggcaatgactattaataccatgcgatgcgagtgcgcactgcgcacgccatggacgaaaccgtccaggcacaccggcctcagaaagtcacatctgccacgagtcgacgaagggtcagatgaacccgcccgcctgcgcgtcaccggctgcgccgccggttggaaaatagccaatattcggggacgcggcagttgaagtatgaccgtctcgtccgtcgtccccatcgagggattacgcggctgcctgnggaaggaggtacctgacctgngagttggcagttgggacctgtgatgggactacnggaggagtcangctggcaggaatgaatatgcgtataccactgatgtagttntggcgtccgctactttggcccatgggcttctatctggta

SEQ ID NO: 69503 - DNA, 480 bp, Zea mays
  unsure (1)..(480): unsure at all n locations
taacccgacatccctatatacattaaaataggtaaattgatttggaaaatatagaaaaccctcaaaattggtttttagtaggaaaataaatgtgaaagcttgcaaaagccatatcttattcattttaactccgatttaatccgttcaggttgccttagcttcgtataaatatttatcacgcagtaataacactatttgtgtcatatcacatanctctataattaggtatttgtttaacctatggattaacctttctagatcaaagttaatctgtctataattgtaacctgactaaaatatgatcactaattaaggtataacttggattagagatgaactaagatgtttatctagaatatatttctcacatgctttatgttaatccacatagaacataattttcacatttaatcacatagatcttccaaaaactatatcttttcagtcgtaactctgattntagtggatctcgaacctacg

SEQ ID NO: 69504 - DNA, 314 bp, Zea mays
tttgtgcacatggccagatatggcttgagaacgagttctcaggatggcccatattattcccatttcccttatccttcggagccccaacagaagcgcttcgtattcaacaatactatctttgcaaccgaacgaaagctatgctgcacaacaggttgtggtttttgaatgtgccactagaaccacacccgctcctgcgccaaaagttacccacgaaccatcgcagaacacatgccaagcttctgtatctttgattacttcctcctcgtgagcccctgaacgacagtcaccaaagaaaactgctaatggcttatagt

SEQ ID NO: 69505 - DNA, 217 bp, Zea mays
gcaggaagcggaccacatcacgccaagacaaaaaggagcaaaatataagcgctgccacagcgcaacaacgggcaaaatgtaaaccctccaccaagtacgccaatggcaagccagctcactaaaaaaacctcacgcagcgagctatgccgctccaaagaagaagagggaaactaaggtgcagcaaaaagtcaaccacgtcgaaccaagcacagaaccc

SEQ ID NO: 69506 - DNA, 485 bp, Zea mays
  unsure (1)..(485): unsure at all n locations
tactaagcttgcatgatatttaatggttgctttgtcctgcagagaagtcagatgatcaggaggctggtgaatactgtgcaatcgttccgccaagctatcaacttggctccagatgcttggagcgccatgcttattctcactttgttgaaacctgaatcacaaaaatttgctcttgatgtgtttttggccctggctaaccattccagttacaagattccagaaacattctggctatttatgtcaagatttctaaattacttggacaaacaagatatactttaggaacggttaatatatcaattcctttttttgtgttatggctcgaatttatttattntatatcggtcgccactggccaatgttgacttaaaaagctgttgctgctgttctccggctggtgctgattacataattcatatcgttttgtcctgtgataagtgcttttcttttatcatttacagatgatagcatttcctatctatgta

SEQ ID NO: 69507 - DNA, 491 bp, Zea mays
  unsure (1)..(491): unsure at all n locations
ntatatggacgacggtgtcggactccgctaaattggtctgaacctggagaaagatacttctttagacctgatatggtgaaagaggttgaagaaaaggttcagagaattatccataatatgaagaaagctcaagcacggcaaaagagttatgcagacaaacggcgaatgcccttatattttcttgaaggggactatgtctacctgaaggtatcgccaatgaagggcgtatcgcgtttcggagttaaaggaaaacttgcaccacgatatattggtccttttcttattctggaaagatatgggccagtggcgtatcgactccaactccccgaaaccttgtctgctgtgcataatgtgttccacgtatcacaactgaagaagtgtctccgggttcctgatcgaaccgttgaagtgactgatgttgtcctggaaccagatntaacatactcggaacatcctattcgagttctggatcanaaggacaggatcacccg

SEQ ID NO: 69508 - DNA, 477 bp, Zea mays
  unsure (1)..(477): unsure at all n locations
tgtgcacacctccgtgaggctccccgtgcaaggaatcggtgtttccttcgccggagaagctagtccgcgctcgccggagctctcacccccgccggagcacgtggaccgggtaaaccactccaccatccttcgattccttgtgcacacagtcgttgcgtgaccccgtgatgctcaccgtgccctcggattgcgccagttcgccgtagtttggccggtatactcgccgccgacgaggacacccgcctgcacgcgtggaccgggcgattccggccacctccgacgccaagccgtacctcgacgtgaccgccagagtctccccgagccgaccccacccttcgccggacctccctcgccgccggtaagccgcgccgcccttttctttcccgcggttactgtttcagtgaggggaatgactgcgggtgagagggaagaaaggtcanggggttttgtgtaatgtcagcgacacaggggaatagt

SEQ ID NO: 69509 - DNA, 475 bp, Zea mays
tcagtcttagcgtagtctcgctcttagttaagtcttagtttgactgggtagtttgctatatcctgtgcatttatgtttgtcatgatgaactatgtttggtttggatctttgtaatgattatcaccagagtgtgggtatcccctgcattttggtttacctattatgttaataaagttagttatatagttgggaaacccattattctcctttcctctttatctgagaagctgtgtggtctgtgttggagatcagtgaagatgctcatctgttcagtgctgttgaagaattctatcctcttttcttatgctgcaagatatgccagatcagttctgatgtgtagttgcattctgcagatgtcagagaacaggcgcacatgaggaatgcgtgctcatcatgagcgagccgctcaacaggatgaggtgccccagcagcagcacctgcctgccccgcccccgatgtccatcgagcagatgtt

SEQ ID NO: 69510 - DNA, 301 bp, Zea mays
tacttgctcctgacccatggtgatgcaatactctaagggtgaactcacacaacaaggtgtgggggataatgcgcatgactcacccaatgtgggagctgatgtgagagtaatgcttactaaaggaaatggttaagctgagcattacatttatagttggtataattctattagcagtttctacgtgtaagttgataccaacccaatgaaagtagagatcacaatttataataacacccacactgcactgcaaatgacaaatatgagttgactccataagttaatcatgtgaatgatcgagcca

SEQ ID NO: 69511 - DNA, 407 bp, Zea mays
  unsure (1)..(407): unsure at all n locations
taaacatgtntaaatctctcgggctcttcttttatttattttattaaataaataaaactgtacctacattagttcatacttaatcataacaattagaatgtgcatacaataaatgaaactattttatttaaatatagaataatcctatgaacattttgcaatttgaatcacaaaatttggagttcatatgcaaaagttatgaaataaacaagtttgggaattcaaaatatgaaattaggtctaattctgtgaatatttaaaagtccagggttcaatctgcaagaatacaggggcctgcgcgcgaaaaccagggatggcgggttgattccaaacaaactgngggtctctttaataaaacaaccacgcgaaggggtatcgggctccctcaaccgtcagatctaaaccca

SEQ ID NO: 69512 - DNA, 483 bp, Zea mays
  unsure (1)..(483): unsure at all n locations
tgccaattcttgtcaaagcaacaacatttaccagcgcagcttctgcagaccatacacgtaacatgaccatttgcgtggtggggactagacatgattggacccttcaagaaagctcagggaggctatactcacgtgttggtcgccattgataaattcaccaaatggatacaatacaaacccattgcttctctaacttcatccaaggcagtggaattcatacaagatataatattcaggcttgggataccgaatagcatcataaccgacctgngatccaatttcactagctctgaattctttgatttctgcgaacaacggagcatccagatcaaatatgcatcggtagcacatccaagagccaatggtcaggtggaaagggctaatggaatgatactggaagcactcangaagaaagtcttcgacaagaatgaaaagttcgcanggaagtggatcagagagttaccttatgtggtttcgagccta

SEQ ID NO: 69513 - DNA, 177 bp, Zea mays
tgcaccaatactgcttataaattacccccgcctgtcctctccagactgtgtattataacatttgcgaatggagccataaacggatgatacctgatcgctggcatcacacttgtgcttggttatattgtcatgggatcggggcaagattgtcatatggcagttaatcaatttgaactc

SEQ ID NO: 69514 - DNA, 440 bp, Zea mays
  unsure (1)..(440): unsure at all n locations
cttaagagatggagtcgttggtgctctacattgtgtgtttcttttagaccgatgaagctgactgtcgtccgtgccgaattactttgtgttcctgtccaccttgtaacggccaggaacttcgctttgtttcttggatcagctgctcctggcgctcctcaacaggagctgtattcagccggaaggttcccatgtcggtggatgatgttagcggcgttcgaacccgggggggtccctggaccgacgagtaaattgtcgctgcgtgccccagcccagatgggtcggcgcgagacggatcgcgaatggtggagagtagccggacggagacaggcgtaaatggggaaacccacggtcttcgtgttctgtccgcgcccatgtcgggtgtgctttgcatanggggttacaagcgttcgcgtgggagagagcgagaggcttatgctcgt

SEQ ID NO: 69515 - DNA, 434 bp, Zea mays
ggagggctaagcagtgtgcgtggaagatgatatattgtgtctgggagtctgggtacgagcagctacctgttcttttaaatgcaatgaaggcggtcaatccatgcatgcattatgagtacatccctaaaccaaatgcatggattgatgggagacaaatattcttccatgcgttctggtgctttccccagtgtgtggatgcctaccaggattgtacaacaagattttatattgtctaacttggattcttgacatgtatggttagatgcgatcgacaaatacataaagaaaccgtgttgccctctttttaatttcttatctaacctatgtggagcaccccgggatatttcatttggatcttaagagggacgggagacaattgcatcgttatcacgaagcgttcgctcatctttatgtatgtgtgatactacacgagt

SEQ ID NO: 69516 - DNA, 456 bp, Zea mays
  unsure (1)..(456): unsure at all n locations
ntggcacttcagcctcccaatatgcttcggcctacgtgtttataccttgcccctctntgccttcagcgcactggaagaagttgaagcagcaacttttctctttcccccttgccttcgaacaggaaaacaataatcagggtagacaaccccaataacatcgaaaaccctattcaacctctttttccctcgagtgacgaaggcaactgccatacctctttatccctcgagtaggttccaagtagctcgtcactcgttgcctctatagcatctagccaatcatcatttggctcgtcaaattgccttctgtaccggaaggtgtatttgagataaaccaagccaccctgactggagccagcgccagcttgcttcggcatttcccattcatttgcaagaggtcatactttgaaagcgatgtgctcttgaactaaatctctggtaccaatgtaggtacatatg

SEQ ID NO: 69517 - DNA, 482 bp, Zea mays
taagcatagattaatcatgcttaagcgtttgtaggaatattacaatataatatatatttgcacagaaaaacagttttacctagaaattatgggtacttacctggattaatagacatgtttttgcagccttgctgcacgttcccagcttcttaccttcagcccttcaccaaacagcagcagcatcacaaatcaacaaacaatagattaaactgtaaaagagatgaacaaatcaacaagaagactaaaagaaaagaaacttaccttctcatcttctttccttcagcctttcaccaaacagcagcagcacaaatataagaaaaatctcataatcacaattcacaaataaacattaacaactcatagcagacttaaactaattcaaatagataatagactagttcatgacacacaacacactagtagctcagtggagcaatataaatattacaaacttagattagttcaaacttcaaataaactga

SEQ ID NO: 69518 - DNA, 266 bp, Zea mays
acctgtgacgtttcgccctaccaaagagacacaaataaagaggcgagattcatggacaatcgcacggctttgacgagtgaaagcgcttgaaaaatgagattggtaacactcggaagaaatctgaacattgaccccaatgaataaccatttgtagtcattttcgagctgtcacattcaagtcgagaataatcagctgaagaattccaactccttcgaataagagattttgactgagataaccagaatttttcaacgttttgcatgat

SEQ ID NO: 69519 - DNA, 500 bp, Zea mays
  unsure (1)..(500): unsure at all n locations
ccttgatactcagcttcctccgcattcttgagcccctcatgcattcgaagataactatatgtaccactgggggttatgaagctggtctttggctcatcttccttcttcatccagatttggtgatagcctgaataacaatctagtagactcataagttctgacgaagctgctacatctactagagaatctattcttggtaatgggaactcatcctttggacaagccttgttcagataagtaaaatcaatgcacattctccatttaccattggccttctttaccataacagtgttggctagccattctgggtattttacttctctgatgacaccagcactgagaagtctttntacttcattccgagcacctttggctntgtcgtcagacattntcccgaagctttgcttcctgggtctgaaggatggatcgacattgagtgaatgctcaatgacgtccttgttgacaccacatatgatcgtggctgaccatgcanaaacatc

SEQ ID NO: 69520 - DNA, 493 bp, Zea mays
  unsure (1)..(493): unsure at all n locations
actaagcttgtntagactcgtcctccctcttcatccagaattgatgatatcctgaatagcagtccaataaactcataagctccaaagttgctgctgcatccacaagggagtctataattggcaaggagaactcatccttcgggcatgccttgttgagatctgtaaaatcaatacacattctccacttcccgttggccttctttaccataatagtgttagctagccattctgggtatgttacttccctgattactcgagcactgagaagccttttaactttgtttcttgctccttcggctntatcatcagacatcttccgaagcctctgcttccttggtctaacggctgagtctacattgagtgaatgctcaataacatctctgttgacaccacaaagatcattggttgaccaagcaaaaacatcctttntgttgaacantaaatttagcataactntctcttgttcgtcagaccattgagatcccaacaacac

SEQ ID NO: 69521 - DNA, 478 bp, Zea mays
  unsure (1)..(478): unsure at all n locations
tctagagggagagcacattntatgattaacaaatgttcattctgagaaagacaggatntgtagcgcatgccaagcaggaaagcaagttggtgctcatcatccacacaagaacatcatgacgactgacaggccgctggagctcctacacatggacctattcggcccgatagcttacataagcatcggcgggagtaagtattgtctagttattgtggatgactattctcgcttcacttgggtattctttatgcaggaaaaatctcatacccaagatactttaaaggaattcttgagacgagctcaaaacgagttcggcttaaggataaagacaattagaagcgacaacaggacggagttcaagaactctcacattgaaggcttccttgaggaggagggcatcaagcatgagttctcttctccctacacgccacaacaaaatggtgtagtggagaggaagaatagaactctattggacatg

SEQ ID NO: 69522 - DNA, 491 bp, Zea mays
tcgtgagcgtctcaacactggttgtgcggacagcaacaacgagctggtcaaccttgccatatcataggaagactacattgtaacccatcgggcagagaagaagaggaaagtaccaatgtctggatcctcagctccaccatagaggttccggattgtctccaacaatctgagcagaggattccagcagcaagccgggagatgggttatcagaccaccacagcagcagcaagcacccaaccattttcctactcccgctctaaggaacaatcagcctcagcagccgcagcagcaattccgctaagggaacggaaacaaatgcttcacgtgtggcaatgcaggccactatgccaagaattgcccacggaatcatgcaaggcatatgctatcacccaactaggacaaagggaagaagcagatagtgcaagtcaggcaagggaagctcaatttcacttctctcgaagagctacctgaaggagcgtacatcatgactg

SEQ ID NO: 69523 - DNA, 452 bp, Zea mays
  unsure (1)..(452): unsure at all n locations
ntaccctgtagtctggactataagttggttacggtaggtgtaccttatgcagatgaccatttccagcatttgcgtaatgaggactctagggagaagcctcgtagtgagaccctggccattcgcctcggaagtgaatacgggtctagctaacccggactagaagggaatcgcgactcatgggtaaagatgtgccacctctgcagagtgtaaaactgatatatcagtcgtgcacacggttatgagcagtctggactcctcacatgataattgaacttgaagatggaaataaatcaagatccaatgatctgccaatgatttgcttaagtggtttcacttaagtgtttttgatatactcttatacctttgtttaatgggaatacttaagattcacacttattagtaagacagttggtgttaataaaatgttgaccaactaaaatgcttactgctca

SEQ ID NO: 69524 - DNA, 384 bp, Zea mays
ggaagaaccgaatttctggatttaacaaactgagaatctgatttctataaactgaggaatcaatcggcatgtttggaaccaactcaagtcttatcaaccatattcctaaaaactagatgttcttaaatagatccattctcttttaactaacagagaccagcctcttgatttttaagaatctgtaaacctactgtatataaactaaatcataaaccactatgtctggaaccaccttcatttctattaattggcacttatgctatatatacaccgatgcatctcgcctgatgttgctattctatctatgagatcacctccttatgtaacctatgctataacactctactgctctactatattatacactctgacatggcgcataca

SEQ ID NO: 69525 - DNA, 407 bp, Zea mays
atggacccatcaaggaagaggcctatgttgagccacctcccggcttcgaagatagctgcgtacacctaaccactgtttacccaactctcttaggcgctttatgggctcaacaacccccaagagcatggtatgaatgccttagagatatccttatcactattggatttatagtcggaaaggccgacctacactctttaccaaaacacttgaaaatgattcgcttgtatgccacacttatgttgatgatattatatttgggactactaacgaatctacatgtgaagagtttagtacgatcatgacacaaaaattcgagatgtctatgatcggggagttaacgtatttcttatgatatgaagtgaaacaactccaataggcgaccttcattagccacacgaagtatactc

SEQ ID NO: 69526 - DNA, 457 bp, Zea mays
gggagtcttcctccatgcgcctatgggtcccttttatagcctctatgtagctacgagccgctggagacaatcttggaaggcaattcctgccttctgtcgagtggcgcaccggacagtctggtgcaccaccggacatcactgttcatgtccggtgcacgatctccttccaaatcatgcgcattcgaccgttgctcctccgggcccgttggcgcaccggacactgttcggtgcacaccggacagtccgttgcaccagctgaccgttggagcagtccacatgtcgcccgtagattgcgcgaccgaccgttggcgctggtgaccattggctgaccggacagtccgatgaattatagccacgtcgccttttccgtttcccgagagcgacgagttcgtcgcggatgactcaccgaacagtccgatgcaccaccggacagtccggtgaattatagtcgtacaac

SEQ ID NO: 69527 - DNA, 405 bp, Zea mays
ggaacttaagcgaccgagcatgcaagctgaccagggggaagggtggatctatccaccggggtctgagatcacagtcaatgtgagcgacaccttagcggagcaaatggtaagagtcctcagagtattggaaaaaacccaatgccagttagtttaaaaacgttaatcaagccataaatttcaaagacccctaaattgcaaacctatcccgcgctagggacctgtttaccccagctagagatggaacggataatataatcggtattactatacatacccatcccacgacaaaaataactcgtagcacccatatcctgggggatggttacccaatacccaaccatggggatggtacccgcatgccctccccaagatacaattatatcatcttgcaaacatctcacaaat

SEQ ID NO: 69528 - DNA, 474 bp, Zea mays
  unsure (1)..(474): unsure at all n locations
acggacctatgaatactcaagctggtaaatccatagagcgtcttagagagcttataaactatagagcttataaacttggttgggatacctgtcatcctcaaatctagaaggttgctccacatagacttcctccttgatcgacccatttaggaaagcgctcttcatgtccatttaaaacaaattaaacgaatgttgagtacttgtaacaccctgaatttgttgtataaaatttcttctctaagacataccaaattcaggtgttacctcttttttctctctctagttttcttccctcttcatttttattagaattatgtctattaggtgggagattaattatttctttactatatcaaaacctataaaagtcatgaagtgttgcatcatgctgaacctaaattattnnttttgttgatgcacatgtttgaattaatttgaatttgaattgggtttgaatttgaattgaattccata

SEQ ID NO: 69529 - DNA, 400 bp, Zea mays
agcatgcagctaagcctggtagtacatatgcttgttatatgcgaaatgacctcagcctagctacaagtgcataggtttcaccgcaatcaaaaccttctactggtgaatatcccttggccacaagtcgggctttgatccttgtcacaaaccatactcattttgcttggtgcggaagacccacctggttctacaacattttggtatgacggggaacaagatgccatatctcaatccacgtgaagtagttgagttcctcttgcatagccaacacccaatctgtatcttttaatgcatctttcaccctgtatggctctatacaaggcacaaaagagtaatgtttacaaaaatgagcgaccccagagtgagtggctactctcttatgaatgcaccgagaatgagt

SEQ ID NO: 69530 - DNA, 483 bp, Zea mays
tgactcaggtatccacacattaatccttaattcctttttcccatctcatggacaaggcatcctccctggatccaagtccatagaccaacatatatcctgttatcaagatgaatacaatcaattcctgacctcgcgcgagtgctagaaaaatcactcgacttctaccgagatcctgattagcaaagcagctactcgacatagcatactattatccatctcataaaggaatcctaagttcatgcaactaggggtttcaagcaactcctacacttaagtgcacattacaatcctacaaacattaagtgtagtaaagtagcatatatagatacggctatgtataaaaccagggcttgccttcaatagctggggctgtggggagatcctcaatggcagtctcgggagcttgctcctggtcttactcgtggacagctccttgctcggggttgagcacgtactctccgtcagcgagattgcaatctaatg

SEQ ID NO: 69531 - DNA, 341 bp, Zea mays
agcttgaagagggtgagtcagtgttgtttcttcttgagaaaagatcaatctccagagttaagaaagtctaaatcgatgccatgtggtgttggtccatataagattttggagaatataaatgattatgcatataaacttgagtgccttccgagatccaggataggcctacatttaacattgcagatttgaaaccatacttgtgggaagaagatgagcttgagttgtggacgactacacttccagagggggaggatgatgaggacatcatctttattcataccataaatggaccgcatacacgatcgcgtgcacgacagctcatactccacgtatgttctact

SEQ ID NO: 69532 - DNA, 299 bp, Zea mays
tctgccgtgtctcggacatcgcttaccagcgtggtactttttcggtgcacactccgggaggcgtgttgccgagagctaagcactcggcaaaaggggatatcctggacagtccgccagcgaggcgaatcacagctgaccgtcacctggccttgtcgagagccaacagtccgctgtagagatagacgcccttttgccgagtgacaagcatctgtcactccggcacgatgatttacccagtgtggtatcccacacgttaataacttgataatgaattacaccatgtccaccgatctgccaat

SEQ ID NO: 69533 - DNA, 394 bp, Zea mays
gcctagctatgggtgcataagttacatcaatatacatacctttgacttgagaatatccgctcggcacaagacgggctttgttaagttaccacaccatgctcatattgcttgtcgcggaagactcacttggatcctacaacattttggttaagacgaggaactaaaagccatactccattccttgtgaagttgctgagctcctcttgcatcgccagcacccaatccgaatcttgaagcgcttcctctactctgtgtggctcaatagaggaaacaacagagtaatgttcacataaatgagcaacacgagattgagtggtactcccttatgaaatcgccgaagaggcgccaccgggtgacctcttgattgttggtgactcttggtgtggcggctgac

SEQ ID NO: 69534 - DNA, 482 bp, Zea mays
tcacagtctgaccagtttatgcaataaacaaccccgtgttatgcatatttgcacatacatttatgctacatacgacaacggtctatgctttataagcttcacaatctgaacagtttatggctagtgttatgcatatccgaacatacatttatgctacatacgacaatgtcctatgctataaaaaaactcgctgtacattcataaatctacataactattaaatgcttatgataactttcacatacgtttacgacagtatgttaacatacttatgacgttgtctgtgcattgacaatttaacatacgaatcacatttacaaccagaatataattttatcataaatcttatggtattctactctctaccagatgaatcatcatctccgacatacaacgttcgatttttcgacgttgatgtctcattccactgtggtgctgcacctatgcttttgttccttgaaccaggaggccgtgctcgctta

SEQ ID NO: 69535 - DNA, 477 bp, Zea mays
  unsure (1)..(477): unsure at all n locations
cgcgcttacgaccaaaccgcacccacatccatatctcattctatggctcaacaatagtggtaaggtcaaggtaaccaagttggtacgaattaattntgctattgggtcatatcgcgatgttggtgactgcgatgttgcgcctatggatgcttgtaatattctgctatgtagaccatggcaatttgattcagattgtatgcatcatggtagatcaaatcaatattctctcatacaccatgataagaaaattattttgcttcccatgtcccctgaggctattgtgcgtgatgatgttgctaaagctaccaaagctaaaactgagaacaacaagaatattaaagctgttggtaataacaaagatgggataaaattgaaaggacattgcttgcttgcaacaaaaactgatgttaatgaattatatgcttccactactggtgcctacgccttggtatgcaaggatgctntgatttcaattca

SEQ ID NO: 69536 - DNA, 475 bp, Zea mays
  unsure (1)..(475): unsure at all n locations
agcttcggaaaaacatgacttcgatctccttatgggcatgaacattgtngnctccgccaaccctcacaatagacatatctcanaagtaccttcccctcatggtcttaagatgactttgcgtgatggctgatcttacgaaaattgaatgcttggcctctagggtcgatcctcagaatcttcgttcccactttccacatcatagctatcactgtcaccagtatcttcagacaggccttctagaatcttcttagtaatcttctctgtatttgttcttgccattgactcaataaattcagcaatataaggatgtacagccttcttctcctcataaagcttcttcttttcagtcagcttcgtctcagcagcaatcttcttgtcttgaggcatattttcttcacaaatgttgaaaacacattctctaaatcgaggctcggagagctagagaactatcaagcgctattgagcaagagctata

SEQ ID NO: 69537 - DNA, 494 bp, Zea mays
  unsure (1)..(494): unsure at all n locations
acacttgaaactcagctntccaaaagtcttggatcactctntntggtgatctgaatattaagttatgtacgtttaaagtctgaagactgaatctgtccaattctggacagcaaagccttctagtgtcttttgtccttagttaaatattgaatcaccttgagatgtttataaatgatatgtagacaattttattacctttccggaaagtctatgatcaatttgtttggatgtctgaacctgtagttatgaattattaaagtcgcaagtctgaatctgtccaaatctggacagagctgttgtgtttacgcaattcggccttgctaagagtctaatcatgctgaggtaaaaatatcaaagttgtagaacactttntaaactttccagaaaatcctagtttcataattntgaactaatatttgaagagttatgattaaaacaaaaactactgcgctgntgtcctaaatatgttagaagtgattgatggctctactcta

SEQ ID NO: 69538 - DNA, 103 bp, Zea mays
tatgctcctccaaatgttcacatatatttgttcaaacattaacagatatgcggttagtgcacttccgcgaacgcaatgttatatgccacaactgctgtgaact

SEQ ID NO: 69539 - DNA, 459 bp, Zea mays
  unsure (1)..(459): unsure at all n locations
cttgaatgtgtctgggtgatttcaacatgattagataccggataatcgcaacaagctgggtggtgaccctattagaatgctcaattntaatgcggcaatcagtcagctgggtttacaagaaattcctctcaaagggcaaactttcacttggtcaaacatgcaacgtcaacctttgcttgaaaagctagactggtgctttgtctcgccagcctggtcttccaatttccccaccactttccgattatccagtacgcagatgatacaattatgattttggaagcgtgccctagacaactcttcttccttaaagcgatgcttaattcttttgctgactctactgggctccatgtgaattataacaaatctaatatttatcccatcaatgtttcagagcagaaaatggcagttctagcatatacgttccactgcaaggttgggtctctgcccttcacgtatctt

SEQ ID NO: 69540 - DNA, 483 bp, Zea mays
tatacgcagtagacccaatcctctccacaatgagaaaaggtcctaagtatttaaaagagagcttagcacatggcctatgaacaactgatgactgagcaaacggttgtaacttcacatacactttgtccccagtctggaactgtctgaaagacctattgttgtcagcataaaacttcatcttattttgtgccgcagccaaatgagttttaattacagccaaatgatcttgacgctgctgtaatgtcagtgaagcttcagattcagcccatgaaggaacaggtaacactcccatattaggctcaactccatacaaagccttaaatggagagcactgcagagatgagtggtagcaactattataccaaaactcggccgagtcaagccatttagcccacttggaaggcatgtcatgaactgcacagcgaagaaacatttctaaacactggtttaccctctcatgttggcatcagactgatgatgata

SEQ ID NO: 69541 - DNA, 281 bp, Zea mays
tgagctgcaacatgcaaacatgcaaagcacagcattgccttcttacaactacaaaccataccacacaacctggtctttcacatgctggggactcgatatgataggacccttcacgaaagcacacgggggatatacacatgcaattggtggcgaagattcaatcactcaatggaaagaggtcaagcccactgactctttaaccacgctaaggccgcggaatccatacacgacataatcttcataattccggataccaaacagcatcatcactgactcgtgat

SEQ ID NO: 69542 - DNA, 484 bp, Zea mays
  unsure (1)..(484): unsure at all n locations
ntctagtagtttagattcttcttgtaataggggaccatttgagggcctctgtcatgctggtcagcttggctgacacactcgtctcccttttactaccttcttctcggactgagcaggcttttgacctggttcattgtgacctctggacctcccctgtactcagtctttccggatataaattctatttggtaattttggatgatttcccattttctctggacttttcctcttcggttgaagtccgacacttttaccatgctcactcatttcttcgcctgggtctccacccagttccgtcgcccggtctgtgccctgcagtgtgacaatggccgcgagttcgacaaccatgcctccaggtcattcttcctaaccagtggtgttcagttgcgtctctcgtgcccctacacctctgcccagaacggtcgggtcgagggcatganttgcaccaccactaatatgatctgatgccttctcttccatgcgt

SEQ ID NO: 69543 - DNA, 327 bp, Zea mays
gcatgataagaatggagggtgtttattcgccgaacgctcttattacaaatgtgtgtatgtttcatgcatcgccgagaaataaactacagcagtttacatattcgattcaatgtgacatacacctaacgccacatatttgtgttattacacaaactcaatattacttccattgtttcatatatcagcatttaacaaatattattacaatacaaactactattctctaacgactttatctgccacttcggtcataagcttataaacgacttcgtcgtttatggagttcgccatgcttataatatccagagcttacttcacatctggatc

SEQ ID NO: 69544 - DNA, 214 bp, Zea mays
cacataaccaacatgccatcgctagatatccacattacatccatccttacaacctagaagacccccacaagattataaatccactgaacgagcctctaagctcttaccaggagaaccatgaaacactgacagactcatgcggagataatcaataacgactaacctgacctactaagaaaccactggctagctagaacccaccatgactcataca

SEQ ID NO: 69545 - DNA, 406 bp, Zea mays
  unsure (1)..(406): unsure at all n locations
gtcgcgccagcgttcaggggttggcgtggagcggatattttctatgaggtctggctntatacctagggcagagtccgagcatgtgggtgcgagtagcaagatctgcggcgaaaatcccggccgaggatttggctctcgccgcggcgatttggaatacggacgccgcggcacccagcagaggaagaaggacccggcgaacggtgcccaccggtcagcaacacgagtccgtgcccgcgcgcgcgatgaccagatcctggcggagggggcccgcacggcatggaaagaaaggaacgcgggcatgtgagcatggagctgaccgggtggcccattttgcagtgaagtgacccatgctgacacgtgggcccagactgcagcgaaacaagggggctgggcgcgggagttattc

SEQ ID NO: 69546 - DNA, 454 bp, Zea mays
cgcagcatgcaagcatcgcgggacacgcgcatacgctccctatcttcacctccgcgccgatgtccgcgatttgtggcactagcgcgggacccacaggtcggccactggacgcaagcgctccgtggttggacactcgttctgtacttctttccacctccgcgcaataaacgcgcgttgaccgaggttatcgtcgcgacgaatctcaccagttcaacaaaaaccatggggtgcgcttgtcgatgcggccctatcgccttctctgagtcgtgcgccatctctggttgtggacccgcacgcacagagctgactcaccttcaactgtcgcgcgacgcgagctccgcacgaatcgggcgccatttgtttcccccatgtaaacgaccccaggtggatttaacgcggccgcgtgccttcttcctctaaaccttagaccatcgtcgccacctatacctgttct

SEQ ID NO: 69547 - DNA, 425 bp, Zea mays
tgtgagcaatacaagttcagaaaggaaaaagctgcttcagctgttctctcgtaacccatgctcttatgtgaggatatagcagagcagaaggtgctattgggatctcaattgtccaaagagcacgagaaaaccttgataaggtttttgttcaacaataaagatgtttttgcttggtcagctaatggtctttgcggagttaacacggatgttattgagcactcgctcaatgttgatccatccttcagacccaggaaacagaggctttggaagatgtctgatgactaggccgctggtgctcggaatgaagtgaaaagactcatcagtgactgagctattagagaggtaaaatacccagaatggttggctaacactgttattgtgaagaacgacaatggtaaatggacaatgtgtatcgatgttactga

SEQ ID NO: 69548 - DNA, 483 bp, Zea mays
tatataaatctaatttcaaaatggttcgtacaacatttattctctggaacggagataaggagctgtgagtattctcagactcattattctaattccacttctaattccacgtgaatgggagtggattatggtggactttgacttctatagatttaaatcgactcaataccatccagtatagaactaatttacaccataaatcatcttaatctatgtggattgaggtgaataagagccttaatctatgtggatcgagtgaatgtatagaattaatttacaccataaattatcttaatctatgtggattgagacgaataagagccttaatctatacggttccgttgcaacgtacgggcactcacctagtactatatgatgttatcaagcttaagtacttataatatggaataagaattctagttctttataattctttctggtccatggcgttcatttctatgtaattaatatattaaactaaag

SEQ ID NO: 69549 - DNA, 479 bp, Zea mays
  unsure (1)..(479): unsure at all n locations
tgtcaacttaatctctctaagacaagggactcgttcctatcccttntcttatacattgagctctgtccctatcaggttcaatagggcatggtggaccgacactctctaatgatatgtagttataatcgtcatccaatttaagataggatatcttactcccattgttggagtcgccatcaccatgccgcgtgcaccactttgactgataatgaagagtgcgccacatgtgctctagcttgaagtcggtttcatcaagcttattgaggaagctcttcttggtcgtcgaggagcatagcgccatttgctcgctcagtcaagccacatacaagtggttgtatatgtcatcaaagagggtgaccttgcggttgcttatgaacaattgatccttcatttgcttggaggacggtggtgagaagcttccatagtggagttgtgtatactggctatttggtcctagaaaggtgatctcttcttgccat

SEQ ID NO: 69550 - DNA, 464 bp, Zea mays
  unsure (1)..(464): unsure at all n locations
actaagcttgccaaatggcgctaatatacctgtgaatcttctcgtttgtaggncattcttaaataaaaccattctgtcatccagtcgacgggccatctcttccgaaaggttggcacgggacaacttgacccggatcgagaaacgaaactgtagcagccaaaattattatggtactgttctttacccgaatgttctgttgcgtatgataattcgcgtatattgcagaaactttttgcatcatgcttcagaccttggcttctcacggtccacacgaagatattcagccttatgattgcctcggcggtaagttggtgaagatagacttcgaatattttcagcacctctacaacaaactcgctcaggggatatcagagtccagctttcaaaaagcttcggtacactacaacttcattctcttcagggtgtggacaagttntttccccttcgtcggccctcacaatgga

SEQ ID NO: 69551 - DNA, 413 bp, Zea mays
tccaagaattgtagataagtaagttgtctctaagggcatctctcttttctgatgccagcttcgctgcttgaagtgggacctctggtcttttcttccgttcagccacgtggatagccaaccggtttcccctattaagcatcttctctaagccatgacccatggttttcttgcggacattctttttgggcgcgacattggcaaataataataaaattgtgttattatagcagtaacaaatgtagatattaaatgaacaaaccaatgcttggaacatttattgtttacctggaactaagtcaccaactggttctccttcattcggattaccctctgaagtagcagcatcaaattgctcagctgactcattgatggcattgctttgcctagagctgtgcccacctggtgagttgtct

SEQ ID NO: 69552 - DNA, 498 bp, Zea mays
  unsure (1)..(498): unsure at all n locations
ttacgcgaacttagaaactcagcttgaaataactganatcagagagccatatatacacattatttgagattgccaagccgccgggtaagaaacacgtgatgatgggttaataattcatgtccatgcatggccagcaggtactaggtgatcgatcgatgctcaccacgatgccgtaatccagccgcctcttcttgccgttgagcagcaccttcccggtgaggaccacgttccttgccagcctccctgcatatacgaagatcactcacgcaaaatcaatgcatctctcatgcagatcatccatgccttgacgaacgaatcgaatcaaactagaaagccatcatatatgttatttttatttaaggcctctcaaaaaaaagctcagataaatggttttgattacttgacgggccattggatgacagtactagagcttggtcgtccaaattaaatagcccatggaggcacgcacggctataggagagctggatacgtacgtac

SEQ ID NO: 69553 - DNA, 465 bp, Zea mays
ggaccgttgtaagcattgtgaagcttctagatatgtcgaggtgacaattgatgatggtgaatcggtagttacgaaggtcgcagctaagcaacttcgtcggttgcctattattcctcggctttcaaggctgttcctcaacaaggaaatagctctgcatatgacgtggccaaagaatggtgtacgtctcgtcactgatccagacataatggtccatccgtcggacggtgatgcgtggaaggcatttgacgagtttgatcccgaatttgcaaacgaccctacgagtgtacggcttggtctatcgacggacggattcacacctttcaataccagtgcaagcccttactcgtgttggcctgtcttcattgtgccatataatcttcctcctgagttggtcaataaagaagagttcatgttccttgcactagtcatcccaggccccgagcattcagggccaaagctgaatat

SEQ ID NO: 69554 - DNA, 489 bp, Zea mays
  unsure (1)..(489): unsure at all n locations
tcgtaacaagatagagcttcggcaaagttaaaaaatttcttcttcgttcgaaaaacaagaaattcaatcatcagatggccagagtacgttcaacagctagggttaatcgcgacggagtggaagccgaaggtgccgaaaccgctccaatctctgaagtgatgaagcgttcagggttagtagtatcgaaggatgcacttgccgctgaagccgagcaggctgatgctgaggaaattgaatctgaagatgattacagcgccgtgccaactaaacccagccacctggagtttgggaaatccaccatttccgaaggtgatatgactaagctgatgaatttgggatattttagtgaagcaaagaaggagctggttcatttcggcggggaaggttcctcttaccttanaagattctctcttatcttanaagattctctcttatcttaatagatccatcttatcttanaagatactcccttaccttaatagactcatc

SEQ ID NO: 69555 - DNA, 487 bp, Zea mays
  unsure (1)..(487): unsure at all n locations
tcttccgaagaccacccagaccactgcaatagatgtgagatatatccagagatgaattggtgataatgccacaatcatagagaaagaaagttcaactttctgtcagggtccggactgtccgcgctaagggtccgaacggtccgcgcccacctggcggacggtccgcgaccatccaggggtgatttttcaagaaccctagtcgccccaattactcaaacattgattcggcagataataaccatccaaagtcgttcaaaattttgcaccacattcacaatgagtagcactaacaatcccaccaatcagatttgtgaatctattgctcaattctagatcagagagaaaatccgaagaatccccatatttgaagaaatgtgatgaaatcaatgagattataaaataccgggatgaagacatgtntgttgaacgtcccacatgcttccggacagtccgtgcgcaacgttacttcaccgtccgcacacaatcg

SEQ ID NO: 69556 - DNA, 484 bp, Zea mays
ggagcaaggctcacggtctcaccaggaagctatctggtggcttgaaccgagcggatggggactggagaggggttggccaccgcggtggctcttggtcggcactggcgggctgcggagaggtcgccggaggcaacggctggctcgggcgagtccggcgaggtacggagggagcaatggggaaggcaaccgagtgctggggcgggttttatagacgcggacgcggccggggcgtcggttcgaccgtttggcgcgacgcgggcacgcggtgcgcgcgcgggcgtgccctggcgagctcagagcgcgtcgaacacgtggcgcgttacttctgcccgtgctcttcgctctgctgagcggccaggcgtacgaatcttgccctaccgcctgtgggagatctcttccctgcacctatggctacctagttcatgtaagttccaagagtagatgtggtctggttgaggagatatggtagcgccaagtcttgtct

SEQ ID NO: 69557 - DNA, 319 bp, Zea mays
aactgaatcactattcagtttcaaatctgctctgccagcggacagaacacaccaaccacatttgtaaaatcataacctttaaagcgccgcgcccctagtaatgaaaatttaacaccaagcaatataagaaaagcatctacaactttcttataatctacaaggactgattcaaacattaacttacacaaacagtgcggttcctgaaaactgtatagaatttggacagattcaggtaccgaatatgtaaaaagcaaaactcctaaacgacaaacctatggctgccaattttacacccgccggataataaggtatctacact

SEQ ID NO: 69558 - DNA, 476 bp, Zea mays
  unsure (1)..(476): unsure at all n locations
tccaatctccttaagtgccacaattaagacaagtgatcattattgattagtgacttgagagagtgtgattcgtttttcatttgttgctctgcttgcttggctttttaaatcgtgctttcttcatctccttctaaactctctaagtgacttgtaaagctaccaagagacacctaagtgtgtggtgatccttgcgaggtctttgtgatccttgagattaagaagaagcactcaatcggtctatgtgatcgattgatagagggaaagggttgaaaaagacccggcctccgtggcctcctcaacgggaagtatgttcattggaaccgaacctcgggaaacaaattgttgtgttcatttgtgttgatcatcaccgatcgatgtgattcttcccctccctctctctaagttctcttgctcactatcttttgagttgagctccacagttatccgcattcattataatnntgttctaatactaa

SEQ ID NO: 69559 - DNA, 407 bp, Zea mays
gcttaaaggctaagacttgcatgggctgtgtgtggcatcgccgcttaccacatgtggagatgaacaacctgcacaagcttctaacgggagaacacgtgataggtctatgccaatgctcattccgaagtagatagaccttgtgctgctcgtcaagcatggaaacaggagggtggctctgatcacaccaaatatgtgaggacatcatcgagacccctggacctgctacatatggacctcttctgacccttcacctatctaagcataggaagaagtaaagctggtacatttatagttgatgactgctcccgcttcacttgtgtgtactttctgcaggataagtcttatacccaatgaaccctcaagcgcttcctcaggagagctcacaatgagtgtgagctcaacgtgaa

SEQ ID NO: 69560 - DNA, 372 bp, Zea mays
agctccgcacttgatagacaatttgtcttttatgattgatattatatcagttctccagtcttcactgtgtactggagaaatagtaagcactgctctctccatgagctcaactgaaggtgctcttattgttcataaaatacttatagggtatggggatcccgtgagccgttgatatggctagcaaatctgcatgctcattttcacctcttggaatattcttgacggaaaaaccttcgaaggaagcttccaacctctcaactgcatcataatatatttcaagctttggatctcgtgccttgctgcttttatccacatggccagcaataacttgagaattagtctttatgatggcccttcttattcccattgccc

SEQ ID NO: 69561 - DNA, 486 bp, Zea mays
ctgataccagctatggcggaaccgccggaattatttcaacttaagtgcctaagtcccgccttagaggcttgaccacacttaaataggaataaaacgtcagtccctcggatctagtccgacatggccactaacaggatcaagtaccacgtactcactcgaaggtgaggcacagagcaaatacaataaagcataaaaccatacattaaagaagtacttcaaattattacaacatcatcagagttttgcaaaagtagtggtcgttgttcggaatgcagcgaaaatcaactaacgataagtaaacggagggatggggaagcctggcccatcactcctcatgctcctctcgtgcagaggaagagtcccactcgactgtccaacccggtggcaagatggacggccaagtcactccagcaaccatatcctccagagaacctgtaaaataatatgccacaagcaaggctgagtatactaatactcagctagact

SEQ ID NO: 69562 - DNA, 367 bp, Zea mays
  unsure (1)..(367): unsure at all n locations
tgcagcatgaagctnggcactcaggagacatatatattacttcacatgcgncgggaatgaacgaaagagctgcataatagatatacactcaagacgaccaatagcccagcaaattgtaatagatgtacagcaaatggcggacgcaaaagcggaaagaaaagataacacttgctacatgtgctctgaaagatgagtatctaaccacctaaaagggtcggtggatctctaccatattggaatacacccatgcaataagccccgtcaacttcggagtgcttcatttcagaatgtaggaaagacacacatacatagcatgagaaaacatcaccaatagacaaattaaacaaacgtcatctcaaccgcttaa

SEQ ID NO: 69563 - DNA, 484 bp, Zea mays
  unsure (1)..(484): unsure at all n locations
tcctanatggatgagctcaggcgagatggatcttaagttcctattatcaataaaactcgaagattgcacctactgcgagcagctccccgcattgggccatctcctgagtttagatttcctgctgatcaaacatgcgccatctattatgagaattggacacgaattcttttgcagcagcaatgctacacaaatagaccctcggatgctgttcccaaggctggagaaacttggatttgataggttggatggatgggaagaatggatatgggacaaggaacttgagcaggcaatgccaaacatcttttctctcaaagtcacaaaatgcaagctcaagtatttccccacagggcttgtgcatcaaaccaggaccttgagagaattgatcatatctgaagcttgcaacttgacatcagttgcaaactttctcctcctcagcgatctgcatctccatgccaacccaaatctcgagatgatcgccaatctc

SEQ ID NO: 69564 - DNA, 452 bp, Zea mays
cctgcagctgcagctgcaaccaagagccattcttcctttttttctctgccacgcgatattcattcaacggtccacgagccggtctccagttacttcacaagacaggagtgttctagacgaaaactgtgtcacgctctatatattaatcgtgacgcaaagcttgcatacctttgagccacgtcgttccttcatccctctgccacgcgattttcattcaacggtccacgagccgacctccgtttacttcacatgacaggagtgttctagacgacaactatgtcacgctctatatattaaagcgtgacgcaaagcttgcaaaccattgagccacgtcgtccctttttccctctgacacgcgatcttcattcaacggtccacgagccgcgctccgtgtacttacaagatatgagtggtctagaccaaaactgtgttacgctcgctactagacatgg

SEQ ID NO: 69565 - DNA, 449 bp, Zea mays
tagcctgtgtgtcagtgaagtatttaaccatgtctctggtggtggtttgcctagagacacgcgcaaagtgaggattatgtgcaggtctaatgtaaagttcaaatgcagcattttcacccaaactaataggaatttctagcctagcaagcaatcgaaccaattcattacgtgcaaccataggacagtactcccaattacgcatactaccatcaggattaaaagatatctgagactgagacatgcgggttttttcacgcctcctgagatatctatctctatgtcgggtcaggtggccagtgccaccactagagagagcagaatattgcttagagcaatgtatgcacttagctgcaaaccttagcttcttaccattcacgggtttgaataatttctcgatatctaaccacactgcagaagtagaaggacgacaacgcttggaactgtgttcg

SEQ ID NO: 69566 - DNA, 464 bp, Zea mays
agcttatatctatctactagacctattttttttgttaaacccctctgtccactccatttaagttaatcttaccctttattctaaaatatgcttaaggataaagaagataaaaaatgcaacttaattaatgaaccacaagtacttctatttttgttaagctacttattcaatatagttcactggaaaaatgtatcataccctgttttagtacaaattaacgaggatatcttttattttaataaaacaaggattacttataaaaaacctacaaaaatgaccccaacgtaaaaacacccccacccttgggataactattgttctatcagagagaacttacgaaaaataagaaatctgctggttgacatctttcacataataatgtagtagagagtgcctttttgacattaaacttgagaaatcataactaaataaccaccccttagtttcctgtgatatttagcaca

SEQ ID NO: 69567 - DNA, 470 bp, Zea mays
  unsure (1)..(470): unsure at all n locations
ggctgagatcgcanacgtgcgaatcttggcatatatccggcgcagacctcttcctagcacctagggttgtctcttgtatgtgagttccaatggcagatatgccctatgtagggagatttgcggacaccaattctgggttgtctcactgttcaccccgagacaaaagtggtgtcaaatcatgtcaacgaatttggctcgggttcaaatttttccagtgggttccttatgtagtttggctcctttttggtattcaggccaagtggttttggtgccatttactaagtgaacacgtctgatctttaaactagggtttagttttgacttatagaggattagagagctctagtgtgcttgctacttaaggaatgtatttggggtctttaaggagctttttttaatgtttcccctctgcattntgtagattataatggttcttaaactttggtaangggtaactcatgatttgcaca

SEQ ID NO: 69568 - DNA, 247 bp, Zea mays
actaagcacgcgcgcactctccggaccttttttttaaggcatcttcctttgtgtgcaacttcttactctattttttggcttgatataaatcatgccgcaatgagctaagagatgtgtacacacagctagccggaaatgacatcgatctggcgaagagtgtggattagttttccaccctgacagtaaatgatgacatcctaattatgaacaaacaattatactgaagctattccttagcttctctgcc

SEQ ID NO: 69569 - DNA, 452 bp, Zea mays
  unsure (1)..(452): unsure at all n locations
tgttagaaaacagggttgtgccagtgacccaggttacatatttgcttcaagtgtcatgtagaatcttgattntgccaactcatgatcttgcagaaccaatcaaacagtattacgaatttatctattccccagcttcgctggccattttgccgagattgaaaatgctaaatacaaagcaagacatctgttttgagtgaaccgaagaggtcatgggtttacatcagaatgatcgcatattagtttgtgtcccatactcaattgccagttgtaggggagggtggtggtcatgtttttggggttatatgagagcgcataagaggtcactgtgccggtgctatatgccttattaggagtactaccgtgtgaaacctctggcagttgttgcattgcagctgggagctcttccttggtacttatggntgaatctgttgcccattccatagctcaatgaa

SEQ ID NO: 69570 - DNA, 264 bp, Zea mays
acgagcaggcagcttctaaggaaacacggaaaggctaaccatgttcttttctaacaagaaagaccacgcgcagcttgtcaagcaaggaaacacgtgggaagctctcatcacaccaacaatgtgaggacaacatcaagacccctggagccgcacataaggatctcttcggacccgccgcctatccgagcatacgaggaagaaaggatggctcagccaatgcagatgacctatcccgctcaactagcgaggcacttttgcaagaaa

SEQ ID NO: 69571 - DNA, 408 bp, Zea mays
  unsure (1)..(408): unsure at all n locations
tctaaagggagagncacatttgggactaacaaatgttcattttgagaaagacaggatttgtagcgcatgccaagcatgaaagcaagttgggtctcatcatccacacaagaacatcatgactagtgacaggccactggagctcctacacatggacctattcggcccaatcgcttacataagcatcggcgagagtaagtactggctagttatagaggatgattatgctcgcttcacttgggtgtgcttcttgctggaaaaatcgcatacccaatataccttcattggattcttgagaccggctcataatgagttcggcttaaggatcaagataattagaagcgacaacgggacagagtgcaagaactctcaaatagaaagctgccttgaggaggagggcatcaatcatga

SEQ ID NO: 69572 - DNA, 468 bp, Zea mays
  unsure (1)..(468): unsure at all n locations
ctaagcttaggatatgctggttaccagtttccaaggctttcaaacgataccagtcacagctcatgccctgttccaatgtacgcaagaccacgaagaatacctttaggcatatgtacgaaggttcttgcgactgagggcacaagcacctacagtgcccaatgaaattgtcattgaggccatgatcaagggtcttaagctaggacctactgcttaatatttcgccaggaaacccccacaaactctggagaagatgcttcagaagatggatgagtacatccgagctaacaacgacttccgccaaagaagggaggaagcttacagattctcggaaatgaccaggggcttcggaggaagaattcatccgaggcatgtcaggtcaatccataactccactcagagtgacgacaaaggaagtcagcctcagatgtcacaatacacctcacaatcttcggngcagcatcaaatctc

SEQ ID NO: 69573 - DNA, 279 bp, Zea mays
tctagagggagaacatgtgaatgtttaactaacgtgcaattcgaaatagatagaccttgtgcagcttgtctgcacgtaacaggtgggaggagctctctcacaagactgtgatgaccatataagacccctcagctgctacatatagactcttcgacccgttcctattaagcatagatgaataagttggttagtattgtgatgactatcccttacttggtgtcttttgaagaaagatgaacctaggacccttgcgttcttagagagctaaatggttgactc

SEQ ID NO: 69574 - DNA, 446 bp, Zea mays
tataagagggaccatgagataggcttaactaacgggccattcgaagatgatgtacctggtgcacctcgtcacggctgtgaacatgtggaaggacctcaccacgtgtagaatgtgttgaccgcgctttgtgggctcgagctgctacatatagacctgtttgaacgcgtcagctatctactcatcagtagtggcttgtatggtgtaaatgtcgatgatgacttctccagtttcactcgggagtacgacttgcacgattaccctgattccgaaggtgacctcatacgctggcttacgagagctcctacttatgatgagctcaatgtgatcatgacacagagcgtcgacaggtccatgatggagaacctgcaagtggacgtatgacttgaggaggaacggatccagcacgagtccttcgttccctacacaccccatactaatgatgtggt

SEQ ID NO: 69575 - DNA, 359 bp, Zea mays
  unsure (1)..(359): unsure at all n locations
acctgaggctgcaagctagcacacacagtgacaagagctattttttgttttcgggagtggtaggacataaagcgtgcataatgagtttgcggtatggccgtatatatacactccgtgcgttgaatattgtaagaccccacttgtcattgaatgttgtattctagcacagggaaggtgttttttcggaccttctgcgtaaagccttcgtccatattgcaatctatatttattatttctaacaaattaatattgccaggggctactgttggggaccattcgtcgtctaaggtcctcaaaaacatgatttaacaatattttgtntacaatgtgtgaaacgtacctcgactaaagcatcattc

SEQ ID NO: 69576 - DNA, 477 bp, Zea mays
  unsure (1)..(477): unsure at all n locations
tctagagggagaacacattntaggattaacaaatgttcattntgagaaagacaggatttgtagcgcatgccaagcatgaaagcaagttggcactcatcatccgcataagaacataatgacgaccgacaggccactggagctcctacacatggatctattcggcccgatcgcttacttaagcatcggcgggagtaagtactgtctagttattgtggatgattattctcgcttcacttgggtattctttttacaggaaaaatctcaaacccaagagaccttaaagggattcttgagacgggctcaaaatgagttcggcttaagaatcaagaaaataagaagcgacaacgggacggagttcaagaattctcaaatcgaaggctttcttgaggaggagggcatcaagcatgagttctcttctccctacactccacaacanaatggtgtagtggagaggaagaatagaactctattggacat

SEQ ID NO: 69577 - DNA, 468 bp, Zea mays
  unsure (1)..(468): unsure at all n locations
gcatgcaagctnggcttgaccacacgagagcatgcgcttctcttattattattcaatggaccaaaaacaacgctaagttcatggtcacaacaatatcaaacggtgcatttctctattggctcttaccatgactttgctgatttcgatgtggtgagttggatgcttgctctctcttactgggacgtccttacgagtttgatactgatgctattcaccatggtagatctaatagatatactctcatgcataacggaaagaaaaatgtgctgcttcctatgactcccactgaaattgcccactttgaacatgagactaagactaatgctacgccaaaatgtgtcttgaactctcgaaatcagccacctaataatgtcaacacccctactttgctagccactaaatctgatcttgatgagtacatgcctctgttggactttgctatgctcttaagtgcaaaatatttcattc

SEQ ID NO: 69578 - DNA, 478 bp, Zea mays
tactaagcttaacatctctcgggatacttcggatattgatgcgataaatggttattcttcttcacgaagcatgaaaagaagggaaggtgttttttcgccagactcaaaaatggtacgtatgtaaagtttcatgcatcgtaaagaattgaaccataaagaaaaataagacaaatatattacatacagcactacaatatattacacatgctacatttaaaatgtttttacaatagcatttagtcctctctaagtaccacttctgcagcttcgttcaacagtcgatcgacaacttcatccataatagcttcagccatctttttaatttcatcatcacccctaggccgagcacccggagatacttcagtaggatctgatgagggacgggacacagctacattgctattacaaatcgcaagcagatcttatagtctaaagattaccacacgatagaaactattatgtagtacctagctgacct

SEQ ID NO: 69579 - DNA, 430 bp, Zea mays
  unsure (1)..(430): unsure at all n locations
ctgaacaatgatttgtgtcaacatggatctttcaccaaagaccttatccctaacaataacacaatcaaaatacaaggtcaacaaagcaaacccatcacgactctgaagaaagctctgaaggagtatcgcttctggtatgtacgatgcgtttctggtattacactcatttgagctaccatnttcaatcgtctggtggtgtcgttcacatgggcaaagagaggtaaggtaatttcgtgcagttgtaactttctcttgccactcacgtgactgttgagatcgatgtaaccgtaagaacttctctagcgccacaagttgctacaagtaagtcagtgtgaccgttangcttcgattgtggccatgtctgtcggagcccggatgggatatgtagtcacttcactttctctgactagctctagcaggtcatgcatgt

SEQ ID NO: 69580 - DNA, 413 bp, Zea mays
ggtttccttgagtcttaggcgagaatgtgttagtttcgttgatactacttatgcttcttagtgtattatatggtgataatgcaaaattagtgcttccattaatatgaatcatttagtatcttctgcgtttatcctgtaatagatattcatgtggttctggtgctttaaaatcgctcaatttggtatatcaatggtgagaagtgagtggatgttatcttcttggtatatctactctcccgtagttaacttttaattctgtttatcttttagtcttacccagtactgatttatttgtgatctatgcttcctcctgtactatagttagactagcttcgaattacctaagtatgtgaatctggcattaatgccatgtctatttttcgatgtatctcatatttatggggatcattcta

SEQ ID NO: 69581 - DNA, 415 bp, Zea mays
  unsure (1)..(415): unsure at all n locations
ccagcccatgttagtcttagcaattaagcaagtgtcgagttcagctctatcaaaatctaccaagtatagctgaccctctaacactcccttaatgctattgaatcatcacttcttctaaagacagtgacacctacatcagtaaaaagacagttgtagcccattttgcataattgagatacagacagcaaattgtaatctacagaatcaacaagaaaaacattggaaatggaatggtcaggagatataatattntacccaaacccttgaccaacccttgattccatccccgaatgtgatagctcgttggggatcctggtttttctcatacgaggagaacatcttcttctcccctgtcatgtggtttgtgcatccgctgacgatgatccaacttgaacccccggatgcataaacctac

SEQ ID NO: 69582 - DNA, 388 bp, Zea mays
attttcaatgatctatatatccaagattgacccagatatatctagaattatcatatctaaatactcatactcatctgggggaagatagagatgttgcacgaaataaagaatgatcctataccgaaaaatcaatgcctacaacatgtgtgaaatcaccatgatggtatcactgtctctaagtgcgagtatcttccaatatcatttccacttgcgtcctgagtagtccgtagattagggatgctcttaaagaaagtcggtaacttatgctaccattctttggaagaagttactctcatatggtagatcgcatattaatcatttctatagtatggcaatctacatgctttatactgcttaactaccttatggcatgatctacattaattat

SEQ ID NO: 69583 - DNA, 442 bp, Zea mays
  unsure (1)..(442): unsure at all n locations
agctntcaaagaattatgtgaactttatattcttatgattcattctgcattggtcagacatacagagtcaaatggacttgttgaaagagctaatggcattataatgacgggaataatgaagttaatcttcaatcatcctatagaaagtggccagatgaattgatcaaagtggtgtggagccacaatataatagtatcaaggtcaacaggctttacaccattcaaattactgtttggtgacgaagcattaacccagaagaagctaaagctggatcactaagaacaatggcttctgcagaagacgaagctgattggtctgtggcaaaatatgctatataagggatcacgcttcaggcagtggagaacatcaataaatatctagccgaatcaatatagtggcgtgacagaaaagtttggcttaagaacatcaagccagcgcattt

SEQ ID NO: 69584 - DNA, 319 bp, Zea mays
  unsure (1)..(319): unsure at all n locations
tgcgatcggattcactcacgagcatgtttatggtcatgcacttgtgcgcctgccgncgctgtcatcatgatgatgtcctcactcctctgaaataactctgatgcgtcacttttcgcctgtaggccaatacatatggccacctttagacctttccgaatagtgtctatgatgctgcagtgtatacagatagtcgtgtggataccttctcggtcacttgcgtgtacttgatagaaggcacttcatgaagacgccggacgctccccttctgtcttatgagagctcaatgagagtgtagagctctaactgtctagagatgcgc

SEQ ID NO: 69585 - DNA, 439 bp, Zea mays
  unsure (1)..(439): unsure at all n locations
agctngngaagagtcttcattccaacatgttctattctgcggngccacagccaacccatgttagtcttagcaattaaacatgtgtcgagttcagctctatcacaatccacttagtatagctgaccctctaacacacccttaatgctatcgaatcatcacttcttctaaagacagtgacacctatatcagtaaaaagacagttggagcccatttgacataattgagaaacgcgaaagcaagctgtaatctaaggactctacacgaaaaacattggaaatggaaaggtcacgagatatagcanttttaccaagacctttgtcacaccttgatttcatcctcgaatggataactcgttgggatcttggttttctcatatatgagaaatcctttctccctgtctgggtttggcaccactatcagtatcaactgagccccggag

SEQ ID NO: 69586 - DNA, 458 bp, Zea mays
  unsure (1)..(458): unsure at all n locations
tgtgagcaacatgggagcgaaaacgaccctggttgttgtgttttgctgcgcgtangcggtggaactgaggacacaaatagtgacagcgacattcatcttcctgatgatgtgtgtgtgccttacagtgggagtgacagtgatcttgacaacctaatagactttgctttcccaaatctcaacaaaaatatgtctggttccacctacatcacttcaagggcgatactgtcaacacggaacgatagggtggatatgataaatgttaagatgatcgattgttttcaaggggagcatatggtgtaccatagtttcgatagcgccatggatgatccccataactactacccacctgagttccaaacacattgacgcctaatgggctgtcagctcatggtttgaagctcaagattggatgtcatgctatattgctccggaatatagacccagcatatggactttgc

SEQ ID NO: 69587 - DNA, 452 bp, Zea mays
  unsure (1)..(452): unsure at all n locations
agcnttcgattcccgacgctagaagatggtttttctgtgctatcgaaagatgaactggctgatagcttagcctataatagcttaaaggtatgagactgaactatttgtattaaaaaaccaagattatttttatttgcttaacttagtatcacacttctttttgcagggtctgattcttagcaacgccctcagggcgcaaaatagtgctgaagacgaaggatgcactatagctttgaacaaccttcattccgaagtaattgaactaaggaacaaaggtcttgacaaagataaaatattaaactcatcgctgaataaaatataagaagacgaatctacttccaaagcccaagctgaagcccacaagtgcgaaattgaagatcttcataaacagctggttgaagcgaagtttaaatgtgctattgtcgaagctgaccgagacgccagtgactact

SEQ ID NO: 69588 - DNA, 326 bp, Zea mays
  unsure (1)..(326): unsure at all n locations
tctacctcgcgcaacgttgtggcttatatgcgatgctcccagatctgctttccttcatactgaagcatgaattgagtggaatgagctcattctctagatgctctacctgcttgctgtgtgcatgcttgatgtcttcgaccatgcagtntcctcacgcctgtgtatatatgagataatgtatatacccgcacaagcattgagttaacgagaccacagcacatatacgacgtggcgactcataagatataatcctaacttctctgcgtctaggcagctacttaagcccaatgccggactatttgtgctactatactgagaatctaatg

SEQ ID NO: 69589 - DNA, 478 bp, Zea mays
aagcttaagagggagaacctgtgataagtctaaccaaagtacatttataattttattacctcgcgcagctggggcgagcagggatactggtgggacgatcacatcacatccagtatgtgatgaccacttcaagacctctggagctgctgcatatggatctcttcagacccgtcgcctatctaagcatagggggaagtaagtatggtctaaatatagttgatgactctctccgctacacttgggtgaccttttagcaggattagttcgaatcccaagggaccctcaagcgcttcctcaggagggctcataatgaatttgatgctcaaagtgaacaacataaggatcgactacgggtcctagttcaagaaccttcaagtggaggatttccttgaagaagaatggatcaagcactagttctccgctccctacacaccacagcataacggtgtggtagagatgatgatcatgacgctcatcg

SEQ ID NO: 69590 - DNA, 433 bp, Zea mays
agcttcgctatggtataatttttgctttatactgcgcaatagcaacgaatgtcgtggtaacttcacacctacctgtctgtttatataacgctgcacgtaagaatgtgaatcgtcaggattattacaccaggcaatagttgcttgcacccgctgcatggtgggaccgctacgcgctcgaaaacttgatcgtttctcgacaacgagctcacggaaggtgtttttcggaccttcggcttactgaagcctaagagacatctttcacggatcaagctcgttacgaataacgatctatcaccgcgaaggggctactgttgggaccatgcttcatcgccgaaagtcctgcagaaagaaataacttccgctgaagctgctcgtccgtgacgccgtaggcaccattcatgacgcttctgtattacatcgtattcgaagatga

SEQ ID NO: 69591 - DNA, 428 bp, Zea mays
  unsure (1)..(428): unsure at all n locations
actcagcttgtacagagccgaagtgttagcagagagctttggttatctattaagagaggaaccgacttagagatganaaggctattcagacctcgatagactactatagagttattatcaaatgtaaagggcatgaatgtaattttgtaagggctgtgtcccgtgtctataaataggtgaacaatatccccgtactgttcacgttgacttggcatttgcttttgcgtcacacttgtattttcatctccttccaagccgaaggtacatttataattcgatattgtctctatttctctatgatgatataaaaaagttaaatgaatgatgttatataattattcgtgctatcttttatgtntcatatgttgcgtctttcattaatatatactgtgatgatgaaggttcgtacttcatgaccttcgtgcgga

SEQ ID NO: 69592 - DNA, 346 bp, Zea mays
cgcagctcagcatgccactgcatctaagtggcactctatattttctttgcccggctgatggcttagattaccttacgacacccatttgatgatcaacctggacttattgatgggccactgcgtggagcctggttcctccatcgtgactcttcgtattgtgcaacactcactacaagaaactggttagagaacgtggataaaaaacctgcaaactttatgtaataagcccgcgaacttaccgtaagaaccgtggtttaccgactaatatagccgacgaccattcttggacgaacttcatgaagtaagtacgacggccctcatgatcataaagctacgcacgtgggta

SEQ ID NO: 69593 - DNA, 486 bp, Zea mays
  unsure (1)..(486): unsure at all n locations
tctaaagggagaacatgtgataggtctaaccaatgttcatttcataaaagatagaccttgtgcagcttgtcaagcagggaaacaggtgggaggagcgcatcacagcaagaatgtgatgaccacttcaagacctctggagctgctgcatatggatctcttcggacccgtcgcctatctaagcatagggggaagtaagtatggtctagttattgttgatgacttttcccgcttcacttgggtgttctttttgcaggataagtttgaaacccaagggaccctcaagcgcttcctcaggagggctcagaatgagtttgagctcaaagtgaaaaagataaggagcgacaacgggtccgagttcaagaaccttcaagtggaggagttccttgaagaagaagggatcaagcacgagttctccgctccctacacaccacagcanaatggtgtggtagagaggaagaacaggacgctcatcgacatggcgaggac

SEQ ID NO: 69594 - DNA, 179 bp, Zea mays
ccgcagcagcaactcgcaggcaaacaaagcagaaactttctatgcagaagccgggtactcacccaccgcagcaaaaagccgagaaaaggcaaacccaagtttacaccagcccacccctggctcctggcggggccgcggacaacagaaacaccgcaagggggacccgcgcgcgctgggaa

SEQ ID NO: 69595 - DNA, 482 bp, Zea mays
aaaactaagcttggtcacatggctactaaggatatgtcaacaatgccctcttttgttctatagctcacatgtactggactgagtgacataaatgtaattcttacgacattgtacctcgatactaaaaatatgtgtacaataccatgcataagatacaccttttcgtggttgtgatctgttttgctctgcctacatagctatactttattcactgcttattctacctacaaaaggtatacttggaactgtatatgatgaagaagaagcaataacattagtatagttgtaattatcttttcttagatgccctcatctagatcaaaaatttcatcattttttataatcttctttatttaatctatcttttgaatagattagaggaatggaggtccctggtcattaattgtgtgtccctattttggtccctttagggaaccagagtaggtgaccaacattatcacccacctgctagtgaatccacg

SEQ ID NO: 69596 - DNA, 471 bp, Zea mays
  unsure (1)..(471): unsure at all n locations
acctgcggcatgcaagcttcngcacagtgacttgtctcaagacgtatgagtttatcttcttanagatgaaatgaccaatatacccatgatagtttgtgtcatgattgtaatcaattgttaagggcataaatgtaattttacacaggctgcgctctgtgcctataatagatgaacagtacccctgtactgttcacgctatcttgatatcgttcgcgcgcaacacttggatttatgccttctatcaagccaaaggtataaatgtaattaaataccgcattttaatattcaagttcgtataatgataatatttaaatgatgttatcatatgcttatttatatttatctttcatggtatatatgtatcatctttcatctttcattatcttttaaccataataatgaaggtacgtccttcatgaccatcgtacgaagatcgtttatcccaaggaaattatgctcgaggacgaagat

SEQ ID NO: 69597 - DNA, 413 bp, Zea mays
aattggtaccagatcaatagtacttccttccaagaggcattctttcaattggtaataatatatcctattgaaaggaatgtcaatatgaacgttaaattccttttgtcttaaatgtataaattagtgcaaattgtgaattcactgctccatgtgcattaacttaaaacgaatttaatttatgcctttacgccacataaatgatgatttgtttgccattcatatatatatatcatcattcattaaacacttccttgcactactaatatctcttttcaaagtgtcttattcgctagctttaaaaggaacagagataacaaacaacgaagtctccacaaatgatgaatagaagaatactatggtgacaccaccactgatactcagatctgtcataatgctataacaaaaggtacatt

SEQ ID NO: 69598 - DNA, 298 bp, Zea mays
ccgagagtgctacatgctgagtcaccagatgaagaagcgcgaaacgtgcagtgccacgacagtaatagcttgagcgggttccatggacattgaaaaccaactagctatgctgatgcgccgagaaattcaaggtcctgcacgtgagttggacatagctcataaggttcctctatgccataaggttgacccatatatatctaccctggtctgcttgctgatagcaaccaatgaacagtgcctgctgttcacatacatgggacaaaccttgaaccagaatccgagctgtctagaaatctga

SEQ ID NO: 69599 - DNA, 343 bp, Zea mays
  unsure (1)..(343): unsure at all n locations
agcatccatcganagcgacgcagacggaagtaaactatttgtaagtcttccacgaaaactaccgagttcctcgtttagataccacatcatctacgcacgcattcacacgctcgccccagcgatcggcaaagcatgtatgaatggtctctgataagtcgctccaacattcttgatgccaacgacatcgaggtataacagaaagcaccgaatggagtgatgaacgccgtcatttactcgacatcctttgcaaactaatctggtggtatccggaatagcagtctaagaaagacagcacataacatccagcgggggagactaccacctgatctatcctacggagccc

SEQ ID NO: 69600 - DNA, 285 bp, Zea mays
tgcggcccactggcttcggtggcgtgttgcagggaacctggagattctccacaaaccaaggttatcacagccagaattatcgggcaatccatcttctctagcctgtgtggataaggtatctcgagaaccgcgcagaacctgtgtgaagtggcacacggttggttgcgaggcgcaatataaaaaaaccctcacattgcgtgaggggctgctgagaaaatatattccgaacctcttcagcacctctgcgataataccgatgggggcgaaccttactccagtcttaga

SEQ ID NO: 69601 - DNA, 238 bp, Zea mays
tgcagcatgcagcttccgaagcgcatggcgttgtctttttctcggtggaggacacgggggacgctctgcctttactcaacgcgaggactaccccggcgtgccttacgtggggcgctaaggacgttgaatcgctcgacatcgacgaaacgcggtctaacgcttggcctatagtgccccggcttcatcttcgttgtggggggagaagatggggcaaacccgaatgtggctcttccaccac

SEQ ID NO: 69602 - DNA, 461 bp, Zea mays
  unsure (1)..(461): unsure at all n locations
ggaagccatggtaagtagcatatgctaataatatacttattgactcaagcctacctacgggtgcgtaggtttcactgaaatccaaaccttcgacttgggagtatcccttggccacaagtcgggctttgttccttgtcaccacaccatgctcgtcttgcttgttgcggaacacccacttggttcctacaacattntgattaggacgtggaaccaaatgccatatgtcattcctagtgaagttgttgagctcctcttgcatcgccaccacccaatccgaatcttgaagtgcttcctctaccttgtgtggctcaatagaggaaacaaaagagtaatggtgacaaaaatgagcaacacgagatctattggttacccccttatgaatgtcgccgaggatggtgtcgacagtgtgatctcgttggattgcttggtggactctngggtgtggcgagcttgagtcttca

SEQ ID NO: 69603 - DNA, 383 bp, Zea mays
gcccaataccgttcagcaagctcgtcttgcaggcatctgacgtcagctagcaactcatttatacgctgaccgtcttttgcccatacctatcttggtgacataactccggccgaagcttgtccacttgggcttccaaatctccgattggatcgttgctgccgctgctgctcccttcatgtcttagagccaactgatgacgaggcacgccaataggtccagtggactagcacgctgttttccttgtacgtggcatatctccataaggaggaaaatttattagtataatttttaaacatgatgcatgcataattacagaatcaaccttcggtgatcctatttcctatattttgcactctattacctggtcttacaagataagaact

SEQ ID NO: 69604 - DNA, 479 bp, Zea mays
  unsure (1)..(479): unsure at all n locations
cttgccgcttattctagaattntatttgataagcttatttcgatatccttatcagataaggattatcatgtgcggatcagaacaacaaatgcttatatggtatgatcgttatttgatgtagattaacatattcttatctgttatagatttttttggaaccaaacgcgaatttttctcctataaatgcttacctacgggtgctgccatcaaatacaaccaacacatgtagtctcgcctcttccttcctattgcgctgccgtgtactctactccatctctatcgctggcgtgtacctgtgaataggagagcttgtttctagagccgtcgtcctcaacgatagtacacccggagaggttgaataaggtttttaggaagcgctctataactgctagatcgcttccgcctcgtcattttcaacctcgttgccacggctcatccgcctactcatgacgtgggtgtttcacgtcgtcgttaagaac

SEQ ID NO: 69605 - DNA, 448 bp, Zea mays
agcttctaaagggagaacacgtgatttgtttttcttacgtacaattctaaaaagatagaccttgtgcagcttgtcacgcaagttaacaggtgggaggagcgcatcacagcaagaatgtgatgaccacatctagaccacttgactgctacatatggacctcttctgacccgtcgcctatctaagcatatgaggaagtaagtatgggtaattattgttgatgactttctccgctctacttgggtgttctttttgcaggataagtctgaaacccaagggaccctcaagcgcttcctcagaagagatcacaatgagtttgagctcaacgtgaagaagataatgagcgataacgggtccgagttcaagagctttcaagtggaagagtctctcgaggaggaacggatcaagcatgagttctctcatcctacacaccacataatataggtgtggt

SEQ ID NO: 69606 - DNA, 469 bp, Zea mays
  unsure (1)..(469): unsure at all n locations
gatgaagattcttcattccaacatgggctagtcggcggtgcctgatccaacccatgttagtcttagcaattaagcaagtgtcgagttcagctctatcaaaatctaccaagtatagctgaccctctaacactcccttaaatgctattgaatcatcacttcttctaaagacagtgacgcctatatcagtgaatagacagttgtagcccatttgacataattgagaaacagaaagcaagttgtaatctaaagaatcaacaagaaaaacattggaaatagaatggtcaggagatatagcaattttacccaaacctttgaccaaaccttgatttccatccccgaatgtgatcgctctttggggatcttggtttttctcatatgaggagaacatctttttctccccagtcatgtggtttgtgcacccgctgtcgagtatccaacttgagcccncggatgcataaacctacaacac

SEQ ID NO: 69607 - DNA, 434 bp, Zea mays
  unsure (1)..(434): unsure at all n locations
agcttgacattattaggtggcgcttgatattacttttaaagcggaatngcaagtgtatctggcaacagccattgcattatcatgcctaaaacctgcacatggttggtcaggcgggagttttggaaaatttatgtaagcaacagtaatttgagaccagctaagtttttggacataagggccatgagcctacacaagcatcgattatgaagactgagtgatcctcacattggaaagtttaacttaaaaagaaaaaatacaggaaaaaaactacaattctcgaattgtgaacttgagaaagttcggataaataattagagtactttgagctaaaaatgaacctagtcttgcagtacacacttaagtatactaaggcatatcanaaattggccttttggctgagtctaaaggcaatgcacaataactatttgaaccat

SEQ ID NO: 69608 - DNA, 482 bp, Zea mays
  unsure (1)..(482): unsure at all n locations
tcaacacttcatcacggacacgacgcaccatccctcttcttctatcgcgccccatggcctcatcggcgacctcactgtcgcgggagcccgccatctcaccgtggatcggccataccgagcccccaccgaccaaattgaccccaccaccgtgaccccctacccccgcctgtgctatgccaccaccctgaccacccagaaccagatcaccagcgtagaaccttcgtcgagttcgtcggcggccggttccccccaccgcgggcagaccgccgtcccccctgatgatgtacccctcccctcgctggcgtgtgggcccgcgcccacggcatcgtccccgcgccgtgccccgtagcaggcctagctaggctggccgcccgcgcgaccgcgcgcgctcggctaggccaaaatccccccggcccgtttaaatcgagaaaccctnttctnttttcttttctctctttttctcaatttcttatatatatact

SEQ ID NO: 69609 - DNA, 350 bp, Zea mays
agcttatgcagttacgcccatgcgtgcccttttatttatatggatgagacgctgatcaccctcagcagattaccgagcacaacatgggcgactctggtcgcggcgtaaaagatgcggaaacaacgccccgtgaagtcgatagccgacacccgacgagtgacctctttccgggcgcacgtcggcacgtccgtcctgcttccgcggtccgcgggcggtagcggtacggacccgtcgcaactcgcccacccattacatctgcgacgcggcttgtgctggggcggtcgaccggccgtgccgtgcatctgtgcgtgtgcgtgcactggtgaggggtgggtcgctcgatcggttgc

SEQ ID NO: 69610 - DNA, 469 bp, Zea mays
  unsure (1)..(469): unsure at all n locations
ggctacagtccttctttttctccatagcaggaaccttacttgttctctaccccacttaaaatgaatgagggtagaactctcgaatcttggggatttgaactccttgaagtacctcataacaagggtgctacgaggccttcttctgctattgttgctgcttgagcaggttgcggagagatgactgacatagggttgatcttgggacaaccttcttctcatgttctcttctcactgctcttttctttctctttgctcttcccactagaggattctatcaaagagtataaccatcatacagaggaggaaaccaaatattatgaaccatgtacaatagtcttcaacccaagaatcaccaagcattgtgatcttangggcgagggagtggaaaatggagttgcttgtgatttggcagaggggaatttattangtgtgtgctttgcttgngatgggaactganggagttggtgtg

SEQ ID NO: 69611 - DNA, 462 bp, Zea mays
  unsure (1)..(462): unsure at all n locations
tatagccatggtaagtagcatatgctaataatatacaaattgactcaagcctagctacaggtgcataggtttcaccgaaatccaaaccttcaacttgtgaatatcccttggccacaagtcgggctttgttccttgtcaccacaccatgctcgtcttgcttgttgcggaagacccacttggttcctacaacattttgattaggacatggaaccaaatgccataccttattcctagtgaagttgttgagctcctcttgcatcgccaccacccaatccgaatcttgtagtgcttcctctaccctgtgtggctcaatagaggaaacaaaagagtaatgctcacaaaaatgtgcaacacgagatctagtggttacccccttatgaatgtcgccaaggatggtgtcgacggggtgatctcgctggattgcttggtggactcttgngtgtggcggncttggttcttcat

SEQ ID NO: 69612 - DNA, 477 bp, Zea mays
gtgagctctcttcacactatgaattattcgctgatctttctcttctgactcctttaccatatcaggcctgatgaaatttctttcacctggttcaaaccagtttaacggagtacgacatcgtcgtccatataaagcttttgaagggtgccatcttaatgatttcttgatagctattattatatgagaactccgctaatcgtaaacaatcatcccatttttgtgggaatttcagaacacatgctcgcaacatatcttcaagtatctgatttaccctctcagtctgcccactggtttggggatggtatgccgaactgtgaagcaacttggtacccaaggatttatgaagtgcttcccataacttggctacaaattgcagtccacgatccgacactatagtctttggaaccccatgtagactaagaatacgagcaatggacaattgggcatagacaataatcgggtgatctgtcttgactg

SEQ ID NO: 69613 - DNA, 390 bp, Zea mays
  unsure (1)..(390): unsure at all n locations
catgcaagcattgcacacatggatatgaatccggcgatattatactcttataacagctataatacatcggattaaagtcagctgttcgcactactgcagctaccacttataaagacaaaacaacatagaaacagtggaacccggacgtattaagccaaacgaacaagcctggtctatgacgtatatgtgtcactaaagacaacactggtagaccttatccaatttatgggatgagctattaaatcatagtttcctataaacaatgcttacagaacctaatagattcatactatagagctggttgagaagcacacttcaaccacngactgctaatgtgaaatcctctcgtctcgaaaaaatatcatctatatcatgagggtaaaaccataa

SEQ ID NO: 69614 - DNA, 455 bp, Zea mays
  unsure (1)..(455): unsure at all n locations
actcaagctgaggactgcttcngcaggagagcttccgaacgtgaagacttgttctgtccacggagtcgctttatccgagcgcgagttacttctcgcagaaggtgatgagtgaggtatccgtatcccggaggcgtaggagtccctcggctcggtcagccttggctgcttacgtgtactccgtcgtttccaggatccgctttccgaagtagtcaagaagcacgaaagtaatcctgctgaaaagagatcctttntcgaggaaaaattcgacgcagagggggtctccccccttttagcccccgagggagggtcgggctttgccgatgctangccgacccttccttgacgactaaactttgcgtaggtgcgaggtatatgaacaacttggaaacatcataatggtagaagcgacgtagctgtttgatgttccaagcgttgccgtagatctctccttgatt

SEQ ID NO: 69615 - DNA, 490 bp, Zea mays
  unsure (1)..(490): unsure at all n locations
taggttctaggagaagggctcgacacatcgggttggggttttctatgataccgcgacgcccgatttataccccggtagcgaagtccgagcatgggcacgagaagcgagatccacgggcggaaggtcgacatctagttgagatttggggcagagtccgtgaggttgaagaccatcctgaatgagtggcccacgcgtaagggatgaggagggagaatggcgagatggccccacgcgtaagtgactcagaaaaaaaaagataagggcgctgatgggccagtggggtgcgattaagtcttgggccaagcatgaaaatatggcccacaactcagtttcttatccctttnttctttccttttatccattcttttccaaatttaaaacttcaattcaaatttaaatctggtttgaacattggctttctgaatatacccaataagaatcctaataattctaaggagtgctctaatatttatccttatataatacctat

SEQ ID NO: 69616 - DNA, 195 bp, Zea mays
cgcgagcaccagacaagcaagtgttttttttttaagacaacagagcgcaacgtgacactgagactaacaagacaataaagacgccaacgacgagataagcccggaacatacacgggcctagtaacaatcgctacagcacccagcctatcagggccgacatcaacccgccctccctcacggccccccaacacaaac

SEQ ID NO: 69617 - DNA, 482 bp, Zea mays
tcatgaaggcagggcttcagttccctctagataaattgctggtctaagtcctaagaaccttcaaaatttaccttcatcagcttactcccgaagctatcatcaaggtggggatctttatatgggccatgaggagccattggacttgagccaaatgcaaaatgtttctgcaacatccatgagctgtcttatgatatgaaagctaccggaaaagagcaatatcacaacaacttcagttgttatagcttcgtgcctcgctctgaggtgagctacccagttcccacatttcggaagagatggtcggaggcatggatgcaggaatggttctacgtgaagaatgacctaagtgaaagggaggatattaaagggattattcaacatcctatatggtcttgcttcggcattatgagaccatccactgcccttgggaatgatatacaagcatgccatgtgactgtcaatacaggatgcacttatatatgcac

SEQ ID NO: 69618 - DNA, 291 bp, Zea mays
agataaccgcccacaaagcgagtgacaaagctctaactcagatctaacttgtacagctttatcttaagctctagccttagattctacttttatgccatcggtcgttcttgaaatatgcatgaggtactgcacctacgcggagtacttcaaaactcaacatacttattgaaacccctagtgcaaggctataatgcaaatttcaccatctgcatattatctctaaaagatattagcctatggctaaatattgtgaaaattattggaaaagcatatgagggtgccactacctgt

SEQ ID NO: 69619 - DNA, 470 bp, Zea mays
  unsure (1)..(470): unsure at all n locations
ggctcagaaataggcagatggaataaaccagcanaatgatcatgttctttagcctctgcgatagacagttttgtgtttttgacaaaagagaataattctggaaattgttgtcttggaatgttctggttccactgatcatcccagaaagaaattgatctgtcattgccaatgattgggtgcgccagacccttaaagttagaaaggagtttgatcacgcttttccaccataaggaagcaatgtttctatgacctgcgagtccacgggacaaataataattattctagatgagatttacccagggtaagtcatagctattaaagaacttatgcaaaattnttatcagaagagcatcgttttgggtttcaaggcgaagcacccacagaccaccattcactattctctgagtaaccgaaacccaagcaaccagaggcggcttcttggagctaatgtcattccctctccatagaca

SEQ ID NO: 69620 - DNA, 429 bp, Zea mays
agcttcagactctcttatgcatcctggctttcttattcttgatcagcggcgcatagtcaggatattcgaagcccagtgcatcatgcactcggttcagccttcgcttcggaccggtactcgaagctgctgtcatcagatgatctcttttttcgaataatttccaagaatttcattacacatcacctcaactgtgtccagccactcttggcagggcttcttaaatatttcttgaatctgaagcggtaaggaagccggacaagatccccttccttcttctccccctttaactctggagttcccatttttcagagtacggaaactttgatgcttagaattttgaaccgatccctggaccaaatgctctgcatgatctgattctccattgccgtgagttgacctctgtgtctgtgcgtgggctggttctcaagt

SEQ ID NO: 69621 - DNA, 483 bp, Zea mays
  unsure (1)..(483): unsure at all n locations
tgcattgcatatttaaattccttgtattgcatctaggacttgtctaacctagttgagataaccgccaacaaagcgagtgaaaaagcttaactcgggtcaaacctgacaagtcttagtttttaagcttttagcacttaaattcttacttttcatgcaattattggttcttgaaatatgcatgaggtactgcacttatggggagtattcaaaactcaaatcattcttgaaaacccctagtgcaagccaaaatgcaaatttcaccatttgcctattttctctaaaaattatctagtctatggcaaaatattttgaaaagtatatgagggtgccaatacctgtcccaacaagtgatattttgtgtgattataagttgggatttggtttggttaggagttacatagaataattcaaaattttccaaactccnctctgtctgggctcaccggacagtccggtgtgcaccggacactgcactgtgcaatg

SEQ ID NO: 69622 - DNA, 440 bp, Zea mays
agctgcaacaaactcaacagcatacctggctttcactcgtaaaaaatctctgtgtaaagataatactcactgaagaaaacgttataaccctaaaattggaatagaataagctaccgacaagatgctatcgtcggtccggctcacgtcggtctccagcttcgggaaaccaatactctttgaaagagttccgataaccatccgtacggtttgatctcggacgcagcctatcttatcatcatcaacgccaccgaagagtagtgccccccgttgatatctgcaagatatggcatattcttttaactctactttctcagccttcgtcaacttctgttcaactaagttctgaaatatgaaatctcctcttccgaagcgtcttcggctatatccctttccttctcaagctctaagaccataacatcttctgcggcatgtctagaaga

SEQ ID NO: 69623 - DNA, 484 bp, Zea mays
gtgagattcatgattgaacgggcttgtactgtcttcttttgttgtttctgtttctttcagctctgggcgtcgcctatcaattcttgcgtcttgatctgaaatttgaatgcttcgcttctcgctttgaagacgagcttcatcaagagagccttcggcaatactgagcagagagtctttttccttcaaagagttttcaatattatcaatcttttctcctaatcgctgatgataaactcgttctttttatcttcattttcttgttgaaattgcaaagctttgctcaaaagcagactctgtggaaaaagacgaagttgtattagattttcattcttaaaacactaaagctaattgaacgaaggaggaacaacaaataatcgaaccttaaaatttgagtaaaacaagttgttggtgatatgttgtcttctataattgctaatgtccctttcaagcttcgggaatccgatactcttggccagggtattca

SEQ ID NO: 69624 - DNA, 364 bp, Zea mays
aacgcgccaacagagaaatcttcacagacgtgcaaaagatgctcctcgacgaacaaagggcaagtgggccgatatggtacaccaggccgtctgggacaatacactcctttccgccttctatacgaatcggaggccatgaccccacaagacataaaacatgggtccccgcgaatagtaccttctgccgtccccgacgcggacgagcccacttcaaaggatctcatcgatgtagaccgagtcttcgccctacgagctctaaacaaataccaagctcagacaaaagcatggcgcgaccatgcagtcatcccaagggaattcaacgtgtgggacctcgtactctgaccgaacagctcggacagagtcc

SEQ ID NO: 69625 - DNA, 468 bp, Zea mays
  unsure (1)..(468): unsure at all n locations
ggcacgggcggaggccagtctcgcccaccaacgctcttatgagattgtgatgaggcttggcagcctgcgcaaccgcctggacaagacggaggcctcgatgcgtgcggaggtcgagcggacgcatacgcagcttgtggacacgtaccgggagctaggtgcacggaccgtgccctttgaagcgtccgatcaggaggtgggcctgcgcttccttggatggctacaggaggagctggaggtgctcctgaccattgtcatgggtctcatgtgctttgcctccctcgtcacctgcgagggggctgtgaatgccttgtcccgcgaggggtgcgggcacttcgaggccttcgaccagtctgacgaatgcttcgagcgcgaaatcttccaggtcgaggacccggtgctgaagcggtcggctggtgcgcttcttgatatgatgtggcgccctcacggtcgagagacntatccggagag

SEQ ID NO: 69626 - DNA, 471 bp, Zea mays
  unsure (1)..(471): unsure at all n locations
taacccaatgtaccaagtgtaccacccaagggtcttacattttaaagctaaccttgtttaactggagaagatcatgcacctttanagttgtgatttctaanagcacatatcacatcatgcatgtatcttacgcattgcattcattagattgtaatcttgccgacggagagtacgtgctcatccccgagcaaggacctgtccaagaggaggaccatgagcacgcttcagaggctgctattgaggatctccccgtagccccagcaattgaaggcaagccccggttttatgcataacctgttaattatgctattttactacacttaatgcttgtaggattgcaatgtgcacttaagtgtangagttgcttgaaacctctagttgcatgaacttangatctctttgtgagatgaatactagtatggtaagtcgagtagctgctcgctaatcatgatctcggtagaagtcgagtga

SEQ ID NO: 69627 - DNA, 463 bp, Zea mays
  unsure (1)..(463): unsure at all n locations
agcttcaagtcctccacatgnaagttactatttcttagataagggaataaaacttctcctacaaaaacaacacgggataaaaccctgagtacgcaattactcagcaagacttacccgactaaaaaaaagactctcaaggtatgttggcttttgggaatcaaggtaaagctcatcaaagttcaaggactcattttgcagtaaagtttactagaagtgggtccttaagccaagttntatttcacaagttagtttattacctgaatcttctagcctgaatctagcattttcctaatctagatcattcacttgacctacactaggttgcttttaaaatccaaattttgtttcgcttgttatctacgatgaagggcagcgatccagtcttcatatccgagaagtaacggcgatccgaatcgatcaatacccagctggggatctccaaccacacaacatatgtagcact

SEQ ID NO: 69628 - DNA, 459 bp, Zea mays
  unsure (1)..(459): unsure at all n locations
tcttgtcaaaggatgtttgtttctaactagttgtgcgctctgtataatttagctcatgccgctatggttttcttcccattgctagcagactattaatgtctattatgttttcttatcatgatatctatttatactttgttgcttccccgtttatgccattttcaaaggagatgctgtcgaaattttatatacgaatgttagatgtgtagtttagtagcattctggggtgtttgtggatcccggggtgttacagttggtatcaaagcataggctttagattcttggcaatctgaagataaatttgacacacttgcacatataggaagggtatgggtacaaatatctttgatatatattaatgtctctgaagcgcagatgacaataatttcacccctccctattgctgtatggtgatgtggtaagttgtttatgacctaatgcctgatataatntatctct

SEQ ID NO: 69629 - DNA, 395 bp, Zea mays
  unsure (1)..(395): unsure at all n locations
atcatatatatgcacctaataaccatataaagcctctaatggccataccatctatgcaatggaccacacatcctcctttgaacaatccatagaacttaaccaattcagatcacattttaagataagagggacttaaacctcattcccaagatactcatcaacgatccatcttatgggaaaaacatgaccaccagaattgtccttaacttatcatttcatcccaataatggaattaccaattcagtcttacccagcatggtatgaatcatcacatgtaaagtcttaacacatgccacactttgtatgggaggaatgttcgttaatacaactcatatgatatgtttntgagatacatatgccatatncatcactatcaccttgtgttccacactgat

SEQ ID NO: 69630 - DNA, 477 bp, Zea mays
  unsure (1)..(477): unsure at all n locations
tcggcttcatctatattgnggattgctcttgaatcagtctctttcctctcggcctttctagcagcttcctgactcccatgaatagcaatatgtccctgatccgaaggtatcttcatgcaaagatatgctggatgaagaattgcttcgaaatcattgagtgttccgcgaccaatgataacattgtagggatattccatgtcgacaatgtcaaacacgacttgctcagtccttgtattgttgacgaatccgaaggtcactggcatggtgatcttaccaagcgctacaatctgtcttcctccgaagccacaaagagggtgcgtagcatcatgaatcttgtcttcgggctcttgcatttgtctgaaggccttagcaaatataatatccgttgcactgtctgtatcaaccagaacattgtggaccagaaatcctttgatcacacaagagataaccatagcatcattgtgtgggtaatccttg

SEQ ID NO: 69631 - DNA, 456 bp, Zea mays
  unsure (1)..(456): unsure at all n locations
agcttgagcgagacgaaaggtgattatgattattgacaangngatcacgaagctgtgcgcataatagcttctgcatgacagcagataaggggaactgacttatagatgataaggccaattataccttcaagaactatatacagttattagcaaatgtaaagggcatgaatgtaattctacatgggttgcgtcccttgcctataaatagatgaacagtactcccgtactgttcacgctgactgggcattcgctttttgcatcacgtttgtacccttgcttttcttcataccaaaggtacatctataatttgtaattgtggatatggtcatgcaaataaaaataagttgatgatgatgtttatattgtttttcgtatttcgtatatgaattctctctcaatatttattgatgttacgaaggatgttacttcataacctctcgtccgaattcattatat

SEQ ID NO: 69632 - DNA, 460 bp, Zea mays
  unsure (1)..(460): unsure at all n locations
tgctggatgatgcaaggactatagtgtcgcgagattacttcatgacttcgattcacatttagcagaaaatagctatagatctagaggtgtaaagatgcaaaaaaaatcgacatagataaaatcatatgcatgttgggtgtggagaattgagctagaatgacatggagaacaaagattgaaaaaagcattaactagagactgaggagactctggccattatgtttgattcatgccataataaattctagtgtttagttagacgagcattacatagntatttattttccgctttatatctatcgtgatgtctagttgtctacattgaaagcaccggtgttaattcattggtggatcgatagccaccaatcggtattatctaagttgttcgtttcgaattaaaggtataaaataccggagaaaccaatatagattaatatcaagcttatagtctaatcgacat

SEQ ID NO: 69633 - DNA, 453 bp, Zea mays
tgcgagcatgcaagcctggtattcatttgaaggggagttgagcatgcttctgttgttcccttctcaagcattttcaccatattatcacacttatcttgagaaggtagagcattacactttcccttcaaaagagataagctctttcttatccttccaacttctccttgaactctttattttccttgtgtgataaaaatatcactaatctctgaaatttctagcctcaatggaagaatggctttcttgagagcaacatttgttagcacatgataatatagattctatttgaagacatgtgcatatgtgagggtggtatgaattcaaattagttaacacaacctcatgagccatttctaacatgatatgtgaatccataaatctattatgagagcacacaaacatatcatgttttcctgcaaagctaattttcatattataccttctatcgtgttt

SEQ ID NO: 69634 - DNA, 491 bp, Zea mays
taagctagtgggttatatagggtataaatatatattattaagacgtcgtctcgccttatgttctaagcttaaaagataaaaatgatcgcttgacaactattgctcttctatcttatgtctttatgttgctcctatataagatacaaataaagatatgttcaatagattgtacatatagccatgtaaaatactgtttcatatcgtagacaaggcaatttagagaaactgaaggtaagggtgcgtttggtttagctgtgagctatgaaaaagctattgtgagctgtcagctatgaaaaaactgttgtgagctgatagctatgaaaaagttgaaagttgtttggttgaacctgttgtaaaacggtggatttgatataaattatctataatgcccctaaggccttgctatgttgtttgtacgtaaaataatcataatgatatgatctctacatataacataaatggctacatttgtaaataagtgcaacattcat

SEQ ID NO: 69635 - DNA, 481 bp, Zea mays
  unsure (1)..(481): unsure at all n locations
tactctcggcttcaccaaataaacctaatttcttcattataaccatatcatctgtcgntacagtggatctacgcaaagtcaatgtgactaggcatttctgggctcaggatggtgtaatcctcttcatcttcgttaccacttccctctccaactgtgatttgttcagcttcaacagtcaaagtatcttcggcaacaggtttttctggcacaacaagacccaactgcctcatcacctctgatattggtgtcgtctcagttacctcggcctcgtctccctcgcgagatactctatcagttgatcgcactctggccatttcaacgttttcacttttttgacgaagctaatctcaaatgacgaagtgttccctcgaaagcacaatgcagaaagcttcgactatggttaaattttntaacagcacgacagtgcaatggcaatgaatgctgtaggaactcctcaccaacccgtctgttatatagtgct

SEQ ID NO: 69636 - DNA, 482 bp, Zea mays
ctctagcttggtcgagaagctgatggcggcgcaactctgttacaatcctcttatgtgtaaaaggtatcgaaccactttggttttagtgactgtgatcctgctccaacaccttatgatcctagtgtgctattgataaagaatctgcaaatagcatgggatcaattgacatactcccagatcattggctcgctcatgtaccttgcaagtgcaacaaggccagacatctcttatgctgtgagtaagctaagcctgcttgtgtcgaaaccaggagatgatcactggcgtgctcttgagagagtgctgcggtatttgaaaggtactatgacatacagtattcattataccggaaacccaaaagtgctggaaggctattgtgatgccaactggatttctgatgctgatgagctttatgccacaagcggatatgtgtttctgttcggatgtggcgctgtctcctggaagtcttgcaagcagactatctt

SEQ ID NO: 69637 - DNA, 462 bp, Zea mays
ttggtctatgttgtgcatgtgtaagaaaatgtgtttgtatggattgtagttcgtggcgaaagaataatgagtagaaaaggactcgaatgtttttatatttcgataggaatatatgcgatgtattgtttgatgtgtgcgatttgtagtttgtataattatattttggttgatgtggtgcacattggtattggaatgtgtgtgggtataaaaatgttttggttatatgccgtagcaaggttgccttaacatttaggtaagcaaacgtgttgtgttgtttaacgtgatgagtaaattggaaatacatgggatgcgaggatttaattagtgcatgtaagtgtgtgtgtgtgccgtggtgtgatataatagtggtggcgtgagataattgttgaggtgcgcgggtgtatgccgtgatatgggtacactcgcaacgagaaaagatgtacacattgtgtaacatgacgc

SEQ ID NO: 69638 - DNA, 459 bp, Zea mays
  unsure (1)..(459): unsure at all n locations
agctctntccagacatgagagtctatttgttttgctcaaccaggataaggcgttctcccttaatatacatactaacaatatatttttgccataatccattcgaattctcaatattccaaagccatttagaaaaaaggagtcattcataacttcaagattcaaaacacccagacccctctgaattttgggggaacaaaccgactcccaatctgccaggtgaaatttcttggactgcttacccccctgccatagaagtctccttctcaacagatcaatttttttaataacagatttaggggcaggatagatcgacaacatatataaaggaacattagaaaggcaactatntagcagagtaagtctaccaccaagactcaagagtctaccctgccacccagccaatctttattccaatttctcaattatggagctccaaagattttattaatcttattttat

SEQ ID NO: 69639 - DNA, 472 bp, Zea mays
  unsure (1)..(472): unsure at all n locations
tgtgcgagagacgaattcccgttgccaaagatagactctctagtctatgcagcagcttcttcagagctcatgagtctcttggactgttactcacgatatcatcaaatctggatgaaaaaggaagatgagccgaaaactagcttcataactccaagtggcacgtattgctatcttcggatgcctgaggggctcataaacgctggaggaagtttcagcagaatgactgcgaaggttctccagtctcaaataggtagaaatgtgttgacctatgttgatgacattatcgtcaaaagcacgaagcaagaggaccatattgctgatctgcaggagaccttcgccagcttcagacaagctggtctgaagctgaatccagagaaatgtgtcttcggagtaaagaagggtaaatttcttggatgcttagtttcaacanagggaatcgaagctaatccacataatatcgaagctatacttc

SEQ ID NO: 69640 - DNA, 338 bp, Zea mays
ttctccaggctaacactatcattactagacacaaagagctattggaggtcatttccctatcacagtggtatgaatacttactacataatgcgtctgtcaccactttgtattgcctggaggaatatggatctccagtccatagcaattaatgagcttatggccatctgacgttgattacatatttaacatctgactcggcgagaatatacttccaacttttatgatcagtatatatgtgatagacattttccacttcatagtgacacctaatttttaaggaatggaacacagcatcctacttcagatcatgagtaggataatgctcctcatgccggtgc

SEQ ID NO: 69641 - DNA, 468 bp, Zea mays
  unsure (1)..(468): unsure at all n locations
tgtgaaggttcttcatccncacatgtgccaagcggtgatgcctctgccagcccatgcaagtcttagctattaagcatgcatctagaccggcctcttcttttgcaaaatcaactaagtaaagtttgccgtctaatacacccttaaaagctagtgaaccatcacttcttctaaagacagacacatctatgtttgtgaataaacagttataccccatattgcacaattgactaacagatagtaaattgtaaccaagagactctactaaaaacacattggaaatagaatgctcattggaaattgcaattttacctaacccttttaccttgccttgattcccatcaccgaatataatcgaatcttgggaatccttactcttgacgtaggaggtgaacatcttcttctcccccgtcatatagtttgtgcatccgctgtctataatccagcttgaacccncggatgcataaacct

SEQ ID NO: 69642 - DNA, 389 bp, Zea mays
  unsure (1)..(389): unsure at all n locations
nagctcggaggcgtcgatggggaccctactatgtgtattagcctccctcttccccccggcgacttgaatgccacgggctgcacatccggtgtggaggaggcgccttgctcgataatttcctggagcctttgatcatcaactcaagctcacaaattttcctattactttctcgggagacattagtgtgtattaggatcccacgaattaatgaacctgcgtatggtgaacgaaaacgagtgatctaagaataacctcgaccatctcatggtcatcccatttggtgctccccgaggatgcgcacttggttcaccaaagtcttaagcccgctgtacatcgcttgaggctcctctccttggtgaagcatgaagcgatcgagcatcctctcaatc

SEQ ID NO: 69643 - DNA, 479 bp, Zea mays
taactagaacttttcttactctacttgaatggtcgtatgcagcggaatacaggcaagtagagtagtagaagcagaatagggccatgtctcaaatagaacctgcacttcacaaaagacttataccacagataagaatagaagttcaaaaagaaatagaacaaagagacatagggacaagatgatttttccgtggtttggcgaagcctgaaatgcttgcctacatccatgttggagttaaccaaactgacttggagtctatttcaattcattcctcggtttgtttagttttatcacgagggagataaatcgagacttctcttatatctatggtgttgcagtacaacaaaactgtggtagttgggacgaaggccaaacgggcccttggtcagaaacgcgaagtcctcgccaaccacctcgactaaatgtagccctacaggtgaccagagacgttgcttgacaacgacttcgttgacatcgac

SEQ ID NO: 69644 - DNA, 423 bp, Zea mays
  unsure (1)..(423): unsure at all n locations
agcttaccctaataaggatatttgtgttatatctacccacattgagaaaacctagatactctacggaaatagttattaaataccctnccaaaataaagttgaatcacatttataccctcgggataccaaaaaccctaatggaaccctataaaaccataaaactataccctaggggcctatgcgctaaaatagtccacttttgtgctaaagtgcacaaaccaagtcaaataagttcattaagtcctttggttcacaaatgtgtggacttgtaaaccaaatgttgagttatggacttatatgcaaaatggacctcaattaagttctattctaagtctgaaatccagtgttgaaggctcaacttctgggcttcgcaactttcacatataagaacttttctctggtcaccacataaaattatagcct

SEQ ID NO: 69645 - DNA, 373 bp, Zea mays
  unsure (1)..(373): unsure at all n locations
gttctggattagcaggatattatcactgcttcatccccgatttctcctggattacgaagccaatgacaaaattattgaaaaaggcagttaaatttgaatggagtcagaagtgccaagtgtaacaccttgaatttaggggtataaaatttctttccctatcttcaccaaattcaggtgttaccttctttctctctttcttttctgctccttcctcccattttcaaagtaatatagagacttacgtccatgccatgctctttatttttgatgctttgctcgggagttagtccattaaattcggatcttgttcctgtgaatagatntaattagaaagaaatgagaatgattaaaggaaagaagagcagaaagcgat

SEQ ID NO: 69646 - DNA, 470 bp, Zea mays
gcacgcatgcaagctttaccgttgccagccctttttccggtttattcccgcccacagcaacctcgggagagcggtctcacatgcccacgatgcttgccgacccactgaatttcacggagtaacctctggtcgccgggaacgctgtagtcttccgcgaagctcacgagcacccgggccggagagatttagtgcgcgattgataaaattaacgtatggaaaacatccatcatggtgtgaattaggtattagtcgacggagagcgccagtcgtagccccaatcagccggcgtaagtgctcgccggagctcagccgtgcgtgaacgccatcgaggaccgatcgggttaagaaatagataaccgaggactatactgccaactgtcagcgacacggagaaacagtaacaggacttatctccagatagccaagaaccctgggtcccttttgctatgatgcctgagcgcgcgggcgca

SEQ ID NO: 69647 - DNA, 390 bp, Zea mays
  unsure (1)..(390): unsure at all n locations
gatatcgaaattgcctatgttagcacccacaaccaattagccgatatcttcaccaagcccctatatgaaaagacttttaacaagcttaagaatgaactcaataacctcgattctcgaaactttgactgaaatcttgcacacattgctcatttatatacctttgattatgtctctttcatttggtacaaatgcatatttttattcttcttgtatcaaagctaagactaatgtgcttccaagtatatttctatctttagtcttaaattgaaagggaaatgaagtaataggcaaaggcaaggcttccactacgactctgtcagtatcatatttcgttngccctactcatgtatttacatccatatcttgtacaaggcctctagttctctttat

SEQ ID NO: 69648 - DNA, 420 bp, Zea mays
  unsure (1)..(420): unsure at all n locations
agcttgcgaagggtctttatnctcacatgttttaatcggcgaagccacagccagcccatgctagtcttagcaattaagcatgcatctagaccggcctcctcttttgctaaatcaactaaataatgcttgctgtctatacacgcttaaaagctaatgaaccatcacttcttctaaagacagacacatctatatttgtaaatagaccattatatcccatattacataattgactaacagatagtaaattatatccaagagactcaactacaaacacattatagatagagtgctcattagatattgcaatcttgcctaaacctttcaccttgacttggatcccatcaccgaatatgaatgaatcttgagaatacttattcttgacgtaggaggtgaacatcttcttctcccccgtcatatggc

SEQ ID NO: 69649 - DNA, 390 bp, Zea mays
tcggctgacaattctatcagatctacccaagaatgggtttccttctttacgaagcatgaatagaatggaaggtgtttattcgccgaatgctcaaaaagcgggatgtgtgtatgtttcatgcatcgcacagaaataaactacagcaatttacatattcgattcaatgtcacatacaccacatgttacatatttttgttatagcagaagcttaatattccttccattgttccatatatcaacatttcaaaaatattattacaataaaatctactcttctctaaggactttctctgcaacttcgttcaaaagcttatcgaccactctcgcgttaatggagtttgccatgcttataatatacagtgcttccttcacatctggatcagctagggg

SEQ ID NO: 69650 - DNA, 426 bp, Zea mays
  unsure (1)..(426): unsure at all n locations
nagcttgaacttttctgttggaaattctttttagattanttatacggaccggtccaagaagcatttacgcttccgcttttggttaaattacgtttaaaactttaaatacaaaagtcaaactttggtcaacaaataattttcggaactccagaccgaaaataaaatctctggctgccaggggcggatctaggattgtttgaccctcactcatttttgttgcatgtagtagatactatcttttacttataagggtctatgtgctcagatcaacttatatatcctcgttcatgtgttttgacacttgtctttataaatatgccctcactcttattttgctttgggtccgcccctgatccttggcagctgcagagtaaggtgcaaaacaacaaagttgagttcttgctcacagttggaatgactcctaat

SEQ ID NO: 69651 - DNA, 468 bp, Zea mays
  unsure (1)..(468): unsure at all n locations
ctggctcattagctctcggcagaatcacccttaataatgacaaaggaaagtgtattaaggaatgcagtaaggaaaaagataaaataaagacataaaggtaaaagagattttctatactctgttaagtaggtttcgagcttcgtctctagccatctctcggtcaccctttgcccagatttgagtgatgaatctgttgtctatgcttcgagcttcgactggaatatcaactatgtcagccagtgagaggctaaagtttggcctattaacagctcttatatgattgcacccagctttgatgaaagcggcggccgtgccacgagaagccactagtgcacagaaatctccatggccagttataacttcgtcgagaacgtcaacctctttctcaacgcatccaagcgccccaggaatatctttagcagatagattaacctcttcggatacggctncaacagaattgaagatacc

SEQ ID NO: 69652 - DNA, 461 bp, Zea mays
gcgacctgaggcatgcaagctgtgaagaacttatccatcatgttgctagtcgacgacgccagagccagcccatattagtcttagcaattaagcaagtatcgagatcaactcttttgatatcaactaaatatagctgaccctctagtacttcttaaaagctactgaataatcacttcttctaaagatagtaacacctatatctgtgaatagacagttgtagcccatattgcataattgagaaacagacagcaaattgtcatctaaagaatctacaagacaaacatatgaaatagaatgggtaggagatatagcaattttaccaagtcctttgaccaaacctctgattctatccccgaatgtaatagctctctttggcgatctttgtttatctcataagaggagaacaaacatatctcctcctgcatatggatcgtgcacccgctatcaattatccaacttga

SEQ ID NO: 69653 - DNA, 437 bp, Zea mays
gtatacctgtgatgatggtgtttgagatgtctgtgaatggtgtgcgaccaacattgtatcctatctgatccataacaagaagagtgccctacaaaacatgagcacataaacaacactgaaagagggtagacaatcggtagtccttttatatgcgctcatccagttaaacagatatagctctatcaaacaaaacaaacaagggtatcaaatatatagaacacacataaatagaatctgaaatgaacaaccaagctctacaatgattaagaagcttacttggtatgataacaagcaaatagaaatatcgctgaacatgatatagaaaaaatatagacaacaaatgttagataattcaccataatagataaattttgttggacattgtaaattaccaatcttactacttataagcatgtaacgggacgtcacaccgccat

SEQ ID NO: 69654 - DNA, 338 bp, Zea mays
  unsure (1)..(338): unsure at all n locations
tgaataccccttggccacaagtcgggctttgttccttgtcaccacaccatgctcatcttgctttgtgcggaagacccacttggttcctacaacattntgattangacgtggaactaaatgccgcacctcattccttgtgaaattagtgagctcctcttgcatcgccaccacccaatccgaatcttgaagtgcttcctctaccttgtgtggctcaatanaggaaacaaaagagtaatgttcacaaaaatgagcaacacgagatcgagtagttacccccttttgaatattgccgaggatggtgttcacagggtgatctcgttgaattgcttggtggactc

SEQ ID NO: 69655 - DNA, 487 bp, Zea mays
  unsure (1)..(487): unsure at all n locations
tacccatgacgaggcatgtggccagttaaagggtcctatatatcaagtctactttcggnacggtccttaatcgacacagacgggcgacctttcctgctcaacgtctggtctcatcttattatttaacacccaaatcatgtacctgacagaggtaccatacttgaatgatgaattcatcactgcagatgatgctctcaccattacaagtcctttttcataaaacaaacccataccagtgttacacagcattcttttaaaaagaatcaagttttagttctctatgcagggctaagcctcattggttctctttataaaacaggtagcaaggaggataatcaaattccaaggaatggtaatgcatcaattggttattcacacaactcctatcacctaatgcagcaggtaagtgataataagttntaacacagaaggaggtggcatatgcaccggngcttgcctgtgataacactatgttagtgttgtaaat

SEQ ID NO: 69656 - DNA, 474 bp, Zea mays
  unsure (1)..(474): unsure at all n locations
ctcagagncacctgacgctgcagctttgttagatctggaaagcaatgctcttttttctattaccattggccttcttcaccataacagtattagctagccactcttggtatttgacctctctgacaactccagcgctaagaatcccctttacttcgctccgagcaacttcagctttgtcatcagacattttcttgagcctttgttttcttggcctgacagatggatccacattgagtgaatgctcaatgacatctctgttgacaccgccaagatcattggctgaccaatcaaagacatctttgttgctgaatagaagatttagccaaattcttttcctgttcttcagataactgagaccccagcagaactttttgctctgctatatcttcacatattagcatatgctttggctgatctgctgaagcaccttctctcgatcgatcgatactgctacaggcctccgctcctctatgt

SEQ ID NO: 69657 - DNA, 476 bp, Zea mays
  unsure (1)..(476): unsure at all n locations
ggggctaccaccatgcagccggagtgcggaggcgatcccgcatgaacgtccatggaagtacaagaaggagaccccgctcggacaccctcgggggctgggtcatagtttgcactgcccacttgagccggatcatccccagcagcaccctcgggggctgggcagtggcttgcacttctcacccgaaccaagtcatccccgacaacatcctcgggggctgggtaagtgtcaacaccatccttggatccaagttctctgcggtagccacctctaaggctgacgggccctcagttatttccatgggaccgagacgatccaaatcagtctcccgaccctcgagatcgcgctctaaggtcgacgaggcacgagatgacctcaactcagcatcaagcacatcagcgcaaaccttcatcacaccatcgtctgctggctctgataacanatcctctggaccatatcctcaagagtctgatcaaaat

SEQ ID NO: 69658 - DNA, 415 bp, Zea mays
cagcatgcaactcgaaccatggcgaggagcataagctttttatatgcctaattgactcaagcctatctatgggtgcataagcttcatcacaatacaaaccttcgacttgtgaataaccctctgcaacaagacgggctttgttcctggtcaacacaccatgctcatatctgttcgttgccgaatacccacttggtacctacaacattttggtttggacggggaactaaatgccatacctcattcctcgtgaagatgttgagctcctctcgcattgccaccacccaatctggatcacttagtgcatcctctatcctgtatggctaacagaggacacaaaagagtaatgttcacaaaaatgagcaacttgagatatattggtaccctctattgaattgtacccagtatggagctgaca

SEQ ID NO: 69659 - DNA, 507 bp, Zea mays
  unsure (1)..(507): unsure at all n locations
ntaatgcanaatntctcccnctttgtcatanatctccaattatgatacaaagaatataaagggtagaaattatgatttaagcaagatgtgaacacactatcatgaaaaagatccttagatgacaaaaaagtaatgtagaagtgacatgaagtgatgtacctttgcgttttaccttttcaagggggtgttccaaacttgtgttggatttagaattcatttgcaagctcttgttggcataattgtgacataggtccaagatatcaaatgaagattgtcatactaactgaaagataaatcttgatacctggagtctagatgtcacctagcattttcttatcacaacaagaggcaacatgataattgcacaagtatggattatgcaactagtgatcatgtatganaaatatcaattgaaaaacaccaattgatacaattngatagataaatagatcactaatagcatattacactaagttcttctcaagtttagtgcacacatatatatat

SEQ ID NO: 69660 - DNA, 261 bp, Zea mays
acattatgagaaagtgccaaatgtcacgagcatcctctcttccttggactttccgggactctatcgaacaaaggcttacatttattatgcacaccgctagaacattgcggggtacaacttgcatcaataccggaggcatctcttctccttgggcaggctcatacatgcctatattgacaatatcccaaagactaggatgcacaccaattaaatgcgactacatcttatcggcccactcgccatagctcaccccaccaagag

SEQ ID NO: 69661 - DNA, 429 bp, Zea mays
  unsure (1)..(429): unsure at all n locations
tcggatctctngccttgctacttttgccacatttccataaataacttgagaatcagctttcaggatggccgctcttattcccatcgcctttaacttccaaagccccaacagaagtgcttcgtattcagcaatattatttatgcaactgaaatcaagcttggctgcataacatgttttgacttttgaaggtgccactaggaccgcagtcgctcctgcaccaaaggttccctatgaaccatcacagaacactatccaagcttcggcatctttgtttacctcttcttcgtgagcccctagcgtccaatcagcgataaagtctgctaacgcttgggactgaattgaggatctatgcacatagtcaatggtgaattcattaagttctgcagcccatttcccaatccttccagtagcttctctattccttataat

SEQ ID NO: 69662 - DNA, 351 bp, Zea mays
tgcgtggcttaagagaacatgggaggtgaatgtcttttatagggtggggtgaatagggcgaaactgtaatctaccaatatgagcacaactacaagccggagttagcgttagtaataaagaaactagtccgcgagagaaggcgcagaacaaatccccagcgaataagcaagtgagacacggagatttgttataccgaaggtcggttcttgcagacctactccccgctgaggaggccacataggccgggtctctttcaacccttacctctctcacacgatccacggatcgagtgagctctctcttctaaatcacttggaacatagagtttcaacacggaccaccaccagattg

SEQ ID NO: 69663 - DNA, 422 bp, Zea mays
  unsure (1)..(422): unsure at all n locations
tgcgatccataatgcctgctattatatgatgccctctgaatgctgccttgaactctctccattccaccatgtggtcaactggctacatagcgaggaaatgatcccaccatgttcgcgcgcggccacgaagctgctgggtggcgaacctgaccttagccacatctgaacaaactccatttagtagtggaaatttggattccactaccctaagccatacatcagcatcaagtgggtcctctgcccgagtgaacaacggcggctgagtgctaaggaaatcctgataagtggccgctgctgggggatgctgatggtgatcaccaccaccataatgctgaggtggcggctgacgctgagccaactatcgcagaatctcattctgctgagccatcaactcttgcatggtangagtcggtggacgtggt

SEQ ID NO: 69664 - DNA, 460 bp, Zea mays
  unsure (1)..(460): unsure at all n locations
cagcntcttcaccatgttatcacagttatctttataatgttgagcatgacactttcccttcaatcgaatcaagctccttcttagcctctcaatttcttccttgagctcattgttttctattgcataggaaacattacttgctcctgaaaattctagctcaatggaagaatggctttcttgagagcaacatttgttagcccatgcgaatatacgttcaattccaacatatgtgcacatgtgaggctggtatgatctcaaattagttaacacaacctcatgagccatttctaacatgatatgtgaattcatactattattatgagagcacacaagcatatccatgttcctcttgccaagcatgattttcatatttaacctctctattgagtacttgaacatagtatttctattttctaattgagcaatatatgatgaacgattaacagctctaattcgctca

SEQ ID NO: 69665 - DNA, 457 bp, Zea mays
  unsure (1)..(457): unsure at all n locations
ttagatcactntagcttactgttaagctctacagctttaatttatagctctgcctctaaactttacgtagagggtatgcaaacaggcccttaattatcaacagtaatttagtttacgctccagccaatagtggaagaaatccaacagtaacatgttgactaactggcagtgacaggaaacaagttngcagcataatgcgattattaaatacgatacaatgtatatttgcaggtacatcatggttcgcgacaacttgctggaacacgtcgaagatgagaatgagctcgttagtttcccaggattcccaacgccgcttgagctgacgaaagcaaaatgccctgtaagtgtatctgttcccggtctggatcagatccgtaagaagatgtatgaggaggagatgagatccagtggtgttgtcataaacagctttcaagagctggaggccttgtacatcgag

SEQ ID NO: 69666 - DNA, 497 bp, Zea mays
  unsure (1)..(497): unsure at all n locations
tcttgatgggctacattggtgtgatttcattttctgtcttatctttagaaaattgtctctttttgtcaaaagttggtctcttgtggggagaatgttggatatgggaaataaggggagtttttgaattcttgatcaatttctcttggaatgtctctctctatgcctcaacaagtgattttcacttagagataggaaattgagtttgatttgcaaaaacaaaccaagtggtggcaaagaatgatccaaatatgccaaatttgaatcaaaacaaatttgagttttcatttgcattgatgttgcacttcctttagttgcttttgttgtgttggcataaatcaccaaaaagggggagattgaaagggaaatgtgcccttgggccatntctacagtatttggtgattaagtgtccaacacaagtgcctaagtgtaatatgtgcaaagacttaagaagtgcnatcaagagtaaaggatgttctaagactagtacattgtttgag

SEQ ID NO: 69667 - DNA, 404 bp, Zea mays
  unsure (1)..(404): unsure at all n locations
ntacagatagttcgacctgtggacctccctatactctagcagcgacgcctccctgcttgccccatccaggtaaggcaatctctccctagctttcctaattacttggtcaagggcgtcccattccacgcttgtaatagcactgttttcctgggtggttctccatgttctaataaacatgatgatcttatcatgaaaaataaataaaacaacaacataattggaacatggtcataataaaacattaatttcacaaaaccaggtagagcaatagcaaatctacccaataattcatctgtttgaaggtgggggtaaacaatgctaaggaaacctattangtcccatcaaattaacctaagcatgtcacagtgattaatanggacattattaggtaaagaaaagtgatc

SEQ ID NO: 69668 - DNA, 76 bp, Zea mays
caaaaacgagagcaccgcgggcaattctttcgagcagccaaatggcccacacacgagtcaacaatcatagccggcc

SEQ ID NO: 69669 - DNA, 448 bp, Zea mays
ataaccgctgcgagaccttgtcccgcttctttctaaccataatgaaagcgatatcgaatgtcatacttgatgcatattcactatagttgttcccttgtatgatgtactgttcgcttcccaattagaatggatgaatgtatgtatgcttgcaatcgcatagagaacgatccggtcgaagagcccgatgaactcacaggagaagcccctgagcagcactcggttgagggaggcaagtgtcctttgacctatctctgtcctattcattctctaattcacctcccgctttacacaattatacctaaggattgactagctctcgctatccatgtccttgtttacctatatgggttggattattattatttagctttatgctattgctcaactctaatcaatgaacatgatgagactatctatgatacgctattatgccttctcttattatgat

SEQ ID NO: 69670 - DNA, 406 bp, Zea mays
gcagcatgcaagctggggcccatagagaaacagaaaatcttgtaatcttggctgtcgaaccgcttgccggtgtcatctgttagctcgaacggtgctccgaagcggcaaacgaagatctgccacaagaattttgggcagaccttgatgagaacgtggaaaacaaccccgcctacaaaccatttggggaagcattcgacggctacgaaagcgaacttaaggttccactgagcggagggcacgggctcgacgatggccaagccccaccgccggagaggccaagtatgggccatcagccttgcatattgcgaggggtcgcctgaccgatgagagaccttctgcaagcttcacaagacctctgtgaccccattaggcggcgcagatcattgcaggccacataaacccctgt

SEQ ID NO: 69671 - DNA, 480 bp, Zea mays
  unsure (1)..(480): unsure at all n locations
tctaagggagagcacattntgggactaacacatgttcattttgagaattacanggttcgtagcgcatgtcaagcacgaaagcaagttgatacccatcatccacacaaaaacatcatgacaacggacatgccactagagttactccacatggatctattcggcctgatagcttacataagcatcggcgggaagaagtactgtctagtaactgtggatgattactctcgcttcacttgggtattctttctgcaggaaaaatatcaaacccaagatactctatagggattcttgagaagatctcagaatgagttcggattgagaatcaaaaagataagaagcgacaacgagacgaagttcaagaactctcaaattgaatgctttcttgaggaggagggcatcaagcatgaattctcttctccctacacacctcaacaaaatggtgtagtggagatgaagaatagaactctactggacatggcg

SEQ ID NO: 69672 - DNA, 327 bp, Zea mays
agcttcatctatctgcctgtgcagagcagttattttatccatcttttccttcttcctttgtacttgctgatggagcatctccatattcccgatctctcggtccaagtcgtcctcctggggcgttggactggcggccttcctctcctggctatacgcctctcgaagagaaagggtctactggttcgggtccagcggctgcagagctgtagcccctgtcgctgtaactttctctggcggcatgacgaatgtcgatgcttgtcgaacgtgctcaaaactaacaagtggaagtgagatcaccggaagtggtcgccaatgttggtgactcgt

SEQ ID NO: 69673 - DNA, 453 bp, Zea mays
tgtgccttataacacgaggatacaaggagttggagtgcttttgtgattgcttttacgaatcacttgaagcgttagtacttttgtgaatgattttgtaaagtgtttgcaaatatgtgcaaaacataataacatgtgtaggttttgtgaatgattttgttgtggtgcttgttgatggtttatgtgatgtggatctattattgtgcaatactaattataattgtatatctatgtgattatgtgtataaaaattggtgatttgtgatgcttttgtatatataaaagttgttgaatgctaattaatggtatattatcattattaacgactataactatggacaactttctgttggttgtaaatgtatagtataacgactcacgattggttgctaaatctatagtacaacaacctacaggtggtcgcttaatatacaatattagcaactgacggtcggt

SEQ ID NO: 69674 - DNA, 475 bp, Zea mays
ttaagcaccgctgctgcagcttgacacatagctcatgtgatacctttgatttatctcttctatatgctatgactaatgtgttttcaagtctatttcacaccaagtcataggtatattgaaagggaattggagtcttcggcgaagacaaaggcttccactccgtaactcatactttgccaccactccgagcaactctctcttctttgggggaaaaatgagcatcaaggaaaaggacttcatccttgggggagagagtaaaagctcaaacgcaaaaggacttcgtctttggtataatcttaactcacttatttatgaccaaaggggaagattgcaccttcagggctctaatgattccgtttttggcgattcatgccacaaagggggagaaatgatcccaaagcataaggaccgcaccaccaccaccaaattcaataacttaagtgcttctcaaagtctttacattcggtacctagtg

SEQ ID NO: 69675 - DNA, 476 bp, Zea mays
  unsure (1)..(476): unsure at all n locations
tgaagctacgatgtaatatcttggagctcgtcaccattccatgaccttggaactntgtttccctccatgtcttttaatctgtaggagcctggtctgttcgaagctgacaccaaaaagggatcttcccactctacttacaatttgcttgctgtgtctaggttagccacccttcgtagcactagatgacttggcactatgtttttgagcttgacctttctatcttgccaccttattgtttcttcttggtactttcttatatgcttgattgcttcgagccttgattcttctaatgcatctttcgaatttttntgttgtcctcaccatctgtcaaagctataatccttgcagaacccaacttgatctcttcggnggtgacttcttcgtccttgaggagatgcttgaatggtgtaaaacccacagatcttgatattgaagtattgtgatatcacacaactttgataagttcttctgtccat

SEQ ID NO: 69676 - DNA, 380 bp, Zea mays
  unsure (1)..(380): unsure at all n locations
agcagcagcnacccagacaggaagggcagttatttgtctcatatcaacacacacggagtggccataatagacacagacggagacactacactgagactcactctctcgtgcaagacaccacgccagtctcatccttaacaaagacaaacccaaaactcggcacctaacagaggtacacgttggcagaagttgaacacaacatgggcatgatggagccaccaacaagtgcgaccccggagaacacgacaaaccctctgaagcaacatgctatgttgagaacaaaacatcttatgatgtcccaaagcaagactaagcatcagaaaactcattaacaaaacagcgaaccaaggaaggggaaacagttccaacgaaagaaatgc

SEQ ID NO: 69677 - DNA, 458 bp, Zea mays
  unsure (1)..(458): unsure at all n locations
tctagctgctatttcgaatgcatttcgaatatgtgtacccgtaagttctgagctaaatccagacaatccgccctgagcaagaaactntctattatggcttgtttgggtaaaccaaaaaccgtcttcaacacataaaccttgtgatgtggtacctgaatatttgactgaacagtgcgcacgtcaatctttcctggaaacgattgtgtgcgcgcacgtgcacgaacaacaacacaccaatatcaaatctttcctgtgcatcatatttcatgcatacaccattaaccaaaaatacaatctgtgggggtgtggnggcgggcacaatcaataatatatcatcaatctaaattctaatttcatgcatacaccacaatgaatgttagatcatataaggttgaagaatgttgtaaaggctttaaaactncagataaaacgcaacatttcagaagtcatgatgttca

SEQ ID NO: 69678 - DNA, 484 bp, Zea mays
  unsure (1)..(484): unsure at all n locations
ctcagctttacccccgcccgactgcttctgcgccgcggtttgttcttcaggtccatcntcctaccttcctcttcttggtcttaccgcaattacgatgagttagctacgagggcttcggatatggcttggtgtggctactggtgcacagcgagatgaccctggggcaggagcatatatatccaggagtccatcagaggaggcggagtatcccaacaaccccgacagcgacccgcacgcatgcaacagattcgtgcggactcagattgtctggtggagcaaggtgaacctgacagaggggccccacctggcggagacagcaaagccacangcgtgttggcgtgaggctgtcccgtgggaccagcgtgttagcgcgtgggtgcactgtgttgggtncgcacgagtggacggtaacacacatgggccaccagcgtattcaacctagannagtgtttctcctttttctttatgtgtgcatttgttctcc

SEQ ID NO: 69679 - DNA, 411 bp, Zea mays
agcttctaaagggagaccacgtgatatgattatctatatgtgaaagggaattaggctcacacctagtccctaattgatattggtggctgaattgcccaacacaaataattggactaactagtttgcccaagtgtatagattatacaggtgtaaaaggttcacactcagccaataaaaagaccaagttttggattcaacgaaggagcaaataagcaaccgaaggctccctggtctggaggcaccggactgtccggtgtacaccggacagtgttcggtgcgccaccggacagtgtccggtgcaccacaggaattcaactctaactcgccaccttccggaattttcataggcactcgtgctataattcaccggactgtccggtgtacaccggacagtgtccggtgctccaagga

SEQ ID NO: 69680 - DNA, 478 bp, Zea mays
  unsure (1)..(478): unsure at all n locations
tactcagcttgtcaagcatgtttggtacccatcgctggatgggtccattattgntagtcaacaaagatctangaacccgaatgtcctttgcgctagcgcttggcaaattcattgcctttctagcacaagttgcaattttgggttgcctagttatatatgaatcaaatgacaagctatgagtggaggagttaccaatgggacaatccttgcattgatgtcccttttcccggcatgtgtagcataggcgttttccaagttttgaagatttcttcttttcttgtttggtgcttgctacatggttagtaaaaactntattttctaaccctatgcccttttgttttaaatggggacaagatttaataaagtgttccttctttgaacatttaanacaaggttngtcattcttggtaataatcaagtcatttntaatatanggacatgatctaatcaagtgcccctcttcanagcattcactaca

SEQ ID NO: 69681 - DNA, 462 bp, Zea mays
  unsure (1)..(462): unsure at all n locations
ggatccttaagtcacctgangctgcaagcntcgcatagtgacatgatctttattttgttcgaaccgacttatagatgagatgaccaataaacccatgatagtttgtgtcattattgtaatcaaatataaagggcatgagtgtaattttacatgggctgcgtctccgtgcctataaatagatgaacagtgctcccgtactgttcacactgacttgtcatttgcttttgcgtcacgcttgtactntacattctttcaagccgaacgtacatttgtaacttgatatcattcctatttttccatgataataaaatagaaatgagctaacaatgatacataattggtcatgttaattcttacatctcatatgattctcctttctatattatatgttgcaataaatgaagatatgttcttcatgacctatctctgaagatcattatatcctaaaggatataatgtctt

SEQ ID NO: 69682 - DNA, 415 bp, Zea mays
  unsure (1)..(415): unsure at all n locations
catgcaagctgagctgtgatagagaccgtccttttaatgcggnaactatcaagaacaagtatcctctgcctcgtatagaagtactttttgaccagctggtccgagccaaggtatttaccaagataaaccttcgctccggctaccatcagatcaagatacgagcgagcgatattccgaagaccgcattctcaaccagatatgggctatatgaatacatggcgatgacattcgggctaacaaatgcaccagcatatttcatgtatctgatgacatccgctttcatgccggaattgacaagttcctagcggactttatcgatgatattttggcgtactcaaagaacgaagaagaacatgccgggcatatgcatgtagtgcatcacagtagcgagagcaccacctttatgccaagttat

SEQ ID NO: 69683 - DNA, 448 bp, Zea mays
  unsure (1)..(448): unsure at all n locations
tgtcgatcccaagctcactcttgggtcttgaggccaagtatgaacagatgagcacaactgcaggaggatgtggaggctntcattttgactttcagctcttccaaaggagacaggacaattgttgaagagacacacaacattgtagaggccattggatcagccaaaggaattcaagtacggagccaccaagagcatcagaagatatacttgtcatctttgaagagatacgcccaagcaaagagacggttacaaaggaagctgaaccatgcccaaagcaagatatccaagctagcccaacagctgattatatttctggaaaatcgagacaaattgttcccagatggaatccattccgatgagagcgatatggaagatggaagcagctgtgagaccatgagccatgaagaggtgcaaggttcaagccactcaccgtatggaagcgaacctt

SEQ ID NO: 69684 - DNA, 324 bp, Zea mays
catgcactgagaaggagaaccgagctccgtaactctcacaaaacgagtcctaagcatgagagaagcaacaacagaacaagaaaaagggaaaaataagtatcaatgtgttgactaatgaccttttatgcctccagagcaaaaaggagaaaaaagagatgttcaatgcaggagtgggtcacttattgcttcatgccacacatggcactgtgataagggaggaggtgctccacatacacagaaaatatgtgactgtatatctctataagaataagacggcatcccacattgctctaccagacaagaagacacaagcgtctataagct

SEQ ID NO: 69685 - DNA, 469 bp, Zea mays
  unsure (1)..(469): unsure at all n locations
tcagctccatctatgttatggattgcctttgagtctgtctattttccttcggcccttctggcagcttcctgacttccatgaatggcaataggtccttggtccgaaggtatcttcatgcaaagatatgctggatgaagaattgcttcgaaggcattgagagtaccacgaccaatgattgcattgtaagggtattccatgtcaacaatatcgaacacaacttgttcagtccttgtgttgttaataaatccgaaggttactggcattgtgattnttccaagtgctacaatctgccttcctccgaagccacaaaggggatgtgtggcatcatggattntgtcttcgggctcttacatctgtctgaaggccttagcaaatatgatatcagctacgctgcctgtatcaaccanaacattatggaccagaaatcctttgatcacacaagagataaccatagcatcgttgtgtgggt

SEQ ID NO: 69686 - DNA, 400 bp, Zea mays
taattatgttgataaaagtgcctaaatctttagagaacagattctgcataacatcatgagactgaaaaactgctatgatcaaactgcaataactctctgatctaatgaccggatgaggtgttcttcacggccacggaaagatctacaaattatctacaactcatatatggaatcttatattttatgccactaagaccaacgaaaactggcatgaacagaaatagtccaatctgccattctgcagacattaaattcgagatcaaaatctaaccccacatctaatacaacctctaatactttaatcctcatgatccagaacgctcataaacacttaataacagggaggaacatggatctcatacctacctaaggtttctccacaaaaaactgcaagaagaga

SEQ ID NO: 69687 - DNA, 387 bp, Zea mays
  unsure (1)..(387): unsure at all n locations
ntatcacccttngcatttgcccctaatttcctaacaactatcttcctatcctttctacaaatagcaaaggaagcatttaaagcatgataaattgtagagggaccattcataacttttctaggaacatgaacaatattcttcctaggcacatgatgaatatttttcttaggcatatctctaccatgcatataggaagaactggaagcatacatagcataagagtcataggcatgtgaatcaaaagtattacaactcctatgagattgtcttctatcactgtacataaaagcatggttctttntagtactacttgccataggggccttccctttctccttggcggagatgggagtcttatggcttggtaagttcttggcttccctcttg

SEQ ID NO: 69688 - DNA, 443 bp, Zea mays
  unsure (1)..(443): unsure at all n locations
agctntacaatttacatgaggctagagatttgtgtatttcttattcaagaagtcttgggtttcccatgtaacctcatcttcataatgctggttccactgtatcttataaaacttgagagtgtttctccgggtaaccctgtccttttgatccacaactcgacatggatgttccgagtatgttaaatctggttccaggacaacatcagtcacttcaactgttcgatcaggaacccgaagacacttcttcaattgtgacatgtggaacacattatgcacagcagacaatggtttggggagctgaagtcggtatgccactggtccacattgcttatgactaggaatggaccaatgttcctgtgtgccagcctccctctaaccacgaaacgctatacacccttcattggtgaaacttttaagttgaacttgtcgtctacctaaagcat

SEQ ID NO: 69689 - DNA, 380 bp, Zea mays
  unsure (1)..(380): unsure at all n locations
tgtgctacaaatgtggtaagcccggtcatcttatagctacaattcctatgtcaagtgatagtaacaggggcgacaacaagaggggaaagaggaaggaaaaaaagaagtactacaagaagaagggcggtgatgcccacgtatgtcgggaatgggactccgacgagagctccaccgactcctccgacgaggatgccgccaacatcaccgtcaaaaaaggtctcctctttcccaacgtcggccacaagtgcctcatgtgcaaggacgacaaaaggaagaaggtaanatctagagcctctaccacatatacaacttctagtgatgagggtagctctagtgaagatgatgataatttgttaccctctttgccaccttacatgcac

SEQ ID NO: 69690 - DNA, 374 bp, Zea mays
  unsure (1)..(374): unsure at all n locations
actcaagctggacaatgaggaaatggcgctcgtcatcaagagcttccttctatcttattcaaaggagggggaaggattacaaatcccgctccaagaaggtttgctacaagtgtggtaagcctggtcattttattgctaaatgtcctatatctagtgacagtgaccgaggtgacgacaagaaggggaggcgaaaggagaagaagaggtactacaacaagaagggcggtgatgcccatgtttgtcgggagtgggactccgacgaaagctcaagcgactcctccgacgacgaggacgccgtcaacatcgccgtcaccaagggactcctcttncccaacgtcggccacaagtgccttatggccaatgactgcnaaaag

SEQ ID NO: 69691 - DNA, 370 bp, Zea mays
catgcaagctacggctatggatgagagatagtggcagattatcattgcaaatagcaacgaatgctgcggtaacttcacacctactcgtctggtatatagtgctgcaggtaagaaagcgaagcgccacgatttttacaccaggcggacagccgcttgcactcgctgcgcggtggaccgcagagaccaaacagtaactctgcaagatgggaccggtacacgctgggaaactgaatcgtttcttgacaacgagctcagggaaggtggtttttggaccttctgcttcccgaagcataagagacttttttcacggatcaagctccgtacgaaaaacgaactagcgccgtgaatggggccactcgtcgggactatg

SEQ ID NO: 69692 - DNA, 475 bp, Zea mays
  unsure (1)..(475): unsure at all n locations
tctaagggagaaacacatttgngactaacaaatgttcattttgagaaagacagggtttgtagcgcatgtcacgcagggaagcaagttggtgttcatcatccacacaagaacatcatgatgactgacagaccacttgagctactacacctggatctattcggcctgatagcttacataagcatcggcagaagtaagtactgtctagttattgtggatgattattcttgcttcacttgggtattatttttgcaggaaaaatctcacacccaagaaactttgaaaggattcttgagacgggctcaaaatgagttcggcttgaggatcaagatgataagaagcgacaacgggacggagttcaagaactctcanactgaaggctttcttgatgaggagggcatcaagcatgagttctctttcccttcatgccacatcataatgatgtagtagagaggacgaatcgaattctattggacat

SEQ ID NO: 69693 - DNA, 461 bp, Zea mays
agcttgtagctctgatcctagagggattatttatttttaaagcaagggttcaatcattatctccaagatttatgttatgccaatagaagttgctgaaggagtttcgacagagcgcctcggcggagaagacttttcttcttcatcacggatcgactccataatttcccatttcttagataccgaaagttccggcgacatcttcggtcttttctatagccttttctttttgtccttctcaatagatcttattgcttgtcttttcaggatgcttacaactcttttcttcttcactccctcggcctcttcgttaagtctatcataatcaggatactcgaagccgagggcatccatcactcggtttaaccttcatgtctcccgtgtgtcgaatgcagcagtcatcaactggtcttccttctcagtatagttcccaacgatgtcatcgcacattggttttaaaacct

SEQ ID NO: 69694 - DNA, 402 bp, Zea mays
  unsure (1)..(402): unsure at all n locations
tggatgccatatattnattagggtggttaacaagttgactattacatantactttggtaattaaatactccatccgtcccaaaattgtagtcgttttagggaattattacgttcatattaatcttgatgcatgtgttttatatgtgtgtctagattcatccccatccgtttgaacatatacataaaaatcaagagcttaaactactatcattttggaacggagggaataataggtagttgtaacgccccgaattatgcaggtgaattgtgtcttttctttactcgccaaaattcaggcgttaccttatcttttattttttcccctcgcttaaccttgactctcttcaaagttctagcgggattacgtttggatttccgtgtaagataaaccctaatacttta

SEQ ID NO: 69695 - DNA, 467 bp, Zea mays
  unsure (1)..(467): unsure at all n locations
cctgaggcatgcagcctacggttgttcctttccaagaatttctcttttatcttatcaaagtactttagcagccattgttgaactggaaaaaccgtcagatgattaatctgttgggctgttaataatgatttaaccaatgtttctctgcctgctttagagagtagactgcctttccaaccggccagtctgttgttgattctttccagtagcggttgcaaggagatctttttaatcttcctcaagtggaggggaagaccaatatacttttcaggtaagttagcatatttacccggcaacacttctgcaagatttgaccacagcgactgaggataacgaactggaaagatttctggtgatcanaaaatatctttagctctgaacaaccttctaagactttcaagaatctgttngagaactctgaggtccgacttgtctgctcttacaacaccacagcatcatctgcatat

SEQ ID NO: 69696 - DNA, 431 bp, Zea mays
  unsure (1)..(431): unsure at all n locations
atatctgacaatgacgtgtagatttgacaatgtacactttgtgctatgctgttttatatattcttaaaccacagtcgacttaaatttgggcactgaaaactgtgtcaatatccaaaatgacatttatttatgattagattgaatattttcattgctataaactctatgttatatctaaagatctaaacatatgttggttacttggttacgaatactgtaacaccctagcccagaagcctgtaatattcatgaagttggcctatgtggcacatgttgttgtggttggtgggtgtaatatcacctgagaagtgtangatgcgaaggctagcttataattcttcgtcgtctaaacgtagcaccttagggctaaccttttacatgangacggangtgtaatacaagtgctatgcatatggaggctgggttcacgt

SEQ ID NO: 69697 - DNA, 390 bp, Zea mays
agcttcccggaggtcatcagaacagtatatattattttctccaattctgaataatgtttctttgataaactaagaacttcagacacaaagtatattggggcttgctttttgacttggccttcaatcttctcttggacaagtgctgcacttaccgctgagtgtgaagctgccacatataacaacagaggagcccctggcgttgggggagttagtgttgctaggtctatcaaatattgcttcaactcttcgaaggctctctactggactgtgccccattgagaaacttccgctgacttcatcacttccaagaatggtaaatctctctctactgatctagatatgaatctgttgagagatgccaatcttcctgtctatctttgagccccttct

SEQ ID NO: 69698 - DNA, 463 bp, Zea mays
  unsure (1)..(463): unsure at all n locations
atggaactgttttgttaacctactcaaagatggaatggttagttctgaaattcagacttaaagaaatctcggccctgtagtttttgcagtgtgaagcaactntggaaacgtgttagtggctaatccatacatttatggagtaagggtactatagcaaagtgaaagaccacatgctggtagggtacctaatcttagatgaccccgtgagctcgttcatgaagtagattagatactgaactatntgtacatgcccttcttctatctgtttgaccaccaactaggttcttaccacgtgagtcatacatganatgtacaacaacaaatcttcagctggctgatcatagtggcttggtttgagaactgnnggttgtcaggaacttcttgagtgcttcanatgcttnctgcacctttggagtccactggaatctgtcaccttcttgagaatctgagaatggcattccct

SEQ ID NO: 69699 - DNA, 357 bp, Zea mays
  unsure (1)..(357): unsure at all n locations
agctctggaccagggagtcgctttatatgtctttttcctcgctgaccaagttatgggctctgttgatggtactgagttggctcctgctggctcgttgcaagctgctttctgtggcggtctttaccctggtcatcaaatgatctctcatgatttgggggtcccttccttcttttccaacttccaagtactgcgatatactttatcttgattnttacaccgcatgaactgctgtcattacactcatctgttctccttatcaggctatggtggacggtatggctagccaactgagattacaaggtgcttctgttccagaagtagcttcacattttgacgttggaatcagtgtactttaaa

SEQ ID NO: 69700 - DNA, 413 bp, Zea mays
  unsure (1)..(413): unsure at all n locations
tcaactccatctatattatgggatggccttggaatcagtctagtctttcttcggcccttctggcagcttcctgactcccatgaatagcaataggcccttggtccgaaggtatcttcatgcagagataagctgggtgaagaattgcttcaaaagcatttatggtaccacgaccaatgatggcgttgtaggggtattccatgtcaacaatatcaaacacaatttgctcagtccttgtgttattaacaaatccgaaggttaccggcatggtaatcttcccgagtgccacaatctgccgccctccgaagccacatagagggtgcgtagcatcatgaatcttgtcttcaggctcttgcatctgtctgaaagctntggcaaatataatgtcagctgcactgcctgtgtcaactatgaca

SEQ ID NO: 69701 - DNA, 123 bp, Zea mays
ggccaaaatacaaccccccttctcaaacgcaccccgccaaaagccaagccccgcccaaatctcaaccccccggcgacccaaaggcccggcccgacaacacacatgaaacccacacgcaacagt

SEQ ID NO: 69702 - DNA, 297 bp, Zea mays
  unsure (1)..(297): unsure at all n locations
tattgcttacttggtgccgatcggttataaactacttattgcaactaatcctgttatcagtgtactccccattatcagtctaagctaagtgtgacactgcttcattctgaggctgggactcanattagccatactatcgttactttattctaaagatatctatgtgatcatcttataggacctatcgccccttttcgtggcgagggagctcctgttgatacagatggtccatatggaccaccaggtcctgacatgctctcgacatttgtcaattggagtacctatggagctgtgaca

SEQ ID NO: 69703 - DNA, 471 bp, Zea mays
  unsure (1)..(471): unsure at all n locations
cgttgatggtcatgatcatagtaccataccaaattctatatgtatgaagacataaactaatatacatgggctccagcactatgcatacactgatataaacatatggaggaaacaaaggactgatataaacacatggatacaagagaacttaacgtcgattacaatgtgacaataacaaaagttacactatgatgnttaatagaacagaattttgaacaacttgagatcaatgggcaaacctagataacttaaggtggtgcaaatgcaacatacataccatataacccaccttctatactaactcaatctacacatctaataggcaatgtaagctatcagcattctctttgcatacagataacatgcgaagatgcatactgcaatcaccaaagcacataataaggagaagattagtctaagcagacagacctggagtatatgtgggcgcatcgagttggtacacactgggca

SEQ ID NO: 69704 - DNA, 423 bp, Zea mays
  unsure (1)..(423): unsure at all n locations
gctgcgncctgtgtctataaatagtgaacagaattcctttactgttcacgcattctggaaattgcaatcgcatattctggaattcaaccttttgccaaggcagaggtattattgtattcaataattcaatatattaagtcaatataatataatccgtccatgaattatttatccctattataccttctattttatgtcgtcttacaatatctattgaaattttattacgaagactcaagcttcgtagttatactctcatctaccttccgtcaaagcccattatcctcaatggaataatgttcatggacgaaggacattaacatttaacactctatgttgccttgttcttaaatcataacatttgagaacaagtcccaacattggcgcccacctccggtgaactcacttcacttttgagctgag

SEQ ID NO: 69705 - DNA, 400 bp, Zea mays
  unsure (1)..(400): unsure at all n locations
taccacatttgaagcatgagcgcttncnctntgtcttggtcttgcttggctgccccttgcgaccctttagcgccgtcttgaatcttttgatgatgagggccatttcttcatcattaagtccggccgcctcaatttgtgccactttgctaagtagcgcctccttgcttcttgttgccttgagagtaaagggttgaggctcggtgattggaccattcaatgcgtcgtccacgtacctcgcctccttgatcatcattcgcccgcttacgaattttccaaggacttcttcaggcgacattttggtgtacctaggattctcatgaatattattcaccanatgaggatcaagaacggtaaaggaccttatcatcagtcggacgacgtcgtggtccgtccatcgcgt

SEQ ID NO: 69706 - DNA, 433 bp, Zea mays
  unsure (1)..(433): unsure at all n locations
agcttgtgaagagtcggcattccatcatgttctagtcggcgatgccagagccagcccatgttagtcttagcaattaagcaagtgtcgagttcagctctatcaagaattactaagtatagctgaccctctaacactcccttaaatgctattgaatcatcacttcttctaaagacagtgacacctatatcagcgaataaacagttgtagcccattttgcataattgagatacagaaagcagactgtaatctaatgaatctacaagataaccatcggatatagaatggtcaggagatatagcaaatctactcaaacccttgaccaaaccctgggttccatcctcgaatgtgatagctcgctggggatctttgttttctcgtacgaggagaacatcgtcttctcccctggcatgtggtntgtgcacccgctgtcgat

SEQ ID NO: 69707 - DNA, 463 bp, Zea mays
  unsure (1)..(463): unsure at all n locations
tagacctgatggtacaatcgagaggtacaaggcaaggcttgtgtgtcaaggatatacccaaaaggagggtgaagatttcttcgatacctactcatcagtggctcgattgactacaattcgcacattaatagccgtggcagcctcttatggtcttatcattcatcagatggatgttaagacagctttccttaatggagagttggatgaggagatctatatggatcagccagaagggttcattgcggatggtcaagagaacaaggtgtacaggttgataaaatcattgtatggcctanaacaagtacctaagcaatggcatgaaaagtttgataatactcttacagctgctggctttgctgtaaatgaatctaacacgtgtgtatactatcggtatggtgggggtgagtctgttatgctgtgcctctatgttgatgacatcttgatctttggatcnaatctcaat

SEQ ID NO: 69708 - DNA, 411 bp, Zea mays
agctatctaaagctctctatgtgctttatcttttctcccgcgcttggtatgaaaggctttaggatttcttgctttccaaagacttcacaattgggaaggttgacactactctattcactaaaagaattggtaaagacttatttgcttgtcaaatctacgctgatgatattatttttggatctactaatgaattattttgtgaggagctcggataaatgatgtcaaaggaatttgaaatgtctatgataggagaattgagcttctttcttggccttcaaatcaaacaattgagagatggaattttcataagtcaatcaaaatatttgagggacatgctcaagaagtttggtttataaaatgctaatcctatcaagacttccatggcaactaatgggcatttagacttagatg

SEQ ID NO: 69709 - DNA, 429 bp, Zea mays
  unsure (1)..(429): unsure at all n locations
nggcaatagactgaattctggatgtgatcttgaattctntgattnggctatctgtaatggaactgctgagattaaaaatgaagcaattatatcactacccataattgtgctgtattctggtcctaggattcttggagcgatgtttaagaaacttgagtgagtggacttgcttcccctttcatgattattgtagatgagatgtacttttccagttaaagttttgtaataagtttttttgtttgttacccagtacatgtgattctatcctttaagttgtgttcttaaatacaagcagttccatacttncatgatttcatgatgatattcccttggttgcttgctatangtcagtggatgctntangactcgagaaacgtgggaaacatatngccttttcacttggttttctatcttgctanatggaaccac

SEQ ID NO: 69710 - DNA, 452 bp, Zea mays
tgcagctatgaaatctgatgccacatggtttgtctgttgtgccagagccaacccatgttagttttagcaattaagcaagtggcgagctcagctctatcaaaatctaccaagtatagctgaccctctaacacttccttaaatgctattgaatcatcacttcttctaaagacagtgacacctacatcagtaaagagacaggtgtagcccatttgacataattgcgaaacggaaagcacattgtaatctagagaatctacaagaaaaacattggaaatggaatggtcaggggatataagcaatttaccccaacctttgaccaaaccttgatttccatcctcgaatgtgatagctcgtcggagatcttggtttttctcataggaggagaacatcttcttcttccctgtcataatggttgtgcatacgctgtcgagtatcaacttgagcccccggat

SEQ ID NO: 69711 - DNA, 346 bp, Zea mays
  unsure (1)..(346): unsure at all n locations
gatgtacccgaggcgccacttcgcctgcatcagcagagctcggtggccgatggtagcagcgcggccgccatgccgctgctgcacggccggcaacctacttgcgcgccggtcgccatgccaggtctcgccgagcccgacgccgtcgtccatcgcggttccatcggctggagcagcctcagtgtggtcgttcccgcggccagcagcggcggcggcaagtaccttctttnttgtgtgtcaagtccaagtgtcaactctgcattttttttttcggaactcatagcggtggttctcacgctgtctctgaacgtttctattttccagagatacaagacttggacttggagtg

SEQ ID NO: 69712 - DNA, 407 bp, Zea mays
  unsure (1)..(407): unsure at all n locations
attcacctcccctctaagngctctcaataggtatcagagtcgttctcttcacgtaagggactaatcgcccgaagagatggatcctaanggaaaggggatggtggtcaacgataaggagaaggagtccatcttcaacgagccaagagatgacaagcccactgactctggctcgagtcacaagaagaaggacgggaataagaagaggcacatcaagaagatcgtctactacgacaacgacgaatctttctcttcaccaagaaacgacgacgacgagaaaaagaaaccggttaattcacattcttcatttgattattctcgtattccttttaattccaatgctcatttgttgtcaattcttcttgataaacctccacactctgatggagaggactactccttttgagtca

SEQ ID NO: 69713 - DNA, 490 bp, Zea mays
  unsure (1)..(490): unsure at all n locations
cggaccttgaaactcagctttagtttctaactgggtaggtttacctctcttatccctatttatggntctanttgtaaaacactaaaaacaatacaacttgtttgaaatttttacctagtaaatgcactctaggtgtgtcaaacatatgcaatgccaatgcttatgatgctatgctcaagttttagttacagtaacaccaggggtgttacactatccatatactcaacagagtccctagtaaatcagtggctaaaattccatattagttgtggactggcagaaagcccacgctcaactacttccacatatggggttgtccagtagaagctagaatatttaatcctagatagggaaagctagatgagagaaccactagctcaccatttattggctaccctgagagatcaaagggttatagattctactgcccaagcagacatatcaagtttatagaaccagacattgccatttcctagaggatgacatgatc

SEQ ID NO: 69714 - DNA, 294 bp, Zea mays
gagaacagctctatacaaccgactaaggatagctgaccccctaacacccccgtaaatggcatgtaatcatcactccctctaaagacagagacacctacatccgcaaagagacaagtctaacccatcatacaaaaatgcgaaaccgaaagccagctatcatccacaaaatccacgagaaaaacatcggaaacggaatgggcaggtgatagagcaaaattaccccaaccattgaccaaaccctgagtcccaataccgaaagtgatagctcgatggggatcacggagtatctcaaaa

SEQ ID NO: 69715 - DNA, 378 bp, Zea mays
aatcaaagaggtagcacagcatgcatcatgcaagattattaccaacaggtaaaatatgaaatgtcgcatataaccatcatacagcagataataacagcatgagactagtattgtctctgctgttgcatttatcttgtggtcatatgccaagtccctgctttactggtcaatggtcaatgccctaaggtgttgggcaggcaacacgttatagcagggtttattggctagcattctccttccttaacttccctaacacaagactgcacaaaaaaacacattttaccagaatccaaacaatctcccaaagaatatacatctacaaaagcttcaggagaccaggaagctggaaatcataacattcagactagagcttataac

SEQ ID NO: 69716 - DNA, 333 bp, Zea mays
aatgccaggacgtctcccactataaagcatactacgagcaaacttaaatatttcattctctagtgcatgctccgcaatcttagcatctagtttagctatacgagcaccttgttgtttaatcatagcaaggcgagcatgaatagcatctacattaacatctctacatccagtgtaaatagaaacatgatcaaccgaagatgtagaggggttgcaatcatctaatataacaatcttagcatgctaaataccattctcatatctaagaatggaaatagaaacattgcaaacatctaatatcttagccttagcagataatttaccattctcaaactt

SEQ ID NO: 69717 - DNA, 407 bp, Zea mays
  unsure (1)..(407): unsure at all n locations
aagagaccattgattacatcatccgccatgcttctgtgtaaaaactgtctaaagaagaagaacaaggggctcaacattatgcccaaaaactaaaatacccaaagggggcattagtgttcaatggcagcggggaggaagattttttgtactgtctcccagataataaagagatatctgtctgccgggagatgggcagaagcttcgaatttccgacgttaaaagatggcctctcagtattatcaaaggatgaattggctgacagtttagcatataatagcataaaggtataaaagttaattttgtatttgaaaatgagttgttttatttgcttatatctaatcctgtcctcctcttgcagggcttaatcattagcaatgctcttagangcacagaaaacattgaagatg

SEQ ID NO: 69718 - DNA, 483 bp, Zea mays
  unsure (1)..(483): unsure at all n locations
tatgggttcccatgttacatctattcaggtgatgtgtgtataacannaaatactaactggtctgcattntcatcagatgttaacacaataatggcctgtgctntagaaacagaaacctggaaagggtcaattatttgagatcttattgtggaatgagatgaaatcaaagaccactgcatattacatggagcaaggataacaataatttataaatattataccttcctcaagtatgctagaattagaggaccgtcactcctacatattacagatgtttccatggagccaacttctagctntgctatgtccatctccatctcttccttgtccctttcagctagaacagcagctacaccaccactgatactcttatntgctagttgcttcagaagagagcccttgtccacagtgcagatatcgtaagcatgttgagtacactgaatgacaatangatagaacatgttcgtacgatttcaaagtaac

SEQ ID NO: 69719 - DNA, 452 bp, Zea mays
  unsure (1)..(452): unsure at all n locations
agctnnggctccatctataaganggttangttttttaatctgnccagnnaccttcagcctttctggcagcttcctaacttccatgaatagcaataggcccttgatccgaaggtatcttcatgcatagatatgcttgatgaagaattgcttcaaagcattgagtgtcccacgaccaatgattgcattgtaggggtactccatgtcgacaatatcaaacacaacttgctcagtccttgtattgttgacaaatacgaaggtcactggcatcttgatcttgccgagtgctacgatctacctttctccgaagccacagagggtgtgtagcatcatgaatcttatcctatggctcttgcatctgtctgaaggccctggctaatataatatccgctgcactgcctgtattaaccaaaatattgtggaccacaagtcccttgatgacacaagaaattatc

SEQ ID NO: 69720 - DNA, 418 bp, Zea mays
  unsure (1)..(418): unsure at all n locations
tgctacaggtcttcttctttttccatagcaggaaccttactggaacactaccccacttaataagaatgagggtagaactcttgaatcttggggatatgaactccttgaagtacctcataacaagggtgtcacggggccttcttctgtcgttgatgcttgagcacgctgcggagagttgactgacacaaggttgatcttgggacaaccttcttctcctcttctcttcgctattttcctttcacttttcactgcctctntctttctctttgttcttcccactggaggattctatcaaagagtattaccatcacataggaggaaaccaaagactatgaaccatgtacaacagtcttcaacccaagaatcactaagcattgtgatcttaggggcgagggagtagaatatggagttgcttgcg

SEQ ID NO: 69721 - DNA, 476 bp, Zea mays
  unsure (1)..(476): unsure at all n locations
acactataaaactcagcttatacaggagaatagaagcaaggctcgaccatatgtcataatagaaggggagttntacaagcgtggggtctgttccccattgctcaagtgtttatccagatccgaaggtatagaattaatgaaggaaatacatgcaggcctatgtggatctcacattggatctaggcccttgctagggaaagtttttcgccaaggattttattagccaaaggcagcttcggatgcagcggatctggtccaaaagtgcgaaggttgtcagaaatgtgcaaaagatcaaaaacaaccttcgtctttaacccaattaatacaacccacttggccgttgcaacggtggggcctcgatttactaggcccattaccaccagcaaaggggaacctaagatatgtagtagtggcagtggaatatttttccaaatggattgaggcagagcccttagccacaataacttcatttacta

SEQ ID NO: 69722 - DNA, 353 bp, Zea mays
  unsure (1)..(353): unsure at all n locations
agcctgagaaggtacgtcatccacacatgttcttatcggcgaagccacagncagcccatgctaggcttagctattaagcatgcatctagaccggcctcttcttttgcaaaatcaactaaataaaggtcgccgtctagtacaccctcaaaagctaatgaaccatcgcttcttctaaagacagacacctctatatgtgtaaatagacaattatatcccatatgacataattgactcacagatggcagagtgtatccaacactctctactcaaaatacatctcagatagaatgctcatcagaaatcagaatattacctaaaccttttaccttgccttgattcccatcaccgaatac

SEQ ID NO: 69723 - DNA, 479 bp, Zea mays
  unsure (1)..(479): unsure at all n locations
tcggggcaacagcaaggttccttccgaccaccagctcctagaggcagaggcgctaggggcttcggcggaagacttggagatcaaccaagaagaatcttttgcttgttttgtggagagaacaaaggccataccaccaagatgtgccatgttaccatccataagcaaaaggaaatagccgaagctgcagcacaacaaactcagccgaagcaggtcatgcacactgcttcgtatcattcgccttacatcccagagtatgtaggcaatcaccctgcagtttctgttgcttcggcgagtcaacctcaagcttcctggcaacagcctacgtcttcaccaccgctgcaacaaggccagcagccagaatggagccaatatgctgcacaacanaaggacttcagagaacagtacgaagctcgcacagtcgacagcactgtgccagagtcaaagcacatctattgacagatatcctaccttaataagca

SEQ ID NO: 69724 - DNA, 453 bp, Zea mays
agcttaacctttctagaacagtgctaccttctttttagatcatccttagtgctcatctcacaagtccatatgcttctaatccctgcggagatactctaacataagatcaatggcctctttgaccaactcagatcatcacacatgtttgttttgaaattttcgcttagtggatgcactcttagtgtatcatacataatgaaatgtcaatgcatatgatgtcatgccgaagttttagttcttcgtacaccacgggtgttagagtaaacaagttcccttgtcagaatcagtaaacaagttccctttccaaattacaattggtactgatacttgttataattgggagaatatggtgctgcaaaaacccttgttataatcagtaaagggtgttcagtaactgaaatttgtgtttcataatttttgtcaactttgggacaacaactttccttgaatttc

SEQ ID NO: 69725 - DNA, 453 bp, Zea mays
  unsure (1)..(453): unsure at all n locations
ngtccaaaatagttaattaataactccaaacaagccattcttttggaggttcaatggggatttctgaaattcagatttctaaattttcagcccttgaaccaaaaccgagtgtgttcaccttgatccttagctctaatcctagtgctcccattaacaaaaacgtgtctaactaacccctctgtcacatgccagaagatggcattgggacatgagccctagacacgacaaaaccaaggatttgcctcgggctcgggcagggagacagaccagacttcagggctccaaatctttgaaaccagtaggcaaaaccctatgacccccacacaagatcagtagcttatagggaggagaagaggttntgtgcactgaccaaggcgagagcangctcggatgaatgaccacacgtaccggaacttgtgcagaatgaacgcgcacacgtgttcgaccctggtc

SEQ ID NO: 69726 - DNA, 472 bp, Zea mays
  unsure (1)..(472): unsure at all n locations
cccggatccttaatcacctgagctgcagctcgtgatgaatcatttgttttctatantttgttgcacgacctggattaccaggtgtngacctcatctcgtacagggatatgagtaatcatgggcatctgatcactgaagcaatttcaatacctatgagcggtgatgcacataatggttacgaaaattatatgcatgttaagatgagtgaaaggatttattaacgctggttttgctggagttattgccatctcagtcaagaacaaagatgggccagaggggatatttaccaacaagaaagctgtcgaagcccatcagttcccaatgcatgtgaattttgataggttctctgtacgcattttggttggtgatgagctggtggtcaccggcatgggcgctgactgtcataatatcaccttctactacaggtgggcttttggacagactggtcatatttcccaattggtgctaccat

SEQ ID NO: 69727 - DNA, 493 bp, Zea mays
  unsure (1)..(493): unsure at all n locations
tctttgcattgtttgcgtctaggtcaaacagacattgttgtttacagggaagcaaggcagcttanggtaagctagctagccttttcttgtgaacgagctanggagtgtgatcatcagcgaggattgttatgtgatgaacttggatgtgaagaggcccaagttcaagacaaaaaaaacagtgcatgcatctcagatcatcacacgtgtcactagctagcatgcaggcaattaacaaggaatataccgagtcagttgtttaatgagagagtatatacgaccggcggccgtacgtaccacanaggctccatgcagcaatctttattctataatatatagctgtcagtgagaaagcttctgtcccttatctcattggaagagtggctccatcgtggaacacgacacgacacatgcaatcaagacaaatcagcagctgggattatatattatagctattatactacaggtcgaccacatacatatatataatatacac

SEQ ID NO: 69728 - DNA, 447 bp, Zea mays
  unsure (1)..(447): unsure at all n locations
agcttgtcttgaactcttgatgctggtcttatacaacgatataantattcttagcagcttaagtgttttatcaataaaactttgttcaaatgtttgtaactatctgtcatgtgaaagatacagctgaggttgatttcaacgtttcacgccacttagaatttgagcttgctgctaaagactggagtgtcttggtacgctattgctcttaaattggtggctgattcatttcttattccttgtggactgataatgttatgtctgtagacttatactcatcgacgtgccttgccaaagacgctgaagatgatctctagatcacttaaacacacacaaaacccaccgcagatgtaatgtctggcctagtatgaaccagatagcgctgactccccaccaaacttttgtacatcgtcacatcgacctctgatgntgagctcttcatcgagagct

SEQ ID NO: 69729 - DNA, 416 bp, Zea mays
  unsure (1)..(416): unsure at all n locations
tgctacatgccttcttattnttctccatgacaggaaccttattggaacactaccccacttaaaatgaatgagggtagatctcttgaatcttgtggatatgaactccttgaagtacctcataacaaaggtgttacggngccttcttctcctgttgctgcttgagcaagctgcggagaaatgactgacacacggttgattctgggacaaccttcttctcatcttctcttcactatcttcttttctcttctcactattcacttttcactgcctctttctttctctttgctcttcccactcgaggattctatcaaagagtattaccatcatacagaggaggaaactgaagatgttgaaccatatacaacagtcttcaacccaagaatcaccaagcattgtgatcttacgggcgagggagt

SEQ ID NO: 69730 - DNA, 417 bp, Zea mays
  unsure (1)..(417): unsure at all n locations
ttaatgatctatattcaagattgacccacggttattgtgaattgctatatcttatactcatatcatctcgaaggaagatattgatgttgtatgaaataaagaattatcctataccgtagaatcaagacctacaacatggatgaaagccaaaggatggtaacagatatgctctttagtgcaagaatcttagaatatcgtttctcatgtgtctcgtgtagtcacatagaaaaagaaagcacttataatgttcttaaaattatgtcaccattctctgaagatattcctctcatatggtagaatagatattcttcatttctataccatgacaacctacatgctttaaattgttgcaagntcctcatggcatgcttttctcggattatcttattattgccatgttctatatatagagagata

SEQ ID NO: 69731 - DNA, 379 bp, Zea mays
  unsure (1)..(379): unsure at all n locations
agccnncgngcacccactacctcgagcattatgttgttataccctanacctccctttcaccctatcttccaaaaccatggttaagagggggagagaataatcaattgtgcaaaccatgagttaatctttaaccaaactttaagttaccttataaccagcaattgcgggaaggaaatattgcaaaaagacccctggagaaaccccaaatccataccctatgtggagaaagagctagagctctttatttctctctaagncaataactacacctacactatagatcagccgtgttcaccttgaatatggcaccaaatccacctatgttttataccacaaatgtggcataccacctatggcacccactggaaaaagctgagcc

SEQ ID NO: 69732 - DNA, 339 bp, Zea mays
  unsure (1)..(339): unsure at all n locations
cgacctgacaaggtgagaagagacgtgtatatgacaataagcgtcccgtgtagcgatcgaacttgagatcctatatgcatggagatacatgatggtctcagatacagtggatgtattcatagttatggagattatgcgagaatgaagttactgccagaagaaatggatagaggagtggctcatggaaaacacttggcacccgcatatgtgaatagaggagcagacttcatgaactgtgtactcgctaactcccataagagccagacatcttatgtccgcgcggcaattgctgagtcaaagatgcgacctcccatngaattcaaactcatcacacgtctt

SEQ ID NO: 69733 - DNA, 422 bp, Zea mays
  unsure (1)..(422): unsure at all n locations
actaagctgcttcttgccgaggtanggcaacaacactcgacatttaactttattagtgcccaggtattccttctctggcgagtgctatgaccttgacactccgcaaagcacctctttgtctagtgtaacactcggcaaagtgaccagtatacaccttttttatttggttgtgctattccatgcgaacaaacaaatgataccatatatacatgacaaatatcacatatacatcatagatatcatcacagacataagtatccaacacatacataagtattcgagttctcaacacaaacataagtatcaagaacataagtctcataagtatcaagctctcacataagtatgcaacacaaacataagtatacaatacaacattaccaacaagttctgaagtcgcaacactaaaaacataagtctca

SEQ ID NO: 69734 - DNA, 503 bp, Zea mays
  unsure (1)..(503): unsure at all n locations
ntgaaagaaaatattgaatatattatccgtcatgcttcgggaaaattatctctctaaagaagaagaacgagaagctcaacgctatgcccagaagctgaaatatccaaagggggcattagtattcaacggcagcggagaagaggatttcttgtattgtctcccagacagcaaggagatttccgtctgccgagagatgagcagaagcttcggattcccaacattagaagatgggctttcagtgctgtcaaaagatgaattggccgacagtttagcatataatagtataaatgtgtgaaaatcaatttttgtacttaaaaatgattttttttcatttgcttatactcaataccgtactccttttgcagggcctgatccttagcaatgccctcanggtgcagaaaaatactgaagacgaaggatgcactatagctctaaacaaccttcgttcagaagtaattgaactaaggaacgaaggtcttgaataagataaatattaatttatt

SEQ ID NO: 69735 - DNA, 428 bp, Zea mays
  unsure (1)..(428): unsure at all n locations
agctnngngcatcactacgctcggccaagtttatattataaggcggncatgctcaaacttctagagagagcgagagagcaatgccaagctcgttcaaggctagaagatatattctccatcaagatgcgacactctgacgagttgactaaagaacatgaggagctaaagtgccctcatgttgaataggtccacaggtgtgaaactatctcaatagagcaagaataccgcccacattgtatcgctcaattagtaaataggaataccttgctcaacgaccaactagaaaagctaaaaactgagaatctatctttctaagaccaatatgacatgctcctatgccctcactgaaatacttagagatgatcatatcatattaaacatgtgtcatgagggggtgatcgaaaatatataatctccacaaccccact

SEQ ID NO: 69736 - DNA, 470 bp, Zea mays
  unsure (1)..(470): unsure at all n locations
tgacaatgaggagatggcgctcgtcatcaagggcttccgtctaattctcatacaaaggagggggaaagactacaagtcccgctccaagaaggtttgctacaaatgtggtaagcccggtcattttattgctaaatgtcctatatcaagtgacagagaccgacgcgacgacaagaaggggagaagaaaggagaagaagaggtactactagaagaatggcggcgatgcccatgtttgtcgggagtgggactccgatgaaagctctagcgactcctccgacgacgaggatgccgccaacatcgccgtcaccaagggacttctcttcctcaacgtcggccacaagtgcctcatggcaaaggacggccaaaggaagaaggtaaatcaagatcctccactatatatgaaacctctagtgatgaanatgctagtgatgaggaggataatttacgtactctttttgcaacctcaacatg

SEQ ID NO: 69737 - DNA, 431 bp, Zea mays
  unsure (1)..(431): unsure at all n locations
agctnctacagggagagcacgcgatttgttttactaacgcgcactacgaaaaagagagaccttgtgcagcttgtcaagcaggtaaacaagagggaggagcgcatcacagcaagaacgtgatgaccacttcaagacccctggagctgctgcatatggacctctttggacctgtcgcctatctgagcatacgagggagtaagtatggcctacgtattgcagatgagtattcccgcttcacttgggtgctctttctgcaggataagcctgaaacccaagggaccctcaagcgcttcctcacgagagctccaaatgagtttgagctcacagtgaagaagaaaatgagcgacaacggatccgagttcaagaaccttcaagtggaggagctccttgaagaggaagggagcaagcacgagttctgcgctccctacaca

SEQ ID NO: 69738 - DNA, 499 bp, Zea mays
  unsure (1)..(499): unsure at all n locations
tagccatggcaagtctacattaattaagagtttctcaaatatttttagcanaaagggtgaactaacaattaaatgagcacatgcagatttttaggacagcagcacagcagttacttattttaatcataactcttcaaatatgaatctaaaaatagcaaactaggactctctgaaaagcttaagaagtgctctacaactntggtatttttacctcaacatgattcaacacttagcaaggtcaaacagtgctaacacaacaactctgtccagatttggacagattcagacttgcgactntaaaaatccctaactagagattcaggcattcaaataaattgatcctagactttctggaaatataatgaaactggctacaattcatttataaacatctcaaggtgattcaatatgcaatntatgataaacgtcattagaaggctntgctgtccaaatttggacagattcagtcttcccattttaaacatccataacttaatct

SEQ ID NO: 69739 - DNA, 330 bp, Zea mays
  unsure (1)..(330): unsure at all n locations
atgttctattcggcgacgccatanccagcccatgccagtcttaaccataagcatgcatctagaccggcctcttcttttgctaaatcaactaaacaaagtgtgccgcctagaacaccctcaaaagctagtgaaccatcacatcttctaaagacagacacatctacatttgaaataaacaaatatatcccattggacataattgactgacagagagcaaatcatatccaagactctccactaagaatacatttgatatagaatgctcatctgaaatagcacatttacctagccctttaccttgccttgagtcccatcaccgaatataaatga

SEQ ID NO: 69740 - DNA, 483 bp, Zea mays
  unsure (1)..(483): unsure at all n locations
tataagtttctggatgagaagtggtcacccaagttccgttaatgaagcaccaaaagaccaatcaagtaaggaatccatgtgggagtttgcaagagaaaggtttgtgtgttggcatcgatgcttcttcaataagctagttgccaagcgaaagccagaagcctaaagatgatcttgagtagccagaatcagtgtttgcaatcagcagccggatgctccgcaatggccagatttcgttgaaattccatctcctcgaagagttgcaaagtgaagaaatgtagctgaagtaaagctatacccataacccttctaagccgaatctcgaggacgagattccttttaagtggggtagatttgtagcatcccanaaattcaaatcctgaattnttctcaaactccctgtaaattcaaaatgaacttcaaatttcgtttcanaatgtgtggttgcaagtgatatcaacanatanactatagtggtctatattc

SEQ ID NO: 69741 - DNA, 362 bp, Zea mays
  unsure (1)..(362): unsure at all n locations
nnagcacccttgagtgatgagtggcgcttgtttattcttctgcaggatgcatataaaagccacacctgcattatatgaagaaaaatagacgtcagaagaaataattcatgaaagcaatggttatatatggcaccctatattgatatgtgtatagcatgggccacggaacatcattaatgatagaacacccgtctagggcttggggtctttcccatgttattaccatctcaccccctctgtaatgggccatgcccaattaatcaagtctattaataccacacccaaccctgattagggtagggtattcttcctacatggtatcacagagctaggtttattttttttacaccctccttcctccc

SEQ ID NO: 69742 - DNA, 476 bp, Zea mays
  unsure (1)..(476): unsure at all n locations
actaagctgagtagtcctctataaagaatatgacgccaaagtaatttgagggagtgaacacanttatgagaaaatggagccagaaagccaactgcttcagaagagatgatcaaggtgttgtatggtttaacaaccgcatagttgtgcctaggaatgaggagatccgccagtaaattttagatgaagcacatcttagtcgctattctattcatcctggaagcactaagatgtatcatgatctaaaacagcattattggtggacaaagatgaagattgaaatcgcacactatgtggcaagatgtgacacttgtagacgtgtcanagccatacacatganagatgttggtccattacaatctttacctatccctacatggaaatgggaggatattagtatggacttcgttgtggggtacctagacagcaaagggtatgattcatcttggtattgtgatcacttacaagaatgccacttc

SEQ ID NO: 69743 - DNA, 479 bp, Zea mays
agaattccatggtagtagcataggcaagtcattaccaattgtcttaagcctagctacgggtgcataggtttcaccgaaatccacacctttgacttgtgaatatgctttggctacaagtccggctttgttccttatcaccacaccatgctcatcttgcttggtgcggaatacccactcggttcctacaacattttgattaggacgtggaactaaatgccatacctcattccttgtgaagctgttgagctcctcttgcattgccaacacccaatccgagtctcttagtgcatgctctaccctatatggctcaatagaggacacaaaagagtaatgttcacaaaaatgtgcgactcgagatcgaagttgtacctccttatgaatatcgtcgaggatggagttcacggggtgatctctctgatcgcttgtagactcttggtgtggggtcttgatctgaactctgctatttcttgcttatcatg

SEQ ID NO: 69744 - DNA, 481 bp, Zea mays
cccggaccttaagtcacctgcgggcatgcagcttcttccatttacacgctaaatatagttatttcaagaattctatcaatagcctgatttctgatgatggtttgatcatgaccaagcatgaggacatggagagagaggtaaccgaatattatcataaactgctggggtttcctctgaccgagaacataccattaatctggaagaacttcacatcccctctcatgatatctctgagctggaaagacccttctctgaggaggaagtttggaaagctatattatccttgccatcaaacaatgcttctgggcctgatgggttcaccgggaaattctatatatcttgttggcagatcataaaaggggatatctttgccacaaacaaccaaggtgctgcatcagcataaacatgccaggatgcttttgagataaataaacaaaagccttcgatcacgcccttttctttttattggacgtatgcacat

SEQ ID NO: 69745 - DNA, 448 bp, Zea mays
  unsure (1)..(448): unsure at all n locations
tcgtcctgaccattactttgtatactcataactcgattccgaagatacctgttcacatatttcacttggaaaacattgtcaaatcatgtttttgaggaccttcggaagccgaaggcccccaacaatactcttattgccttttattcttatttgaagattttgtgaggcaatggggtttaagggccaagattgatcccgttttggtgcttgatgccaaagggggagaaaataaggccaaagcaagaaatggatcagctaccacttgagaattntgaaaatagtagagttagaatttttgttttggcaaaatcctcttaatgtctcttcttgtcaaaagttggtctcttgtggggagaatgtttgattatgggaaaaaggggggagtntttaatccttgatcaatntctcttggagataccttatctatgcnnctcacagtgaatttgac

SEQ ID NO: 69746 - DNA, 468 bp, Zea mays
  unsure (1)..(468): unsure at all n locations
gggttaaccgagtggctatagagcgagctcttgcaatttcttaatcacagagaaagacaacacaagagacacagtggtttatcctgtggttcggccaagtataacacttgcctacttccacgttgtggcgtaccaatggacgagggttgcactcaacccctttcaagtgatccgatgatcaacttgaataccaggtattcttccttatagntttcttcccgtgtgcgaggaatctccacaagttggagcctctcgcccttacaagattgatcacaaagaaagcgcggagtaaggttgggaaaagcaacgcacactagaattaaatccacaccacatacacgcacacaagtgagaagatgagcacacataacacgcgcggtgagtgtgcaactcgaaaagtgctccaatctcaagaacgatgaacgattgcgtgaaagtgacgactagaagtcttggaatgcttagagt

SEQ ID NO: 69747 - DNA, 368 bp, Zea mays
ctgagatgaatatggaatatggacatcacaagctaagtgaaggtgaacattgcttatgtgagactcagtgtgcataacttaaagacagtttggcaagccaaggatggaggatagtagaacttccaggtattgagtgcacgggagaaggtcaaggagacagaggtaccaaacccaggggtgaagaagaacacttgcttagtcaaggttgattgagttgagaagagctatggtgtatcgaggatcactacttaagtgtgacttacaaccaatgatggaatacctatgcgtatgtggtgtaagtcataatgctcaagatcaagcttcatggagcatatcaatgtcagtataacgatgagtagtgtcatagc

SEQ ID NO: 69748 - DNA, 498 bp, Zea mays
  unsure (1)..(498): unsure at all n locations
nttatagtctccagcacatctagtacactagccatcctttttatcttgngggttgctgctagatcttnttgtgtcttcagcacctccactcctgccgaagggcttagaacttctaatgttttcgtcccttcgattctcggttcttcaattntgtcagtcttcggcattgcagccggctcttcaatcctctgcgtaagagcaagtcctttggtttaaatagctgaagaagtctcaccgccaaattcaggcactatggccggttcaatgtagcgcggtcggtgagtaaggaccttcaactntntcctcttcggtgcgggctcgcttgaagcagccgaagcagcagccttcccagaagttgcaccctttcttttctgcccccgcggtgggtagcgatagtcagggtacacaaatccaatagcatcaaaaaccctatttagtcttttctttntcccgtctccgaaggccgcagatagtgcattatcttcagacttggagtat

SEQ ID NO: 69749 - DNA, 474 bp, Zea mays
  unsure (1)..(474): unsure at all n locations
caagacacctgcggcatgcaagcttctnaacaatattgggtggattttttattttgtctttcatatatcctaatttgtttgagatttcctatgataaagatatcaaagtggataaagccctctcttctgattttcgggcagcaaatttcagaagaagattacggggtgttatggatactgaatacaataacctcattacacaatgcaatgataccgtgatatcggatggggatgatagatcactgtggctattgggtaataaaggtttctctgtttaatcactttataaagatagcatatgttctcatgttactgtgccttctaacttcttatggaagactaaattaccgcacaatatcaagggcttttttgtggcttgttgtgcataaatattcttctactatagacaatctggctcaaagaaattggacaggtaattcttgattgcgctctttgtggacttctggattctat

SEQ ID NO: 69750 - DNA, 485 bp, Zea mays
  unsure (1)..(485): unsure at all n locations
ntacactaagcacctgtcctacacttaacacacttatcagtcctttaattgggttgncatccaaaccaccaaaacccagaagagatctttcaattaggccaaaccaggactntcttgtcgtcaaaactgaaaatgttcattggaaagggatctatgtctagttgcttttcttaaaactttaatcgaccctcattgatggccgattcgaccaatcgtcaaaatatattacaatcattagtggcgtgagagaacaaattatgccacttgcaataagcacgacatttaagcccgtcagcagatggaatagtgtgatttattntaatgttgttgcttttgagtaacttgtcaaatattatgtcacacttgccaacatttaatgtaaatttgacctcatcttgtcgtttcttttgaaccggctgcaaagaggaacaaactagagatttggcctgctttggcgaaaccatcttagcagcgtacacttcttg

SEQ ID NO: 69751 - DNA, 479 bp, Zea mays
  unsure (1)..(479): unsure at all n locations
acttacatntatttagaaagtaagatcaagttacttattacagaccagngctataaacgagtgctgagtagtattattacacattccaagggaggtaaaaactcctcccgataactatcaaacaaaaagtcctatatggaggaccacgtcctcccgcatcttcattcttctacttcttcattngataccaccttggagcanaagcaacaaaactatgtcgcttcctcacctaaaaacaacgaagggataaaccctaagtatggaattactcagcaagtcttacccgactaaggaaaagactctcaaggggatgctggataaatagggatcaaggagaggctntagcaagaatcaacttagatacttttgaagaaatagcttactagagtgagtccttactttcaatattntaacgccaaaataaatatcaatagactctcgttgcctctagtctaatttcatcatctcatcaatacaac

SEQ ID NO: 69752 - DNA, 433 bp, Zea mays
  unsure (1)..(433): unsure at all n locations
cgtgaacacaaactaagctnggaaggttcttcatccccacatgtgctaagcggcgatgctccagtttttccatgctagtcttagctattaagcatgcatctagaccggcttcttcttttgcaaaatcaactaaatacagtttgccgtctaatacacccttaaaagctagtgaaccatcacttcttctaaagacagacacatctacatttgtaaacagacagttatatcccatattgcacaattgactaacagatagtaaattatatcctagtgactctactaaaaacacattagagatagagtgctcattagaaattggcaatttacctaacccttttaccttgccttgattcccatcaccgaatatgattgaatcttgggaatccttattcttgacgtaggaagtgaacatcttcttctcccccgtcatatg

SEQ ID NO: 69753 - DNA, 197 bp, Zea mays
accctaggcgaatgtctaacatgtatacatgtacagagagcccaagtcagctatattgacttattctcagacttggcctatgagagaggaaatgaggggctctttgcacatgagccctattcacatcttatgagttgcaaatcttgcaatatgtgagccataagacttgacggaccctaacaccttggtttttgcac

SEQ ID NO: 69754 - DNA, 482 bp, Zea mays
  unsure (1)..(482): unsure at all n locations
tgagttaggttattacagaccagactataagtgagtgcatagtattattattatacaagccaggggaggcaccaactcctcccgataagtttaataaacaaaagatcctaagtggaggaccgagtcctcccgcacttcagtcttctttttcctcatttggtaccaccttggagcagaagcaacaaaagtttgtcgcttcctcacctaaaaacaacaaagggataaaccctgagtatggaatactcagcaagtcttacccgactaaggaaaagactctcaagggtatgctggataaataggagtcaaggagaggctntagcaaaaatcaacttatacttttgcagaagtagcttactaaagtgagtccttactttcagtcttttaacgccatgttaagtattaatagactccatttgcatctagtctaatttcacatcacatcaagacaacatcattnttatccatcgtgttcacatcctgac

SEQ ID NO: 69755 - DNA, 427 bp, Zea mays
  unsure (1)..(427): unsure at all n locations
tcatacacggctgcatagatagaggcctggaattttattggtgggcgcacttgaagtgttcgcctccaagtgcggtgaagagaatcattgctcctgctccctgcagcttcagcgagccatcaaaatacattcgccatacttccgcaatttctggattatccggtacttgctgttctgtccactctgatacgaaatcaaccagtgcttgagttttgatggcagtgctatgtcggaactcgatgtcgtgggatcccacctcgcaagcccactcggctattcggccaatggctttcttgttgtgaagaatgtccnctattggaaaaccactgactactatgactttgtggtcgtcacagtagtgacgcatcttgcgggcagctagaacgactgcatataatagcttctgaacctgatgatactttttctt

SEQ ID NO: 69756 - DNA, 369 bp, Zea mays
agcttcatgtttgcttagaaaagttttttattatttatactatcccgccgaaactatgctacagtaacatactcgttatgccgtttaattccgtctaaacacgtctaaacacgtctaaaccttagacagctcctcaccgttcgtctatcgatttccgtctaagaaaacactgacgacatcgctgcacggagcaagatgttgtcattgaaaatctacatgaccaaaagagtgtgcatcacaaattcatgaggcagccacaagaggactttgctaaagtacatgagtaccatgcccaacaacaacaatggatcattcgaagtctaactttacaatacttagcatttggtgtattttaatagcactaacatg

SEQ ID NO: 69757 - DNA, 362 bp, Zea mays
  unsure (1)..(362): unsure at all n locations
ctacaatagtgtatattttggtttgttgttctacgatgaaccgtttctatggattttcttatcatcatttcatgctcattcttcgattatcagggcttgattttgagcaaggctttaaaggcccaaaaagatgcagaggatgagtgtgacaccccagtgtcacctatggtttctctcaattaccaacccaagaaccattattttatgtgaacccaagtaagcatgagcatcaaattgacttaagtaagagagaattcaccaagtatatacttattagtatcatgatcaaaacaattgaatctnttaaaaaagaatagaatgtacaaccctaatgaaaactctaagtgagccncatgagcaaa

SEQ ID NO: 69758 - DNA, 468 bp, Zea mays
  unsure (1)..(468): unsure at all n locations
gcgaccggtaaaggcaactgatgagtccttctttctaaggatcttcacatccacatcagaaaataaacaattataacccattccacacagttgtgaaacggacaacacattatagcttaaagaatctaccaataaaacatttgaaagtgattgttggtcagagataggaattttaccaataccaatcaccttactcttgccactatctccaaacacaatttcttgtgcttcttgagttagttgcaatgtatgaaacatgtctttctccccggtcatgtgatttgtacatccactgtcaagcacccaacttgacccaccagaggagtagacctgcaaaacaagttntaggctatgctcttaggtacccaaatggaattgggtcctacagtggtagttatagccttgggtacccacacacttcttttcatgactnttcggttagtgtaggcacccacatatttcacaatc

SEQ ID NO: 69759 - DNA, 334 bp, Zea mays
agcatgccttcgcctcagtaagcattcttcttctacggagcatggaacgagccaatggataaattctcacagctatcaaaaagatgctcctcgacgaacaaagggcaagtgggccgatttgctacctgagcggtctgggcgctaaacacgactgagtgcagggcgaccggctatacccctttccgtcttctatatggatcggaggccatgaccccacaagatataaaacatggctccccacgaacagttacttcagccgtgcccgacgtggacgagcccacttcgaatgatctcatcgatggagaacgagtcttcgctcttcaagcccagaaca

SEQ ID NO: 69760 - DNA, 394 bp, Zea mays
  unsure (1)..(394): unsure at all n locations
tatcaagtctactntcatatggatccggaattatagtcatatctgntctgaggccgccgtaatcattgttttcttaccgagacatttcctgccttttctgcccatggtgctgcgtcaccctattttggcccaatgggtcgtgtatcaagttaggtccattatggacgcatcctagggttgcagcacgaccccaatacccttgtggtcgtcctcccatgtttataaaccccctagccgccaccaagaacagcgggttttgtttagatcaagtttagctctcgctacttgcttgcaagcgcgcgtgctagttcagccgcccgtcttcttgtcttcggaaccccaccatatngtagttngatctttaaacctacatttagatctggtaattcaggac

SEQ ID NO: 69761 - DNA, 461 bp, Zea mays
  unsure (1)..(461): unsure at all n locations
ggacctaagtgactgagctgcagctcagctcctctatggatggattgttttttatctgnccagattccttcggcctttctggcagcttcttgacttccatgaatagcaataggcccttgatccgaaggtatcttcatgcaaagatatgctggatgaagaattgcttctaaagcattgagattaccacgaccaatgattgcgttgtaagggtactccatgtcaacaatatcaaacacaacttgttcagtccttgtgttgttgataaatctgaaggttactggcatcgtgatcttgccaagtgctacaatctgccttcctccgaagccacaaaggggatgtgtggcgtcatggatcttatctttgggctcttgcatctggttgaaggccttagcanatataatgtccgctgcactgcctatgtcaaccaaaacattgtggaccagatatctcttgataacaca

SEQ ID NO: 69762 - DNA, 453 bp, Zea mays
  unsure (1)..(453): unsure at all n locations
ntctcatgttgtgctttatattagctatcgtatgtttcctttctttccaaagccacacttcaattcccatctaatcccaaatcttggtgacgaattcgtcttcatcttaaaatgtttatttttaacatggcatggtaaagatgcatttatttataatatttattttattatgtatagtatttctctctttctattatattaccaattattttcccattttgcactattgggattaaatccgaattatcaactctttcttatctttgtatccatattaccattntattaaatgcacatacaactaaactccaggatgatgcgcattatgctatttagtatgcttattggtagttagggttaatcccatgatctgaaatatacaacaatgaacataacaatacccgtggcacatgaacctttatatctctcttttttgacatctatattctacta

SEQ ID NO: 69763 - DNA, 438 bp, Zea mays
  unsure (1)..(438): unsure at all n locations
agcntctaaaatgagaacacattctatgactatctaangcgcattntgagacagacaggatttgtagcgcatgccacgcacgaaagcaagttggagcccatcatccacacaagaacattatgacgaccgataggccgcttgagctactccacatggatcttttcggcccgattgcttacataagtatcggcgggagtaagtattgtcttgtaatagtggatgattattctcgcttcacttgggtattctgtttgcaggaaaaatctcaaacccaagagaccttagaaggattcttaagacgggctcaaaatgagttcggcctaaggatcaagataatatgaagcggcaacgggacggagttcaagaactcttaattaaaggcttccttgatgaggagggcatcaagcatgagttctcttcttctacacgccaccacaa

SEQ ID NO: 69764 - DNA, 408 bp, Zea mays
  unsure (1)..(408): unsure at all n locations
tggttaaccgagtggctatagagcgagctcttgcgatattcaataatcacagagaaagacaacacangagacacagtggtttatcctgtggttcggccaagtataacacttgcctacttccacgttgtggcgtaccaatggacgagggttgcactcaacccctttcaagtgatccgatgatcaacttgaataccangtattcttccttatagttttcttcccgtttgcgaggaatctccacaagttggagcctctcgcccttacaagattgatcacaaagaaagcgcggagtaaggttgggaaaagcaacgcacactagaattaaatccacaccacacacacgcacacaagtgagaagatgagcacacaaaacacgcgcggtgagtttgaactcganagtgctcaatc

SEQ ID NO: 69765 - DNA, 340 bp, Zea mays
gcggcgacgccacagccagcccatgctagtcatagctattaagcatgcatctaaaccggcctcctcttgtgcagaatcaactaaataaaggttgccgtctaatacacccttaaaatctaatgaaccatcacttcttctaaagacagacacatctacatttgtaaatagacaagtatatcccatattacataactgactaacagatagcaaattatatccaagggactcaactaataacaccatacagatagagtgctccattgaaaatgcaaacttgcctaagactttcaccttgccttgggtcccatcaccaaatatgaatgaaacttgtgaatccttg

SEQ ID NO: 69766 - DNA, 429 bp, Zea mays
  unsure (1)..(429): unsure at all n locations
ntcctgcttcacagtttcggatgccgaatctttttctgcttcacagctacggcactgggtcaaccttcgtatctcttgagcttctncctttctgattcaagtccgaagatacctgttcacacattatactccagaaacattgttaaatcatgtttttgaggaccttctgaagccgaaggcccccaacagtagcccctcgcaatattaatttgtttgaaataataaattcagattgcgatatgaacgaaggctntatgccgaaagtccgataaaacaccttccctttgctagaatagcaacattcaatgacaagtgnggtctttcaactttcaacgcatcaagcgtataaatacggccataccgcatacttattttgcacgctntctggccaaccactcctgctcacctcatttttagctcttgtgcact

SEQ ID NO: 69767 - DNA, 367 bp, Zea mays
  unsure (1)..(367): unsure at all n locations
agctttaagagcatggcagagcagggaaatcttattntttcttcacaatgaactgactttgccatgtaagagcatcgtaatgtggtccatatcggaccattctctttctcacaaaaagatatgcagctgtcctgcgtgttcgaaaaaaaaacaatgagtcgacttacacggacgcctgaaggactaaaacctcgacaccctccaaagacatgcatagcactacgatcctgcggaaacattcggctgtgctgtacatcatgagccacacccattagtgtgctactttgtcccacataggatgcaccgaacactacacatggtgatgcttgcgcacattctaaagcttggccggggccaacaccaccca

SEQ ID NO: 69768 - DNA, 492 bp, Zea mays
  unsure (1)..(492): unsure at all n locations
tctccagnggttgggggggctntctggcaaaatattgtgttgttgggcctangcaaagncccttgatcatggcttcaatgacaatctcatttggaactgttggcgcctgagctctgagacgcagaaacgtttggacatatgcctgcaaatactcctcgtggtcctgtgtgcactggaataaggcttgagcggtcactggctntgtctgaaacccctaaaagctagtgaccaacatatccttcaacttcttccatgatgtaattattcctggcgaagagaagaataccaagtttgagcaacacttctgactgccatgacgaaggatnttaccatgacagtggtgttgccaccatatgatgatatggttgcttcgtaacttatgagaaactgcttctggtccgagtgaccatcatacatgggaagctgaactctgtaccagagggaatcatatcaaagcatgcttcatgggaaagcgcataccatattatatgg

SEQ ID NO: 69769 - DNA, 410 bp, Zea mays
  unsure (1)..(410): unsure at all n locations
tctagagangaacggcaagcatgcaagcnngggccanatgagcttaggcgcgttttttatctcttccggctcgtgatccgctatgggcccttatatcgtgatcggacggatgtgaatggggcttattgtttaaaaatctggacggtcgatctatgatcctaccgtcagcgtgttctaccgcttgataagtgatggtgatctaatctggaccctcggattaaaatccaacggctgagatatgataaaaccccttcggatgatatactttgctaaacagtctccgtgctgttacgacatagaacccgtcgtccatgctggtgtggttcttgatgttgagatcctatgcgcacgggcccctatacttacagaatttgatgcgcggtccaagagatggataaatcaaacaatat

SEQ ID NO: 69770 - DNA, 390 bp, Zea mays
  unsure (1)..(390): unsure at all n locations
tcacgagagagggaacgggtcctaggcctnctgaggagtttattgttgctgagnggagctcgatgtttgagtgagtccgtctccgttgcccttgctgcccgtgctctcctcccctcttcttctccccccttcccttgagaaggccctgngcatccccttttatagacacaaggggatggtccagctatacatatgggggtgttgctatgtgctaacgtggcctgcagagaagtgcttgagccctatagaagcgtagctggtggtgcggtcctgggccctgctgacgtttctatgccttcgtagagagcttgaggactatngacgtcatggacgcatgcggngaaccatcattacctgttgccggagtaatctagatgtgactctggtctt

SEQ ID NO: 69771 - DNA, 438 bp, Zea mays
tcatctatctgcctctgaaggtcagctagacgagccatcttctccttctttcgttgcacctgttgttggagcatctccaggttttggatttcctggtccaagtcgtcctccggaggcgttggactggtggccttcctcttctggcttcgggcctccctaagagaaaggacgtcctgattggggtccagcggctgcagagtggcagaccctgtcgctaaagctttcttcggcgccatgacgaaggtgatgtttgccgaagatgttcagaagctcaagaaatggaagtgagttcacgggaggtgggcgccaatgttggagacttgttctcaaatgctatgaatcaagaacaaggcaacacaaaatgttaaatatcaaaacccttcatcctcttgatcattatttcccttccgatataatggatttcggatgaaggtcatg

SEQ ID NO: 69772 - DNA, 494 bp, Zea mays
  unsure (1)..(494): unsure at all n locations
tatctaatgcatatgttgttctttggatcacatctgttatttgtttgttcattgaatgacttcaattaacaatcatgtntcttagtgccgtatatactatcaatcgatatctctcttgatatgcactaagctaggaggagaattcatgatacatttatgcaatttgtgatctatgctaacaatatcttggaaaaagatcactagttgtagaactctcccttgtgcaaaatacttccatatattgtcttaagtataggtcttaagcaactaagacaaagggcaaagcacaatgaagagagtgtctctatgcgaaggtacaaaagggtaaaactatctccttccatttaaacttgtacctaaatcttcctcttatatacatttcttgcatatcttgtataaaaggaagagaaagcatgtncatgtactaaccctgcttcatacctagnttaacttctcaaaatctcacttctgcattaatgcatcnnttgttaact

SEQ ID NO: 69773 - DNA, 279 bp, Zea mays
tctcgaaacagatagaccttgtgcagcttggcaacacaggaaacatgagggaagctctcatcacgccaaaaatgtgatgacaacaccaagacccccggagctacttcatatggacctcttcggaccccgcccctatctgagcatatgaagaaagaaggatggacttgatatagttgaagataattcccgcttcacttgcgtattctttttgcaggataaatctgaaacccaagggaccctcaagcgcttcctaaggagagctcacaacgagcttgagct

SEQ ID NO: 69774 - DNA, 466 bp, Zea mays
  unsure (1)..(466): unsure at all n locations
tgccaatacctgtcaaagcaacagcacatgccttctctgtatctacagaccataccagtaactnggcctttcgcatgctggggactggatatgattggacctttcaagaaagctcaaggaggatatacccatgtgttggtagcgattgacaaattcactaaatggatagagttccagcccattgcttctttaacctctgctaaagccgtggaattcatacaaagcataatattcagattcgggataccaaacagtatcatcactgacttgggatccaacttcaccagttcagaattctttgacttctgcgaacaaaagagcattcagatcaagtacgcatctgtagcacatccaagagccaacgggcaggttgagcgagccaacggaatgatattggaggcactcatgaaaagggtcttcgataagaatgaanaatttcacgaaaatggtaagagaactgcctatg

SEQ ID NO: 69775 - DNA, 109 bp, Zea mays
gcacaaagaacgagcagcaccggggcgagaggagtatatttatgcgggcaccgcccaccaacgaaaccgcaccaccgccaagaacgcaacgcgaaacctgcgcgccggc

SEQ ID NO: 69776 - DNA, 78 bp, Zea mays
aaaacgcgaaagcggccgaggggagtttttaccccaccaggggagaaacaacaacccacaaaggagccggcacaaaaa

SEQ ID NO: 69777 - DNA, 461 bp, Zea mays
  unsure (1)..(461): unsure at all n locations
ctaagcttggtgcccaattaagctcatgtatcgagcacttgtttgttcatgtgcangatttgcatattgggcgccgtcacctgtgcccatgtctcgagcacatctgcacccacgtatacgcaatcgaagctcacgacaacgaaccagaacagggccacatggccatgtataagtgtaatcacgaaaactagtggaaatcgtagaaaactctgccagtcgcacaagaatctcctgtccgattcgctcgctcgtggccggtgcagagcagacgtgatccctccgcgatcttctatgttcagtgaacttgagagagtgcctctgctgacctagtgtgaacggcatattatttggcgcaccactgagccagcacggctcccaggcccatgccatatccncgtagccgctatatcccggttgttcccgccagcgacgacggcgacctgccttgtctctaactgtta

SEQ ID NO: 69778 - DNA, 363 bp, Zea mays
  unsure (1)..(363): unsure at all n locations
atctaaaccgaaatggtgaacacgaaaccgcaacttcaataacaacgcattatatgcacggggtaatggcaaccgaaggggaagaacagtcacagcgaatcaatgccacgtattcgaggagatgccaccacccctgatagcggcatagacactacaggcgagaggcaatgaccgacgaccttccaaagagactcccacccgttgaagagggccgacttgccgacattgtggcagacgaggaggaagaccgcccataagcattggtacctacaggcaacaacttatgcttatgacacatggtacaanaatattaacacgccacagctgcactatgtagtgagtagtgaagatgctattaaacta

SEQ ID NO: 69779 - DNA, 379 bp, Zea mays
  unsure (1)..(379): unsure at all n locations
actaagcttacgggtattggcctcttcgccttcagctagctagaggctctcttgaaaggacgctctttcttctgaaagttccctgactntctgctccaggctttccacctgggaggttatggaggtgcaatggagggcaaggtcatcatattggttatcaagggtatgaagttatcctgccatgtagacaatggtgggatcattctcaataagatctcctcctgatagggcctgaagtcttttcctccacgtgggggtattcttgttgctgggtggaaagtagcgaaggggggtttcaatgattactttgttgtaattctgacaaagctgtcggagggcttctctggcgacattttggcaagcatctaagaaatgggct

SEQ ID NO: 69780 - DNA, 448 bp, Zea mays
  unsure (1)..(448): unsure at all n locations
taattatatactggcatattatggctgacattcgcttatattntagatgtcgncgcaatatagattatgactctcatattttataacacgagaaaacatataaatagttaggtatcactctcttttcgggcacgtttacagtgttagtgttagagttagtttgagaaccatatttttctatggtatttgtattttacaagagatattagttgattgttatttgagaaaataaaaatccctggagaaaatagggttcctaaactaggccttatgcatagctataaaccctatgaatctagggatttgaagcatatatataatgcagttgctactgcggtgagcggcgataaataaattcaagagtggccattctactttcgcagtccataaccaaagaggggagaaggggagaggtggagagagaattcatgactaatgtgcatgacac

SEQ ID NO: 69781 - DNA, 312 bp, Zea mays
  unsure (1)..(312): unsure at all n locations
cgccactaaaaggagaacacattntatgtcttacacacgatcattccgagaaagacagtatctgtatcgcatgtcaggcaggaaagccagttggctctcatcatccccataagaacataatgacgaccgacaggccactggagctcctacacatggacctattcggcccgattgcttacataagcatcggcgggagtaagtcctgtctagatattgtggatgactatactcgctatactcgggtatccttcttgcaagaaaaatctcaaacccaacagatcttaaagggaatctcgacaccggctcacaatg

SEQ ID NO: 69782 - DNA, 345 bp, Zea mays
  unsure (1)..(345): unsure at all n locations
tgctgccttgctggtcatttccctggcctgagccgttattctgtctgnactggcagcttgttcgtttactccgttccacgcatcccaacaattcgtcaatccccagccgcacgcacgagaaagaggcagattcgctgctccgaccgcgtcttcgntgccttgttggtttccgttctgtgactctgtccttcgcttgcttttgacttggggtagttggcttttctctcccccctcgccttcctccaggctttggggatttggttgcttcctgtcggagtttgagaggagcggcgctcttgaattgttgctctcaattggtccgtttggcatggtttggcaatagaa

SEQ ID NO: 69783 - DNA, 292 bp, Zea mays
gcccagacatcacacaataactacggcgaattatactatcaaactaccaagaaactgacctctaacatcccttaatgctatagatcatcacttcactgaaacagtgaacccacacggtgaaagacagtagaccccatctggatactgagaacagaaggaaattgagcacatgaacaacagacaaacccgtaatgaacaggccgggaatactatttacccaaccatcgcccaccatgagttccaaccaagagggaagctcctggggaacctagatacacgtaaaggagaacac

SEQ ID NO: 69784 - DNA, 472 bp, Zea mays
  unsure (1)..(472): unsure at all n locations
taatatatngagactntacctaagctgtttatcatgctgatgcatagaactccatagtaacaagatcctccatttgaacctctccaaatttaacatcacagagaattctccagattccctcggagaaaggcaaacagttcaaagcttaactattgagattggaggtgatgcacagcgttccaataactaaccatatttacatctagcacaattgtctgggtggtgtagttggttatcacgttagtctcacacattaaaggtccccagttcgaacctgngctcagacaatgtttacccattttttttattgttcagtcatctctttgttttcacatcttatacattgnttttgttcagtcatcacctttgttcttttctttcttgtcagtcatcactctgttctttcttgcatctagtagtattcgttttgtcagcatcacctttgttctttgttctttttgttctgactgac

SEQ ID NO: 69785 - DNA, 442 bp, Zea mays
agcttcaccatgatctatagaccacgatgtacttatttattactatgactaaccttacgaaaggctgaccacgccgttgcactgtctcgtgacgctagtgaccaccgatggggataaactggtgttcttggctatcgatggtggaaccgctgaaacaataggttgctatggtgcgtaacggatatgcggaactgagcgtatgctcaaatttgcaggaagtctccaagacggggggcaatttgatcgctgactcgccgcggaggcgatatccccaagagctccacgttagccttaacatgtgatcacaggacagtaacagggcggacataccgtgaaccctctacggtggttcaatacgcgagccttctaccagctacgtggacggtcggagcgtccggaggtttgttactgcgactgtggatgattcacggtgaggcaccta

SEQ ID NO: 69786 - DNA, 421 bp, Zea mays
tggccactaggccagggattgtcggcagccacgacgtggtcaggccaacgtcgcacaagcggaggcggaggaagaggccctgctcctggcacatgcaagcatcgagccatcaccagcggcaccggccgcagcggcactcctccaccttgatgagtcgaaagcacgcgctttcctcggtgacggctccaacaagaacatgatcgaaggatggtgcctcgacaccggcgccactcatcacatgaccggccgacgagagttcttcaccgagcttgactctagcgtccgaggctccgtcaagtttggggatgcctccggcgtagatatcaagggcgccggctcagtcgtcttcaccgccgcgtctggtgagcacaggctgctcaccggagtctactacatcctcgcgttgaggaactctatcatc

SEQ ID NO: 69787 - DNA, 406 bp, Zea mays
ttaagcactgagcatgcactgggccaggaaacaaaatcttgttgtttggctgaaaaaagcttgccggtgacaactgttagctcatacggtacttctaagcggctaacgatgctttgccaaaagaattattgggcaggattagacgttatagtggaaacagaccttgcctctatccatttggtgaagtatctctacagcgacaaaagcgaacataaagttctcctaaacggcgggcaggggcgcgacaatgtccaagccctaacgctggagaggccatgtgtggaccaatagcattgtatactaccaagggctgcctgaccgaggagaaaacttctggcaagcttaccacgaccttgcgaaccgaactgcggcacagatcattgctggtcacgtaaagccttggcgg

SEQ ID NO: 69788 - DNA, 433 bp, Zea mays
  unsure (1)..(433): unsure at all n locations
tctaagggagaacacgtgataggtctaaccaatgttcatttcgaattaaatagaccttgtgcagcttgtcaagcagggaaacaggtgggaggctctcatcacaccaaaaatgtgatgacaacatcaagacccctggagctgctacatatggacctcttcggacccgtcgcctatctgagcataggaggaagtaagtatggtttagttattgttgatgatttttcccgcttcacttgggtattctttttgcaggataagtctgaaacccaagggaccctcaagcgcttcctcaggagagctcanaatgagtttgagctcaaggtgaagaagataaggagcgacaacgggtccgagttcaagaactttcaagtggaggagttccttgaggaggaanggatcaagcacgagttctncgctccctacacaccacagc

SEQ ID NO: 69789 - DNA, 399 bp, Zea mays
  unsure (1)..(399): unsure at all n locations
tcttgtagctgctgccaanatgagatgtgaactgcgttcttcgatctgacactatcttcttcggcacaccatgaaggcagactatccgtgacatgtataactcagctaacgtttctccggtgtatgttgtcttcacaggtatgaaatgggccacctttgttaagcggtccacaaccacccagatggaatcataaccggcccgggtacgaggtaggccaactataaaatccatcccgatctcatcccacttccactgaggaatccgcaatggctgcaacaatccggcaggcctctgatgctctgctttggttctctgacaactatcacagatggcgacatattctgcgatctctcttttcatgccataccaccaaaacctnctttataaatcctggtaca

SEQ ID NO: 69790 - DNA, 394 bp, Zea mays
  unsure (1)..(394): unsure at all n locations
ggagaagcagagagatctttatttctggctgtcaaatagctcgccatagataactgtgagtncngacgggactccnatacggcaaacaatgttttgctagaagaatttctgggcaagcttccatgctattgtggatacaaacctcgcctcgatccatttggtaaaatactcgacagcgaccaaagagaacctgaagttcccctgcgccgcgggttggggcctcacaatgtccaagccccagcgctgaaaaggccacgtgtgggccattagactcctgaatagcgaatggcttcccgagcgtggagacatacttggaagcttccacgacctgtgacctattgcggcgccatatggagggcactagaaccttgatgcctacctttgctgtagggcc

SEQ ID NO: 69791 - DNA, 458 bp, Zea mays
  unsure (1)..(458): unsure at all n locations
ntatatgggaggaagtgcaggactcctctatattgggatctaactttagaaagacaattctttgggcctgaattgattcaagaagcagaagaacaagttcgtataattcgagagaatttgagagtggctcaaaccaggcaaaagagctacgcagataatagaagaagaccactggaatttgaagaaggagattatgtgtatctcaaggtgtcaccacttcgtggaatgaagagattcanagttaagggcaaattgtcccctcgctatattggaccattcttgatctttaggcgagttggagagatggcataccaacttgagttaccggatagtctatcggatgtgcataatgtgttccacgtatctcaactgaagaagtgtctccgtgttcccgaggaacagttaccaatggaagagctcagtgttcaaggtggattgacttacacggagtacccgat

SEQ ID NO: 69792 - DNA, 259 bp, Zea mays
  unsure (1)..(259): unsure at all n locations
caatacaaacatncnaccattaaacccnccccccaggatgtgctgagctgagacgganaaaggacgagcgcacgaccagaagagatgttttaacccggcaacccaagcgggggccccgaaaccaaaacaaggaggccacaccacggaaaaaccggccgaccggaaacaaaggccgacaacaaaaacggaaacaagcgagaggacagcacggcgagggaccaaagagacaacaagggacaaccggcagaaaaaagggaaa

SEQ ID NO: 69793 - DNA, 490 bp, Zea mays
  unsure (1)..(490): unsure at all n locations
tgcttaacaatatccgcatctgttgatgctataatggcttacagatgctgctgtaacaaaaagatacataaattatcagtacactactggaaatgaaggaaaccacaaagttatgctgttatcttatataaaataaatacgaaggagaaaaacaaatatgactgcagataaacaggacacgcataaagtgctgacctcaaaaaaactagagaagtgtctacttgtacaattttccaatataagttttgatacacggagaatttgaagtagtgcttctcgaggaaatgggggatccacatcaagaaaattatcttcaagatgcaaatctttccttgatttgatataactctcaaagaaagaatcaaaatgattgaaaaggtccaaccagtgatgaaaatcccctacatcattntggtagcangagaatagaattaataacatcaccacanagatgttatacatataaagtctatgatgtacgcaccttgtc

SEQ ID NO: 69794 - DNA, 332 bp, Zea mays
agagaagagagaggggtagcttgtctcaccacccaatcattacaagaccaagaagaattttaaggcaccctcgccaagaatggatcgaaacaaccgaaaaaatgagtaccgaaattcacggaaaacacactaaaaaagaggatcaaatgaggacagtaaccttccgcacccggccgaaacgaatgctaaacaaacagcctgatgctataggcattgaatatcctgaaaatgggcgaacggaccgagatgctggaagccctaagagaaaaagaattgccagcgccgttgacgaagagagcaccgaagagccaacaagaaacaggagatctctg

SEQ ID NO: 69795 - DNA, 486 bp, Zea mays
  unsure (1)..(486): unsure at all n locations
tctgacttgtgggcccgcctgagtgtccggtgtacaccgtacatctactgttccttgtccggtgtgccggaatgggcgcgcctgacatctgcgcgcgcagagcgcacattgaatgcgcggcagagagccgttggcgcggagatagccgttgctccggagtcgcaccggacagtccggtgcacaccggacagtccggtgaattatagcggactagcctgtggagtttcccgaagctggcaagttcctgaggccgaccttccttggcgcaccggacactgtccggtgtacaccggatagtccggtgaattatagcggagtcgcctctggaaaatcccgaaggtggcganngttgtgtggagtcctctggaccggacactgtccggtggtgcaccggacactgtccggtgtacaccggacagtccggtgctcccagaccanagggccttcggttcccacttngctcttnntgtgaatcagaacttggtc

SEQ ID NO: 69796 - DNA, 454 bp, Zea mays
  unsure (1)..(454): unsure at all n locations
tgtatatggaactctacctacgtacttagaactttntactatataatngctatggcattgcaaaggaagtgaaagagtgcgtnccagacaaattatggagaaaattggaactcaaatttgtacaggtgtttgttcgaaaaaatatattattttaaatgatcgtagtagttcatctgtctataaaaatataattataatatccgtaccaatcaatctaactcaaatttaatacaattatagtaaatactattatcatttattttcttaataaatttattataaaaatatattctataactaatataatgatacttattttgttttatgaatgtttgtgcttttatatatatttagacggaatctagactattttactcttatggacagagagagtatatatggattaattcttagaacttagtaacatgcctccccctagtgttngaatcgttgg

SEQ ID NO: 69797 - DNA, 406 bp, Zea mays
  unsure (1)..(406): unsure at all n locations
gtagcataggccaataatatacgaattgactcaagtctagctacgggtgcataggtttcaccgaaatccaaaccttcgacttgggagtatccctttgtcacaagtcgagctttgttccttgtcaccacaccatgctcattntgcttgttgcggaagacccatttggttcctacaatattntgattaggacgtggaaccaaatgccatacctcattccgagtgaagttgttgagctcctcttgcatcgccaccacccaatccgaatcttgaagtgcttcctctatcctgtgtggctcaatagaggaaacaaaagagtaatgctcacaaaaatgtgcaacacgagatctagtggttactcncttatgaatgtcactgagaatggtgtcgacggggtgatctcgttgga

SEQ ID NO: 69798 - DNA, 391 bp, Zea mays
aggaagaaagattaacgctccacaaggtcctaattaaatggccagagagcgttctaccgtcacggctgaacgcgacggggaccggactgaagcttcagagactgatcccatctccaaagctatgcaacgatccgggctggcgactttcggaaaagatccctcatgatgatgcagaacaagcagaacatacaatcgctgaaacacaagaagaagatatggaggaaactgattctgaatacgactatcccattgccatgccaagcaagcccaggcacttggactacgggaaaactactatttcgaaagctgatctgtccaagataggtaaaacaggcttctttactgaaaatcaaacaaagctattgcgcttctgaggagaagagactacccc

SEQ ID NO: 69799 - DNA, 478 bp, Zea mays
  unsure (1)..(478): unsure at all n locations
tctaaagggagagcacactttatgactaaccaatgttcattntgagaaagacaggatttgtagcgcatgccaagcaggaaagcaagttggcactcatcatccgaataagaacataatgacgaccgacaggccactggagctcctacacatagatctattcggcccgatcgcttacataagcatcggcgggagtaagtactgtctagttattgtggatgattattctcgcttcacttgngtgttcttnttgcaggaaaaatctcaaacccaagaaactttaaaaggattcttgagacgggctcaaaatgagttcgccctaaggatcaagaaaataagaagcgacaacggaacggagttcaagaactcacaaattgaaggcttccttgaggaggagggcatcaagcatgagttctcttctncctacactccacaacanaatggtgtagtggagaggaagaatcgaactctattgggacat

SEQ ID NO: 69800 - DNA, 402 bp, Zea mays
cgacctgcaagcaatgcagactctactggacgagcgctgcacttatctttgagcgcgaagctgacacatataataacgtatgagcctctggcattgggggagtcaatgatgttcaatctattaaacactggtttagatactcaaagccctctggtgactagaccccattgaaagacttcggctgacttcagcacatcaaagaatgggaaaactctctctggtgatctggatatgaatctatcgagagatgtcaatcattcctgcccatctttgaactcccttctacatagcaggtggctccatcctaagaataacttcacatttactcggaatagcttcacaccccttggtgaaatcaaccatccagaaatttcccctcttcactctatgacacaatatttt

SEQ ID NO: 69801 - DNA, 479 bp, Zea mays
  unsure (1)..(479): unsure at all n locations
ntggtttcatgggtggatcagctagaggtttcttccaatagtgtctgagcctttgtcagctctttgctcaaattcttattctgagcttgcgcttcggcaagtgatccttgagctcaacacatcaactcatctttttcttttagagaatcttcaagtttcttgatcttatcttccaaacccttgataataactntggttttcttgtcttcatcatcttgttgtatttttaaagctttgcttagtaacaaactctgtgaaaatgaactcaaagttagaatacctgagtcaacacaaagatatcaacggtaacttgcaaaaaggatcttactttgaagttagaataaaataagctccctatgacgtgttggcgtctgtagcaactgatgtccttttcgagcttcgagaatccaatactcttagacagggtgcttataaatttagcactggcacggtcgcggatgcatnccacaacttcttca

SEQ ID NO: 69802 - DNA, 504 bp, Zea mays
  unsure (1)..(504): unsure at all n locations
ctataaatactcagcttctgcctgacgcgattggccctagcctgttataatagtatcatgncnttgccacacttccgactgccatgacgaaaggatttgccatgacagctgcattgccttcatatgaggatattgttgcctcataactcatcaaaaatagctttgggtccgaggagcccatcatacatgggcaactanggtggcttgtaggattgtggccatggaatatcctgcaattctgctgccaggggagaagcatcatcaaaagtaaagttaccatgatgaaagtcatcgtaccattcattcttcgtgaatgagccatcttgatgaagctccctgtgctgaggccttctgtcctggtcatcttgagtgagatgacacatttctctaatggcctcatcgatcttcttctgaagatcggtgagacggagcatctttctccttttccacttgacctatcgatgaatggcttcgaagtccctgatctctcagtccaactcttcc

SEQ ID NO: 69803 - DNA, 441 bp, Zea mays
  unsure (1)..(441): unsure at all n locations
gagacatgatactctgtgttcacgacaagcattaatgtcttaatctttacacctacgacaaaattcaacatgttctacacaagattcggatttattcgctacttctaatttagcatttagatcattgttgacacctttcagagtatatatggtttcatgacatgtagatagttcaaaagaaagcatttgatctctgttaacttctaacgcataagatttttgtgcctcatcaaatttatcatgctcttcatacaacaaatgctcttgcttttctaaaagtatattctgttcattcaacgcatcaattaattcattaattatggctatcttagatctatctaagcctttgaacaaacatgaataatctacttcatgctcatcactagatacngcctcacttgaagacacataggtctagttgcgagtacataccttcttctc

SEQ ID NO: 69804 - DNA, 365 bp, Zea mays
tgcaagcttaaggcttcacctttacacaaaggatgttttggattttgtatgaatagtcactaccaagatcaaaagaaataagaccacacatgaaagtggtatgcccttttgatccaacggagatgacagatgttgcttggtcacttcgacaaacaacaccgaaatcatttcaagggaaggtcgatggaagataacatattgatataacctcataatggattatgactactaactgtgatactagcgtgtgctgagtagcgcaaccatgtgcgcaaacacagaaagccctcggtttcatcatggcaccactggtttcagtcataacaccattatcagacgtaaccaataagaaatctcacacgaca

SEQ ID NO: 69805 - DNA, 402 bp, Zea mays
ccgtatttaatacaatcccgacccagaaaccataccgaccagtgtactggacgctgcatgtactccacactgccctgcaaggacttgctccacaagtcgctaaccggtggacgagagaacgcacttcatgaggacgcctgacgcgccacaagtgtataataactccccatgaaagtatagcgagctgatagtctggacatgcgctctggcgagttcttgtcattcggctcttcttcagtcattatatacttaataaacgcgcgctccaccatcagagctaagtcgggtagataatgagttgacactccattagaccggaagtgatccgtggagaattctggacgaagacccggcgggacctgttccaccggatcgacttgacagacatctgcgcgtgaccga

SEQ ID NO: 69806 - DNA, 209 bp, Zea mays
actgcattagaatcgcacgcaacctgcgcgccggcgcaccaattatgtacacatacaattcgcttcatcgtattatcactatcggcgtacaccagcgttaggccctcgcctaaattccccgctgcctatgcattgtgattattactctgcactgagctccaacgtgtaccgatgccgatccacttgcctgcttaatgcctggaacgggc

SEQ ID NO: 69807 - DNA, 403 bp, Zea mays
gaactaaaattgtttttatcaatgaactatatgatgctttgaatgaaaagaatagattggtagagaagccagaagatcttttatatgaaaaacatgataaatttgctaatgcgcaaaattcttttgctttaaaagttaaaagaaatgaaatgctttcatgtgaattatctacatgccatgaatctatttctagcttaaagagtattaatgttgatttaaatactaagttagaaatagctaataaatcaagctcttgtgtagaacatggtgtgatttgcaataggtgtaaaggatttaatgctgatgctcgtagtgaacacttaatttccatcttcaaattaaatggagaagtggctagtcttaatgccccacttaagactagcaaaaattgatttgataaact

SEQ ID NO: 69808 - DNA, 457 bp, Zea mays
  unsure (1)..(457): unsure at all n locations
nttctttttctccggtcaggggcatctagaatgatcatgatcacaggctcanggccagttgaccattgtcgggttgcttgagataggatacaagcacaatttaattcagaggccggccgtgccaactgaagtcaatggctccatgtttctaagggacagctcaacagggtgtcaaaaaagttgttacctggttgataaaatctaaacaaatcgctgtcaatcaaaacaagccttgttgccacattgaatctcctgaataaaaatcacatgttgacacttgacgtgttcgtcgcaggcatggagactcaccgcgacgtctccatcggcagcgagatatgcgagcaggaggaagacggcatcaaacaccacgccggcgaccgcatcgcaagaaccaccagcgccggcgacggttgcggcccgctcgtatctctcttcgagctggcgccgatcgtgtcgt

SEQ ID NO: 69809 - DNA, 400 bp, Zea mays
  unsure (1)..(400): unsure at all n locations
agcttatncgcattccaagacctaagaatgttattttcgtttatatcttncaanctatatgaaccgggtcttgacgaatatgctactaagaaaggcccgtcccatttcaactgcaatttgcccactgtttccgggttggccaccctccgaagcaccaagtgccctggctcaatatttttttagccgaacctttctatcccgccatttgactgtttcagcttgatatttattgatattctccacggcttgcagtctgatcccttctaaagcatctttttctatagaataagcagcttcggaatctgattctgccgaagctactatccttattgatccggttgtagcttcctctggagttattgcgtcgtcaccaaataacaacttgaatggagtgaagcct

SEQ ID NO: 69810 - DNA, 440 bp, Zea mays
  unsure (1)..(440): unsure at all n locations
tagcaaaagaaatntctagaatcaagaatattgagctcatgcctaagtctggtaaaagattgttcatcaagtggctgggtaaagatatcggctaattgatcttttgtattaatgtaagaaatctcgatatcccccttttgttggtgatccctaagaaaatgataccgaatggctatgtgcttagtgcggctatgctcgacgggattgtcggccattttgattgcactctcattatcacatagcaaaggaactttggttaatttgtaaccgtagtcccgcagggtttgcctcatccaaagcaattgcgcgcaacaatgtcctgcggcaatgtactcggcttcggcggtggaaagagcgaccgaattttgcttctttgaagcccaagacaccaaggatcttcccaagaactggcaagttcccgatgtgctcttcctattgat

SEQ ID NO: 69811 - DNA, 336 bp, Zea mays
  unsure (1)..(336): unsure at all n locations
agcttaccgcatatgaagcatgagcgttttttcttggtcttantcttgctcggctgtgcattgcgaccctctatcaccgtcttgaatctcttgatgatgaaggccatttcttcatcattaagaccggctgcctcaatttgcgccaccttgctgggtagtgcttccttgctccttatggctttgagagcaaaaggttgcggctcgttgatcggtccattcaaagcgtcgtccacataccttgcctccttgatcatcattcgcccgctgacgaaattttctatgacttcttcgggcgacattttggtgtacctgggattctcacgaatattattcacc

SEQ ID NO: 69812 - DNA, 429 bp, Zea mays
  unsure (1)..(429): unsure at all n locations
nnctttagtttgaagcttcggctttgaaaatagttntttagtgtctccgaagatgtccgaggataagaagactgctgctgagacgaagctgagcctcgacgaagagaaaaatttggggtttcttatagcgatgtcaaagaccaacacagaaaaaatcaccaaggagattctggaaggtttgtctgaggatactggtgacagtgacagctacgatgtggacagtggtggtgaagactccgaagatcgtccatggcgaccaagccattcagtttatggtaaatcaactatcaaagaaagtcatcttgtcaatatgagaggaaggtatttccgggatttgtccattgtgagggccgacgaaggggaaaaaacttgcccacaccctgaagagaatgaagtcgtagtgtaccgaagctttttgaaagctggact

SEQ ID NO: 69813 - DNA, 355 bp, Zea mays
  unsure (1)..(355): unsure at all n locations
tatcagtatgtcttcaatgaatacgaccagaaactgatccagatatttcatgaatactttatttatcaagttcataaagtatgctggtgcattagtcagtccaaacgacatgaccaaaaactcatataatccatatctcgtagtgaaagctatcttgggtacatcttctgataaaatctttaactgatgatatcccgaccttagatctatcttcgagaatatcttaacttccttcatctgatcaaataaatcttcaatccaaggtaatgcgtatttattcttgatggtacttcattcnacttctataataacacatattcttttaaccattttcttgttacnatatactgggctc

SEQ ID NO: 69814 - DNA, 464 bp, Zea mays
tattaaaacgataaaacgttggaacgctcatgggtgatattttgacttttaaacgtttaaactgtggttaaacgtagttttaaacaacatatgaaaaataccaatatatcataatttcagacaataatatgaagttaaataccaaaacggagaggttagtggcttaccaaaacttcacccatgagctggattgaaccccataagtaactaatagaccgggcccaaaaatagctaatggtctaaaatgcataaaacactacgttttacagtttataacgctaaaacgtgatttcaacctctaattagagttttgacgtttagacgtagtttaaacaacgtttaaacgtagttttaataacactgctgtttacactggttgcaaagtgaagtttgagatagaggataagggatctgctagagatggcctaatatagcaaacatcatagttttggctatcacttaaa

SEQ ID NO: 69815 - DNA, 330 bp, Zea mays
  unsure (1)..(330): unsure at all n locations
ccaaaaggacagaccgggcgggggttgttaagcangtaaacaaccgcgaagagctcatcacagcaagaatgtgatgaccacttcaagacccctggagctgctgcatatggacctcttcggacccgccgcccatctgagcataagagggacgaagcatggtctaattattgttgatgacttttcccgcttcactagggtgttctttttgcacgataagtctgacacccaagggaccctcaagcgcttcctcaggagagctcaaaatgagtttgagctcaatgtgaacaagataaagagcgacaaccggtccgaattcaagaaccttcaagc

SEQ ID NO: 69816 - DNA, 421 bp, Zea mays
  unsure (1)..(421): unsure at all n locations
ntaccttggccatggggactatgtccgggatgacaccattcccttcgaatccccagaagaggcttccagttctcgcgactcctgcctgaacttcatcggcgatgcagagcccaccggctttccttaccatactgtatgccacgggcaaggatcctggtgccaggtccactatttcaccaacccccttcggaaaagaacatgccatgttcatgggagaaatttggttttcggttaggcttagtttggatactctgggattagagtgttttggagggattggagagggtgtaaatctccaatagatcaaatactctntcaatacatctcaatccactccaatccacctcattactagagtatccaaactaggccttaagagtgatggatatgcctaaccgaccctttgatgatggaatacctg

SEQ ID NO: 69817 - DNA, 428 bp, Zea mays
  unsure (1)..(428): unsure at all n locations
agcttcggatctttagccttgcaactcttgtctatatgacccgaaacaacctgngaatcagctttaagtatggcccttctgatccccattgcttttagcttccgaagacccagaagcaaggcttcgtactcggcaatgttatttgtgcaactaaaatcaagttttgccgcatagcaagttttaactttggaaggtgaaaccaacacagcagctgctcccgctccgaaagttccccaagacccatcgcaaaacactatccatgcttcggcgtctntatttgtttcttcctcctgagcccctggcgtccaatcagcaatgaaatctgctaaggcctgggactgaatcgaagatctatgaacatattcaatacaacattcgttgagctttgcaggccattttccatccttccagtacttcttattttcata

SEQ ID NO: 69818 - DNA, 461 bp, Zea mays
  unsure (1)..(461): unsure at all n locations
tcagctcaagtggtaaggtcccttcttggtggtatcttcgtcgacacttggatcttacatgttgaaagacatggatggcaatgacttaccaaggtcttggaatgcagatgagcttcgaagatattatgtgtaaactatgtaattttcctatttttccctatggtacccttttcctttcaagatgggagaaaggtttttaatggggccataggttgtaattttcatttttgtgtagctctgtgcaatacaagggccaaattccccaacaagtaaaatgtaaaatctggaccatataaccgaatataaaagccatgaagaagctcaaaagtagtccctaaggggatgcagagctaagatgccacctaagaggtgaagaaactccaaagtcgttccttaaaggacgcagagtaagttatgaagctccaaagttgttactaatggaatgcagagcttanatacca

SEQ ID NO: 69819 - DNA, 436 bp, Zea mays
  unsure (1)..(436): unsure at all n locations
catgcaagcttctcctatagagaatcactttaatgttgnnttaagaatnctaagagatttgaagtatactcccaatattggtctatggtatcccaaaggtgctcaatttgaattaattggatattcggattcggactatgcggggtgcaaagttgatagaaaaagcacctccggttgttgtcaatttcttggtagatctcttgtttcatggtcttttaagaaacaaaattccgttgctctatctaccgccgaggcggaatatatatcggccggaaattgttgtgctcaactattatggatgaaacaaaccttattggactatggaattattttcaagaatgtgcctctcatgtgtgataatgagagtcgcggtgaaatggctaccaatccggtccaacacttcagaaccaagcatatngatatactgcatcacttc

SEQ ID NO: 69820 - DNA, 439 bp, Zea mays
  unsure (1)..(439): unsure at all n locations
tctatagggagagcacattntgggactaaccaatgttcattntgagaaagaagggcttgtagcgcatgtcaagtanggaagcaagttggtgttcatcatccacacaagaacatcatgacgaccgataggccgcttgagctactccacatggacctattcggcctgatcgcttatataagcatcggcgggagtaagtattgtcttgtaattgtggatgattattctcgcttcacttgggtgttctttttgcaggaaaaatcacaaacccaagagactttaaagggattcttgagacgggctcaaaatgagtttgccttaaggatcaagaaaattagaagcgacaacgggacggagttcaagaactctcaaatagaaggctttcttgaggatgaagtcatcaagcatgagttctcttcttcctacacaccacaacaaaatg

SEQ ID NO: 69821 - DNA, 373 bp, Zea mays
  unsure (1)..(373): unsure at all n locations
ctcaagctctctaacggagagcacagtttgcgacttaccaatgttcattttgagaaagacagggcttgttgcgcatgtcaagtacggaagcaagttggtgttcatcatccacacaagaacatcatgacgaccgataggccgcttgagctactccacatggacctattcggcctgatcgcttatataagcatccgcgggagtaagtattgtcttgtaattggggatgattattctcgcttcactagggtgttctttttgcacgaaaaatcacaaacccaagagactntaaagggattcttgagaccggctcaaaatgagtttgccttaatgatcaagataattatgaacgacaacgggacggagttcaagaact

SEQ ID NO: 69822 - DNA, 441 bp, Zea mays
  unsure (1)..(441): unsure at all n locations
caagcttacataagatttgataataagaatttgaatttattatatagnnncctccccctaaatatgtgcatttcagaaaataccaattttgtactaaatgccaaaagcacatatttgggtcaaagtatgaagacaacttatatcatactattcatggggtgcactgtgtcataaaataaatgtgatgctcatgacattttatgcactcatcaactttctacatcttatgtttttcttatgattccccctttttgttaattatgtatccccttttcaaaagtattctaacacttagttacataggactaaaggtaagctttaatgcacaatttctccccctctgtcatacatctccaaaaaggacacaaagaatataaagggtacgaaatatgattaagcgagatttgaacacactatcatgaaaagggtccttagatgaca

SEQ ID NO: 69823 - DNA, 476 bp, Zea mays
tctcaagcctcagaagattattcatcccaacatgggctagtcggtggtgccttattcaacccatgttagtcttagcaataaagcatgtgtcaagtgcagatctatcagaatctactatgtatagctgacccatcaacacactcttaaaagctattgagtcatcacttcttctaaagacagtgacacctacgtgagtagagacacaatggtaaccgattgtgcataattgatatgcagaaagcacattgtcatctactgaatctacatgataaacattggaaatagaatggtcaggtgatatagcaattgtacccgatcctttgaccaaaccttgatttccatgcccgaatgtgatagctcagtggggatctctggttttctcgcaggagaacatttacttgtccccaggcatgtggtttgtgcacccgctatcgatgatccaactagagccatctgatgcaaaacctacataacat

SEQ ID NO: 69824 - DNA, 422 bp, Zea mays
agctgtgagcaagagaagaaagattcaaaatatttctgattcctaagctaaaaaagttcaaatctacagagatcactcaaagatctgcagaaaaaatgcttaagcttctgcacccggtgcattcaacggctgaagcaggtctttaattcagttggagccagctccaaaaaatttacaccttcggttgaagacctgccgagtacatttgatcatattgaaggtgaagttgatgctctcgacgaagttatagctggacatggtgacttttatgccttgctagcttctcgaggcacaactgtcgctttcatgaaggctggctatacacatggaaatattgaaacagaccaaacttcagcatgtcaccagcagactaagatgacatccccggcctggcccaaagcatctgaaacagattcgttact

SEQ ID NO: 69825 - DNA, 464 bp, Zea mays
  unsure (1)..(464): unsure at all n locations
tctcctggacaagtgctgcacttaccgctgagtgcgaagctgccacatataataacaaaggagcccctggtgttggtggagttaatgttgttaaatctatcaaatattgcttcagttcctcgaaggctttttgatggcttggtccccattgaaagacttcggctgatttcagcacttcgaagaatggtaaatttctctctgccgatctggatatgaatctattgagagatgccagcctccctgtcagtctttgagcccccttttttgtgtttggtggctccattcgaagtatagcttcaattttacttggattagcttcaattccctttgttgaaaccaagcatccaagaaatttccccttctttactccgaagacacatttttctggattcagctttagaccagcttgtctaaaactggcgaaggtctcctgcanatcagcaatgtgattntcttgtttcgtg

SEQ ID NO: 69826 - DNA, 358 bp, Zea mays
aaaactccgctaagggcaaacattcatcccatttctgtgagaattcccagaacacatgcccgcagcatattctcaagtatttgattgaccctttcagtctatccacttgtttgaggatgataggccgaactgtggagcaatttggtacccaaagatttatgaaagtcttcccaaaacttggatactaactgaggtccacgatccgacactatagtttcttgaataccatgcacactgagaatacgaccaatatataatgctgcataagtggccactgtatatttggccctgacaggttaaaaatgtgccatctttatgagtcgatcaactaatacccaaatagaatcataccctttgg

SEQ ID NO: 69827 - DNA, 469 bp, Zea mays
  unsure (1)..(469): unsure at all n locations
tgcattgcatgtntaaattccttgtattgcatctaggacttgtctaacctagttgagataaccgcccacaaagcgagtgaaaaagcttaactcgggtcaaacctgacaagtcttagttttaagcttttagcacttaaattcttactttntatgcaattattggttcttaaaatatgcatgaggtactgcacttagggggagtattcaaaactcaaatcactcatgaaaacccctagtgcaaaccaaaatgcaaatttcaccatttgcctattttctctaaaaattatctagcctatggcgaaatattttgaaaagtatatgagggtgccaatacctgtcccaacaagtgttattttgtgtgattataagttgggatttggtttggttgggagttagatagaaaaattcaaatttttccaaactctcctctgtctgggctcaccggacagtccggtgtgcaccggacact

SEQ ID NO: 69828 - DNA, 312 bp, Zea mays
aagtgtcgagttcaactctatcaaaatctaccaagtatagctgaccctctaacactcccttaaaagctattgaatcatcacttcttctaaagacagtgacaccaatatcaataaaaagacagtagtagcccatttgacataattgagaaacagaaagcaaattgtaatctatagaatcaacgagaaaaacattggaaatggaatggtcaggagatatagcaattttacccaaacctttgacccaatcttgatttccatccccgaatgtgattgctctttggagatcttggttattctcatatgaagagaaca

SEQ ID NO: 69829 - DNA, 474 bp, Zea mays
  unsure (1)..(474): unsure at all n locations
ngacgcatatgatatgtcctggaagatgggtcaagaggatgccttcttatcaaganagggtatagctctcacatgtgaagatcacaaaaagaatgaagggcagaatgctagatgaaagctcaagctcctcaaatgaagaagaatatgatgaggatgaaaaagacgatcaagcatcgaccacattctctgaagctgacgaagaaacgatccaaagagtcagaaaagttatgagaatgactcacaagataaatctaatagatgtgctcattcacattgaagatatcctattcaacgttcctttcggtgacgtgcaaggcaacggtcgccctgccacttttaatgggctactaaagaggcggaggacgaacggagtgcgaagcactggacccacgaacgatgttacctcttttatctatgcacatagatagcttctggagttgggggtttatatgtcatgatatataggctagataa

SEQ ID NO: 69830 - DNA, 327 bp, Zea mays
  unsure (1)..(327): unsure at all n locations
gactacccttattatactttgagtagagttatgcatggacctgacatgcctcggatagaatcttcctccgaagcccctggtcatctcagaaaatctgaaagcctcctcccttctttggcgaaaatcattgtcggcacgaatgtactcgtccatcttttggagcagcttctccagagtctgaagaagctatctagcaaaatattgagctgcaggtccaggacgaagccccttgatcatggccttgatgaccatttcattgggcaccgttggtgcctgcgccctccaacgcaagaacattntgacatacgcctgtaaggattcttcatg

SEQ ID NO: 69831 - DNA, 446 bp, Zea mays
  unsure (1)..(446): unsure at all n locations
cctccatcattgtttgatatgcaagttctcctaatcatacatctcgtggatcagataaaaatattagggccactatatttacatcatatgtntcagntggagcgatacctgngagtattaaaaggttatgtgcgaaatcgcgctcacccagacggttcaatcatggagggatacactacagaagaagtgattgagagttgtatagattacatcagtgatggaacaatgatatgtgtgcctgtacctaaacatgagggtaaactatgtgggagagggagaatgggcaggaaaacttttcgcgttgaggattacaaggtagtacttttcgcgttgaggattacaacatctcacgatagccgagccttacatagaggaacacctggatgagcttcgtatagataatcaaaccacacagaggactggatcatgatggagcacaaacatcg

SEQ ID NO: 69832 - DNA, 419 bp, Zea mays
  unsure (1)..(419): unsure at all n locations
cagcaagcttcggcttatctatgnagagnattgnctttgtatttgtccaactgccttcggcccttctggcagcttcttgacttccatgaatggcaatgggcccttgtttcgaaagtatcttcatgcacaagtatgctggatgaagtattgcttcgaaggcattaagtgttcctcgaccaatgatcgcattgtacgggtattccatgtcaacaatgtcagaaacaacttgctcagttcttgtgttgtggacataaccgaaggtaactgacattgtgattttgccaagtgccacaatctgccgtcctccgaagccacaaaggggatgtgtagcatcatgaatcttgtcctctggctcttgcatctgcatganagcctttgcaaatataatgtccactacactacttgtatcaactagaaca

SEQ ID NO: 69833 - DNA, 443 bp, Zea mays
tgtgaagccaatcacaagtttgttgaagaatgacattaagttcaattggtcttccaagtgcaatgaagcctttgagcaattgaagacactattgaccactgctccggtattggctcaaccggacatcactaaaccttttgacgtgtattgtgatgcatctggcagtgggctcggctgtgtactgatgcaagagggccgagtgattgcgtatgcttcaaggcagttgcgcctacatgaggagcactatccaactcatgatctggagctagctgctgtggttcatgccctaaagatttggcgtcactatctgctgggtaatatctgtcacatatatacagatcataaaagtttaaagtacatcttcacccagtcagagttaaatatgaggcaaagacgatggcttgagctcattaaagactatgaactggagatccattatcacc

SEQ ID NO: 69834 - DNA, 344 bp, Zea mays
ctgcacttttcgttataaggctgtgttgttgttggttgaagaatgggaagaaatttaaagattggaagctagtatcagaccatcgcgctagcttaacttaaaagtctaaactgtacgcagtgtagtaactcttgtacaaccctttgatcatatataaaggtctttgaggcacttctagtcctcattttaatacccttttgtgatccacaaactaaattttggtccatagggcaacatctttcgaatcaaattcttaaacttgatggctcaagaatcattacataactttattaattcgacgttttcgtattacaaccttacacgatcactaccatgttgccata

SEQ ID NO: 69835 - DNA, 464 bp, Zea mays
  unsure (1)..(464): unsure at all n locations
tgagtcagtcctccagctaagaataattgatgcacacttttaggatgagggaatgaaacacattcatgagaaaatggaggccggaaaaaccaactgcttcaggaaagatgatcaaggtgttgtatggtttaacaactgcatagttgtgcccaaaaatgatgagatccgccagcaaattcttgatgaagcacatcttagtcgctattctattcatcccggaagcactaagatgtataatgatctaaaacagcattattggtggacaaagatgaaaattgaaattgcacgctatgaggcaagatgtgacacttgtagacgtgtcaaagccatacatatgaggactgctggtccattgcagtccttacctataccaacatggaaatgggaggatataagcatggactttattgtggggttgcccaggacagcacaaggatatgattctattngggttatagttgatc

SEQ ID NO: 69836 - DNA, 260 bp, Zea mays
  unsure (1)..(260): unsure at all n locations
agcaagccccaagagcanggnangaaagcccgcgagaaaaccnaaacaccaaaggcnncaaagnncggaaagcagaacctactctcttcactaaaactattgcaaaagacttgtttatatgccaaatctatgttgatgatattatatttgggtctactaacaaggcatcttgtgaatagtttagtaggataatgatacagaaattcgagatgtctatgatgggggagttgaagtatttccttggatttcaaatcagcaac

SEQ ID NO: 69837 - DNA, 464 bp, Zea mays
tatctgtctcgatctcatgggtggctcctccgcatatgttatatcgcatcaatctctgactgatcatccccgtgataatcatataatagtgctctgagctgaagaaaattctcatgtgacgctctttcggcggcagcctctgcttcaacttcggtcacattcttattatctgagcaatactctcatgggctccatctatctgtgctatgtgaatttcttattggtcgcgtttggcaatgatgtcatgactaacgactgatgatgccgcgacgataccgagagcctactatggtgcacacatggttgagctgctcggcacgcgctggtatcgcggctaatagtcatgatccattacgagaccatactgatgtgctatcttttgtgaacgttctctcagaatgatcgctgcattttgacttcatatgtcgcgacattctatacaaatcaatcttcagtatcttgtc

SEQ ID NO: 69838 - DNA, 432 bp, Zea mays
  unsure (1)..(432): unsure at all n locations
agctgaagctgtgaagttttcatcnccattattttctgtgatgccacagccagcccatgctagtcttagcaattaagcatgcatctagaccggcctcctcttttgcaaaatcaactaagtaaagtttgccgtctaatacacccttaaatgctagtgaaccatcacaccttctaaagacagacacatctatatttgtgaataggcagttataccccatattgcataattgactaacagatagcaaattataaccaagagactctactaaaaacacattagatatagagtgttcattagaaattgcaattntacctaacccttttaccttgccttgattcccatcaccgaatataattgaatcttgggaatccttattcttgacgtaagaggtgaacatcttcttctcccccgtcatatggtttgtgcatccgc

SEQ ID NO: 69839 - DNA, 387 bp, Zea mays
tcacatctctggactaactcggctgcgtcactctttgttgttggccagtagaaaccagacctgaagaccttcccaaccagagtcctggatgctgcgtgtatcccgcattgcccagcgtggacctcatttagcagttgcttcccagtagccgaaagaatgcatttcatgaggactcctgtcacgccccttctatatagtgtttccccaatgagagtatagtgagctgactgccttgcaatgcgctctgctgcatttttgtcatctggctcctcctcattctttatatatctgatgattggttccttccagtcatcagaatccgattttggttggctcagaatattgcactcttctgaccgatctaatgaaatgctcgggcgtagtact

SEQ ID NO: 69840 - DNA, 424 bp, Zea mays
  unsure (1)..(424): unsure at all n locations
catgcaagcttgtgaacagtacaaattctttattggttatttcagcttcagcagatcagccgaagcctatgctcttatgtgaggacatagcaaagcagaaggtgctgttaggctctcagttatccgaagagcangagaaaaccttgataaggtttttgttcaataacaaagatagttttgcatggtcagccaatgatctctgcggagttaatagagatgttatcgagcactcgctcaatgtcgatccatccttcagacccagaaagcaaaggcttcggaaaatgtcagatgataaggccgaaagtgctcgcaacgaagtcaaaagactccttagtgcatgagttatcagagaagtgaagtacccagaatggctagctaacactgttatggtaaaaaaggcccaatggcagtggcgaatgtgcat

SEQ ID NO: 69841 - DNA, 426 bp, Zea mays
tgaacccggctattccatacatgataagacaatcacgcactgcgagtggagagatggccagagtggcatgtaccctcctggcaaaggaccgcctaaaaggggtggtgtgctctcgggtggcgtggacctgttcatgcagcggaggatccgtgggaatgatagacatatgcaagagttacgagaaacatatgtcgagtggttagagatactcagatgagtctatcgattctgatcgccgttatatccccggagagtggagactagatcgctgctcctgcaacctaactcaagactgttacattatgaataaaaatgatggtgtattgacgagatggtgaaagtagactatgatgctatggcagaaccgaccgaattattccagcttaagcgccttagtcacgcctcaaagaccgcatctcacttaaa

SEQ ID NO: 69842 - DNA, 393 bp, Zea mays
  unsure (1)..(393): unsure at all n locations
catgcaagcttgccttcgcctcaaagtatctancctatatttaacggagncgccgaacgcgccaatggtaaaattttcacagccgtcaagaaaatgctcctcgacgacaagaaaggcaagtgggctgaccttntacctgaagcggtctgggcactgaacacgactgagtgcagggcaactgggttcacccctttctgccttctatatggatcagaggccatgaccccgcaagaaataaaacatgggtcaccacggacagtcacttctgccgtcctcgacgtagacgagcctacttataaagacctcatcgacggagaccgcgtcttcaccctataagccctaaacaaataccaagctcaaacaaaagcatggcgcgaccacacagtcatcccg

SEQ ID NO: 69843 - DNA, 402 bp, Zea mays
  unsure (1)..(402): unsure at all n locations
ntatcaaatggacgtgaaaagtgccttcctcattggactcttcaaggaagaggtctatgttgagcaacctcccggctttgaagatagtgagtaccctaaccatgtttataaactctctaaggcgctttatgggctcaagcaagccccaagagcatggtatgaatgccttaaagattttcttatcaataatggcttcaaagatggaaaggtcgatcctacactctttaccaaaacacttgaaaacgttctgtttgtatgccaaatttatgttgatgatatcatatttgggtctactaacaaatctacatgtgaagagtttagtatgatcatgacacaaaaattcgagatgtccatgatggcggagttgaagtatttcttaagatntcaagtgaaacaactcca

SEQ ID NO: 69844 - DNA, 190 bp, Zea mays
  unsure (1)..(190): unsure at all n locations
aacctgctagaccttnccctttttttctatttttgtaacacacaccacagcgaagggtattctattacttatttgcctctcgatgaggactgttgcttctatttgaaggaggatgtatgatgccgcatctctcaaaacatctgtctagaccccaaaactcctgaaagcccccacaacatcggtggacagc

SEQ ID NO: 69845 - DNA, 436 bp, Zea mays
  unsure (1)..(436): unsure at all n locations
gcaagctgccttgattnctatcaccgaatataattgatancttgttaatccttattctcgacgtaggaggtgaacatcttcttcttccccgtcatatggtttgtgcatccgctatcaataatccagcttgaacccccggatgcataaacctgcaaggcaaatttacgcttgggacttaggtacccaactcttgttgggtcctataaggttagtcacaatttccttaaggacccaaatgcaagttgtatcacccttgcattttgcctctaacttcctagcaattatctttctatcctttctacaaattgcaaaggaagcattcaaagcatgatatatcggagaaggctcattaactttcctaagaatattaacaacatttcttctacgcatattatgaacaaccatcctttctaccaacattctatcatgcacatat

SEQ ID NO: 69846 - DNA, 386 bp, Zea mays
  unsure (1)..(386): unsure at all n locations
taagaaaagagtatanaatctttcttttctttgttcagatgaacatcttcactgatttgcaacacagaccagcacagcttctcagataaagaggaaagtggaataaaaaggcttcccaactagacaactaacttcattaatatataacaggtaaaccaaaatgcaggggatacccacactctggtgacagtcattacaaagatccaactccaacattgttcatcataacaagcataaaagcataggataagcaaactaccttgtctaactaatactaactaagagtaaaattgaggctaagactaagactgagactaagactaatacttctatattaagcatttattacaagatccaacactgacgatctatgggtctaatattat

SEQ ID NO: 69847 - DNA, 474 bp, Zea mays
  unsure (1)..(474): unsure at all n locations
tgggtagttcaacccggcgttgccatgtatccaatcagacctcctcgacggtcaaacctgcaacaatggacattttataggaaagaacagaacttcagagtggattcgtgcaataattgagacttcatttgacagatcaagataaatcaacaattgaaaggaaatatgtaatcacaaaacagatgaaagatacaagcacactgaactagatcaataagagagataattgccttgtccctcggatctcatagctattacccatcatcgatgaacttcgtatcaattagttttagccacaagcctatatgccaaatggtagagacaacaaaggcttgaagctaaaactaatcaatcattcatctatggtcaaataatattttcttcaatgggactgaacctgatcaaatagaanagccaaacaaaagcaaaacaatgatcttggttcagagtgaaaactggtaaagaaaaaaaggg

SEQ ID NO: 69848 - DNA, 290 bp, Zea mays
  unsure (1)..(290): unsure at all n locations
aaactttattaaacaccaaacacgacaaatttaaaagtttatatttacaaatgaggtttcaaagggttatggctatttgggtcaaaaataggaagtaagtgaattatggagttagggggaggcttaaantcataatatcacattgtggggacaatatgcatgttaggaagtagatagatattttaattaaatacttgtattatgtgattggtttggttgtgttgtcatcaatcacccaaaagggggagaatggtaagataatggaccctgggcatatggtaattgagttt

SEQ ID NO: 69849 - DNA, 465 bp, Zea mays
  unsure (1)..(465): unsure at all n locations
tgtgaaggttcttcatccncacatgtgctaagcggcgatgccacagccagcccatgctagtcttagctattaagcatgcatctagaccggcctcttcttttgcaaaatcaactaaataaagttttccgtctaatacacccttaaaagctagtgaaccatcacttcttctaaagacagacacatctacatttgtaaatagacagttatattccatatgacataattgactaacagatagtaaattatatccaagactctctactaaaaatacattagagatagaatgctcattagaaattgcaattttacctaatccttttaccttgccttgattcccatcaccgaatataattgaatcttgggaatccttattcttgacgtaggaagtgaacatcttcttctcccccgtcatatgggttgtgcatccgctgtcgataatccagcttgaacccncggatgcataaa

SEQ ID NO: 69850 - DNA, 423 bp, Zea mays
  unsure (1)..(423): unsure at all n locations
gagctagtagagaggagttttttttgtttttatttacatnganntaacgagccttttagagaattactggagttgttttaagcgacgttgtggcccatgatatctttgctccaaacacatattcgcatccgcctagctctatactaaaacattatatatatatatatataatatctctactacttattaaagctctaagagtagcctgccgttttgccgatctgtgatctcagtcgttcattctacagtctacaatctcagctgttcgatgctgcccacccaattttccgcccctgcatcccgatcccgctggcccagccccgaagtcatcgcgattcgcccctagcctcctctgtccgattccgttgccgcgaccccatgctcatcgtctgccacgccactgatgccgtgcgctctctatgc

SEQ ID NO: 69851 - DNA, 470 bp, Zea mays
  unsure (1)..(470): unsure at all n locations
tgacaattgcccagtttgtggtctctcaagatggattgatgctgaaagaaagaagattccacagaaagtgttacgacattttccgttgatacctatgttacaaaggatgtttgtgaacaatgaaacagcagaacaagcacaatggcacaagctaaagagacatcccaaggagaaggaaatgagccacccagctgatggtgatgcatggcaagattttgatagaaaatatccagattttgcaaatgatgctagaaatcttagacttggcctagctactgatggatttaatcctttttcagaaaagaacactaattacagcatgtggcctgtacttgttatgccatacaacatgccaccttgggtgtgcatggacgagtcaaatttcatgatggctntgctaattcctggtcctgcatcacctggaaaggactttgatgtatntttagagcctcttatagaagaattacttc

SEQ ID NO: 69852 - DNA, 488 bp, Zea mays
acctataaaactcagctatataactcttggtgggtaaacaaaataaaaaatcctcttcagactgaagaaatttccaaacatgatagccatatgtccttttccatatttattagtcgatgcttatatctctccgttcttgaacagtttgatgccgtccctccagagattcgcatgccacaaaattcaaggcctaagaaaataaaagaagaggaggaaggaacaaaacgatctgggacagtggaaatcacttgacgatcgtggacactggcacgcctgaatgcagaagaagtgccaaaagcagcgagctgcacatgcaatgaagaaatccataaccaaatgtgaaacatgatggtccagttaaccatgagacaaacaatggcggcaagcgactcccgaagcctgtctacaagaggcaacctgaaaatagagaacgatttcccagctgaaatttctcgtggccccctcgcaaggctatctacaaatgactg

SEQ ID NO: 69853 - DNA, 414 bp, Zea mays
  unsure (1)..(414): unsure at all n locations
cccgcaagcttatcaagtctactttcatatggatccgttatttattttcatatctgntctgaggccgccgtaatcattgttttcttaccgagacatttcctgccttttctgcccatggtgctgcgtcaccctattttggcccaatgggtcgtgtatcaagttaggtccattagggacgcatcctaaggttgcagcacgaccccaatacccttgtggtcgtcctcccatgtttataaaccccctagccgccaccaagaacagcgggttgtgtttagatcaagtttagctctcgctacttgcttgtaagcgcgcgtgctggttcagccgcccgtcttcttgtcttcggaaccccaccatattggagttngattttgaaacctacatttagatctggtaatccagtacttgctctac

SEQ ID NO: 69854 - DNA, 416 bp, Zea mays
  unsure (1)..(416): unsure at all n locations
tatatctcccatagctctgggtgtgcaaaanattcatgcatgtccgaaccattgtattctgtatcgtggcgattttgagaacgcatcaagatgcccagtttgcaatgtcagtcgatacaagaagagctacaatcaagactgtgtaaaaaaaattcccgaagaaaaataaaaacaagaaatccactattggacctgaaagtgacgatgacacttttgatgacatggatgggaaaaagaagtcaaagaacccagctttggtgatgtggtatcttccagtaattgatcgcttaaaacgtttgttctcaaaccctagggaggctgagcttatgcgttggcatgctgaaaatcgcaagcagaataacaaacagattcgacaccctgctgatgcatcacaatggaaaacattcgatcttatg

SEQ ID NO: 69855 - DNA, 377 bp, Zea mays
agaaagacaggaggtgcattatccacataagaacatcatgacaactgacaggtcgctcgagttcctacacatggatctattcggcccgaatgcttacataagcttcggcgaaagtaagtactgtctaattattgtggattattattctcgcttcacttgggtattctttttgcaggaaaaatcccatacccaagagaccttaaagggattcttgagacgggctcaaaatgagttcggcttgaggatcaaaaagattagaagcgactacgggacggagttcaagaactcacaaatcgaaggctttcttgaggaggagggcatcaagcatgagttcttctctccctatacgccgaaacaaaatggagtagtggagagga

SEQ ID NO: 69856 - DNA, 461 bp, Zea mays
tcggcacacagacaaatctcaagatgaatggtcgttccttcttaaagatgaattgacttaaagacccatgatgttttgtgtcattattgtagtcgattgtaaaggacataaatgtaattgtgcacaggttgcatcctgtgcctataaataggtgaacagtatcccagcactgttcacgcgatcctgtgatcacggacacgttacgctaggattattgttttatgccaaggcgaaggtataaatgtgcctaaatatcatgttttaatacttgtatattcatataacaaaacatgtgaatatattttgagctttatatttcattctttattgttgccttaaaaatatgattacgaaggtgaaaccttcgtaatactttacttatgaccttcgtccgaagctcattcaatcctcggggagataatgcttcatcggacgaagggcatttatacttaacatctttg

SEQ ID NO: 69857 - DNA, 334 bp, Zea mays
gaacgcgcaaatggcaaaattttcacagctgttaaaaagatgctcctcgatgagaaaaagggcaagtgggccgatttgttacctgaagcggtctgggcactaaacatgactgagtgcagggcgactgggttcacccctttccgccttttatatggatcgaaggccatgaccccgcaaaaaataaaacatgggtccccacggacagttccgtcagctgttcccgacgtggacaaacccacttcgaaagatctcatcgatggagaccgcgtcttcgccctacaagctctaaataaataccaagcccatacaaaagcatggcgtgaccacgcagtca

SEQ ID NO: 69858 - DNA, 451 bp, Zea mays
  unsure (1)..(451): unsure at all n locations
tgctgaacgacagcattgtttcgacaagcaagcaaatatttattgctatgtcaacccacctcggcagctgcgtgtctcctccatgcagtagcttctcaccacccaaccatttcggacgtatcggtagtcggttgctaccgttaatcactggacgcaccacgccaccacccgtgcaatgctgatgaatgtcctccgcgctacaatcacaagctaggttcctcctaatcccaagcaagcaaccttaacccatatgtagctcctggaggcaatccggaaccaccgagacgaatagaacacgagcaactaaaccagcagatcgatcacggataccgacggaccatcccatcacattccctgatcatggccgcgttggggaagacagnaatcccccaccacgaatccgcttgcagagtggcgggatagataggtcggtgccaaatcacagtcagct

SEQ ID NO: 69859 - DNA, 387 bp, Zea mays
ttataaccggaacaacccctgttcccaaatttcaaaaagaatctgagtagaattccaaacaaagtaacaattgaactgattttataactgtttggtaacttcagctttgcatgttagtttgtgtttctaattagctaaactcaaacatctaacgcggttggaagaaacaaactgagcacacagccaaaaccgtttcatgagcagatgcgtgcaaataaaagttcgaggacatgtacaaaagctttttttctctcgaacagtgcaaaagcttgatataccgaatatggaatctttgtgtcatcctcacttgtgtggttatttgctcctgttgttggggaaattcccaccaacattttcagcccaaaattgttgatcttcacttttata

SEQ ID NO: 69860 - DNA, 456 bp, Zea mays
  unsure (1)..(456): unsure at all n locations
tcattaatntagaattaactaggagtctaggactagtcttttaactctgcagtacagctgtgtgtgtctatatagaaaattatgtgttcttacattgattctttcagagcctaatcggtaagagaaaatatttcgaagcactcatttcttacaagaattggaacgagcaactatgcaagcctgcacttaggatctccatatcttattttgttatttctaattgatagcagttcttgttataaatgaatgcgacacaaataagatcaatcacagagaagacacggatttaacgtggaaaacccctccaaagtgaaggggaaaaaaccacgggcgccgaccggcaacttctcactattttcgggtggttacagatcgcaggagaattacaattgagatagctatctcctgcggcttacaaagatatgtatagaggtgaaaccctanaacgatccggcg

SEQ ID NO: 69861 - DNA, 434 bp, Zea mays
  unsure (1)..(434): unsure at all n locations
catgcaagctttatgaacatgnntgttattttgnatttatacagancatcntccttataaatacatgaacaataccctatataaaggatcttttggaggcggcaaaccctcattgaccgggcttccgaagctaccttcgaggttcttattcttaaaaatccaaaggtatgcttgtaattacttaatataaggaaagatggaataaagtgctaaagcattcgggatgagttccatataatgtttcacattggatttttcatatcatttcattaatgcttctctttaaaaacattcatcctttgttctaacacttcaaagaagtgttatatcataggacgaaagtcttgatattcaacttgtgttgccttggtttcgatacctttaggggattgaaatcaagtaccaacattggcgcccgcctctgtgaactcatt

SEQ ID NO: 69862 - DNA, 428 bp, Zea mays
tctagcacattcaaattttgtattttctaagtcatgctcggccattatagcatctaattatgctatatgagcatttcgttgcttaattagatacatatgatcatgaatagcctcactgttaatatctgtacatctagtgcacatagtgacatgcttactggtcgatgtagagggtttgcatgaattaagctcaacaatcttagcacgtaacatatcattgttatctgataagattggaaatggaagcattgcaaacatctatgtctttagccttagcaattaaatcttcattatcatttctaaggctatcaagagaaacatttagttcttcgatcttagcaagtaattcaacattattatctgtaagattgagaattaaagcatcacgcacatttgaatgagccgtggtaattaaactagcattctca

SEQ ID NO: 69863 - DNA, 236 bp, Zea mays
gcagcatggaggctcctacatgctccgacaagttatcacccaaccattctcagtggatgagcgagtccttgctccctttaatcagtggacgctcctttcgaacacccttggcacacaagcaaatgaagtctgctcttttctcacctaataagaacctacggataaaccccgagcatggttaactcatctagagctacccgacgcaataaagaacctccgagggtattctggctcaa

SEQ ID NO: 69864 - DNA, 410 bp, Zea mays
agctagtgaagattcttcatcccaacatgtgttagtctgttatgccagagccaacccatattagtcttagcaattaagcaagtgtcgagttcagctctattgaaatcaactaagtatagctaaccctttaacactcccttaaatgctattgaatcatcacttcttctaaagacagtaacacctacatcagtaaatagacagttgtagcccatattgcataattgagaaacagaaagcaaattgtaatctaaagaatctacaagaaaaacattggaaatagaatggtcaggtgatatagcaattttaccaagtcctttgaccaaaccttgatttccatccccgaatgtgaataactcttggggatcattgtttttcttatatgaggagaacatccttttctcccctgtcat

SEQ ID NO: 69865 - DNA, 406 bp, Zea mays
  unsure (1)..(406): unsure at all n locations
gcatgcaagcttctccaccatgtcgctgctagccaagttgttgnttttttctccatcaaagatcaaacgacatgaacgctccttaatgacacactttgtttgaaacaacgtatgtcgctgattctgctctgccttctccatttgtgcactaagcacatgctgtacaatgaggctctcataatgctctgcatcatctgcaccaatctgttcttcgggtggttccttagtgcctgcatcatcagccgcaagcaaagcaagtgtagcttcatccaaatcactagcagaggaatacccaccatcgtcttttaccacccaaacacgctgattaagacaatcacgctgcacgtgtccatagcccttgcatcgaaacacagaacatctcttgttctacctgtggaagctactg

SEQ ID NO: 69866 - DNA, 446 bp, Zea mays
tctccaccatgtcgctgctagccaagttgttgcagctacctccatcaatgatcaaacgacatgaacgctccttaatgacacactttgtttgaaacaacgtatgtcgctgattctgctctgccttctccatttgtgcactaagcacacgctgtacaatgaggctctcataatgctctgcatcatctgcaccaatctgttcttcgggtggttccttagtgcctacatcatcagccgcaagcaaagcaagtgtagcttcatccaaatcactagcagaggaatacccaccatcgtcttttaccaccaaaacacgctgattaggacaatcacgctgcacgtgtccatagcccttgcatcgataacacagaacatctcttgttctacccgtggaggctactgaagaggcactacctgctggtttctgggcagaatttggtgctgaatttgtg

SEQ ID NO: 69867 - DNA, 467 bp, Zea mays
tgagcagtcactggctttgtctgatatccttgaaagctattgactaacatgtcctttagcttctgctatgatgtaattgttcctggcctgagagaggaataccaggtttgagcaacactcctgatttccatgacgaaggattttgccatgaaagtcgtattgccaccataggatgatatggttgctttgtagctcatcaaaaaattcttcgggtctaagtggccatcgtacatgggtagctggggtggcttgtacgagggtggacatggcacaacctgcagttctgtggctaggggagaagcatcatcaaaagcaatgttgtcatggtgaaaatcatcataacacatatcatcatggttggggccctcctagcgaatgtatctttgttggtggttgtgccttgctcagtatcctgtgcaatatgtcacatctcctcggctgcttcgtcaatcttcttttggagctta

SEQ ID NO: 69868 - DNA, 484 bp, Zea mays
  unsure (1)..(484): unsure at all n locations
gacctataaatctcaagcttaaccctgcgagaccttntcccgtttctttctaaccataatgatatgcgatatcgaatgtcatacttgatgcatattcactttatttgttcccttgtatgatgtactgtttgtttcccaatttgaatggatgaatgtatgtatgcttgcaatcgcatagagaacgatccggtcgaagagcccgaggaactcgcaggagaagcccctgagcagcagtcggttggtggaggcaagtgtcctttgacctatctctgtcctattcattctttaattcacctcccgctttacacatttatacctaaggattgactagctcttgttatccatgtccttgattacctatttgggttggattattattacctagctntatgctattgcttaactctaatcaatgaacatgatgagattatctatgatacgctgttttcccttctcttattatgatgttgtacttgtggtattc

SEQ ID NO: 69869 - DNA, 407 bp, Zea mays
  unsure (1)..(407): unsure at all n locations
tgacgctgcagcttngttgcctcccactcttccttcagtgtttgtattgttttctcctccctcgagtcagaccgacacgttggttggtcgtgcttctcagacaccttaaaaatagtctgttaatagattatgtctcattcgttaatagatcaaaacgccatgtcttgtctggcatgttaccgctgagagcatctagagggtgtgaataggtgatcctgtaaaaacttaaatcttaaagccacaaacttgattaagtgttagagcaataaagccaagtggctatagaggagttcttgcgaaacacaataaccacataaagatcaacacagagaggcacagtggtttatcccgcggttcggccaagtccaacactcgcctactccacgttgtggcgttccaacggacga

SEQ ID NO: 69870 - DNA, 448 bp, Zea mays
tcttgacgagattgagaaaatcgagaaataaaatgagaagattggacatgaattgaaaagatagtaatcaagagtaatattgtcatagaaaatgaagtggttgataatgcaatggcgcttgacaatgaaaaacttagagaagaaaacaagaaactaaaacaataaaaagaatcatcttgctaccaattagcaaaaattcattaagggacaataccacaaagtgaacttctcatgaatattgtcatgaaaatggacaaaagcagtattggttatcgagcacataaagagaataaatatcaacaagaaaacaagacaatacctaagcctaagtcaaagagattctttgagtatggaaaagaagcacattgcatgataaggaaagatgcaagtgacaaagttatgttcttatgcccaccaaacaagaataggcctaagaagattgggttgg

SEQ ID NO: 69871 - DNA, 391 bp, Zea mays
ccacagccagcccatgctagtcttagctattaagcatgcatctagaccggcctcttcttttgtaaaatcaactaagtaaagtttgtcgtctagtacacccttaaaagctaatgaaccatcacttcttctaaagacagacacatctacatttgtaaatagacaattatatcccatattacataattgattaacagatagtaaattatatcccagagactcaactaaaagcacattagagatcgagtgctcatttgaaattgcaatcttgcctaagcctttcaccttgccttggttcccatcaccaaatatgatcgaatcttgggaattcttgtttctgacgtatgaggtgaacatcttcttttccctcgtcatatgggttgtgcatccgctg

SEQ ID NO: 69872 - DNA, 445 bp, Zea mays
tctgagaggatgtttaactcaagagatgtgaagcgttgttagtcctcatgcaaatgaaaccactagatgctctatgaggcactaagttttacacagatcaaagtcattgacccctcttaatagtacggctatctagcctactaatccggtcaagtatcttctctaaactcctagagaccggcaaaaacaaaacctatgttatacctttgccttcacttgatccacaaccaatgcttataaatctccaagatttcctgttctatgtggtccaaccctgcattcttatttctccaagaaccgttagtccacaaacagttgtcattaattaccaaaacatcactaaggggcctagatgattcacaatctccccctttttggtgattgatgacaacactacacattatattcaagagaagttttggttttccaaatctccctcatacct

SEQ ID NO: 69873 - DNA, 422 bp, Zea mays
  unsure (1)..(422): unsure at all n locations
gccgcaagctgtgagcagtacaagtacatattggataagttgttttgccgancagccgaaacccatgcttgtatgctaagatatcgcacagtacaaggtgctgctaggatctcaattgtctgaggaacaagagaaaacactgataaggtttcttttcaacaacaaagatgtctttgcatggtcggctaacgatctctgtggcgtcaacatggatgttattgaacacccgctcaatgttgatccatccttcagacccagaaagcagaggcttcggaagatgtctgatgataaagccgaaggtgctcgaaatgaagtaaaaagactcctcagcgtcggagtcattacggaagtgaagtatctacaatggttggctaacactgttatggtaaaaaaagccaatggcacatggaggatgtgtattg

SEQ ID NO: 69874 - DNA, 321 bp, Zea mays
acccctgagagagataatgatgaacatggaagctacccgaaggatcagaaaatgggtcgcagaacttaatgaattcaccattgattatgtgcacagatcctcaattcaatctcaagcgttagcagacttcattgctgattggacaccacgagctcacggtgaagaagcgacaaaatatgccgaagcttggacgatattttgtgatggatcttaggggaacttcggtgcacgagcagctactgtcctagttgcaccctctaaagttagaacatgttatgcaatacagttagacttcaagtgtacaaataacattaccgagta

SEQ ID NO: 69875 - DNA, 466 bp, Zea mays
tcgtgttcagctctgatatttctgcttcagcttccgcctgtaaaccttcggctgcctggagctcaaagatctttttctcaaaagcatccgattgctcctttattttgttttccaaatttccaattataacttcatgctttttatcttcaagatcttgctgcatttgcaaagctttgctcaatagcatactctacacaaacacaaccttcgtcagacatgtttttattagaagcaataaaagttaagggacaagttattcaccttgaagttggagtaaaataaactaccaacgacatgttgtcgtcggtagcggctgatgtctgtttctagcttccggaatccaatactcttggacagagtactgataactttggcccctgtttggtctcgaatacacactaatttctcatcatcaacgcctccgaagaggagtgccccacgtttgtatccacaggattgggcatac

SEQ ID NO: 69876 - DNA, 187 bp, Zea mays
ctactcaactcgtctaatgcatggtccagcttcgtgtttaacacggcggttaggttgactgtgctgttcaacctatgattgccctcaccaacaagagagacaatcacgcctcctgcgctgccagatggacggtgggggtaatacttcatgtcgagaccgtcagctacctcatcgagaaccgagcagt

SEQ ID NO: 69877 - DNA, 465 bp, Zea mays
  unsure (1)..(465): unsure at all n locations
ttgctggcggntgaagtggattaatcatatatccaaacattcttttgttccttttgctgttcctcattccaagatctgacatttgcatgggtatggaaggatggaagggacgaaagggttgagcaaagacagattgtatagagcagaaaaccccatctatctaaggttttacctagataactgatgtcattgtggacaaaagtcacacaatacaccaacaatcatttcaaagaagcaaatcaaacatgaacacaaaggacaatgaattcaagcataccatcacaacacaatccaattctactcattcaaccaaaacaaaaggtgagacaaggtttggaataagaaagatattataaagtcaaggagtcaggtaagaattatcaaggagttagacaagaccaaaacattattgttaatgaccaataatgaaataagataaccactaactggtgaagcgaggataaa

SEQ ID NO: 69878 - DNA, 319 bp, Zea mays
  unsure (1)..(319): unsure at all n locations
ttgtgaatatnnnttgggcacaagtcaggctttgtttcttgcaccacaccatgctgatcttgcttgttgcggaacacccatttgtgttctacaacattttggttatgacatggaacaagatgtcataccttatttttcgtgaagttgttgagttcctcttgcattgccaacacccaatctgaatctcttaatgcatcttccaccctgtatggctcaatagaagacacaaaagagtaatattctcaacagtgagcgacaccagatcgagtggttaccctcttatgaatatcaccgaagatggagttcaccgcgtgatctc

SEQ ID NO: 69879 - DNA, 481 bp, Zea mays
catagaaactcaagctggcctacaagcattaagaggatcttcctcatcttattatgaatgcattaaaacaaaacgcttattcttcatatcaacaatgaacaaaaaccaatggttcgcatggcacactggaaaatacagctgagaaaacagattgaggtaaaataagaacaacgcataaatgtatggcacattaaggctgctgcttggaccaaaaaaaattacaacaaactaagcaaacaaaaaaccttgttagagcgatgcaacttctaagcagaattagcccctagaaacgatatccttagatcttcaacttcatattggctattgtattccatcatcgaatgctgtaataacaatataaatttaaaaaaaaatgaaaaacaataaacaaaattactaaataagcaaaacataaccacataaaaagttgaagaataattactcccacttttggataaaagaaatgtttctttgacaacct

SEQ ID NO: 69880 - DNA, 391 bp, Zea mays
  unsure (1)..(391): unsure at all n locations
agctttatcaccctttcatttttttttatttttctagcaactatcttcctatcctttctacaaatagcaaaggaagcatttaaagcatgataaattgtagagggaccattcataaattntctaggaacatgaacaatattcttcctagacacatgatgaatatttttcctaggcatatttctaccatgcatataggaagaactggaagcatacatagcataagagtcataggcatgtgaatcaaaagtattacaactcctatgagactgtcttctatcattgtacataaaagcatggttctttttagtactacttgccataggggccttccctttctccttggcggagatgggagccttatggctggttaagttcttgagcttcctcttga

SEQ ID NO: 69881 - DNA, 440 bp, Zea mays
tctatagggtgaacacattctatgactaaccaaagggcattttgtgaaagacaggatctgtagcgcatgtcaagcaggatagcgagttggagcccatcatccacacaagaacatcatgacgaccgacaggccgcttgagctactccacatggatttattcggcccgattggttacatcatcatccgcaggagtaaagattgtcttgttattgtggatgattattctcgcttcacttgggtattctttttacaggagaaatctcatacccgagagaccttaaagggattcttgagacgagctcggaatgagttcggcttaaggatcaagaaaataagaagcgacaacgggacggagttcaagaactctcaaattgaaggcttccttgaggaggagggcatcaagcatgagttctcctctccctacacgccacaacataatg

SEQ ID NO: 69882 - DNA, 329 bp, Zea mays
  unsure (1)..(329): unsure at all n locations
ataattgaagtaatnaatatgaaaaaagaaaaaggtgaagatataattagttatgttgtttggantgataatntttttatattatnnaagagnaaaaagggaagaggaaaaggaggttggttaagtgtaaggaattaagttattttatngtgttttgtgtanataaagaaaaggatgaagggatagggagatgttttggatgnaatgataaagaaaatatgatnantttatgtntgntnatgaagaataaaaaagtgaatttttaagatgattttantaagaaaaagaaaaaaaaagtgtatgtaggttgaagaagnnttgtaatgtgt

SEQ ID NO: 69883 - DNA, 444 bp, Zea mays
tctaaagggagaacacgtgataggtctaactaatgcgcatttcgagaaagatagaccttgtgcagcttgtcaagcatgtaaacaggtgggaagctctcatcataccaaaaatgtgatgaccacatcaagacccttggagatgcttcatatggacctcttcggacccgtcgcctacctaagcatcgggggaagtaagtatgggcttggtatagatgatgatttttcctgcttcacttgggtattctttttgcaggataaatctgaaacccaagggaccctcaaacgcttcctaaggagagctcaaaatgagtttgagctcaaagcgaagaagataacgagcgacaacgggtccgagttcaagaaccttcaagtggaggagttccttgaggaggaggggatcaagcacgagttctccactccctacacaccacaacaaaatggtgt

SEQ ID NO: 69884 - DNA, 335 bp, Zea mays
gaatggttaccgaataacactttgttatgttttttgcccacacactctggcatgtaaggagagtggctcaaagcagtatgtcaaacctgcttcggctgattctgccgagcttctgcttcagcaatctctttttgcttcagaatagtgatatggcacgttcttgtagtatgacccttgtcctctccatagaataagcaatagattttcctgcgctgatccccatatcttcctccaaagcccctgccgcctctgccccttggagctggtggcctgaaagagctttgctgctgttgggggtctgcttcatcggtcaaggtcctgtgaaaagaaacacc

SEQ ID NO: 69885 - DNA, 257 bp, Zea mays
agagattttttttttttagcacgcatttgcccatcagatctgttacgagcagagataattcaaaatgagatatcgcattctgtgaaagacgcctcccagtctgactatctaatttattaatcgatcacatatctaatggtatgtgcttttttttttatataattctatgcccatactctaacaattactgaatcactaacgtttttgcacacatttttgttgcactccttatcaaccccaaggcagtcgttaccaat

SEQ ID NO: 69886 - DNA, 383 bp, Zea mays
taccgcatttgaagcatgatcgcttccacttggtcttagtcttgctcggctgtccattgcgaccctttagcaccgtcttgaatctcttgataatgagggctatttcttcttcattaagaccggccgcctcaatttgcgccaccttgctgggtagcgcctccttgttccctgtggctttgagagcaaaagggtgcggctcgttgatcggtccattcaaggcgtcgtccacataccttgcctccttgatcatcattcgcccgctgacgaattttcctagtacttcttctggcgacattttggtgtacctgggattctcacgaatattattcaccatatgaggatcaagaacggtgaaggacctgagcattagtcggacgacgtcg

SEQ ID NO: 69887 - DNA, 277 bp, Zea mays
  unsure (1)..(277): unsure at all n locations
atcgaattaatagggctcctcttcaaaagatagtttaatatattattcttttccaccaatgactctgttacaaaagagttagatgctccagaatcaaataaaactgatgcaggtattgggttaatatgaaacataccatacaccacgtcgacatcctcatgaactgattctgctgtcacgtgattaactcttcccttactctggatctgcagagtcttggtctgtgcanatccactagcatgtgtatcctgatcagctctttgggtgctgttcctct

SEQ ID NO: 69888 - DNA, 432 bp, Zea mays
ggagtacaaccaggaattcgcactgccctctccaccttcttccatatcgattgcgcacagtgaaagcacagcctcttacggtcctatagcctcgatcccatctcccaatttcgcctagaaccgccgcgacaccgttttcccctttctctgtctccggtgaacgtaaagctctgcgctccgtggccagccctctctggtaaggccctgtccgattcaagctttgttttagcagctctgtgtattcatgaagctcctcgtagtggccgtttgaccaatccgagcgtagattattgggaacacaggatcgacaccacgggttccgccctgatcgtggacaaatagtttccagtggggtttgtgtcgattaaatggatgttcctaggttgccttaagccagtgatgcctccccggtcgttatccgtagcaatcgtc

SEQ ID NO: 69889 - DNA, 373 bp, Zea mays
  unsure (1)..(373): unsure at all n locations
cccttctggcagctatctgacttccatgaatagcgatgggtccttgatccgaaggtatcttcatgctaagataagcatgatgaagaattgcttccaaagcattgaaggtgccacgaccaataattgcattgttagggtactgcatgtcaacaatgtcaaacacaacttgctcagttctagtgttgttgatgaatccgaaagtcactggcatggcgatcttgcccagagctactatctgtcttcctccgaagccacagagacggtgtagagcatcattaatcttatctcttcgctctagctntgcctaaatgccttagcaaatatgatttcacttgcactgtctgtatcaaccaagacattgtggaccagaaat

SEQ ID NO: 69890 - DNA, 473 bp, Zea mays
tcagagtgccttatcgaacagtcatgcaatcaagccatgtactcgacgagaggtttctgcagcctcccctcggtgctctctactatggtgagcctccgtgccactttcatgaagtcactgccacagacaacacggtttaaacgtactagtagtacgtagtagacactgattatattatatacaaggtaaataaacactcaccagaacggctcgtcgccagtacgcttgacagcgccagcagcatcacggtaacaaaggtggctcattacctctgccttctcgattccaaacatgtcggccaactgaccgtacagctcttcgtacgagccaaagacggacaggtcgatggtgcgaccgacatcctccgactccacaaataccttgcagtgcccggcttcaaattcgaacccgagcctagaagcctcgcggcctcgggacgaggaaccgatgcagatcgacgagccggagccatc

SEQ ID NO: 69891 - DNA, 412 bp, Zea mays
agcttgagtcagttctctagcaaaatataattgatgtccacaaagataatgagggtgtgaaacacattcgtgagaagttaagggctggaaaagccaaatggtttaaagaagatgatcaaggcattgtatggtttaataaccgcatagtggtgccaaagaatgaagagatccaccagcaaattcttgatgaagcacatcttagccgctactctattcatctcggaagcactaagatgtatcaagacttgaagcaacattactggtggacaaagatgaagatcgaaattgcacgctatgtggctagatgtgacacttgcagacgtgtcaaagccatacatttgaaagctgccggtccattacagtcactaccaataccgacatggaaatgggaagacataagtatggacttcat

SEQ ID NO: 69892 - DNA, 458 bp, Zea mays
ggacacttaacactcagcttaatgagattataagccttgggtcaagactggtatgatttggaccatgtttgatacctagaacccagaaccctgatctcctgccttatgaacttcactatatactccaaaaaccctagtttcctggagattcgtgaacgaaaactatattcaagacttaaaataatatactattgttatccttgcacttcatgagcattacatgagcattcataattatatatggctatatatagaaaacgaggaatagatataagttgaagaagcaaggactacaccaccagcacctgaagaacctcaggcaggaaactgctttttactgcgacatctgcggagcagagcctgacttacctatcacacaatgcaagcctcgatgcatttaccacctccttgctatactaaaatctttctcacttacttgatgcattatgcgataggag

SEQ ID NO: 69893 - DNA, 409 bp, Zea mays
tatacatatacacctaaaggaacaatcagaagagcatgttgtaacctgagtgggggccacatgaagcataaatatagttgtatcgcagcagaccttatggcctgtttggcaccaaagctattttgcagttttgatggaatactatagtatttgagaaaaccgaggtattgtaagccgtgaggtgtttggtttgattttgcatactacagttttcaataatacaatatcctcaaaactgcagtatttttggagttttggatactggactcaagaccaaagtttctcctcccagctggcttgttctcccttgccgccgacgttccttcctcctgccgatgcatcgtgggacgccacgcccgttccacctcgtggctgggtctcccttattgtgctcccacgccgccccact

SEQ ID NO: 69894 - DNA, 360 bp, Zea mays
  unsure (1)..(360): unsure at all n locations
gggaaatctaaaattcaaatttctgaattttcaccctttggaccaaaaccgagcccgttcaccttgatacttaactctaatcctaatgctcccattgacaaaaatgtgtctaactaacccctctgtcacatgccagaagatggcattgggacgcaagccctagacatgacaaaaccgaagatttgcctcgggctcgggctgggagacagaccaaacttcagagctccaaatctttgaaaccattangccaaatcctatgacccccacacaagattggtagcttatatggaggagaagaggttttgtgcactgaccaacgctcggatgaatgaccacacgcgccacaactcgggcagaatg

SEQ ID NO: 69895 - DNA, 452 bp, Zea mays
  unsure (1)..(452): unsure at all n locations
ntccaacannatttggatcaccctgtttggtgacctatattctaagctacatctgttgtaattggaatctttgaatctgtccaaatttggacagcaaagcctttcttatgtcttttgatcttgatatgcattgaattaacctgataggtttataaatgaaatatagacaattttactggctttctaaaaagtctaggagcgcctgaatgggatgactgagactccaattatggatttttgaagtgagtagttgaattctgttcaagtctggacaaaatttacgtttcgcattgtttggcctttctaagtgtcaaatcttgtggtgatgataataccaagggtatagtggactttgtaagctttccataaagtcctagtttacttctatttggatgaatatttgtgagttatgaggaaaacaaataaccgntgtgctgctgtctagaaatatg

SEQ ID NO: 69896 - DNA, 416 bp, Zea mays
  unsure (1)..(416): unsure at all n locations
ccggngctgattgacggctgtgttttatttttttacgcggcggaaaccaaaggcacgcgtgatgtcacggcgaatgcaccaccgccgtgaaaagctttatccacgggcggttagcaggggggaggcatggcgacgagcctgagtggcgtccagcgcacggggagatgatatttttccacccaatcgttatcttcaagcccggtgcttgaatcaagacagctgcggcgcgaatcttcgcgcatagaggtcgcctgcggtgaagacagccgcgctggcggtgttatccaatgcagacactgtaccatcagtaggtctattcagacagcctgaccgagcaagtctaagccgccctttctatgattttaagtggcaacacaaccaatgatctaatcaaattgtaggcgctataatccatc

SEQ ID NO: 69897 - DNA, 479 bp, Zea mays
  unsure (1)..(479): unsure at all n locations
tatacggaccttaaaactagctgaaacagatgctggttttggacatatnttcttttgttttagcacctgcctgatcagtgaggcattcgttagtttaaaatggagtcttgcattgaacattgcgctgttccacactagggaagctttcctttgttcaatcatggcggttgtatagtcatatcctttcctatgatcaagatataagacagaccaaagcgtggcggtctttggaggtgtgtngttgacgtcctgctatgccctacgacagtgattactgttgcaccacaccagcagcattgttgcagcatatatagcagtcatacttacgataatctaacattctcccccttaatcacacaagccttactatcataaatacatttatcaataaaataacaagtcaagacatagagaatcagtgaatcacaatagccaattaagtaccattgaaccctgatgagtatagtacatcattctat

SEQ ID NO: 69898 - DNA, 389 bp, Zea mays
  unsure (1)..(389): unsure at all n locations
actaagctntagcacccgttcccacacccgattgcccaccagctcgtctgaatntctcattgcccccacatcggttgtccgccgccgtataagtgaactcaccgtcgcctggccaactccggtcagtgcccgccctttatttacgcgtttgagcattctcatgcctctgtgatgctccccgacccctttaattgatctagaccggtgcccatcgccgggaacacaaccttattgccgctttgcttacggccaccgtggccggagctccctagtccaccaatagtgcaattaagttggggaaaacgttcatggggactcggatttggtctcagccaaagattagcactggtcttatccccaatcggccggcgtagttgctcgccggagcg

SEQ ID NO: 69899 - DNA, 412 bp, Zea mays
  unsure (1)..(412): unsure at all n locations
agcttgggagggcatcattttttctgttctttcggcgagccatagccagcccatgcaagtcttaccattaagcatgcatctagaccggcctcttcttttgcaaaatcaactaaataaaggttgccgtctagtacacccttaaaagctagtgaaccatcacatcttctaaagacagacacatctacatttgtaaataaacaattatatcccatttgacataattgactgacagatagcaaactatatccaagactctccactaagaatacattngatatagaatggctcattgaaattgcaattttacctagcccttttaccttgccttgattcccatcaccgaatataattgaatctggggaatcctttattttgacgtaggaggtgaacatcttcttctcccccgcatatg

SEQ ID NO: 69900 - DNA, 464 bp, Zea mays
  unsure (1)..(464): unsure at all n locations
tacgtgaactataaaactcagcttacatattcgttggaagttntcagttgctacatccttcatctagacaggcacagatgaaaatgaacgatactagtcagtccacaaaaatcactaatgtgaacagtagatgactacttaaactcggccagtaggggaaagaccaccccacaatattatcttaagaagctcaatcggagccccggccgagaagattagtccatacacctgtcttttgttatcatctgatagtatctcataagcttcacgagaagctacatccttctactcgtgctttaagccctcgcggcccctacaccaagatctgaccccaaagattagtccatctcgtgtgcagacaaccagaggaccagcaaatgaccttttttaacctcagtctgaaattcactctcactgggattcaaactcaagacctaaggagtgctactcagagtctcatacca

SEQ ID NO: 69901 - DNA, 428 bp, Zea mays
  unsure (1)..(428): unsure at all n locations
catgcaagcttgatgtagcaacctcatgttatgatttttttcaagaagagcaaactaatctacatgctgaattgactgaaaaagttgaagtcctgactttagacaatcaaaaattgaagaattatttgactgatgcaactactagaggaaaagttgctattgagaacaatgatttcaacaatgagttggcagtggataatcaaaggcttaagaatgaggtcaagaaattaaaaagtgaaaatgaacatcttgcaacaagtgtgcaaaagttcaacaagggtcaatacctccaaaatgagctgcttatgaacactgttatgaaaaataacaagagtggtattggatacaatgcttttgtgcaaaagaaagctatcactncacacaagccaatgcagactcacaagcctatcaaatgctttgagtgtgga

SEQ ID NO: 69902 - DNA, 461 bp, Zea mays
  unsure (1)..(461): unsure at all n locations
taacagttgttataaaagactttcctgcaaaaaattctggataaatctttgtaatataattgtggaaaaaacttatgtaaatttgtacataccttgtaatatatcttgtctccttaatccgtgtacaatctgctttgctgtgaacgaaacttcacttttgagccgaaggcgaaaaacacctttccttcttttcgtacacaacgaagcatgaaaatttcctctttcttcgaagttttttctcataaccgaagcatccgtcttttgtggtatgatgatgatgattctatatatgtctaaatgaatgtttatgaatgcaaatgtgatgatgtaatgtatcgtgcaaatgaatatcggaatatattcaaaaccataatcatagccttcattcccttgtgaatgactcanatctttntgccgtttaattttcggcttcaccgtttacttttcggtgtatcagcgct

SEQ ID NO: 69903 - DNA, 415 bp, Zea mays
  unsure (1)..(415): unsure at all n locations
ttctagtagtgcggagtcgagtaaagaatatatgtctctgtatnttttnnnnnnnccncacgccaaaaaccaagattctgagagaatatgtctctgtgtgaggtgcctgaggctgagaacttacactcagggggacgaatcttccacgcgctggttgtcgcctctcgcanccacttccagagcancgatgttggtgtccgtcgcgcacgccgccgtggtccttgtcgccgtggaaagcgtcgaagttgaggtagatgttgttgaccatgcggacgcagcggaagccgtggccgacgtcgcggctctccgtccacagcaccgactcgtcctgttagccggggttgtaaggcaccagcttgaccgggtggccctctccctgcgagtgctagatggccttctcggtgaccctgttgac

SEQ ID NO: 69904 - DNA, 411 bp, Zea mays
  unsure (1)..(411): unsure at all n locations
tgcaagcttggcgtccaaatgatccagatcttctattcntttangctgaagaacctgagcatctgtttggcgaaagcaagtgtcctctgaattattatgtcccatttactttataattcatcaacccgcataccatgatcaacctaaggattgactagtattctgttttcctgtccttgtttaccctttgggaattgattattatgattagttctatgctattgctttactttaatcaatgaacatgatgagatacaatgatgatactatgattttattctggatatgataatatacttgtggcatttaaagggactcgagcgatttctcgagtgtctctccataaagactggttcgttggatgaccgcccgggaaaacaatgcaaccatgaaggtggtatgggacgccct

SEQ ID NO: 69905 - DNA, 465 bp, Zea mays
  unsure (1)..(465): unsure at all n locations
ngactgngacggcgatcacgacgaaggataagacaatcactaatctatgtgcagaagagcttcggcataacggcgggaaagggaaaccgacttaaagatgaaaagccaaattagacctcgaagaattactgtagagttattgataaatgtaaagggcattaatgtaattttgcatgggctgcgacccgtgcctataaataggtgaacagtattcccgtactgttcacgctgacttggcattcacttttgcgtcacgcctgtattctcattccttcaagccgaaggtacatttgtaatttactattgtttacacaagtaatataaatgaaaataaagtaataataatgtttataaaaattatgttgctttctgtactttgtatgaatgttctccatcttttatcatgatcatgaaggtatgtccttcatgaccttcgtcctagatccattatatccgaaggaaaat

SEQ ID NO: 69906 - DNA, 429 bp, Zea mays
  unsure (1)..(429): unsure at all n locations
gcttganattgtctggctgttggaagacattgtctttctttatgcctgngcggctcccactatagagcatacttctggcaaatttaaatctttcattttctaagtcatgctcattaatattagcactaagttgagctatgtgatcattttgttgtttaattaaagctaggtgatcatgaatagcatcaacattaatgtctctacatctagtacaaatagtaacatgcacaatggtagacgtacagggtttgcaagcatttaattcatcaatcttagcatgtaaaatagcattctcatctctaagattggaaatagaaatagtgcaaacatttagatctttagccttagcaattaatgtttcattttcaatattaacgctagagagagatgcattcaacttgtcaatcttagtaatcaaactagcattat

SEQ ID NO: 69907 - DNA, 425 bp, Zea mays
gactttcctgctaaatataacttggacaacaagtcttagagccgtgggtgtgactaatgaaaacagcccctcccgcgtcacatagctggtgacgctaagacgtgtgcaacctcgtataactggtgaactaaagatctgtgcgagacgagaaggcatattgaccctttgcggttttagatactctctcactcttatagatgactccactcgattatgttatgtgtatctcttaaacatacaagatgaagcgtacgattattataaggcctataaagctgaagttgagaaccaactagagaggaaaataaaacgtttaaggtccgaccgaggtggagaatatttctctaatgtggtcgacgagttctgcgtggaacactggattattcatgagaggacaccgccattctcaccacaatccaatggga

SEQ ID NO: 69908 - DNA, 426 bp, Zea mays
  unsure (1)..(426): unsure at all n locations
aagaanagagacctgtataaaacttttttatttttcttgatggngangncatgaccgacaaccaacagcctattgatccatacaagagcataatctgcaactntttcaacaattgcatttgaaacctcaaagttagaaagaggcctgtggaggaaccaaaacaatcgtttaagttaaattaaaattaaactgtacattgtttataacagaatatgatgcaagatcacaaaaatctaatactaattatggacattgaaaaatgatgaacaagtcaattgctggacaggcttcacctgaaggcttcggccacctcgatagctgaaaaggtacttgtctaccattgaactgtaccagcaaattctaaaaagccgctttaggtgttaatggtaacaatatttttgtgtcactctactttccgcagctctt

SEQ ID NO: 69909 - DNA, 445 bp, Zea mays
tgaggaggacctaaggatgctagaacactcgaccagagcgcttgatcgaacctggaataagctggccgcggtgagggtgtccttgcggtggtagaaacaaaattgggggaagttagaaatcggcgagctctggtgatcgattgagggcaatacttggtgcgttggcttggggataacctaacggagctctcagaggacttaatttatagagatcgaccgtgagcacaacgaatttgagcgttggatggttatcggtaagaactaagatgagtcaccgacatggtgattcgtggccttcaccgtggcagcctccccaacgatcatcggacgtgcccaacactgcttaatgcgacgtggtaattgcggaggcacgtggcattctgtcgacgggcagccaacgccggtgacttattcggaccggtcgcaaagcacaaaggagcatggt

SEQ ID NO: 69910 - DNA, 318 bp, Zea mays
ggccgggcagcccctacgagaaacaaattctttgcagcatatactctagctcaaaaaaaaaagttcgttagagtaagttaaaatattaatcgctatgactacgactatatatatcataatctattatcacatatagctaagttatatatggttaccctccaaactgctgaacggtgggttgctctccctccctcctttaaggcgactgaaccgctccctgcatcgaccctctatcgcccctgactaagggacttcctctcccctcatcagggccgctcactcaccggaccgcttaccgctcggccactccctgctgcc

SEQ ID NO: 69911 - DNA, 460 bp, Zea mays
tcccaggaatcacgcggcgcaaggagcgactggaggggtgggttctgtttgtctgcgagagaagaatgaggaaaggaacgacaacgccactgacaagtgggcctcacacggcagggcacaaagtgcacgctctaaagcaagccgcaacaacagttccactgagccgaaatggggagaggcagcccagcccacatcttatttctgtttcttttaaaaaatcctgttttatctccaaatcagagattcaaactaaattcaaattctggttttgattcttttttcagcattgcaaaaatgtaatagaattcttaacgtgaatataattcatactgtgtgccgtacttatttatttttcttccattattttcactcctttactccgatattttaatcctctaactaaattcttaaagttgtgcttgtttcacttatttgtctgagttttgatgcacaaataaaa

SEQ ID NO: 69912 - DNA, 344 bp, Zea mays
ccgagaaagacaagatttgtaatgcatgccaagcagggaagcaagttggtgcccatcattcacacaagaacatcatgactactgacaggccactcgagctcctacacatggatctattcggcccgatagcttatgtaagcatcggcgggagtaagtactgtctaggtattgtggatgattattctcgcttcacttgagtgttctttctgcaggaaaaatctcatacccaagaaaccttaaaaggattcttgagacaggctcacaatgagtttcgcttgaggatcaagaatattacaagcgaaaacgggacggagttcaagaactcacaattgaaagcttcttga

SEQ ID NO: 69913 - DNA, 419 bp, Zea mays
gactcctccctggaagggccgttcatcatcgccttgattttgaagcccggaacatacaagctggccagcgatcgaggcgaggtctactacaacacttggaacatccaacagctacgtcgcttctaccattaagatggtcaaggcgttcatatacctcgttattttctttacatacataaaccaagcctaaccgttgaggaacgatcagccctgcctgggcaaagcgtgacggtatctcatgggctagaaggggggaaccccctctgcatcaaaagtttgctcggaaaagttttctacccaaacgactttcgtgctttccgactatatcgataacagaatcctgcaagcgagtaagagcgcacgttagcggcaagggcgaccgagctgagggacttctacacctttgagatacggatacc

SEQ ID NO: 69914 - DNA, 455 bp, Zea mays
  unsure (1)..(455): unsure at all n locations
ggcaagattagttctgatatgtgatagcattctgctgatgtcaganaacaggcgcagaggaggaaggcgtgctcaatatgagcaggcagccccacaggatgaggcaccccgtcagtagctgacacccccacccccgatgaccatcgagcagatgttcctaatgcagactcaggcagttcaagccattggtcagactctagctgccattcagcagcaacaacaacaacagccaccacctcagcctcagatgcctcagatacccagggacaagcgtgctgaattcatgagaggtcatcccctagtgttcgctcactcttctgaccccatggatgttgaagactggctgcgcactgtggagcgggagttgcacaccgctcagtgtgatgatagggagaaagttctgtatggtccccgtctgttgagaggagcagcctagtcttggtgggagtcttatc

SEQ ID NO: 69915 - DNA, 449 bp, Zea mays
  unsure (1)..(449): unsure at all n locations
gtttagtgtctctnttattgtctctcttgtcaaaagttggtttcttgtggggagaagtattgattatgggaaatagggggagtttttgaaatctttgatcaatctcttttggaatgactctctttatgcttcaacatgtgtgtttgacttacaaatagagatttgagtttgatttgcaaaaacaaaccaagtggtggcaaaggatgatccatatatgccaaaattgaataaaaccaatttgagtttttatttgaagtgattttgcacttgttctagttgctttatgttgtgttggcataaatcaccaaaaagggggagattgaaagggaaatgtgcccttgggccatttctaagtattttggtgattgagtgcgaacacaagtgcttaaatgtgaaaatatgcccatggatggacaagttgcaaatcacaacgtaaggtatgtttctaa

SEQ ID NO: 69916 - DNA, 307 bp, Zea mays
acaaatatctaaataaaagcagttcccggcaggtgggtcttcaggtggagagggtgcaacttcttcttcttcaaccactactttttcttcggtttctatatagaaccatatataatcatgaatgctcatgtaatgctgatgaaaatgcaatgataataagggtacatcatattaggtcttgaatacacattttcttcacggtactccaggaaactagggtttctggagtcagtattctatttcagaggagagatattacttggaaaactataggtttgggggttatgtatcacactttgtttcaatc

SEQ ID NO: 69917 - DNA, 440 bp, Zea mays
  unsure (1)..(440): unsure at all n locations
gcatgcaagcttgattgatcgcccgtcaaagtcgctttatgcttgcacgtgcactttttttcaccgtagaatatattgcatcgtacttgtctgctcccatccctctcaatatttttctagcgctttgatgtgatcattaagtataacaaatgcatattcttagtaaaacgatagaccattttttccacggaccttcggtgtctggagattcgatgtcagaaaaattgatagcgaactgagggatacatgcacatactgctcatgatgaataggcactgttgtgttattcctaatccttataattggagatggggttgagaaaaattatgaaggtttttaacggatttaaacctatcaatctcctttaatttatatagattatatgaattgggttgaaaacgatgaggccctaanatggatctcatctgctgctataaatc

SEQ ID NO: 69918 - DNA, 344 bp, Zea mays
tccgaagaggttcgtcatcttgttcaagatgaccagaactgaaggcctccgcgcagagagcttcatcaggaaggcttctacaatgaggacgactggtatgaagatttccatcatggaaattttgctttcaatgatgcttctcctctatcaacagaattgcaggctacaccatggccccagtcttacaagccaccccagctccccatgtacgacggtcatacagacccgaagcaatttttgatgagctatgaagcaaccatatcttcgtatggtggcaatactgcagtcatggcaaagtcttttgtcatggccgtcaagagtgtcgctcagaccatgtgctcctc

SEQ ID NO: 69919 - DNA, 301 bp, Zea mays
  unsure (1)..(301): unsure at all n locations
aacagannagcgngcttcacgcgtgacttatgatgatggtccaaagtggcgctttaaacgagtagatatatgatgatgatatgaacattcaaagggggtgctatatatgaaaagtgatggtcatagcaccatacgaccaaaacttataatatacatgcatatctggtgtgatattcttagataaagtagaaatattttttttctttttgacagttaccattgattgaatggaccaaacttgttagatatcttattacaaacaatcgaatcggctaccattgaccaatcaccaatgcacctt

SEQ ID NO: 69920 - DNA, 403 bp, Zea mays
  unsure (1)..(403): unsure at all n locations
accctgtggttcggactataagntgtttatngtttttgtgtccangcaanngaccatttggagatttgtgtaatgaggactctacggagaagcctcgtagtgagaccctagccattcacctcggaagtgaatacgggtctagctaacccgggctataagggaatcgtgactcatgggtaaagatgcgccacctctgcatagtgtaaaactgatatatcagccgtgctcacggttaagagcagcctggactcctcacatgataattgaacttgaagatagaaataaattgagatccgatgatctaccaatggtgtgcttaagtgggtccacttaaatgtttttgagatactcatatacctttgtttaatgcgaatactctggaatcacacttattcattagaca

SEQ ID NO: 69921 - DNA, 389 bp, Zea mays
gctttttcaacaccttcagcaagcatcacctttttcatgccgccgaagaagacttcagcaccaggggctggcacgctgcagccggtggaccccaatcaagatgtcctttctcttagagaggcacgaagccagaagaggaaggctaccagtccaacacctccggaggatgatctagatcaggagattcaaaatctggaaatccttcagcagcaggttcaacgcaagaaggagaagatggccaggctagctgaactgcacaggcagatagacgaagcctctgaagaagttcgccatcttgctcaagatgagcaacaccgaaagcctcagcatcaagatcttcatcaggagggtttcccaacgaagatgactggtattgacaatttcatcat

SEQ ID NO: 69922 - DNA, 461 bp, Zea mays
  unsure (1)..(461): unsure at all n locations
tgacattgtctccctgttggaagccaatgccatccttaatgtcttggcgtctcccactatagatcatgcttctagcaaatttaaaattttcattttctaagtcatgctcattaattttggcactaagttgagctatgtgatcattttgttgtttaattaaagctaggtgataatgaataacatcaacattaatgtctctacatctagtacaaatagtaacatgctcaacgttagatgtagatgatttgcaagcatttaattcaacaatcttagcatgtaaaatagcattctcatctctaagattggaaatagaagtattgcaaacatttaaatctttagccttagcaattaatttttcattgtcaattttaaggctagagagagctgctttcaaattgtcaatcttagcaatcaaattaacattatcatgtctaagattaacaatngaatcatcacaaaca

SEQ ID NO: 69923 - DNA, 283 bp, Zea mays
  unsure (1)..(283): unsure at all n locations
atgttgtgatggtgtagaaaaaaagtggaaaatggtgnatgtgcatataattnnatagttttaataagtgttggtgaaaggacaattttttgttgtcgcggatcgacaaaatagtcgatagcgcggccggatgcgaagtcatgtccctcctcgactgcttctctggctatcaccacatatacatgaaggaggaagacaaagccagcaccagctttataacacccttcggcacctattgctctgtcagaatgccggagggtctcaaaaatgccggattcacctt

SEQ ID NO: 69924 - DNA, 467 bp, Zea mays
tgcaggaagaggaagaggcggctaatgtcgccattcaatctacctcgacctcgcaactcttcaccaatctcttcgacgactcctacactcccacttgcctcacgacaaaaggatataaagtaactatcgaagaggaaattctccggccgggtggcggaatgcacccgccctaaatcctaagatgaggagggggcctaagcgttttgcctgttgctagatggacgatgaacacacgaacacgcaagggtgtatagtggctctggccgcctgagcgtaataacctactcctttgtgtgctgtattgagcttgagagcttgtatgaacttgtgagtctgagagtctaagcgagagaagcttgttacatcttgtgccctcccttttatagaccaaagggggcacataccaagatgctgatcaccaacatgtgggcctatggatacaatgtaagaaatacatggagcaacta

SEQ ID NO: 69925 - DNA, 358 bp, Zea mays
  unsure (1)..(358): unsure at all n locations
taactttgtttttttcaaagctcccatagntcaagaaaacgagggatatattttatatcctgttgcttatcctgaacataagattaggagaatttattctaggaagtctcactctggctctcatcatgcttttatgtataagagtgaggcatctagttctaggcaatccactcatgttaaattgcctaaaaagaaatctcctattgtatcaaatgagcctattgtttcatttaagacttttgatgcttcatatgttttaactaacaaatcacgcaaagtagttgccaaatatgttgggggcaaacacaaaggctccaagacttgtatctgggtacccaaagtgcttgtttctaatgtc

SEQ ID NO: 69926 - DNA, 465 bp, Zea mays
  unsure (1)..(465): unsure at all n locations
tgattntctcttaatntcaaatggcaacataagtcaagctctgctataaacctgtagagcattataccatctataattttgccatatgacgctgccacaaaaacctattggagcatgcttaaatttatgcttaaagttgatgtcagttcactgctagtctgaaaattcaaacattggcaccctgacagcccaacttcaaccttaattttctccagatttttctcaataacatggcttgcactcttaagcaaacttgttatctattagtaggtctacaagtttgatgtggtaacctagggcatattttcattaatttgaaagttacaagggctcaaagttgtgctcgcaacactgatttcagacttaggctatatagaggtcaagtggtacttttttgcaaataaacccaaaacttatggtttaacttgcaaattcacatatttgtgaaccanatgactatatatg

SEQ ID NO: 69927 - DNA, 402 bp, Zea mays
ttcatccccacaagttcttttttgttatccacagccagcccatgctagtgttagctattaagcatgcatctagaccggcctcttcttttgcaaaatcaactaaataaagtttgccgtctaatacacccttaaaagctagtgaaccatcacttcttctaaagacagacacatctacatttgtaaatagacagttatatcccatatgacataattgactaacagatagcaaattatatccaagactctccactaaaaacacattagagatagaatgctcattaaaaattgcaattgtacctaacccttttaccttgccttgattcccatcaccgaatataattgaatcttgagaatccttattcttgacgtaggaggtgaacatcttcttgttccccgtcatat

SEQ ID NO: 69928 - DNA, 453 bp, Zea mays
agagagccagatatacaaagcgcagtaggagataaactattccaagctacaggcagaactgggtgcagacatagtcccctcaatcaagcttagcagataagagatcttcacctgttaaaaaccttaataaatgtgggtggatactctctggattacacaaggccattccgctgtccctacgagaaagggacctctatcatacatgctttatatggtggagatgaagtcactcttctttttctcagagaaaagcactacttttatgggttttcccaaagaaatagaaataacacattactgagagcacctagaggggggggggtgaataagtgatcctgaataacttcagaacttaagccacaaaaacttgttaagagttagcacaagtatggccaactggcttcagaggagtctaaacacaataaccacaagaaatcaatcacagagatgaca

SEQ ID NO: 69929 - DNA, 427 bp, Zea mays
  unsure (1)..(427): unsure at all n locations
ncaagcttcttcttcattatgatgaagacctattttcttttatcacttcatcaaaacgaatgttgcaactccgagatgcttgcttcaacccataaatggatttctgaagcttgcatatctttccagcattgatcggatcgacaaaaccctcgggctgtatcatatacacgtcctcatctaagtttccattaaggaaagctggtttgacatccatgtgccaaatctcataatcgaaatatgcggcaatagctagaatgatccgaatagatttaagcatcgctactggcgagaatgtctcgtcatagaccactccttgaacttgtcgaaaaccctttgcaacaagtcgagccgtatagatgtgaacatttccatccatgtccttcttcttcttatagatccatttgcattctataggtctaacaccatc

SEQ ID NO: 69930 - DNA, 447 bp, Zea mays
  unsure (1)..(447): unsure at all n locations
ngaaccacctatgattgngagcaccagcttcgtggtcgattgtgctacagcttggttgttgtgcgaagccatcgtcacaactatggaagtgagttcactggaggtggacgccaatgttggtccttgttctcggatgctatacaccaagaacaaagcaacacaattgttaatgattaaagaccttcgtccttcgaagcattatttcccttgagatataatgatcttcagacgaaggtcatgaagggcataccttcatcatttcagtgagcaaagatataaacagaaacatatgaaacacaaagagaatataaacaatcattccaaatcattagattatttatattcttactttataaacatgaatagacatcaataatattcatattacaatcgtacccttcgctttgcagaaagtggaaaggtgggcgtaacataaaagtgaataca

SEQ ID NO: 69931 - DNA, 427 bp, Zea mays
agccgcaagcttgcaagcatgttttggtgcccatttttttattgttcatcaaggttagtcaacgaagatctaggaaccgaaatgtcctttgtgttagcactaagtaaactcattacctttctagcacaagttgcaattttgggttgcctaattacatgagaattaactgacaagctaggagtgggatagttaccaatgggacaatccttgtattgatgtcccttctttcggcatatgtagcataggcgatcttcaagtcttgaagatttcttctttccttgtttcttgcttgctacatggttagtgaatattttcttttctaacactatgcctttttgttttatatggagacaagacttaattaagtgtcccttctttgagcatttaaaacagagtttatcagtcttggtaataatcaaaccatttt

SEQ ID NO: 69932 - DNA, 428 bp, Zea mays
  unsure (1)..(428): unsure at all n locations
tctanagtgagaacacgtgataggtctaactaacgtgcatttcgaaaaagatagaccttgtgcagcttgtcaagcagggaaacaggtgggaggctctcatcacaccaaaaatgtgatgaccacatcaagacccttggagatgcttcatatggaccttttcggacccgtcgcctatctaagtataggaggaagtaagtatggtcttgttatagttgatgattttcccgcttcacttgggtattctttntgcaggataaatctgaaacccaagggaccctcaagcgcttcctcaggagagctcaaaatgagtttgagctcaaagtgaagaagataaggagcgacaacgggtccgagttcaagaaccttcaagtggaggagttccttgaggaggaagggatcaagcacgagttctccgctcctacacacac

SEQ ID NO: 69933 - DNA, 464 bp, Zea mays
  unsure (1)..(464): unsure at all n locations
tgacattgctcccctgttggaaaccagtgccatccttaatgctatggcatctcccattatagagcatgcttctagcaaatttaaacttttcattttttagttcatgctcaacaattttagcagttaatatagctatgtgatcattttgttgtttaatcatagcaatgtgatcatcaatagcttcaacattaacatctctacatctagttcaaatggagacatgttcaccagtagatgtagagggtttgcaagcatttaattcttctatcttagaatttaatctagcattgtcatctctaagccagataatagaatcattgcaagcattcaattntttcaatcttagaaactaatttatcattctcaattctaagactagaaattgaatcatggcatgtgctaagctctctagaataaatttcacatttctctatttcttgagaataagcattntcaaattaaca

SEQ ID NO: 69934 - DNA, 430 bp, Zea mays
  unsure (1)..(430): unsure at all n locations
ctgcaagctngcgnatgattttttgccaccctttttcatatgaacactcgcttcattnttctgacttctcacctctgtgattttatgatgcagatggaacaaaggatatattatgatgaagttgagggattatcagttgaatggttagaagtcactgaacgttagtgcttgatgcatgcaggaacaagcctgctcaaaggagaggaactcatatgaagtgcacgccgattgaggaagtcgcggtggtggtgaacccttcagagttgtctgaagaagatgaggaatcaggagtaacagaagctggcggctacacttcgttggctgctgtcggctgcactatatttcttgttttcttttaataaggtgtgaaatacaagccaccaccatgcatgatnattggacagcctatgaaagctaatattttctcaac

SEQ ID NO: 69935 - DNA, 449 bp, Zea mays
  unsure (1)..(449): unsure at all n locations
ntagctgattcagagtcccttgttggatcatccccaggtttaactnttccatttcctgacacaaagtgttgtcaggggtcttcaccataagacagtggcaggaagccttacggcttagtgcatctgccaccacattggctttacctaggtggtaatggatctctagttcatagtccttaataagctcaagccatcgtctttgcctcatatttaattctgactgggtgaagatgtacttcaagcttttatgatctgtatatatatgacagatatttcccagcagataatgacgccaaattttcagggcatgaaccacagcagctagctccagatcatgagttgggtaatgctcctcatgtcgacgcaactgccttgaagcatatgcaattactcggccctcttgcattaatacacagccgagtccactgtcagacgcatcacaatataca

SEQ ID NO: 69936 - DNA, 286 bp, Zea mays
  unsure (1)..(286): unsure at all n locations
tataaaatgggatggtgtttataaaaagntgtgattggatagtantaaggtgagggaannntgatgttttatgtttaaataatagtgtgattgatttgatgtaaaatgtttttgagttttngaggagaaattgttggagagaggtgtnttttgttaaagatgggaagagtggggagaagaagatgaaaatngatgtaggtgtatgcatggaaggtgaggttagntaagtagtaagaggatgaggttttattatagatagatgaagataggaagattttaaaatttt

SEQ ID NO: 69937 - DNA, 432 bp, Zea mays
ggtcgcccaccatggggcaacgtagcgtgagtatatcgtgtcgtctatctccgatctgcggacgaggcggacaaggctttccacggatcatctatcttgcatactgaagcacaaacgcaaggattgctctaggcggttccatggacggcgacaagactaagcagcttctctgtccatggcatgtgatattgtgaagtaaatcaccttctctgcttagctagtacaaaaccttggattgagtttcgctatttccgttgacgtggagcacgatacaatcagaaacgaactcgattcagcaatcctcttcatggttcgatgggctacattgccattatctaatttgtagaatctcataatggtggaaccaaacacttatcatgctattcatatgcaatcgaacaatccggtattgagctactgaacatgacaaac

SEQ ID NO: 69938 - DNA, 248 bp, Zea mays
ccatgcgatgtctaacttaaaatgcacattattgggtgaaaagcgcttcgatgttgattatcgtggagaacgcgtggttaattgagtacggtaaatctagagcaccaaatgacttggataaaatttatgagtcaacttgatggtcctaatttgactaatttaactctaaccaacggtgacagtgtagaataattcaagtctctacaacacaactaattcttgaattatatacgagctgaatctattga

SEQ ID NO: 69939 - DNA, 344 bp, Zea mays
cggaggctacacccattggttgcaccttcagtgcacccattatattcacaataccttgaagacaaacactaatttcaaaagcaaaaagatgaagacctttgaatggattacttctaaaatccactcttagctcggcggctacacccattgtgtgcaccaacagattcacaatacctttaaactaaatgatgatttctaaagcataaagatgaacacctttgaatggattacttctaaaatccactcaaagctccgggctacacccaatgggtgcagccctcgtgcctagagttcaacacaaatatgatctcttatgccatatatacaacggtcgattacagtgc

SEQ ID NO: 69940 - DNA, 247 bp, Zea mays
  unsure (1)..(247): unsure at all n locations
taaaataaagaagtggtaaaaggtgtaatttgttatgaatnaatangaaataaagtagattaaatatagagaagaaanatatttaatatagaaaaattttttaggtgaaggggaaaaaantangggtgctggttagnaggaataataatatttttngggtggttanagaattgaagaggtttataataaggtgaagatnntttgtgaattataagtggaattatagagggggaannttaatgtgagt

SEQ ID NO: 69941 - DNA, 451 bp, Zea mays
tccactgcgaagatgacatgttcttcattaggtatcattaattgagtttttcaattagtctttcttatgatgagatttcattttgtatcatttacatgtcatgtccacttgaatagactatgtcatcaattggtatcttttaccccaccatgttgccatttatgcatacaatttaaatatctttttgtatctctagaatattcttcatcatttatatatgcatagaattagggggagtctagtctattcatctttttatcaaaatgtcttgggttcctcttccatttattaaataaatgttttccaaagaaggagaattttctgatagggggtatatcttttcactttgggggagattaacttcaccaaatggggagaactttttcctatagggagaaaaatcttttgagagagcccaaatatattgtcacttcctatatgctctaaatat

SEQ ID NO: 69942 - DNA, 430 bp, Zea mays
  unsure (1)..(430): unsure at all n locations
catgacgcttgttgagctcctgaacaagtttcttgtatttcctaatatcatagcaaggtaaagctcttgtttgtgctcctaaataatctaccaatatgcctggttactttntgatgtccttacctatttccccacatactacaggtttatgagtgataggttactatctgaggtgttggaagcttttttggtgatccgtgggcttgtcgtgcaaaagacaaagttaattaatgactgcaatcatcttttgaaagaccttcttgatagcttgcttcttgagagtactgaaaacaaacgtcaatttattcgtgcttgcatctctggattgcagaggcatgtgaaagataaaaagagacggacgtctttggtatgagcacattntctcttttcttttggatattgtacttatagtttgatagcaactttaagt

SEQ ID NO: 69943 - DNA, 349 bp, Zea mays
gctacacgtggtaagaagggatatactttttatgatgtaaagaaaacaccgctctcaaattgagatatgagattggagatcttagataacagacataatgtaatcaccaagatatggtctagggatgggaaaggtaaaggtcataacaaacaaaagtatgcaaaggatggagttaaaatgtaacaccccaggtgttcccatggctaaagcacatcttggcactaagggctgtgaattatatggggtaaaggcttatggcaacacataagaactttggagatcatgtgctaatcaagttgccaatgacctaagaagcattactctaatccttgctcacttctaccttgga

SEQ ID NO: 69944 - DNA, 457 bp, Zea mays
  unsure (1)..(457): unsure at all n locations
tgaagccatggtgagtagcatangcaggtaaaatgcgaattgattctagcctagctacgggtgcataggtttcaccaaaatccaaaccttcgacttgtgaataccccttggccacaagtcgagctttgttccttgtcaccacaccatgctcgtcttgcttgttgctgaagacccacttggttcctacaacattttgatttggacgtggaactaaatgccatacctcattcctagtgaagtttttgagctcctcttgcatcgccaccacccaatccgaatcttgaagtgcttcctctaccctgtgtgtctcaatagaggaaacaaaagagtaatgttcacaaaaatgagcaacacgagatcgagtagttacccccttttgaatatcgtcgaggatggtgttcacggggtgatctcgttgaattgcttggtggactcttgggtgtggcggtcttggaac

SEQ ID NO: 69945 - DNA, 410 bp, Zea mays
  unsure (1)..(410): unsure at all n locations
ctgaccacgaatatgaggccnnacttatttttataganaagggccagnggcataccgactttatctacccgaaacattgtctgctgtgcataatgtgttccacgtgtcacaattgaagaagtgtcgggttcctgatcaaaccgttgaagtaacagatgttgttcttgaaccggacttgacatattctgagcaccctattcgagtcttggatcaaaaggacagggttacccggagaaaaactctcaagttttataggatacagtggaaccagcattctgaagatgaggctacatgggaaactcaagactttttatataagaatttcccaggctttttaacctcttgtgaactgtatagcctgtataattgtgtaataaaagaagtgacccccacaccattctctgtcttat

SEQ ID NO: 69946 - DNA, 471 bp, Zea mays
ctggggtcgggtgtggtggaacctgacagggatgccaggcgtgtcggaagggaatcactcaagtggatcccgcgcctggccctatactgactcgtcataaatagcagaccgcatttaaccacgtttagcaccgagccacagcgcgagcgctggagccttgccgtcgaaccaagacttagctaggactccaccctgtagcttctaagctcaacttacatcccgaaaaaagacttgggagcctctccccccctctctcgcccgcttgtaacccctactatgagttttgatcatcaatggtgccaatagcgcaagccaccaatgactggaagtagggacgttctgcccaaatcagtataaaccttgcgcccaccgcacacaccctctaaagcccggaacgtgcacaataaatttacttgtcggagcgaggttcgaaatatcgacagttggcacgccaggtagaggacttacacg

SEQ ID NO: 69947 - DNA, 315 bp, Zea mays
accttgtgcaacgtgtcaagcaaggaaacacgtgggacgagcgcatcacacccagaatgtgaggaccactttcatacccctggagctgctgcatatggatctcttcagacccgtcgcctatctaatcatatggggaagctagtatggtctaactattgtagacgactattcccgcttcacttgtgagagctttttgcaagataagtcttgaacccaagggaccctctatcgctttcttaggagggctcacaatgaggttgagcttctagtgtaaaagattatgagcgactacgggtccgatgtaagaacctttag

SEQ ID NO: 69948 - DNA, 273 bp, Zea mays
  unsure (1)..(273): unsure at all n locations
tgcgctttcgaccaaaccacccgcatccatattcattcatggcttaacaactgtggtaacgtcacagctaccacgctggtatgatatagtttcactattgaatgctaatctgctggattttaatgcgacgctgacccttgctctcatactatgatgagtgggccacacaggccantagagatacactatatgcctcatggtaaatctgattaatattgcctcctataccacggaatataaaaaattttgcttcccatcgatcatgaggatagt

SEQ ID NO: 69949 - DNA, 460 bp, Zea mays
  unsure (1)..(460): unsure at all n locations
cgacactgtatnttcctgcccatgtgcaaccacggtagtatgtttgagtgccgaatgtgagtatcattatccaagcttttctgtgtagcttttgatgctagatttagtatcacattcagaattttttacttgatttctctcttttatccagtgacatgaagaatctgattggcgaagcatcttgtagaatctgtcaggaaaacttcagcacaactattaatggtatgccaaacctatgtataaaattgtactggttgctcctaatttcacttctatgaactgtactaatttgcatcgaagaaagtttggtcccaaacaactcgtgaactcgttttcttattattgggctgatggacaaggcaacgtgacaattttcatggtacctgngaacagaacatagcctacaaactgcagaaccattcccatttcatcttgtagtcttggcttgctaataatggac

SEQ ID NO: 69950 - DNA, 399 bp, Zea mays
  unsure (1)..(399): unsure at all n locations
gcatgcaagcttgaagccatggtaagtagcatatgctttttttttgcgaatagantatagcctagctacgggtgcataggtttcaccgaaatccaaaccttcgacttgtgagtatcccttggccacaagtcgggctttgttccttgtcaaccacaccatgctcatattgtttgttacggaagacccacttggttcctacaacattttggttaggacgtggaactaaatgccatacctcattcctagtgaagttgttgagctcctcttgcatcgccactacccaatccgaatcttgaagtgcttcttctaccctgtgtggctcaatagaggaaacaaaagagtaatgttcacacaaatgagcaacacgagatcgagtagttacccccttttgaatatcac

SEQ ID NO: 69951 - DNA, 464 bp, Zea mays
tgtgaagattcttcatcccaacatgggctagtcggcgatgccagagccaacccatattagtcttagcaattaagcaagtatcgagttcagctctattaaaatcaactaagtgtagctgaccctctaatactcccttaaatgctactgaatcatcacttcttctaaagacaataacacctatatctgtaaaaagacagttgtaacccatttttcataattgagaaactgaaagcaagttatagtctaaagaatctacaagaaaaacgttggaaatagaatggtcagcagatatagcaattttaccaagtcctttgaccaaaccttgatttccatccccgaatgtgatagctctttaaggatcttcatttttctcgtaggaggagaacattcttttctctcctgtcatgtggtttgtgcacccgctatcaattatccaacttgagccttcggatgcataaacctac

SEQ ID NO: 69952 - DNA, 418 bp, Zea mays
catgcaagctttttaaaggctgggctaagattccctttttattagattgttgcggagatattgaagaggtttggcatctaccttcaccagttaactcctaacgctatcgttaggcttagcgtttatatttgggccctccgaagccaagcagtggagccttttgctgacagtttctgtcgagttcatgaattgcattatcaaacaaaggccagaaaagatgggcttcatgaaaacttcggttgctacaattttgcctaccggaaaaccgcaaagtttcctgtaattagctaccgaagcaaatggccggcaggctggaaatcagaatggttctatgtcaagggtgatgaggacaaagagaagcttggtgcatagtcactcgagctaactttcggagaaacccgactcactgcacatgaca

SEQ ID NO: 69953 - DNA, 471 bp, Zea mays
tatagccacaaaaacttgttaagtgttagcacaatatatgctcaagtggctagaaaggagtctcaacaaaacacaataccacaagagatcaatcacagaaatgatacagtggtttatcccgtggttcggccaagaccaatgcttgcctactccacgttgtggcgtcccaacggacgagggttgcaatcaacccctctcaagcggtccaaagacccacttgaataccacggtgttttgcttgctttttctcaatcccgtttgcgaggaatctccacaacttggagcctctcgcccttacaattgaagttcacaaagaacacagagcaaagggggaatgagcaacgcacacaagacttcaaaagatcatagcaacaacacgcacacaagtcgcaacaagagctcgcaacacaactcatagagttcgcaactcaacaagagctctagatgctatcacaatgaaacgaatgcgtg

SEQ ID NO: 69954 - DNA, 433 bp, Zea mays
caagcttgtgaagattcttcatcccaacatggttattgtttattatgccagagccaacccatgagagtcttagcaattaagcaagtgtcaagttcagcttggttatcagtaaaaccaactaaatatagctgaccctctaacactcccttaaatgctattgaatcattacttcttctaaagacagtaacacctatatcagtaaaaagacaggtgtatcccattttgcataattgagaaacagaaagcaaattctaatctaaagaatctataagaaaaaaattggaaatagaatagtcaggggatatagcaattttacccaaacctttgaccaatccttgatttccatccccgaatgtgatagctcgttggggatcttcatttttctcataaaagaagaacattcttttcttcccagtcatgtggtttatgcatc

SEQ ID NO: 69955 - DNA, 405 bp, Zea mays
tcgaacagaggcgctgattacatccttcgacatgcttcgggaaaagaattgtcgcaagaagaaatactagaagcccaacactatgcccaaaaattgaaatatccgaagggggcgttagtgtttaatgcgagtatgaagaagattttctgtactgtctcccggataacaaagaaatattcgtttgccgggagatatgtatgagcatcaggttcccgaagctagaagacgacctatctattttttcgaaggatgaacttgctgacagcctagcatacaatagtataatggtataaaagattacttttaatttggaaacttatcatatttcactgccatacttaactctctcttcttattttcacgtcttaatttttagtaatgccctgagggcacacaacaatattg

SEQ ID NO: 69956 - DNA, 301 bp, Zea mays
ccgaagcgagctcggtctacaggaccttcggcgacgaagcatggtcccaacagtagccccttcgcggagctagatcatttttcgtaacgagctcgatccgtgaaaaaagtctcttaggcttcatgaagccgaaggtgcgaaaaacacctttcctgagctcgttgtcgagaaacgatacaggttccgagcgcgtagtggtcccaccctgcaggtgtactatttgggctctgcggcccaccgcgcatcgggtgtgagcaactggttgcctggtgtaaaaatcctgacaattcaccctcttacc

SEQ ID NO: 69957 - DNA, 274 bp, Zea mays
cttcttctccttccctttcgccttggtgcgggactcttcctatgaagctctcccgtggcttgttgtgggcttgttgccggtctccatctccttcttggcgagttctcccgacatcatttcgagcagttaggctctaatgaagcatcgggttctgataccaattgaaagtcgcctagaggggggtgaatatggccaaactgatatttgccacagttattacgactactagcctgggtagcggtagaaatataatccagtccaccagagagagtgc

SEQ ID NO: 69958 - DNA, 407 bp, Zea mays
  unsure (1)..(407): unsure at all n locations
agcttgaaaaatattcggatacatgttcgattgttgtaggcctctttcgaaggtttttccatcaagaatattccaagaggagaaaatgagcatgcagatctgttagccaaatcagcggcgcaggggccccctttaccttcggaagtattttttgagacaataaaagcaccttcggttgaacttatggagagagcagtgcttgcaatttcccctatacaaagtgaagattggaggactaaaattatatctttccttcaaggtaattgtctttcagatgacgaagtttataataagagaatggaagcaaggacaaagccgtatgtgantatagaanggnngaatatacaaacatggangttggtctccactcctcaagtgtttatctagaaccgaaggatagagttaat

SEQ ID NO: 69959 - DNA, 449 bp, Zea mays
  unsure (1)..(449): unsure at all n locations
tcttctccttctcttccctgcattcagcaacacgcctcattttctgctcgtcttcacgttgttgctcggcagcaagctcctctcgtcttttctccatcctctctttgtcctctgcatcccacttcttaagattatccaaccacttcttgtctttctctgatatttatgtgtcaatccacagctcaaaatcacatagcggtggaggagtctacaaaacaggcaattattagtatgcaaaaaacattcaccattaaattgttaacatattacaagactattctcaccattaaattcatccgacgttgaacaatagttgtctcaaatgcaaagttagcacacatccaatacctttgtcgataggtgtcatgatcctcagacttatcaaccttacaaggatcaccacanaaacatataggcactggaacaccacttggtaaaggcagcgggtc

SEQ ID NO: 69960 - DNA, 391 bp, Zea mays
  unsure (1)..(391): unsure at all n locations
catgcaagcttatacctcaattntacaatttatagtttatacattacgatagtatgccttttttagtacaatcttcgtttttgacgtttctaattacaaatgtcttttaatcatgtttctgttacattattcattacaacttatttatgttattttgtttgtatgaatattgaatgttgtttgttctttgttgtttgtggaatcgtgtagagatcgaccccttagtcgaagttctagagcaacagtttgaggaagaaccccaaaagttgtgtgaagaaagcaagctgatttcccctttcatattcttttatacccaanacatagcaatgacactttatgtgtatgttatattgcataaaatgataggtcctatttggctacctaaccttac

SEQ ID NO: 69961 - DNA, 390 bp, Zea mays
  unsure (1)..(390): unsure at all n locations
tggtggngaacaacttgttccttactatgcagatatattgtgtgctatcttaccatgcatatctgacgaggaggagaaaatccgagtggtactttcctgtcttatgcttttgattcatacaattactgcaaatgagtactgtgtggtgtgtgcctgttcacgatagcacttactttaattactgacttctttgtttgcaaggttgcacgtgaaacaaatgaggaactatgtgctataaaagctgatccaactgagggatttgatattggagcaatcctttcaatcgcaaaaaggttctctatcaagtcctttggaaatgaaattgtgtgctatcttaccatgcatatctgaagacatacaanaagttcgaggcagatatatatgtcctta

SEQ ID NO: 69962 - DNA, 437 bp, Zea mays
tactcaacttgatattttagcggcccgagaaatacgagcggagaattgttttttttggcggcccgggtgtggccgccaaaaattatatattatcttcggcgtaatctctttgcggccaaaagctgccgaatataggccatatgccgtcgaaaataacctatgttcgacggtatatagcgtatttttggcggattctgaccaccgaaatagatcttgtggcctatagtgtcagatgggatcgatatgggattaagcaccctcatattgaatactgatcagcaaacgaattaattatccctagtccggaccgatccaccaactctaatgaagtgcttggctggagaggcatgtgtacaatatgggggaataatggacatggtatgactcacagataatatagtcgtcagctttagatactgacaaatgggtggctgaat

SEQ ID NO: 69963 - DNA, 283 bp, Zea mays
accataaatctaagcttggcttggcaaatctttaacatcacaacaggcaatggtttgaatgactgggctactcctgaccaagccgtctgtctatataatgctgcatggggaatgtgaaccgccaagccgcttacactcgctgaacggcggaccactcgacgcccgaaatattataatcggttctcggcaacacagctcaaggaaagtgtatttcggaccttcataattccgaatacttctagcttttatggaccaagctcgttacgataaacgacctaacact

SEQ ID NO: 69964 - DNA, 450 bp, Zea mays
tctatagggagaacacgtgataggtctaactaatgtaacttttttataagatagaccttgtgcagctggtcaagcatgtaaacaggtgggaagttctcatcatgccaaaaatgtgatgacaacatcaagacccctggagttacttcatatggacctcttctgacccgtcgcctatctaagcataagaggaagtaagtatggtcttgttatagttgatgatttttcccgcttcacttgggtattctttttgcaggataaatcttgtcggggaccataattaggggtaccctcaaggctcctaattctcagctggttacccccatcatcataaagctgcaaaggcctgatgggtgcgattaagtcagggatcagtccattcgagggactcgatcacgcctcgcccgatccttacctctgacaatggcatgcgaccccggatgatttccgtct

SEQ ID NO: 69965 - DNA, 480 bp, Zea mays
  unsure (1)..(480): unsure at all n locations
tactaagcttccccatcgcttactgctcacaacgccaaacggcgatgtcctgtatcactcctggaacatcgacaaccttcgcaaattntttgtttgacccatttatggctgatttcgcccttgtaattcgccgcaaacaatcttgtaccggcccgcactcttttcctcccggtgggtgaggtttttaacgaggcggagccatgtaatatatgtgagaaaaatcccccgcaaaaacatgtgtcgaaaaaagaccgcgacgacggtcttcggcattcgaccaattcgaagtcaccgcgaggctaatcgctagccaccctcgcgtgcgacaaatccgcgcagaagtcgcctaatggtgcagccggactaagcacaacaagtgcgaaaaaatccgatgtctatcgcgaagactatccgcgcagaagtcgcctaatggtgcagccggactaatcacaacaagtgcgaataaatccgatgtctatc

SEQ ID NO: 69966 - DNA, 462 bp, Zea mays
tatagccacaataacttgttaagtgttagcacaataaatgtcctttttctttaaaggagtctcaacaaaacataataccacaagagatcaatcacagagatgacacagtgatttatcccgtggtttggccaagaccaacgcttgcctactccacgttgtggcgtcccaacggacgatggttgcaatcaacccctctcaagcggtccaaagacccacttgaataccacggtgttttgcttgctttttctcaatcccgtttgcgaggaatctccacaacttggagcctctcgcccttacaattgaagttcacaaagaacacatagcaaagggggaatgagcaacgcacacaagtcgcaacaagagctcgcaacacaactcatagagttcgcaactcaacaagagctctagatgctatcacaatgaaacgaatgcgtgagatcaatgtcttggtgcttatgaatg

SEQ ID NO: 69967 - DNA, 467 bp, Zea mays
  unsure (1)..(467): unsure at all n locations
atactcagcgtaaatcgtacaactatatttcgccaaacattgtcttctataattgcgctgacccctgctaggcttgctgtcaataatcatggttgttgcagatagggcgtcagatgtttctcaaactcagttgaaagccatcagctcaaccacttgcatggaagttcatggtattagtcagaacaaaaaactcaagtatattagcaaagaacatagctaggacgagtcattacattttattttccatttattttctctattttttacttcatcgaatccttatttcttatcctacatttggactaaacaagcgagtctgttagagttcatgctttgcgtgcttgtaattctatggaatgggttgaatgggtcatcataaactttccaactaagattgatgtagcanatagtaacctataatctataaatttggtatcccaaagaaaaaactttcgaggggagtgctc

SEQ ID NO: 69968 - DNA, 455 bp, Zea mays
agtacaataacatataaggtccagctgtattctgcttaatgctttagacattagtaatgagttcaaaaaattcatgagagcttcaaaactgatttgcaattattcctgccaactacaatcttatagcttggcatgcatcatggaaccttttaactttccatatacagtttgaagccttcagtaaaaaaagaagagatgatgattatgtgtgtggtataagaccggtatcatatattcttattgccagcggttaatagcttcaatagttattatttatgactgagcacccatgatgggttttacaacgtctttataccgtgctatatatcactgctgctcctggttgtagaatagcaagcgtctttgacatgtacctgatatcccctatcaacccgttcgaggagatggacatccatcacgtgcggctgattctcttgaaccaatatgttgcaatc

SEQ ID NO: 69969 - DNA, 459 bp, Zea mays
ctcagcttagctccaaggcaccatcttttgagagcacaacattctttctaatctgcacctttggaagctacagctgccgaagctaccacaaccgaatatattcacttagaaagcacaattgctaatattgataagatactgctggacatggccgcataagaagctgttgcagccaccgaatagactatggccccagagcctgaaaaggagaaagaaatagccgaagacacttcgaaagatgaaattttcaactttcaaaacttagttggacaagagttgacgaaggctgaaaaagaagagctaaaagaatatgccatatcttgcggatatcggccggtggcacttctcttcggtggcgttgatgacgaaaagttgggctgtgtccgggatcataccggagcaaaggttattggtactctatcaaagagtattggtttctcgaagctcgagacggacatt

SEQ ID NO: 69970 - DNA, 437 bp, Zea mays
  unsure (1)..(437): unsure at all n locations
ntagtgggatgtgtattagcaacttgctgtccagcttgacatgcactgcatggcttgtctttntcaaacaccacatcctttaaacctctaaccatatctttctttaataccttcttgagtttgctcatcccaacatgtgcaagcctcctatgccaaagccatccaagagaagctttggtgaagaggcaagttcttaagtctgcatcttctgaagtgaaatccactaagtagaggttgttgtatctaaatcccttgaataccattgattcatcatccatttttgttacaataacctctgatggagtgaataagcattgaagtccaagatcacagagttgacccactgataataaattgaagctcataggtgcaactaagagaacatttgatattgataaatcatttgagattgccaccttgccaagtcctttgcactt

SEQ ID NO: 69971 - DNA, 468 bp, Zea mays
  unsure (1)..(468): unsure at all n locations
tctagcattctttntagaactttgagatctagtttgtcttctctaacatacacccctgcatcgtctgcatatatagaacagcgaaactttgccccattgtgtaatacctgtcccagtatcccctcatgagctgcccttttaatcattcgttgtatggggtccattgcgaggatgaagagaaaaggcgatagtgggtcaccctgacgcacccctctcatgtgcttgatttctttggtttgctggccattaatgatgattttggatgaagatgagccaaagatggtagcaatccaatctctccattttcgggtgaagcctatggctcttaagacgtctagaagatatgcccaattaagagagtcaaaagcttttgatatgtctaacttgatgaatacggctgcttgtttgctcttgtgaagttctntaatcactttctggacgtagaggaagttatcatgaatcgatcgc

SEQ ID NO: 69972 - DNA, 365 bp, Zea mays
  unsure (1)..(365): unsure at all n locations
atggacgtgaagagtgccttcctcaatggacctatcaaggaagaggtctatgttgagcaacctcccggctctgaagatagtgagtaccctaatcatgtctataggctctctaaggcgctttatgggctcaagcaagccccatgagcatgatatgaatgccttagagatttccttattgcaaatggcttcaaagtcggaaaggccgatcctactttattcactaaaactcttgacaatgatttgtttgtatgccaaatttatgttgatgatatcatatttgggtctactaacgaatctacatgtgaagaatttagtatgatcatgacacacaaattcgagatgtctatgatggnggagttgaagta

SEQ ID NO: 69973 - DNA, 458 bp, Zea mays
actcgttggctgcataaacaggtcgcatcgttgtgtctatcgttacccaacgttgtcgggctggtcggtattacaactaatacggtgctggggtggatgacgccatgatagggtgggtcgcgtcacgaaagatgtggcattcgaaactgtgcgtcgaggcaaactggtttatgtggcatcagaaagattaatgtcggactgatcgacgcgatgactgggtcggagaggatctggtgaggatgctcatgacagggttgttttatgccctgttccaaaccactaaagctaattgttaactaattgtagctaggttgagacagctaacaactaatggttatctgaatggtatagctaaaaatcagttggtcagttagctgattcattctaaacttttcacctaatttattcactatctatttgtccatatgttaatacttgactatatcatgtcaaacttg

SEQ ID NO: 69974 - DNA, 391 bp, Zea mays
  unsure (1)..(391): unsure at all n locations
gagaaagtaaaaaaaaagaaatgaataaaacccctaactgggcctcaacacaccatttcatgccattcgcctaacacaaccgcacagtccaccccgcaactctgcgccgacagatgggtaccgcgcgtcaaccactaccactctgttgcgctctctcaaagcctcgtgcgagtctcttccctgcgggcccccctggtcagcaaggtcttcctcgccgagtcgggcgcgcaccacaacataatcggcgtcttccacgcgccgcgaagcgaactccgtgatacgcggtgccgcggagtaatcgggtcaccgttgcgggattcttcggatcgacctcctgnggtctatatagttgatcctcgggaccatagcctctcctagtatctcgcaagcc

SEQ ID NO: 69975 - DNA, 423 bp, Zea mays
  unsure (1)..(423): unsure at all n locations
tatcttattaacatctaanaagatcatgtcacagtaacatactgttccataagtaacaagttcattcaacatacatcaatatttacttgaagttcagtatttgcctctcgagatgaaaccgccttatgttgtgtcggcgtttcaaccccggtgggtccctggaccaacgagtaaaattgtcgctgcgtgtcccagcccaaatgggttggcgcgagatggaacacaatgtggggagaaccgcggctcgtgttatcctgcgcccagtgcggatgcgcttgcagtatgggttacaagcgtccgcgagggagatagagagatagagcgagcctgttcgtctgtccgtcctcccgcgcgaccaccctcccgtatgatggccctggacctcccttttatagatgcaaggagagggtccaggtgtacaac

SEQ ID NO: 69976 - DNA, 415 bp, Zea mays
  unsure (1)..(415): unsure at all n locations
tgacaacaccatgtgacattntacttaaaattgttgagatcattaatatttagttcattcctcaacatgcaaaagcgggtcttatcaagtggcttagtgaaaatatccgctaattgatcttccgacctcactccttttaaaatgatatctcctttagcaacatgatctctaaggaagtgatgacggatatcaatgtgcttggtgcgagagtgttgtacaggattattagcaattttaacagcactctcattgtcacacaacaaaggtaccttttctagaactacgccatagtctagaagagtttgtttcatatataaaatctgtgtgcaacaagcacccgtggcaatgtattccgcttctgcagttgacaatgcaacacttgtttgctttttggatgtccatgaaactagtgatc

SEQ ID NO: 69977 - DNA, 435 bp, Zea mays
  unsure (1)..(435): unsure at all n locations
tcggagccgaagcaactccagctttgaacgaagccatcatctcttaaagtggaagtgagttcaccggaggtgggcgccaatgttggggacttgttctcaaatgcttcgaattaagaacaagacaacacaaaaatgttaagtataaattcccttcgtccgctgaagcattatctccccaatgatttaatgagcttcggacgaaggccataaataaagtatcacgaaggtttcaccttcgtgatcatatttttaagacaacaatgagaaatgaaatataaagcacaaaatatattcacatattntgttatatgaatatacaagtattgaaacataacatttacgaacatttataccttcatcttggcagaatacaataatccgggcgtaacgtgtccgtgattacaagatcgcgtgaacagtaccgggatactgttc

SEQ ID NO: 69978 - DNA, 440 bp, Zea mays
taaagccatggtatgtagcatatgccaataatatgcgaatcgtctctttcctatctacgtgtgcatatgtttcaccgaaatccaaaccttcgacttgggagtatcccttggccacaagtcgtgctttgttccttatcaccacaccatgctcatcttgcttgttgcggaagacccatttggttcctacaacattttgattatgacgtggaactaaatgctatacctcattcctagtgaagttgttgagctcctcttgcatctgcaccacccaatccgaatcttgtagtgcttcctctaccctgtgtggctcaatagaggaaacaaaagagtaatgctcacaaaaatgtgcaacacgagatctatttttacccccttatgaatatctgcgacgatggtgtcgacaggatgatctcgttgaatcgcttggtggactcttgggt

SEQ ID NO: 69979 - DNA, 468 bp, Zea mays
tctggccaaagtagacttaggttcttagatgtgtggatgctttcccgacatggtgcaagaaaggctctatggtatagtctgtcaaggtcaagtgtggtgcaaggttagatagctacccttcggattgagatctacactcaacaaatgggtataaacctatagcgggctaaaaacatccaagtgactctataagaaatggccttgcagtgaaagtagatgtcgtggtttcgacccctcgacaagtgaacttgtacgttaggatggggtctgcgtgccactgttcatatggatttgctcttggacgagcctgagtaagagagtttacactaatttgaatagaactcctacatctagtatagtgaagtctttattgatgtgtttatgtgttacaaggcagaatgcttgtgtctcatgcttgtgtgaagaatggtatatatttagtgtgtctgccttctaatggcattctta

SEQ ID NO: 69980 - DNA, 380 bp, Zea mays
  unsure (1)..(380): unsure at all n locations
tctncagcaagaatataagccctgtctcaccggaacatctagatcatcgtcgccggacttcggttgcccgcatccgcgcgtataccgagcaatccggcgagccattcttcaattcctcgcacccatgtcttccttgacctctagtggaactcactgaacaattcaattgaactttaccaccctggttaatccggagccctcgccgctgacgagctcccccgtctgcgcacgtggaccggcctactccgaccatccccggagacgatccgcacatcggcgtgaccgtcacgacctcccctacaccctcggccacttcaccggaccaaccacgccgccagtaagccccttcgccctttcctccgtcgcggctactgtttcat

SEQ ID NO: 69981 - DNA, 410 bp, Zea mays
agtagcataggcaagtaaaatgctatttgtttctagcatagctacgggtgcataggtttcaccaaaatccaaatcttcgacttgtgaataccccttggccacaagtcgggctttgttccttgtcaccacaccatgctcgtcttgcttgttgcggaccatttggttatgacattttggttcctacaacattttggttatgacgtggaaccaaatgccatacctcattcctagtgaagttgttgagctcctcttgcatcgccaccacccatttcgaatcttgtagtgcttcctctatcctgtgtggctcaatagaggaaacaaaagagtaatgttcacaaaaatgagcaacccgagatctattagttacccccttttgaatgtcgccgatgatggtgttcacggggtgatct

SEQ ID NO: 69982 - DNA, 452 bp, Zea mays
  unsure (1)..(452): unsure at all n locations
tcgtagttttctcagtctcaaccttaagtgttgctttctattctttgttttcctgttcaagttgattagagctttccttcagagtgtctgagcgtctgacaggtctttgcttaactttttgttctgagtttgtgcttctgcaatggacccttcggccgaatgtagcaatttgtctttctccttcaaagagtattcgagttctttgaccttatcctctatacctttgataataatttcgctcttcctttcctcatcatcttgttacatctttaaagctgtgctcaacaacatgctctgcgaaaagcagactcgaaattaatatatttaagctaatacgaacacatcggtggtaactctaagaaaggctcttactataaagatggaatatcacagactgnctttgacatgttgtcgactgtagtagctgatatccttctcaagcttcgggaatc

SEQ ID NO: 69983 - DNA, 454 bp, Zea mays
  unsure (1)..(454): unsure at all n locations
tcacgggctactggcggagctagccaaagcactggcttgcccatatggtggctggagtgggctggccactgtggccgaatctctggcggcaatggcgggcggaattaatctcgccggagctaatgaaaggtggctggccggtgatggtgagtgcggtgcgaatatatgtgcgcccggtgaggctttatatgcgcgggcgggcactgtcgatggcgtgggcgcgcggcatacttgaccggacgccattgtgatcgcgcgcgcgggttgggcgatctctggcgtgccgaccatggtcgaacacgtgtgcccgtgcgttctgcccaagttctggcgcgtgtggccgctcatccgagcctgctcttgtggnggatagatatcccctgtgtccactaaagaagtaaaatgcctcacgaaaggcccaatggcccaataattcgtaaggtcattctctcgt

SEQ ID NO: 69984 - DNA, 387 bp, Zea mays
aagggttattaaattgggagcaaaatgtacatagaaaatgaccagcatatgtcataagtgtggaattgctgatggtcacaacagtaagacatgtttgtcaatggatgaaaatatacaaaggttggcaagccttgctggacgttagataggacgacctccaggatctatgaacaagggtggcagtaaagctcctgattggaatgagacaacaacatctatataaacacgcaaatgagttcgatagtagtgagtcagacagtgattagaatgttgtatgagatacgattaattttgtttacaataaaccttgcttgtttggaactgattatatagaggggatattgaaactaataatggtgcgatattgttataatgtgcgaactgaac

SEQ ID NO: 69985 - DNA, 463 bp, Zea mays
tgttctaccaaatggttcgattctaagagcaatgtatgctggtcgtcctacacgcgattgtctgttcactgacccagtcatggatggcaaaaggtatgagcacgaatatagatttacattttcttttgctactaagttgttccttatagcatactccctccgtttcgttttagttgtcgctggatagtgcaaaattaaactattcagcgacaactaaaaagaaacggagggagtgctaatttgtgaattcttctgcagtctgatgaagatatggaacttgaacaatttcactggtgtcattggagtgttcaattgtcatggagctggacagtgggtttggccagttaaacaaactgcttatgttcctaccaacataaacataactggtcagctctcaccgtccgacgtagaatctctcgaggagatagctggtgatgactggaatggggagactgcagtatat

SEQ ID NO: 69986 - DNA, 398 bp, Zea mays
tctcctgtacaagcgccgcactcactgcagagtgcgaagctgtctcatacaatagtaatggagcccctggcgcaggtggagttaatgttgttagatcaatcaagtattgctttagctcttcgaaggctttctattgagctacgccccattgaaaaactttggctgactttaatatttcaaagaatggcaagtttctttctgctgatctagatataaatctattcaatgatgccagtcttcctgtcagccgttgggcccccttctttatgcttggtggttccatccgaaagatagcttcgatctttcttgggttagcttcaatccccatcgttgagactagacagccaatgaacttacccttcttcactccaaagacacatttttctggatttaatttc

SEQ ID NO: 69987 - DNA, 413 bp, Zea mays
taagcttagctcatcttgttaggatgctttgagtcagttcttttttctcgcccttctggcagcttcctgacttccattaatagcaatgggtccttgatccgaaagtatcttcatgcaaaggtaagcatgatgaataattgcttccaaagcattgagggtgccacgaccaataattgcattgtaagggtattccatgtcaacaatgtcaaacacaacttgctcggatctggtgttgttgatgaagccgaaggtcactggcatggtgatcttgcccagtgctacaatctgtcttcctccgaagccacaaagagggtgtgtagcatcatgaatcttgtcttgtatctcttgcatttgtctgaatgccttaacaaatataatatcatctgcactgcctgtatcaaccacaacattgt

SEQ ID NO: 69988 - DNA, 417 bp, Zea mays
  unsure (1)..(417): unsure at all n locations
tcttggagntcgtcctcacaagttcattgttgtatattgttattaggtggaactttacttacttaatgcttaagcatttgttccgtatcgaagcaccttctctgtctttatccaaactatccatccagctcagagagatgactcttttttattggcagaagaccactgcgatgttgataaaaaggtgctatcatttcttgagttgtnttatgatacaactgttgcatcatctagagtttgttacccacttcagcattaatgctacatcatatacttaaaattgctagacatataagcgcttttgaaaatgatgatctgctaagagatgatattgctcctatgaaaacaaagtttttgaaacattggaggaagatacttgttctatactgcattgcttcttggattggatcgtataac

SEQ ID NO: 69989 - DNA, 447 bp, Zea mays
  unsure (1)..(447): unsure at all n locations
tctacccgctngccccagtgatcggctaatcactgttgaatatctctctggtaagtcgctccagcgttcttgatgccaaacgacatggatgtatatcagaaagctccaaacatggtaatgaatgcagttttttcctcatcttcttttgctaggctgatctgatggtatctaaagtagaagtccaagaaggacaacatagaacaccctgcggtcgaatctactacctgatctattctaggaagtctgaagggatctttcggacagtgtttgttgagatctgtatagtctacgcacatgcaccaatccactntattctttgtgagtacaagaacatgatttgctagccactcatgatgcagtacttctctaatgaaccctgctgtgactaagcgagctatcttggcgcgaatggtctctctcttgtcatgcgtgaaacgacacaatttt

SEQ ID NO: 69990 - DNA, 472 bp, Zea mays
  unsure (1)..(472): unsure at all n locations
atactcggctgcattgttagaggccgggaatagcaactggttggcgtacttgaggtgttcgcctacaggtgcggtgaataagatccctgctcctgctccctgcatcttcatcgagccatcaaaatacattcgccatacttctgcagtttctggattatcaagtacttgctgttctgtccactctgatacgaaatcaaccagtgcttgagttatgatggcagtgcgaggtcagaactcgatgtcatgagatcccagctcgcaagcccacttggctattcgaccaatggcttccttgttgtgaagaatgtcccctattggaaaaccagtgactactatgactntgtggtcgtcaaagtagtggcgcagcttgcgggcagttataagtactgcatataacagcttctgaacctgatgatacttcttctctgatgggcctataacctcactgatgaagtaaacaggatgttgtact

SEQ ID NO: 69991 - DNA, 422 bp, Zea mays
tctccaccatgtcgctgctagccaaggtagtgcagtttcttctcatcaatgatcaaatgacatgaacgctccttaatgacacactctgtgtgaaacaacgtatgtcgctgattctgctctgccttctccatttgtgcactaatcacacgctgtacaatgaggctctcataatgctctgcatcatctgcaccaatctgttcttcgggtggttccttaatgcctacatcatcagccgcaagcaaagcaagtgtagcttcatccaaatcactatcagaggaatacccaccatcgtcttttaccaccaaaacacgctgattatgacaataacgctgcacgtgtccatatcccttgcatcgataacacagaacatatcttgttctacctgtggaagctactgaagacgcactacctgcggcgttctg

SEQ ID NO: 69992 - DNA, 460 bp, Zea mays
  unsure (1)..(460): unsure at all n locations
atctttatcactgcaactattgtcgatatgacccgtatcatcctgngaatcagttttaagaatggctcttctgattcccattgcttttagcttctgaagactcaaaagcaaggcttcgtactcagtaatattgtttgtacaaccgaaatcgagtcttgccgcataacaagttttaactttggatggcgagtccaacacatcagctgctcctgccccgaatgttccccatgacccatcgcaaaacactgtccatacttcggcatctttatttgtttcttcatcctgagcccctggcgtccaatcggcgataaaatctgccaacgcttgggactggatcgaagatctatgcacataatcaatgcaaaattcattgagctcttgcggccattttccaatccgcacagtagcttctctatttctcataatatccctcaatggctgcgaagaangaacaataaca

SEQ ID NO: 69993 - DNA, 383 bp, Zea mays
taccacatttgaagcatgatcgcttcccctttgtcttggtcttgcttggctgccccttgcgaccttttagcgccgtcttgaatctcttgatgatgagagccatctcttcatcattaagtccgaccgcctcaatttgtgccaccttgctaggtagcgtctccttgcttcttgttgccttgagagcaagaggttgaggctcattgattggaccattgagagcacctagaggggggggggtgaataggtgatcctgtaaaaacttaaaacttaagccacaaaacttggttaagtattagcacaataatcaccaagtggctagagagaagtcttagcataacacaataaccacaagagaacaatcacagagatgacacaatggttta

SEQ ID NO: 69994 - DNA, 386 bp, Zea mays
tatcggctccgcatgtgtaccctggaccaggcgccatcatggtttatttactgggcaccttgacggtcctgttggtggacccagcctgcccaacgctgacctggaacgatgcgacggcgttgctatggtcctgcgcccactatgcgagcactcctcccctgcagcagttggcggtctgcgtgttgtatggagtcccgggcagcatgtccaccacctccgggtccctcctgcatcagtgggggaggacgctggccttgaacctggagcagtcgccctgctcggtggcctggccgccggtcatcgcccatatcaccttcttgttcgcccacacccatcctatcctccaccccggcgcctggatgtggcggtactgctggttgttgtat

SEQ ID NO: 69995 - DNA, 353 bp, Zea mays
gaagatgtctgaagataagaaggctgctgctgagatgaagctgagcctcgacgaagagaaaaacttggggtttcttatagcgatgtcaaagaccaatatagaaaaaatcaccaaggagattctggaaggtttgtctgaagatactggtgacagtgacagttatgatgtggacagtggtggtgaagactccgaagatcgtccctggcgaccaagccattcagtttatggtaaatcaactatcaaagagaatcatctggtcaacatgagaggaaggtatttccgggatttgtccattgtgagggccgacaaatgggaaaaaacttgtccacaccctgaagagaatgaagtcgtag

SEQ ID NO: 69996 - DNA, 397 bp, Zea mays
cttctgacttcggaggccgaatgttgaaatgaatgtttctgtttcagaatgccaaagggccttcagcgcagtctgctctttcattggaacgacagacttagtacaagagcatattgccttcacggtatggacgctcgcggagaaatgggaaatgccacaagataccgtaaaagatgctgtcgaaagtggacttatcatgttgaagtacactcttatacttggagattaattcgctgagccagatgatgactgggttaaaagtgattaaaatctaattgatgaactgcttggggcttattcgaacgccgaatacactgcaatgtcagcatccttcggatgccgaaaaaataagacgttgtatcgggtatttgatgcaatctggttagtctaccctgac

SEQ ID NO: 69997 - DNA, 429 bp, Zea mays
  unsure (1)..(429): unsure at all n locations
tgtgagcaatacaagttcagaatagataaagctgcttctgctgaccagccgaaacccatgctcttgtgtgaggatatagcagagcagaaggtgctattgggatctcaattgtccgaagagcaggagaaaaccttgataaggtttttgttcaacaataaagatgtttttgcttggtcagctaatgatctttgtggagttaacagggatgttattgaacactcgctcaatgttgacccatccttcagacctatgaaacagaggcttcagaaaatgtctgatgataatgccgaatgtgctcggaatgaagtgaaacgactcctcagtgccggagttattatagaggtaaaatacccagaatggttggctaacacntgtatggtgaagaaggccaatggtagatggagaatgtgcatcgattntactgatctc

SEQ ID NO: 69998 - DNA, 426 bp, Zea mays
gctacatggataggctgcagcatggctctcgtcttatccgtagccgtatctatcgtccttggcgagcatgcggtgactactactggtggtgacgccgtcgtcgtcgacgtgtcctctagcggcggcggcgacgatggctgctgccgcagccgctcggtgctgttcctcgacgacgaccagcttcttcttgaggtgggtgttccagtagttcttgatgtcgttgtcggtgcgctgcgggagatgcgacgcgatggccgcccaccggttgcccagcatggagtggaggtggacgatgacgcgctcctcgcgcggcgtgaagttgccgcgccggatgcccgggcggatgtagttggtccatcggaggctgtatctcttgctgcagcgcatcagccccgtgctcgcgggcacgtggcgccacttggtggg

SEQ ID NO: 69999 - DNA, 462 bp, Zea mays
gagaacatgtgttatgactaaccgatgtctgtttctgttatatacaaaccttgtacaacgtgtcagctgggaaatttggggtaaaagtcatccacgtaggaacgttatgatgacgtccagaactctggagtcgctacatatggatatgcttaccttaacatatggggaagtatggtcccgttattgttgatgattattcccacttcacctgggtattcctttttgtaggataaatctaaaacccaacgcacactaaagtgtttcctaaagcatgctcaaattgagtctgaattaatgatgaaaaagataaagagcgacaaccgttctgagtttaataaccttcaagtagatgagtacattgaggatgaatgcatctagcacgaattatccgctcctacactccataacataatggtgatgtgaaaggaataattgacactcattgaatggcataacaatgcc

SEQ ID NO: 70000 - DNA, 415 bp, Zea mays
tcttgcatttgagaacatgttgagaacacatcccaagtgtgctgtgatatcaatgttattgcatattgctaacccagcccgtggaaggggtaaggatctggaagccatccaagctgatattgatgagagctgccagaggatcaatggagactttggccagtcatggtatagccctgttgttttcatcgatcgtgatgtgtcaagtgtcgagaagattgcctattatacgatagcggaatgcgtggttgtgactgctgtgaaggatgggatgaacttgacaccatatgagtacattgtctgtaggcaaggtgcaccaagatctgagtcagtatcagaggtgggtgggccaaagaagagcatgctggttgtgtcagagtttattggctgctcgccgtcactgagtggtgctattatg

SEQ ID NO: 70001 - DNA, 363 bp, Zea mays
tctaaagctgatgcgttacctcaaactttgtctgtagtccgaaatatcgaatatgccttatcacatgactccctaagcattcataagatgggcatcttcgtcagggcgttgagagccaatgtcaaaacacaatacaaaaagtttctgcaacatacatgagctattgtatgatacataaccctgtggtaaagagcagtatcacaacaattttggctgctcagctcatggcacgaactgtgtcaaactgcccgtgcacccttcaaaaaaatggcacgggactgatgagggaaggtttatgtgaagaagatttgacacaccggagatttaaagattgcatatgcgcctatcttgcacacttctgtc

SEQ ID NO: 70002 - DNA, 403 bp, Zea mays
taacctgctcttaccccgctctatcgcttttatactggatatcgggcgcgaagcggatcaaaaagacgcgagatgcggtaaaagtttaccacataaaaacaataatgccctcaccttctccctttctgatgggtcaccaactcaactcgttttaccaaattattttaccttctccataacgagcttctggaaggtgtttttcatacctttggcataaggcttaccaattttgatttttgtcatctaagctaattataaagaaccaaactcattccgcaaggggatactgatgggggcctaccttggcgaatgttctcaatacaccctttcttcaatataagaaaatgtgtttcacgtaatgttgaacggtggatgaagctggccttcgggtatggtaatgtat

SEQ ID NO: 70003 - DNA, 457 bp, Zea mays
  unsure (1)..(457): unsure at all n locations
tcggctatggttgaatattntggcagcaaaacagtgctttttcaatgaatgctgtggtaacttcacacctacccgtctgtttatatagtgttgcaggtaagaatgtgaatcgtcaggatttttacaccatgcaaacagttgctcgcacccgctgaacggtgggccgcaaaaaccagaacagtgaacccgcatggtgggaccgctgcacgcttgaaagctgtatcgtttctcgacaacgagctctgggaaggtgtttttcggaccttcggcttcttgaagcctaagagacttttttatggatcaagctcgtcacgaataacgatctatcaccgtgaaggggctactgttgggaccatgcttcgtcgtcgaatgtcctgcataaagaaacagcttcagctgaagctgcttgaacatgatgccgaagataccgttcacgaagcttcagaactacagcata

SEQ ID NO: 70004 - DNA, 407 bp, Zea mays
  unsure (1)..(407): unsure at all n locations
tgacattgttccactgtnggaaactaatgccatccttaatgctttatcatctcccattatagagcatgcttctagcaaatgtaaacgtttcattctcaagctcatgctcactgattttagcagttaatgtaactatgtgatcatttagttgtgtaatcatggcaatgtgatcatcaatagcttctacattaatatctctacatctagtgcaaatggaaacatgctcgacagtagatgtagagggtttgcaaatatttaattcttctatcttagcatttaatatagcattctcatctctaagacagaaaatagaatcattgcaaacattcattttttcaatcttagatactaaactagcatgttcatttcttagactataaattgaagcatgacgcatgctcattctc

SEQ ID NO: 70005 - DNA, 358 bp, Zea mays
gctacatatgtggtgagaccagccattctattgctaaatgtcctatgtctagtgacagtgaccgttgcgacgacggcattgtggagaaaaaggacaaaacgatggacctcacgaacaatggcggagatgaccatgtatgtggggagtgtgactcctactatagctaaagcgactcctgggacgacaaagacgccatcgagatctccgtctacaatggagctttgttccgcatcgtttgaccaagtgcctcatggcaaagacggctgacgcaaaagttaatgcaactctcactaatataatcagctatgatgatatgctagtgtgacgagatatttggtattcttttgcaatttaaatg

SEQ ID NO: 70006 - DNA, 457 bp, Zea mays
  unsure (1)..(457): unsure at all n locations
tcattntcgctcactctgctctgctctggacagagaatgtctgctgtcgacgtatgatccgacatgagccctgtctggccagttgtagagcgcaaacaccttgagacaagctggcatgtgggagctgcatcctgcagctaacacgcacggatggacggacgtttttttctctccagttgtttgttcgacgaacgaggaaaggaggatgctgaaacgcagcataatagatgggttacacagacaccgatgtgcctggttnttttggatgacagactatatatagcagagcatgccttaacacattcttttgccgtatctagataaaagcctaatccataaagaatacttacgtttaccaattactcccatgtacccattggtaatgagtggagtagtacacgtccttctagcgtcttttctttatttttctttttggggtaaaattcgcgttgtctat

SEQ ID NO: 70007 - DNA, 466 bp, Zea mays
  unsure (1)..(466): unsure at all n locations
tagcacgtgtgatgnacgaagatatatcgatgtattaatgttcccgccttccgtctaaaggtcttttggagtggactctgcatttttcctttatgaacgacttctcagcttttagcacatgtacttcagcgcttttttatgactctgcattcccttatgaacaactctagtcttatcaccattattgggtgactggtgtttttactctgcattcccttacgaatgacttcagagtcttatcgccttctccaggtgatttgatcctgccttcgtatgaaggacttcagaatcttctcctaaaggaatcttgacaggtgaccaatacatcctcatcaccgtcctcactattcttggtgtatcttcattaaatttagaggatgaagtggagggcttggtcatcttgtttttatcatcaccatcatcttcatcttcacactaagagcttgagcgtgagacttctatttgg

SEQ ID NO: 70008 - DNA, 421 bp, Zea mays
  unsure (1)..(421): unsure at all n locations
tactaagctttgaagtattgnagggcaagccatactgaaccgtcgccatgttttatgggttgagtttatcgaaacatttccatacattgtgtaatataagaaaggtaaggacaatgtggtcgctgatgccttgtctcgaatgaatgtgttgttgaatcaactagatgtaaaagctttgggtcttgaacatttggaagaaatatataatgatgatcctgaattttcaaaaccatacaattattgtggagatggaaaaaggtgggaaaaatatcatatacatgatggatttttgttagagctaacaaactttatgtaccaaattcttcggttagatagctcttattgcacgagtcacatggaggcggtctaacatgtcgtcttggtacacagaagacttatgagatgctcactgataatttct

SEQ ID NO: 70009 - DNA, 462 bp, Zea mays
tcgtcatctgatatgaagatgccctgaaagtaagaaaatattttttgttctacaatcttcactgtacacaggagaaatagttagaactgctctttcaaataactccactgaaggtgcctttattgtttcgaaaaatacatccgaaggtagctgcagcccctgtgctgcagacctggctaacaaatcaacatgttcattttgccctcgagggatattcttaacagaaaatccttcgaaggaagcttcgatccttcggactgtgtctagatatttttcaagcttcgggtctttatccttgcaacttctgtcaatatgacccgaaacaatctgagaataattttaatgatcgccctcctgatccccatcgcctttagtgtccgaagacccacgagcattgcttcgtactcatcaatattatgtgtgcagctgatatccagtcttgctgcatagtcaagtttaacc

SEQ ID NO: 70010 - DNA, 412 bp, Zea mays
caaacattgtccaacaatcaacatttctttcctacacttgaaaccaagacccggtggaatgactcccaccatgaaccacatgccaaacagcagcaccgctgtattttaattttgtatctttaaaattataacagtagtgatatcaaacaaatactctaggggtttctacacaaaatactctacaacttcggtattcaatggataattaaattttgccatctataagttataaaacatctgacaaaataactgactggatctgtttcagacagcagcatagttaacttcaaaattcgatatctcccaaactactcaacaaaaaattatgacattctgctggcagtaagatcttttattcctctacaaaagtcttccgagttggaagagccagtttgtgcatttactaaatgaa

SEQ ID NO: 70011 - DNA, 432 bp, Zea mays
  unsure (1)..(432): unsure at all n locations
gtacatgaaccgattgtgaagacctgatttttattctttgcgaatgaagaggagctgcttctgcaaagtgtccgctttgccttccgcatacatcatgtaacttgttccgaaccacgaattaattcgcaacgacacttgcagaatctaatttatttactgactgcaccgaaacaaatttgcagcttgctggtggctttgacgaatgatgcagataggcantttaggaactaaatactaatgcaagcaagtcagagtgatccgagttcacgtgggttcaaataaaagtcgagatcacacatagataaatatgacacacatagattatcaagttttgccgaggttggctccaagggtctccaccaagactcgatgatggtgctgcatcttctaaagtgtaatttatttggcatcatgtgctgatctctcggatac

SEQ ID NO: 70012 - DNA, 461 bp, Zea mays
  unsure (1)..(461): unsure at all n locations
tagaanagtctggtataaatctgcgataatatccagcctgctcttgaaacttcggacctgatgaacagtggtcggtggtttccactccaaaatgtccttgactttgctggggtctaccgcaatccctctggcagatagaacatgtcctagaaattgaatttcctccagccaaaacgcgcatttgctgaacttagcatattactgatgttccctcatgcgcgttaatacgatccgtaaatgttgggcgtgctcctcttcattcttggagtatatcaaaatgtcatcaatgaagaccaccacatacttgtctagctcgggcatgaacaccgagttcatcaaatatgtgaagtgggccggagcattcgttaacccgaaagacattaccacatattcaaacagcccataccgcgtattgaacgcggtctttggtatatcttctggccgaatacggatctggtgat

SEQ ID NO: 70013 - DNA, 456 bp, Zea mays
cggagtcatcttaagccggttacaaaatcataccttgtgtttttcttctccttcgaacttgaattgtgcttataatactttaatacgtacaggatgactaagctgatgccgaagctgaagagtgaaaagacgaagctccatggatactaacgaagcttgagtagtctgtagaaaaagctctaaaaactcttgtaataactcgtgtaaagaatgatgtaattaaattttacttcgcgaactttgtccataccttgtaatatattcttacctttccatcaatgtatgaagtgcttcggtgtgaacgaaattatcatgtttgagccaaaggcgataaacaccttcccttcttttcgtacacagcgaagcataaaactgcttcttttactttgtttctcgaagccttctcttttgatccgaagcaactgtctatgttatgatgatgatgatcctatgtat

SEQ ID NO: 70014 - DNA, 427 bp, Zea mays
tgctttagctcagtccgaagctaccttatgctccgaagatatctttgttccctcggccgaagcaagtgtggttgctggcaaatattttactgatatctggaacgacggcggtcggtgaatggcacaagaaattatcgaaaggagcgaaaaaggcatccatgaagctaggaaagtggcagagactgccgaaaagagtatggagcccgaaagacagttatgtaccaactagtcgttcttgttgtgctgtaattttcattttaaactttgctcgcgatttgtaaaagtactgaagaagtgttctctacgctcagaagctgttggacgatctccccacacaaaaggggatgaagaaattaatcagatggccgaaactatcatggacaatggtcgtgaccaacttctgaataaagcccgcgaagcaatattg

SEQ ID NO: 70015 - DNA, 469 bp, Zea mays
  unsure (1)..(469): unsure at all n locations
taacacccctaaaagattgtctaattntgttaagggtatttgcttcatggctcaagataacgagggttgcattntatatcctgctggttatcccgagcacaaaattaggagaattcattctaggaagtctcactctggctctcatcatgcttttatgtataagagtgaggcatctagctctatgcaatcaacccatgttaaattgcctaaaaagaaatcttctatagcatcaaatgaacccaatgtttcatttaagacttttgatgcatcatatgttttaactaacaaatcatgcaaagtagttgccaaatatgttgggggcaaacacaatgggtcaaagacttgtgtttgggtacccaatgtgcttgtttctaatgtgaaatgacccaagaccgtttgggtacctaataacaatgcctaaacttgttttgaggtttatgcatccggcggctcaagttggatcattgat

SEQ ID NO: 70016 - DNA, 441 bp, Zea mays
tcagctgttaggaaaacaatatgcttcgtaagaccttgttgtgtcccacttgaagtgataggcctagattttgaaattttatggctctcgcatttcttttccacttgtgtataaaatgggttgagatttgtgtgtgctagttacaacatccgtctgcttttgccaactagctatttttgtttactaaaactctgaagttttctatgtagagcacgatttgccacatatccttgcctgcgtagttttgtgttttgtgacttttttgaaatggatgaagggaagaagagcgaagagcttgctcttgttgagttgcatgaggccatgatacagtctaatgttgataatattactgatgaaatgttggccgggctatcagattattctgaatacagcgaggagtttgattttaataggatgttgatgacattgaagaacaaccct

SEQ ID NO: 70017 - DNA, 432 bp, Zea mays
tgacattgcttacctgtatgataccaatgtcattctttattccagggcatctcccattatatagcatgcttctagcaaatttaaacttttcattgtcaatcttatgctcattaattgtagcagtcaatttaactatgtgatcattttgttgtttgatcatggcaaggtgatcatccatagcttctacattaacatctctacgtctagtacaaatggaaacatgatcaatggtagatgtagagggtttgcatgcatttaattcttctaccttagcatttaatttaacattctcatctctaagacaagaaatagagtcattgcaaacatttaaatatgtaaccttagaaattaagctagcattttcatctctaaggctaaaaattgtatcattcaatgtatcaatcttatgcattagactagcatttttatttc

SEQ ID NO: 70018 - DNA, 460 bp, Zea mays
tgccttagctcatgcagatgcccgagcgggcgatgcagaaagccgtcttgctgtggccgaagaggaccttatggagcatgcaaactgccatagtcagctcctcagatgtgtctacctagtggaccgtgccaagcgcatggaacgccaacccacgaccgctgctgagtcaccaccactggagggaatacctttgtatactttgtcccacccccgcaggaggatttatgaatcggtgccacccacacctcccgcgtctcctcgtgaagccgattgaagagaccccgaagaccgtgccatatggaccagtatccaaattgtttcggccgacccttataaagtctagacatgaaatagtaccctattgtgtcatgtatgcctgcatgttgaatgaatgcttgtgtgatgtatgaatgctctcactcgtgtgtattgtgtgagataatatatatatacacccata

SEQ ID NO: 70019 - DNA, 467 bp, Zea mays
tcatgaagccgaatgtccaataaacaccttccctgagctctgtgtcgagaaacgatttagtttcccagcgcataacggtcccaccttgcagagttactgtttggtctctgcggtccaccgcgcatcgagtgcaagcggctgtccgcctggtgtaaaaatcctggcgcttcgccttcttacctgcagtactatataaacagacgagtatgtgtgaagttaccacaacattcattgctatttgcactgttttgctgccaaaatttttaaccatagccgaagcttgactctcggaatcaaacgaagctctagcttgaagcctgcttcatcagaagaaaaacttcggaagaaaaaatatttaattcccacaaattcagaattaaatggccagagtacgttctaccgctagggttgagcgtgagggaggcgaatctgaatgttcggagactattcccatctccgaagcgatg

SEQ ID NO: 70020 - DNA, 396 bp, Zea mays
actgtcgtctagaatacccttataagctagtgagccatcacattcttcttttgacagacacatctacatgtgtgaacaaacagttatatcccatattgcataattgactaacagatagcaaattatatccaagagactctactaaaaacacattagagatagagtgctcatttgagattgcaattttacctaacccttttaccttgccttgattcccatcaccgaatattattgaatcttgggaatccttattcttgacgtatgaggtgaacatcttcttctgccccgtcatatggtttgtgcatccgctgtcaataatccatcttgaacccccggatgcataaacctgcaaggcaaatttatgcttgggtcttatgtacccaactcatgttgggt

SEQ ID NO: 70021 - DNA, 436 bp, Zea mays
tgtgaaggttcttcatccctacatgtgctgaacggcgatgcctctgccagcccatgctagtcttatcaattaagcatgcatctagaccggcctcctcttttgcaaaatcaactaaataaagtttaccgtctagtacacccttaaaagctaatgaaccatcacttcttctaaagacagacacatctacatttgtgaataaacagttatatcccatattacaaagttgacttacagacaacaagttatatccaagcgactcaactaagaacacattagaaatagagtgctcgaatgaaatagcaatttttcctaaccctgtcaccttgccttggttcccatcaccgaatatgattgaatcttggggatacttgttcttgacgtatgaagagaacatcctctgtttccccgtcatgtgggttgtgcatacgttgtcgat

SEQ ID NO: 70022 - DNA, 365 bp, Zea mays
tcttgcgtctgatggcacaagcgccaacagtgcccaatgaaattgtcattgatgccatgatcaatgggcttcagccatgacctacggcccaatactttgccaggaaaccccctcagaccctgcagaaattgcttcaaaagatggatgaatacatccgcgctgataatgactctcgtcaaagaagggaggaagactacaggttctctgagatgaccaggggcttctgagggagaatccacccatggcatgttagatcaatccactccacctataatgacgacagatgaagtcaacagatgccacaatattcctcacaagcttcggtgcaacaacatagctatcttcggccgccagctccaatgggc

SEQ ID NO: 70023 - DNA, 284 bp, Zea mays
actggatattattggacctttcaagaaagctcaatgatgatacactcatgtactggtagcaatcgacaatatcactgaatggatagacttcaaacacattgcctctttaacctcaacttatgccgtggaattcatacaggacataatgttcatattccgaataccgaacagaatcatatatgaactatgatccaacttctcatggtcagagtctttccatttctgcgagcgaaagatcattcagatcaagtatgcttcggaggcacaccctagatgccacaggc

SEQ ID NO: 70024 - DNA, 448 bp, Zea mays
tcggttcatcaatcttcatcagcctcgccctataaattactatgtgtcaaaaagatattatggaatataatgtgataaacgcgaataagcatgaaagcaggagaatcttcataccttgtcaattagtgcccgagcttcgtctctatcaacttcccgaccaccctttgtccagattgagtgataaatctgttgcctacgcttctagcctcagccgggatattgtcctagtctgatgctgaatggtcgaaggttggtttattgacagtttttatgtggttgcatccagccttggcgaaaacgtggtcgttccatgggcagccactattgcatagaagtcaccatggccaactatgacttcatcaagatcttcaatatcttttgcaatacattcaagtgtcgctggaatatctttggcagaatgattgacttcctcggatgtagccccaac

SEQ ID NO: 70025 - DNA, 454 bp, Zea mays
  unsure (1)..(454): unsure at all n locations
cactattaatactaagcttggatacaactagcaatctcatagcctctggagtaccttcctcaaatgttcctcatgctcttgctcattctatgaatatacaagaatatcatcaatgaacaccactacgaacttgtcgaggtaatccatgaacatgctgttcatcaggcacatgaagtaaactggctcattcgtcaaaccgaatgacatgaccatgaactcatatagtttatacttggtgataaatgttgtcttcggcacatctgaaggtcgaattctgaattgatgataacctgacctcagatctatctttgagaacacactggctcctctcaactggtcaaatatgtcctcgattcgaggcaaggggtacttgttcttganagtgacttcattcaaggatttgtaatcaatgcacatcctctttgtaccatccttcttcttcacaaatatcact

SEQ ID NO: 70026 - DNA, 424 bp, Zea mays
  unsure (1)..(424): unsure at all n locations
ctaccatgtcgcagattttctatatgagaacaaaataccattgcacgtcgtcaattcaaggagctgggaggttatgttggagtcaattgggcaatttggtcctggatatcgtggtccatcgtaccatgatgttaaggtgccttggcttgatagggttgtcgagaggacaacaacattgatgtcgaagcatgaacaagcttggaaggaatatggctgctcaattatgtcagatgcatggaccgatacaagacaacaacatttgatcaactttcttgctaatagtcctgcaaggacattcgttntagcttctgttgatgcatcaagtgaagtagctagtgctgaattgttggcagatctattagagaagcaaattgacagtgttcgtagagaacatgtcgtctagatagtaactgataatggatct

SEQ ID NO: 70027 - DNA, 468 bp, Zea mays
ctaagcttctatcttcggtagcttcgcttcagcaactgtctgtgtatcttgatacatcttatcttcggaactaacgaaaatatgtccttaaatccgaagcttagaaaatttaagaagctaagcaactgctggatagcaagagctaataaatcaagcaaagcatagcatgcataccaaatgtgctcggggtgagttcttatttatacgcccatcgcgctccaagttggaaggccccgtctgtcattgactgttgctattctagcaaagggaaggtgtttttcggaccttcggcttatggccttcgtccatatcgcaatctgaattcgttattctaacaaattaaccttgcgaggggctactgttgggggccttcgtcttccgaaggtcctcaaaaacatgatttaacaatgtttctggagtataatacatgaacaggtaccttcggactcggatcataaacacaatatg

SEQ ID NO: 70028 - DNA, 424 bp, Zea mays
gtatcaaatggacgtgaaaagtgccttcctaatggaccattcttgaggaggtctacattgagcaacctcccgactttgaatatagtgagtaccctaaccatgtttataaactctctaatgcgctttatgggctcaataaagccccaagagcatggtatgaatgcctaatagtttttcttatttctaatgacttcaaagtcagaatagccgatcctactctctttactaaaacaattgcaaatgatttgggtctactaacaaatctacttgtgaagagtttagtaggatcatgattcaaaaattcgagatgtcaatgatgtgggagttgaagtatttcttatgattccaagtcaagcaactccaagagggcaccttcattatacaaacatagtatattcaagacattcttgcaaagtttgggatg

SEQ ID NO: 70029 - DNA, 391 bp, Zea mays
  unsure (1)..(391): unsure at all n locations
ttgtcttcgccgaagactccaatttccttttaatacacctatggcttgtgttgaaatagacttgaacacacattagtcatagcatatganagatacatgatcaaaggtatataaatgagctatgtgtgcaaatcaacaaatgaagttcctaaaatcaagaatatttatctcatgcctaagtttgttaaaagtttgttcatcaagtggcttggtaaagatatcgattaattgacctttagtattaatgtatgaaatctcgatatctcccttttgttggtgatcccttaaaaagtgataccgaatggctatgtgtttattgcggctatgctcaacgggattatacgccatgcggattgcactctcattatcacatataagatggactttggtt

SEQ ID NO: 70030 - DNA, 469 bp, Zea mays
  unsure (1)..(469): unsure at all n locations
ttggatgtgatgaagatcgctaacgaagtcggtaacgatattgtctatagactattatcattgtcgacatactattacatgaagccactgagaaaattttaaaagaagattcaattcttgtactctagaaattgttaatgcttgtgtgtggatgccgccatgtgtatggtacaaacattaagtatttatatgtaaattaatgtaatatatttctttgcgatgcctgaaacctacgtacataccgttttttgagccttcggcaaaaaaacaccttcccttcttttcatgcttcgcanagaaagattgccccctctattgattggataccacatgctttgccacaactattgtataataatgttgctgacgaagaattccctgctgtgttanaatatgtctgccagaagtatactttgngcttcagcacattctttcacgatccaacatatattttataagagcatttttc

SEQ ID NO: 70031 - DNA, 471 bp, Zea mays
cttccttgagcgcagcttcagcgctggttcaaccttcgttcttattctgctttccatattgtgtacagcttcatcccgagtccataagttcctatacatatattatgcttgggaaacattgtttatcatgtttttgatgaccttcggaatactaatgcccccaacagtagcccctcgcagtatttattcgttataataacgaattcagactacgacgtgaacgaatgccttaatctgaatgtccgaaaaaacaccttcccttttctagaatagcaccaatcaatgacagacggtgccttccaagttgcagcgtactatgcgtataaatatgaactcacaccagcatcatttgatacactgtttctgctatttgcattatgtttctcaaacttttatctctcgcatactagctctcgctagatgttcaagcttcttgagcttccggttaaagtcacgttttcaccatgtctg

SEQ ID NO: 70032 - DNA, 454 bp, Zea mays
agtgtgagttaatctagttgctatgaatcaagctctcgtgaacaaaacaatcacagataatagcagcacaagagacacggtgttttatcccgtggttcggccaagtataacacttgcctacttccacgttgtggcgtcccgatggacgatggttgcacgcaacccctttcaagtgatgcaatgatcaacttgaatacaacggttctttttgcttggtgttcttctcccgtttgcgaggaatctccacaagttggagcctctcgcccttacgatatatatcacaaagaagcacaagagtaatggagggaaagcaacgcacacatgactcgaatccgcaacacacacatgcacacaagccaagacttgagctcgaaacacagcacagggagttcacaactcgaatggagctcatatcactaacacaacgaatcaaatgcgtggaggcggagtctgg

SEQ ID NO: 70033 - DNA, 449 bp, Zea mays
  unsure (1)..(449): unsure at all n locations
gtgggaaattctggaataaagcggcggtgataaccatcctgtccatggaaacttctgacttgatgtacagtggttgggggtttccactccaaaatatccttgactntgctgggatccaccgcaatccccttagcagataatacatgtcccagaagttggatctcctccatccagaatgcgcacttactgaacttagcatataattggtgctcccttaagcgcgctaatacgatccgcatatgccgatcatgctcctcttcattcttggaatatattaagatatcgtcaatgaaaaccaccatgaatttatccaactcgggcatgaataccgagttcataagatatgtgaagtgggcaggaagcatttgtagtccgaaagaataaccagatattcaaataatccataccgcgtagtgaatgccgtcntgggtatatcttcgggtcggata

SEQ ID NO: 70034 - DNA, 432 bp, Zea mays
  unsure (1)..(432): unsure at all n locations
tcggtgaaccgacgatcaagccttggcgaccaagtgttcttattcctcgagttctgcaaggttgaagatcctgagcatctatttggtgaaggcaagtgtcctctgacctatttatgtcctattcacatgataattcatttccccgcattacataattgaaacttatgatttgactagctttatatttaccttgtccttgattaccttntggattatgatggttagctttatgctagtgctctactttaatcaatgaacatgaagagatacatttatgatactatgattttattctgaatatgatgttgaacttgtggcattnttggggacttgggctgttttctgagtacctctccgtaaagacctgttcgttgagagaccacccgagaaaatagtgcaaccatgatggtggtatatgatgcccttaactaa

SEQ ID NO: 70035 - DNA, 437 bp, Zea mays
catgtgcacgtcctaacaagactggctatgtagatctaattacgttgttgactttttctcagacagacagtaagatttcaaattttgaatccaatttaatatgaatgatggcatacaagcatatacaactatacaacatggaagaacatttccatctaattatgttcctagatgaatgtcttctcaaaggttaaaaagatcactaaccatcattggaaatctctccaaaagaatgaacaaattctaacagtaaagtgtgtggcaacaagtagaacaaaggcacaaacaaatcacaatatacataactactcgctattatattataagataacagtatgagattagatacatcacctgaatatgagtcttgatgatggctttcccaatcaaagtagcaaacaagaactcccagatatgcacaccatattggccacaca

SEQ ID NO: 70036 - DNA, 456 bp, Zea mays
  unsure (1)..(456): unsure at all n locations
atggagagaatatcttctagcctttgacgatcttcgctntgctctctcgctctgtttagaagtttgagcatgaccgccttatctttttggcttaggcgagcgtaaagttgtaagaagcttctttcctcctcctcatcctcatttgtgcttccgctatcattgtcattagctaaacaacatatgtgggaatcaaaatgggaagacaaaccttttggagaggtggattcatcgtttggtctccatcggtcattttcttcttcttcttccttcaaagggttagtttcacaaataccaaaggaagtagaggcacaaaatgaactatcatgtttggactcatcaaatttggtttaaattctagtccaaatatcatgcacatcacatatagctgtatcatattgtattatgaacgcatgataatcttctctgctaacgggattacttaagatgtcataagct

SEQ ID NO: 70037 - DNA, 468 bp, Zea mays
  unsure (1)..(468): unsure at all n locations
tcttgtgcatggcatggcgtccaacacggtcaatgtagagatatctgttggaatcatataaaagcgttacaggtttacgtctagttataagctacaaagagtaaatgataaatttaagtgtttcatgccactaacatttgattcaatgtccactntaacatcaacagtggtattcttgtacttgttaactgaactgacatcaagagaataaagccctcctttcttcacagctgtggaagtcatgccctaaaaacggatagccatgagaagcatgttcatatagacacaattcatatattaagaaaataagttcaaacaacagaaagtgtactagtattgccatatagcagttaacaacagaacgtttttaactaacattggacggtatgttgataaacatgtttcacaatagtgctgtagaaacatataatgaaaaggatatgcaaatataccacgttaacatgtttc

SEQ ID NO: 70038 - DNA, 440 bp, Zea mays
  unsure (1)..(440): unsure at all n locations
cgagcggcctctagttcctgagcgacatgcttcttggaaacacgcaaatccctgatgatggaatccttggtcgatagcagctgtctgagtcacaaaacttcatcttgggatacttgcagctcacgacgatgatgatccaggtctgacatattgaagcggtggctcctttccaaaatagtcaatgagttactggcgtcacggtataacttgtccagattgtcatgagaggtcgcgagtgctcgtttctcgtcctacgagcaagaagcaacattcagcatccagtcaacaataagcatggcaaagtcaaccaaggaagtntacctcatgtgccgccctttcagagtcaagctgggaattgagggaggaattcatagaatgcgtgacatccaaagatgcagatgcttgggccaagtcgactcgactttgagaatacttctcct

SEQ ID NO: 70039 - DNA, 446 bp, Zea mays
aaaccatggtagcactcagaatacactaacagttcatactattgcaatcaaagggccgaggcatacaccaaaggcatttgaaatctcaccaaagttgggaccaaaatctgtgcaaacttcatcacagatggtctcgctgttttcagcaattccataaacctccataaaatgtgatacggtgacgtccatggcacttttgacacacaactggtgcccatcggtggactgcccgacaagcactccaccttcattgtgttggacttgaacaaccgtgcgcactcttcgcccaacaaacatgttcagcatctatgcattgacaagtgctgcatggcttgatgtgtccatctctgcaaagtgaggattcataaatttcaaatcattcaatgcaattcagtacaatcatctatcacacagtttccgtattcatgaattagtacatataaatg

SEQ ID NO: 70040 - DNA, 433 bp, Zea mays
cgtgaagagacaatcgcgcactgggagtggagagatggcgagagtagcatgtaccctcctggcatagtagcacgcctggtagggtaatgtgctctcgggtggcgcggacctgttcatgtagtggaggactccgtgggaacggttgacatatgcaaaggttaagtgctacatatgtcgtgtggttagagatccccagctgggtataatcggttcgaatcgtcgttgctcctcggttatgaagactcatcccggtgaccatcatcgtagttagcaagtgaaataaaagtatggataaaatgcagctagtaacatatgtcaagtgcttgaactagattaggcaaatctagattcaagtaatatctaacttgtgaaataaaacttggcttaaggatcaactggtagcaagcttttctgcataaaggagtctttgatc

SEQ ID NO: 70041 - DNA, 408 bp, Zea mays
  unsure (1)..(408): unsure at all n locations
tcttgaagatatttcttgactttttacatgtttcccttttcgtttcttggacctgatgcgatgacgatgctgaaactgagatccttgtgatgtttcccttttggaatactttgcaattcatcaactgacaatgcattaagtatgagagactctgctattagttgttcttggggagacattngtctnttaatgccagataacaaaatccggttcttctgttttgtagtttcactttcgtttgtactaatctggcgacaaggaattccatattactcgcaacaacaacatgttccaaggtcacttgtcggttggtttgtgtcggcgtttctatcccggtgggtccctggaccgacgagtaaattgtcgccgcgtgtcccatcccatattggtctgcgcgagactgatcac

SEQ ID NO: 70042 - DNA, 455 bp, Zea mays
gagtatgtgcttcaatagaggatcgatgatgctcttatggttgataagggcatgaagcatattcaagagtaaacggaagccggtaaagccactcgttttataaaggatgacccatgagtgttatggttcaaaaatcgtataatggtgcctaatgatgctgagctctgccagcatacgccgcgacgatttctccaccaccatcaacagctgcgcataaacgcgccactgtccagcgatgtcccattcgcactgaaagtcgcctagaggggggtgaatagggcgaatctgaaattaaaatcttaacacaactacaagccgggttatcgttataaatatgaacgagtccgagagagagggtgaaaaacaaatcgcatgcaaataaagattgagacataatgattttgtttaccgaggttcggttcttgcatacctactacacgttgatgtggtcacaa

SEQ ID NO: 70043 - DNA, 445 bp, Zea mays
atgtccttgagcttctgccatgaagtgatagttcctggccgaagagaagaataccatgtctgggccacattcttaactgccatgacgaatgatttggccatgacagctgcattacctccatatgaagatatgattgcttcataactcatcaaaaactgcttcgggtctgaatgcccatcatacattggaagctgatgtggcttgtacgatggggccacgggatagcctgcagttctactgccaagggagaagcatcatcaaaagtaaaggtatcatgattaaaatcatcataccatccatcgtcattgaacaagccctcttgatgaatctccctgtgttggggccttctgtcttgctcgtcttgagcaaggtgacgtacttcttcagtagcttcgtcaatctgcctttgaaggcagctagtcgagccatcttctccttcttcttt

SEQ ID NO: 70044 - DNA, 434 bp, Zea mays
gcgcacagacttcggctacactcgaccttcgtctgtttcatgcttcatcctggccgtgctccatattcataattctggatccgaatatacctgttcacataatccactctgaaaacattgtcatatcatgtttttgaggaccttctgaggacgaaggcccccaacaattctgctcatgaatttacagttgtcgagacgagtaagccacaactcttccctcttgcatcaacacacatcccaaacctgtgtaactagcatcacagttcaccgataatggattgtgcacatcatgctagactaatacaggcgccgtagtcaacttctctttcagcgcttcgaatgcctcttgacatttctgggtccactagaactcaactatgttgcctagcaacgctgtcattggtttcgcaatcgtcgagaacccttcaatgaat

SEQ ID NO: 70045 - DNA, 418 bp, Zea mays
cggatgtaggtgacatcaaatcatcgccatgcttataatccgtatcccttattgaattatactatgtgatatgctttgttttgtctagatcatcacaacaaacgatgataaacaagctttataatttccacggtggatagagacaataaaccacacatggttcatagctccgccacacattcaatacttagacggtatattttgaaatgcctagtatgatacagagtatagattacatgcattaaaagtggttgaagtgtctcgttagatagaaaaagcagtttataaagaggatattggatccacgttcattatgctcgaggtagttgcctcgtatgacttgtggatttggcatgtgaaagtcgcctagagggggtgaatagggcgaatctgaaatttataaacgtaagcacaacta

SEQ ID NO: 70046 - DNA, 327 bp, Zea mays
cccatgctagtcttagctattaagcatgcatctagaccggcctcctcttttgcaaaatcaactaaataaagtttgtcgtctaatacacccttaaaagctaatgaaccatcacttcttctaaagacagacacatctacatttgtatatagacaattatatcccatattacataattgactcacagatagcaaattatatccaagagactcaactaaaaacacattaaagatagagtgctcatttgaaattgcaatcttgcctaagactttcaccttgccttggttcccatcaccaaatatgattgaatcttgggaatccttggttttg

SEQ ID NO: 70047 - DNA, 202 bp, Zea mays
cgggaaccgtttctacgcggtgaccccctggttacgcccgttcgcgcaccgcgccttctcagtgcacgcccgcgcgcacttgccggtccacgaccgtccgtgcaccgcgccgtgcctataaagccttcctatgcgcgccccacttgttcccgtactcaccctcaccggccaagcaccgttccttatctacggcgagcgtatt

SEQ ID NO: 70048 - DNA, 451 bp, Zea mays
  unsure (1)..(451): unsure at all n locations
tcaacaacntaagcctgtggagaagatatatgtgtcttatggcaaacaacgaaactattacatganatttaaaaaatgtcctttattacacaaaaaataaaactgaatggaaaagactactatcaaggtaggatatttgtcaatagatgtgcttcgactctggcacagtgctattgactgtgcgagcttcagactgttctctgaagtccctttggtgttgagcatattggcccccttctggctgctggccttgttgcatcggtggtggatgcggatgctgttgccatgaatcttgatgttgactcgccgaagcaacaaaaactgcatggtgattgcctacatattctgggatgtaaggcgaatgatacgaaacagtgtgcatgatttgcttctgctgatcctgttgtgctgcagcttcggctatctccttttgcttctggatggtaacatg

SEQ ID NO: 70049 - DNA, 405 bp, Zea mays
  unsure (1)..(405): unsure at all n locations
tcggcgatgggtatacaatttggcagcagaacagcgcacatattattgattgctgtggtaacttcacacctactcatgtgtttatatagtactgcacgaaagaaggcgaagcgccaggatttttacaccacgcggaaacccgcttgcactctctgtgcggtggaccgcagagaccaaacagtaactctgcaaggcgggaccgctacgcgctgggaaattgaatctgttctcgactacgagctcacggaaagtgtttnttggaccttcggctccccgaagcctaagagacttttttcacggatcaagctcgttactaaaaacgatctatcaccgcataaggggctactgttgggcctatgcttcgtcgccgaatgtcttacacgaagaagcggtcttcggctgaaa

SEQ ID NO: 70050 - DNA, 463 bp, Zea mays
  unsure (1)..(463): unsure at all n locations
ntgtagtgcctaagcaaatgcccagccagcagaagatctattacactatctatccttacacattctacaacatgcatgaattcaaaaattggacccattcactttctcaaagatctcatcaaaatcaattaagacactagatttgcgcttaccaaccgatgtaccagtaccaccatcggtgctgctagagccgaccagattctcggttgccttcgcggccctccaccactgtcgtcgacgtcgacatcgatcgtagcagagctggcatcgatgccgagcaaggcagcaacgtctccccaaatgtcgtcttcatcatcagggacaagccctgccgcgtgaaggtcgtcattgccggtgagcggatagacatccttgtcatctgccatgcatggcaaccttcaccacatttgatcgatctccagctttgttcctcaatggtgcgtacaatcactattctcggtct

SEQ ID NO: 70051 - DNA, 489 bp, Zea mays
  unsure (1)..(489): unsure at all n locations
ggcaagctcatctaagattgcatctgctgcaattgagcaatatgctttttctctgaaanaagaggattatntgcaggggaggaagccgaacgttcaccaactaatggacgcatgagtgcacgtttttacttgactcattattatgcctctttggtggtggccttgcaatttttagtactcttattaaatggtccatgttcattttntgcagctgaatggtggagtgcatatggaggagagtacaaagaactacaaatgcttgcacgtcagattgtttcacaatgtctatcctccagtggatgcgagccaaactggagcacatttgcattggtccataccaagctgagaaatcgtttgggttatgagaagctccacaagttggnttatgtccactacaatntgaaattacgaatccaacatttcgagaatgacatgcatagtcttcaataaatgcangtcttcaaagatactgaattagatccatatagc

SEQ ID NO: 70052 - DNA, 490 bp, Zea mays
  unsure (1)..(490): unsure at all n locations
tagcanatcgtaatgcacaagagctaaatatngagtgagcgggagctttgtgccanagagcgtatcanatgagtctgcggtatggccgtatatatacgccaagggcgttgaaaattgaaagaccccgcttgtcagtgaatgttgctattctagcaaggggaaggtgttttttcggaccttcggcgaaaagccttcgtccatgtcgcaatttaaatttattaatttaagcaaattaatattgcgaggggctactgttggggaccttcggcctccgaaggtcctcacaaacaggatttaacagtatttctggagtataatgtgtgaacaggtatcttcggatccaagtcggcatcacagtagaccagagtaatacgaaggttgatacagcgccgaaggtgtgagcatgaaagcttcggcgcgacaacatgaagtgaaaccgacttaaagatgagaaggctatttagacctcgacagattactatagaattat

SEQ ID NO: 70053 - DNA, 490 bp, Zea mays
  unsure (1)..(490): unsure at all n locations
ctcagcttgcgtgaaaggtgaaagaagctgatagtaaaggatgtcatatgatatcaacaacttctctaccattgcttttagcttctcttcaagttgctagcaagcctgctccctcctctctgggcccaacttctcatctttcatttttttctcggatgacgtggatcttatgatacctagaaaggaggccaaggcctgctccctcgcctctgccttgtccttaaagactttctccaccatctagtgtgaagtgagcctcttggctaggtcatgctcttataaaatgagaacctacttccacacccatatggcagcgaagtttgcctctaactcttggcacaactcaagattntcactntccttggcctttgcatcctcccaattgtgtttgtggtctacttttactgctttagtgcctcaagctccttntcagccttgaggatagtatatcctccatacccttccaaaagagggtatccagcataactat

SEQ ID NO: 70054 - DNA, 379 bp, Zea mays
taaaataaagacgcactggtgcaaaccggatcagacgattttaatcacgactgaacaagtttgaacctgctcaactaatatttgataatctattgaacaaatgcgaagcagggaagaatatagctatagatttgccctacacaaaatctactcaaatgaataatatgaaccaaccactgaatataaagcgcctgacaagaacacacaagaacactcgatataacccgaggttcggcaaccaccacaaaggtgtgctactcctcggtgaggaacccacaaagggtcgggtcttttccaaccctaatcctccacaagccgaccacaaaggtcaatgcaatcttctctcaaatcaactcaatgagcgggtgatacacacttc

SEQ ID NO: 70055 - DNA, 456 bp, Zea mays
  unsure (1)..(456): unsure at all n locations
tatggagattcttcatcccaacatgggctagtcggcggtgctagatccaacccatgttagtcttagcaattaagcaagtgtcgagttcagctctatcaaaatctaccaagtatagctgaccctccaacactcccttaaatgctattgaatcatcacttcttctaaagacagtgacacctacatcagtgaaaagacagttgtaacccattttgcataattgagatacagaaagcaaattgtaatctaatgaatctataagaaaaacattggaaatagaatggtcaggagatatagcaattttacccaatcctttgaccaaaccttggtttccatccccgaatgtgatagctcgttggggatcctggtttttctcataggaggagaacatcttcttctcccctgtcatgtgggttgtgcatccgctgtcgataatccaacttgagcccncggatgcat

SEQ ID NO: 70056 - DNA, 329 bp, Zea mays
gctggcgttcatggatagcaacggctccctgacccgaacgtatcttcatgcacagatagacacgatgaaggattgctcttaaagcattgaggggaccactaccgataattgcattgtaagggtattccatgtcaacaatgtcaaacacaacttgctcaattctagtggtgttgatgaaccctgaaggcactgacatggtgattatgcccaatgctacaatctgcctttctcctaagccacatatatgatgtgtagcatcatgaatcctatcttctggttcttgcatgtgtctgaaagccttaacaaatatgatgtcaactgcactggct

SEQ ID NO: 70057 - DNA, 412 bp, Zea mays
tgtaaggttcttcatcctcacatgtgctaaacggcgatgtcttattcagcccatgctagtcttagcaattaagcatgcatctagaccggcctcctcttttgcaaaatcaactaaataaagtttgccatctagtacacccttaaaagctaatgaaccatcacttcttctaaagacaaacacatctacatttgtgaataaacagttatatcccatattacaaagttgactcacagacaacaagttatatccaagcgactcaactaagaacacattagaaatagagtgctcggatgaaatagcaatttttcctaaccctttcaccttgccttggttcccatcaccgaatatgattgaatcttgcggatccttgttcttgacgtaggaagagaacatcctcttttcccccgtcatg

SEQ ID NO: 70058 - DNA, 293 bp, Zea mays
  unsure (1)..(293): unsure at all n locations
gtccatgttgtgcttgaacattctaatccgagcccgtatattatttggtgaccgccacatagtnggcgagagtctgcaatccgaatccagcatgttcaaatccttatccctttcagccttctacctgattcctaaacgaaacacgagtgcactggtctccatggtgctaaatatgatggacatgaactcaggactgtaatcacctgatggctgacgggaccagcacgaccgcgagtaatgggaccgacacatggtactncgattggtatacatgcatcactactgtggatgtc

SEQ ID NO: 70059 - DNA, 400 bp, Zea mays
  unsure (1)..(400): unsure at all n locations
ntagatatgacaatcaacgtcgaagctgagaagaacctcgatctgagtgacacgcttaaagctcttaaggatgaatgtgttatctttgcggcccaatgtactgctcggctaaaatgtatcttcaattctgtcggagccatgtccgaagaagccaatctttctgccgaagatatcctcggagcacttgaatgtattgaaaaagaagttgacgtcctcgatgaagtcataactggccatggtgatttatgtctgctagtaacttctcgtggtacggctgctgctttcataaaagccagatgcaatcatgcaagagccgtcaacaggccaaactttatcctgtcgccatctgaccttattgacattctcgccgaaggccgaagcatatgcaatatatttatta

SEQ ID NO: 70060 - DNA, 56 bp, Zea mays
acacaagaaactcagcttgctagctcagtggagagcggtaacgctcttcttttttt

SEQ ID NO: 70061 - DNA, 366 bp, Zea mays
  unsure (1)..(366): unsure at all n locations
agagcactaactcaagttcttttcttgcngagtgttgttttactcaaatgagagtttaacttgaagcaacaccaaatgatatgaacaaagaatagtgcaagagaacttagagtaagggaaagcaaacaaatcacaatcaaaagcacaatgaacacgggtgatttgttttaccgaggttcggccctcgaaggcctattccccgttgaggagtccacttaaggacgggtctttttcaaccctttccctctctcccgatcacacaaggatctgcgagctcttcttcttctcaaggatcactctcgatcccacaaggaccaccacaatctttggtgtctcttgctagcttttacaagcctccaacacttt

SEQ ID NO: 70062 - DNA, 487 bp, Zea mays
  unsure (1)..(487): unsure at all n locations
tgtcagttntctttttcataaagtgggtntctctgaaaacatatattatatattagagctaatcctcaccttatggttccattctcctcttaacccatctcaagagaaaagcatcttacccaagaaggtaccggaaagctaatccttgaaggctggaagggaccgatctggtcaattagtccaaaggaccaaccatgagaatcaaagcattgcccctaagttaatgtaaacaggaaacgagcacagaaaaatttattaccatacacagaggcaaagattcttggaaccagagaccataaacatcaaggtcatcgaccccaccactcactcgtgcccccgcacaagtgcattgcctccatgcgcactaccaccgcccacaccccctttgctgcgcacccaccaccagcaacaccaggcccactcccctttgtcgcaccttctgccacatggcacatgctccatcaccaccactccacaccctaagcac

SEQ ID NO: 70063 - DNA, 484 bp, Zea mays
  unsure (1)..(484): unsure at all n locations
tnctctganagacctccctgngcactcacattggtatgtactgtgtatattagtatactcaaaccagaatgtttctatgcaatctttaaatgttctcaatctcatgtatgcatgtgcgatgtgctggtggcctggagtgtgtgcangcctagtatcttttgagtgtgtgtgtgtgtgttggttttcctttttgtacggttctggccatgtgcctttttttcttctcctattgatacaaagatacgcagctgtcctgcgtatttgagaaaaaaaatgtgtgtatatatgctgtgaattttgtatggttnggcacttactttcattgaacaagagtcaatttcatccaattcgatgtgaaatttctggatgtggtttggtcactaacatttgtgattacacaaacctgttttgcccttcttatctagcacatacccaggatttttatatctcattatgtgtacaggacatgggctattcaacacaa

SEQ ID NO: 70064 - DNA, 409 bp, Zea mays
  unsure (1)..(409): unsure at all n locations
cctactggctatatatattacctacagtccttanggactaatcatccattatcaatcccaaggttagtaacaatcatcatcgtctccatcatcaccagaataatccggatcatcgccttcaggagcagaggcttgagctactggcactggcggtgctgaagatgaagctccaacgacanagacattagactttgacaacagagtgggtgttgccaaaatctcctccaagctgtactccaagatcactccattctccacatgtaggtggtgtagctccactgggacttcttacaccacaactgggtagacaagagcctgtctgggtggaaggatacttgtggtgttcatgccggtggtttggagagtgcgcactatctacaagtagaaatggtcaccttttgttttattt

SEQ ID NO: 70065 - DNA, 434 bp, Zea mays
  unsure (1)..(434): unsure at all n locations
ggctaanagttntttcatctagtggctnggtaaaatatcggctaattggttgtgggtgttaacataagcaatttcgatatctcccttttgttggttatctctcaagaagtgatactggatgtctatgtgcttagtgcgactgtgttcaacgggattatctgccatgctgattgcactctcattgtcacataggagagagactttgctcaacttgtagccatagtgcctgagagttttcctcatccagagtaattgtgcacaacaatggcctgcagcaatatactcgacttcggcggtggatagagctactgaattttgtttctttaaagcccaaggcaccaacaatcttcccagaaactgacaagtccgtgatgttctattcctgtcaattttacatccggcataatcggcgttggaatacctaattaaattaa

SEQ ID NO: 70066 - DNA, 472 bp, Zea mays
  unsure (1)..(472): unsure at all n locations
tgaaggactgcttcngcaggagagcttccgaacgtgatgacttgttcggtccacggagtcgctttatccgagcgcaagttacttatcgcagaaggtgatgagtgaggtatccgtatcccggaggcgtaggagtccctcggctcggtcagccttggctgcttacgtgtacctcgtcgtttccaggatccgctttccgaagtagtcaagaagcacgaaagaaatcctgctaaaaagagatcctttttcgaggaaaaattcgacgcagagggggtctccccccttttagcccccgagggagggtcgggctntgccgaggctacgccgacccttccttgacgactaaactntgcgtaggtgcgaggtatatgaacaacttgataacatcttaanggtagaagcgacctacctgtctgatgttccaagcgttgccgtagatctcgcctagaatgttggcaacttgtatgttccgggc

SEQ ID NO: 70067 - DNA, 451 bp, Zea mays
  unsure (1)..(451): unsure at all n locations
tgagtgtggactgtttgcaacgccgaaggaccagcttgcagtctgtttggcctataacagactaaaggtaaagcttcttcctttttgcttcgaaacatataaagtttacatggtgtggtgttgagttactctttgtaatatacagtgacttattttaaacaaagccttaaaggaacagaaaggatgcaaagataagcgctcgaatagccatatgcaacatgtgttctgaagttattgggcttcagcatgaagttgaagaaaaagaaatgatgttgaatactttggccacggatctaattacaagacaaagtaaatttcagaaatcttttgagcaaaatgataataaaatttcaaagctagaggccgagaactcacacaatacgaagcgcattgcagagctcaaggaccaaataaaagagaaatttgaagtgcacaanggtgaagtggatct

SEQ ID NO: 70068 - DNA, 464 bp, Zea mays
  unsure (1)..(464): unsure at all n locations
tacctcacacacgcangttcgcgggcgatgggaccgattcttcttgcangcgcgaggcggcgagggatgcgtgcggaaaaaatggagaggtcacggcggcttgtgaattgggatgggatacggattanggtggaaattgaagcgcggaggccggctctatcggctntcttctgcagctcctgattcttcgcttatttctaacttaagtctgtaaacaatactccctctctcctctccctatgttcggatttataatttgtatgactttttatctcaagttttatcggctcgtcttattaatattcataattattattaattgttactataatattgtttactatataatatatttttagtatggctctaaatttttcattnttcatagaaattgtgaataagataagcgggtcaaatttagtataaaaaatcaaacgaattgaaattagaatagagggagtatc

SEQ ID NO: 70069 - DNA, 459 bp, Zea mays
tcagctccatctatgttatggatagcttgtgagtctgtccatttttcttcggcccttctagcagcttcctgacttccatgaatagcaatgggcccttggtccgaaggtatcttcatgcaaagatatgctggatgaagaattgcttcgaaggcattgagagtaccacgaccaatgattgcattgtaagggtattccatgtcaacaatatcaaacacaacttgttcagtccttgtgttgttaataaatccgaaggttactggcattgtgattttgtcgagtgctacaatctgcctttctccgaagccacaaaggggatgtgtggcatcatggatcttgtcttctggctcttgcatctgtctgaaggctttggcaaatatgatatcagccacactacctgtatcaaccaaaacattgtgaaccagaaatcctttgatcacacaagagataaccatagcatca

SEQ ID NO: 70070 - DNA, 469 bp, Zea mays
  unsure (1)..(469): unsure at all n locations
nggaggctctngctagcctntacaatcaatgggagccaaatctccaagttcaatgatcacaataacaacacacactctntgctttagctctctatcaaggcactatcataaatcaagtacacgagactatctcttttcttgattcactcttttgtggcacttggtaggctttgatcacttgcgagtgttgcactagtgtatatgagttattgatcatctcttgtgtattgaatgggctagttgcgggtacttatagcccccaaccacctaaatagttgttgggatcaaatgccaaaatatgttctaaactcgagtgcaccagatctgcaacattgtttggtacgatgcacatcagacctctaccatccctgcagttttagtgaccattctgatacttctgtcatcttatcaagtacaccaaaccggtcaggtgtcccatcagacccgccacatcatcgccacatcattc

SEQ ID NO: 70071 - DNA, 482 bp, Zea mays
  unsure (1)..(482): unsure at all n locations
acaagatactcaagcttggcaccatctgaattcagatagcttataccttcttatgatggccagaccgaaaggaccaagcaaattcttgaagacatgttgagagcctgtgcgttgcaagatcagtccggatgggacaagcgattgccttatgcagagttttcctataacaacagttatcaggccagtttgaagatgtcaccattccaggcgctctatggaaggagttgtanaactccgttgcaatgggatcagcctgtggaaaagcaagtgtttgggccagacattctgcttgaagccgaagagaacatcaagatggttcgagagaacctgaagatagcgcaatcgaggcagcgaagctatgcagacacaagaagaagagagctgagtttcgaagtctgagactttgtctatctgaaagtgtcaccgatcagaggagtcagaagattcggagtgaaaggcaagctagcacctcgctacatcgg

SEQ ID NO: 70072 - DNA, 469 bp, Zea mays
  unsure (1)..(469): unsure at all n locations
tgtgatgctcaccaacccgttaaatcaaactagaccactccttatccgcgggaacgtatactcccgtgctcggtttccgccgtacacatggacaagccgttctcagggtgttcgtgccaatttgttaggtgtcccgaggtccctggtagtcgctaatgcctccccggtagtttgccgtagccgccatcgccggccatggccggtacaaaccacgtcggtgacaatctatgtgtgcgccatggccagngagcggtttggggaagaaaagaaagtaaagggacttgtccgtaagttgtcagtgactcataagcatagtaaccgaacccaacttccaatagccaaaaccgtgagggccttcgtgcaaagtcgccagcgcgggcgcgcgcgggcgcctttcctctctgatgttggggccgctgggctgaatcngcccatcactgttggagcattntcctttntcttttacaac

SEQ ID NO: 70073 - DNA, 479 bp, Zea mays
tcgcacctctgaattaactcggctgcatcactcttcgctgttggcctatataatcctgacctgaagaccttcccgactagtgttctggatgctgcatgtactccacattgcccagcatggacctcctccagaagtcgtttcccagtagatgggagaatgcacttcatgaagacgcctgacgcaccccttctgtataatgtttctccaatgagtgtgtagtgggctgactgtctggcgatgcgttcggctgcatttttgtcatctggttcctctttattctttatatatctgatgatcggccttctccagtcatcagggtctgactcgggttgatccacgatattacattcttctgcttgatctgttgagatgcttggtcgtggtatttcttgcacgaagactccgggtggaacctgagttcggctggatcctaacttggacaatacatcagctgccgtgtttcgatctctttcacatga

SEQ ID NO: 70074 - DNA, 438 bp, Zea mays
  unsure (1)..(438): unsure at all n locations
tgtgaccacatgtacattntgtcgaacaccagacagacgctatgtattgttcgtgcccggngagaatgaatcagctccaaaacagctgtagcatccttgccaaaggcttatgttgctgcctatgaacagcttgtccagattgtcctcctccgggaataggctccaaagtagacgaacacggacgtggcgaggcagccgccgctccacgagggcgccggatgtccatgcacgcggccgggtccttggcctcgtangcgtggaggaggggctgctgcaacatgccccgtagcgcggccggcgagccgtctggagggccgcgcgacgcccgctcaccatctgctatgcacgcacctaaagcagaagcgaacagaatggagtagagccgagccgatcctgtcgtatgtaattcgagccgtctggaaaggtgattgtcgtggg

SEQ ID NO: 70075 - DNA, 474 bp, Zea mays
  unsure (1)..(474): unsure at all n locations
taatacttcggagacataatatactgggactngctttatagtttgttcttcaagcttctcttggacaagcaccgcacttactgcagagcgtgaagctaccacatacaatagcagaggagcccctggcgtgggtggagttagcgttgttagatctatcaggtattgcttcagctcttcgaaggctttttgctgagctgatccccattgaaagacttctgccgacttcagcacttcgaagaatggtaaatttctctctgttgatctagatatgaatcgattcaaagatgccagtcttcctgtcagccgttgagcccccttctttgtgcttggcggctccatccgaagaatagcttcgattttgttcggattagcttcgatccctttcgttgaaactagacaaccaaggaattatcccttctttactccgaagacacatttgtctggatttaatttcaggccagcttgcctaaatta

SEQ ID NO: 70076 - DNA, 459 bp, Zea mays
  unsure (1)..(459): unsure at all n locations
tatcttttgggctcttcatttgtctaaaagctntgacaaatatgatatctacaacactgcctatgtcgaccagaacgttgtgaactacaaaacctttgattacacaagagataacaatggcatctctgtgcggataatctttatgacaaagatcatcctaagagaaggtaatatgaacaagggaccacttggtccttatgttgggtccttggacacctacatgttgcacccttctttaggattttcttctattttttgttgttgggtttgaagctcaagaccctagtgatggggagagtaagcttctccatgaaagctgacaaagcttgacgacttgccatgctcttcatcgtgatgaagctcgtcgtgatcgtgagatcaccggaggtgggcgctacatgtgagtaattcattttaatccctgaacgcgctgaanataagacaacacaagttaaaaat

SEQ ID NO: 70077 - DNA, 451 bp, Zea mays
  unsure (1)..(451): unsure at all n locations
ggctttgaataaatgtaagttatgtaattcgcttccgcatttctttatctccgacgttctgtaatgtctgcaagacgggtgaaacgttcctggtaaggtaaggaaagataccgaacttgtcaagtgacttatgaacatctacagggtgtctgatgtctgttagacaaggacaactgtaggtgggcctaattacttgggaggttctgtcacagctggtatcggagcgtagcccttctttgcagatattatgaggcatcttcaaaaggattttcaaaagtcttacctaaaaattcttttctcttcttacctaagtattctgaagagtctatcttanagaccagataggaagagtgcaatgtatagaaggttgaatcgactaaggttgattctgtacttacacatgcatcatgctaagcactatactaataacattntcccccttagaaaagat

SEQ ID NO: 70078 - DNA, 455 bp, Zea mays
  unsure (1)..(455): unsure at all n locations
tagcannatgtagtacacaagagctaaaaattgagtgagcgttatcagttggccagaaagcgtgtcgaatgcgtttgcggtatggccatatttatacgccaagtgcgttgaaaattgaaagaccccgcttgtcagtgaatattgctattctagcaaagggaaggtgttttttcggaccttcggcgtaaggccttcgttcacgtcgcaatctaaattcgttattttaaacaaattaatattgcgaggggctactgttggggaccttcggcatccgaaggtcctcaaaaacaagatttaacagtatttctggaagtataatgtgtgagcaggtaccttcgaactcaagtcgttatcacgccaggagaagaccaggataatacgaaggtcttgatacaacgccgaagatgtcagcaggaaagcttcggcgtggttgcagaaaatgaaaccgacttaaa

SEQ ID NO: 70079 - DNA, 469 bp, Zea mays
  unsure (1)..(469): unsure at all n locations
tacccatgatgaggcatgtgaccagttaaaaggtcctcgatcatcttgcctacatcgacacggtccttaatcgactcagacggagacactacaccgagactctcttctcgtgcaagtcacccgcccggtctcaactttatatttaagaacccaaagtctggtacctggcagaggtacatcttttctgatgttgaatccatcatggccatgatggatccaccatcaagttntatttttgaaaacatcccttccactgtgaagcatcacctttttgttttaaaacaaaacatttgtttttctaaattaggactaagcattagaaaaccttttaataaaacaggtgatcaaggaatggtaaacagctccaaggaaggaaatgcagcaattggtttagcacacaacttctatcacctaatgcatcataaaaggtgataaagatttaanaacagcaggaggtggcaaatgcact

SEQ ID NO: 70080 - DNA, 483 bp, Zea mays
  unsure (1)..(483): unsure at all n locations
nttaggttntctcaacttgggttaggtcttacccctttaatttctatttanggttaagttccctatccagggttctagttgcaaagtgctataacaatacaacttgtttgaaatttttgcctagtgaatgcactctangtgtgtcaaacatatgcaatgccaatgcttatgatgccatgctcaagttttagttacagtaacaccaggggtgttacatttcctatcgtaaataaatgcatgattcttttgattactactagccataggagccttccctttttccttgttgaaaatgggagctctttggtttgttaagttcttggtttccctttgaaaaccaagaccatccttaatagagggatgtctaccaatagtgtaggcatccctagcaaaatttagttcgtcaaattcattcttgctagtcttaagtggggcattaagactagccacttcatcantttaattggaaatggnattaagtgt

SEQ ID NO: 70081 - DNA, 481 bp, Zea mays
  unsure (1)..(481): unsure at all n locations
tgcattgcatgtttaaattacttgtattgcatctagggcttgtctaacctagttgacataaccgccaataaagcgagtgaataagcttaactcgggtcaaacttgacaagtcttagttntaagcttttagcacttaaattcttactttttatgcaattgttggttcttgaaatatgcatgaggcactgcacttatggggagtattcaaaactcaaatcactcatgaaaacccctattgcaagccaaaatgcaaatttcaccatttgcctattttctctaaaaattatctagcctatggcaaaatattttgaaaaatatatgagggtgccaatacctgtcccaaaagtgttattttgtgtgattataagttgggatttggtttggttggaaattaaatagaacaattcaaaattttccaaactcccctctgtctgtgctcaccggacagtccggtgtgcaccngacactgcactgtgcaatg

SEQ ID NO: 70082 - DNA, 439 bp, Zea mays
tctgtgattcgagttctacaccctcgcgcacttcattcttctccagataattgtccacatcagcggcgacaaacacaaaatcatggtcctcatcctcaataccaagtgcctccctgctgtgcggcatctcctccagggaggagaagggcgccgccgagttagcacgatcgacgtctgtggaggagtgcagggctatatcgcgctctatcttgtcgagctcggccagaataatctcctggcgaagtcggtccttctggagcagcgacagcagcgcgtccctgatcaccaacatcgacgagtcttctgcaagagcctcatgcccccgaggatcggggaaccggcggtatcgaccgccttcgtcgccgcacgaggcggtttctcggtctcggccggcgatcaactcgatcgatttggcaatggggtcctctggagagcaatg

SEQ ID NO: 70083 - DNA, 469 bp, Zea mays
  unsure (1)..(469): unsure at all n locations
ntaccatgattcccaaaagctagcatatccttaagagtcttttttcttatatgggtaagacttgcgaaagtacactccgtactcacggtttttgaacccatgttgttgcacgtactacatttgtgttgttgttgatggtgctaagtgccactgggctcgaccttcttataggttaaagtagctctcctatacttcttattgaggattgtcattgagctagcatatatttcaaacttataaataatttataacatttcaaagtttatttctttgaatcacttttgtaatcactccgataaatataatgtaaatttgttgtaacttgtaagtttttgtaataaagaaattccgtgcaaaatgttggtgtgtgatttgtgtttacttaatcttgtgatcctagttatantgtggttatccggggtccttgggacactcggatggatcctgttaagttatccggtgcacatgc

SEQ ID NO: 70084 - DNA, 486 bp, Zea mays
  unsure (1)..(486): unsure at all n locations
ttagacactcagcttctnagggagagcacattgtatgagtaaccaatgctaattatgagaataacatggtttgtagcgcatgccaagcatgagagcaaggtggtgcccataatccaaaacatcatgacgaccgacaagccactggagctactacacatggatctattccgaccgatcgcttacataagcatccgtgggagtaagtactgtctagttatagtggatgattattctcgcttcactagggtgttctttttgaaggaaaaatctcacaccctagagaccttatagggattcttgagacgggctccaaatgagttcggcttgaggatcataaaaattagaagcgacaatgggacggagttcaagaactcacaaatcgaaggctttcttgaggaggagagcatcaagcatgagttctcttctccctacaccccacaacaaaatggtgtagtggagaggaagaatcaaactctattggacatg

SEQ ID NO: 70085 - DNA, 481 bp, Zea mays
  unsure (1)..(481): unsure at all n locations
ntaacctctntgacaataaaattacttctcctagtgttaacaaaattgcataaaatgcaggaatgaatgtttgagaagttaaactaggtatgaagcacggctaatgtatgaacatgctttctcttcctttttatacaagatatgtnaagaacgcctggaacaaggaagattgagatacaagttaaaatgaaaggaagtcgntttacccttttgtaccttcgcatagagatgctctcttcattgtgctttgtccttagtcttagtcgcttaagacctatactcaagacaatatatggaaatattttgcacaagagagagttttacaactagtgatcattntctatgtcattgttagcatatcacaaattgcatagatgtaccatgaattctccttttaacttagtgcataacaagagagatattggttgaaattacatgaggcactaagaagcataagtggtaattgaagtattcaatgatc

SEQ ID NO: 70086 - DNA, 489 bp, Zea mays
  unsure (1)..(489): unsure at all n locations
tcggatagcccatcttatccatcatctcccgacaaacgtcaatcttctttgtgtctggcaggcagtatagttaatcatctttgacattgcctccataaaccagagaaccttgagaatacttcaagtctttcgcgtaatattgcacttcagcaatttgttcttccgtcaattgtttccccaaagcatggcgaacattgtatccaagatcatcaagagacaccgcttcaggtattgttagtaatattttctctagtaggctttcatttacctgttctattggcctgcattctgaaggtccagccttagcgtaatcaggagcaataccttcgtcaatagccttttcgaattcttcaattntatctttggaaatcattgtaggagcaggcgtagccactttcgagggcctcagaacaacgtctagcacgttcgccatcccttctccttcttangaagtactgctggaacggacgctatcttcggcagctcttg

SEQ ID NO: 70087 - DNA, 467 bp, Zea mays
  unsure (1)..(467): unsure at all n locations
tcgacatccaatcgatgggaagcggtgggagatttaatgtttattacgagactctaccgatgaaccaagagatgttatgttcacactgagtactgatggaatgaatccatttgctgagaggagcagcaagcttcgcncatggctactgatgttcaccaaatacaaccttcctccatggttgatgcagaaacgaaagnanattntgttaaccattcttatttctagacctacacaacctgaagttgacatggatgaatttttggagcccttaatggaggatatgaaaatattgtgggacaagtgttcaaatgttggatgagtatcgtaaaggttcgttcacactaagagncaattattttgttatgatcaatgattaccctgctctcttcacattatcaggccagtttaagggaaagggtggttgcacagtatgtattgatggaactacttacgtgttccttactaca

SEQ ID NO: 70088 - DNA, 478 bp, Zea mays
  unsure (1)..(478): unsure at all n locations
tctaaagggagaacacattntaggactaacaaatgttcattttgagaaaggcagggattgtagcgcatgtcaagcaggatagcaagttggtgcccatcatctacacaagaacatcatgacgacggacaagccactggaattactccacatggatctattcggcccgatagcttacataagcatcggcaggagtaagtactgtctagtaattgtggatgattattctcgcttcatttgggtattctttntgcaggaaaaatctcaaacccaagagaccttaaagggattcttgagacgggctcaaaatgagttcggcttaaggatcaaaaagataagaagcgacaatgggacagagttcaagaactctcaaattgaaggtttccttgaggagtagggcatcaagcatgagttctcttctccttacacgccacaacaaaatggtgtagtggagagaaagaatagaactctacttgacatg

SEQ ID NO: 70089 - DNA, 471 bp, Zea mays
  unsure (1)..(471): unsure at all n locations
tggacgtgaagagagccttcctcaatggttcattcttgaagaggtctatgntgagcaacctcccggctttgaagacagcgagtatcctaaccatgtttataggctctctaatgcgctttatgggctcaagcaagccccaagagcatggtatgaatgcctaagagatttccttattgcaaatggcttcaaagtcggcaaggccgatcctactttattcactaaaactcttgacagtgatttgtttgtatgccaaatttatgttgatgatatgcatattgggtctactaacgaatctacatgtgaagaatttagtaggatcatgacacaaaaattcgagatgtctatgatgggggagttgaagtattgtctatgatntcaagtcaagcaactccaagagggcaccttcattagccaaacgaagtacactcaagacattctaaccaagtttggaatgagcgatgcaagcccatc

SEQ ID NO: 70090 - DNA, 473 bp, Zea mays
  unsure (1)..(473): unsure at all n locations
aaaactaagcttaccctaatagggattaatgtggtaaaacttaacctaatatgatataacctaaagactctanggaaagagtcataaaatatccccaaaaacaaggttgaatcacctttatacccctaagataccagaaaccctaattggaaccctggaaaaccctaaaaccaaaccctaggggcttatgtgcaaaattagtccacttttggactaaagtgcaaaaaccaggttaaataagtatcctaagtcatttggttcacaaatgtgtggacttgtaagccaaatatttgattttggacttatttgcaaaagagtcacatttgaactcttttgactaagtctaatttcagtgtattgtgctcatctttgtgaccttgtaacttctaaacaaaggagattttgccctatgtcaccacaccaaatttgaagatctatcaaaggagaacaacttttcttaagaaattgagctc

SEQ ID NO: 70091 - DNA, 463 bp, Zea mays
  unsure (1)..(463): unsure at all n locations
tcggtatctntacttgcttcttcttcctgagcccctgtcgtttagtctgcaataaagactgctaacacctgngactgaatcgaagatctatgcacataatcaatgtagaactcattgagtttcgcagcccactttccaatccttccagtagcttctctatttctcataatatccttcaaaggctgtgaagaaggaacaattatatggtatgcttgaaaataatgtcgaagcttcgtggaagccatcaaaacagcatacagcaccttctccaattctgtatagtttttctttgatagactaaggacttcggagacgaagtatattggggcttgctttntggtttgcccttcaagattatcttggacaagtgtcgcacttaccgctgaatgcgaagctgccacatataacaacaggggagcccctggcgttggtggagttaatgtcgttagatctatcanatact

SEQ ID NO: 70092 - DNA, 430 bp, Zea mays
  unsure (1)..(430): unsure at all n locations
ntggcttagcgcanagacagtgatggagaatgaaaccgacctataggggaaaagactgcttagtcctcgacagattactccttagtcaatagaaaatgtcaaggacttggatgtaattttacccaggttgcgtcatgtgcctataaatagatgaacagtaacaccgtactgttcacgctgacttgtattcactcgcatgtcactcttggattcttaccttctgtcaagccgaaggtatannatgtactcaatatcattaatgtttgttcatgatcatataatgagaatatagataatctaatgatttgatccgattattcacattctttatatgtaacatantgtccttgctttcattacatattgagatgatggaggtatgtccttcataaccttcgtctaaagatcattatatcctaanggagataat

SEQ ID NO: 70093 - DNA, 474 bp, Zea mays
  unsure (1)..(474): unsure at all n locations
ngtgtgtntcttgatacctcagtagcaatattaacactttttcgtgagttngnatctctatagtatttaaacttggttgtgtgctcttaccttcctagcttagttatacactagtggacatgcttggaacctatgttgcataacttctttacggtagagataacatcacttagtcaaaactatagttgaacataagatagcttagtttaattgtataggttttggctaagagaaaaatagagaccatactttatacagaaattagattgcttattcaccattgttgcactgacactattgatatattgagagaaggaaagaaggatacctctataccatcntcatttaacggcgctaaggccctcgttgctttagctgtagatttctaaatatctgattctagttgtgagctgtgggaaagctactgtgagttgtgagaaagttgaaagccgatagatgctaattgattggatt

SEQ ID NO: 70094 - DNA, 423 bp, Zea mays
  unsure (1)..(423): unsure at all n locations
acttcatactcagcttgaactggctactcgtaatagaaactttggttgaagaaagattgtttcttttacaagtggcaaatatttattctctaaaatattctgcattttgtcttttgaccttgtattctaacgtaattgagcctgaagcatagttttattgccggtaaaactacatggactcaaaaggtctggattgtgaagatgatcagcacagattatgcgatccgacatgtcttgattcatcactgccggttgcaccatattccaaccttgcagacagtagaccagaacctgcaacgacaggagaagctttctgaanaattcacctgtgcttgaaccatccgggccttttcgacagaccgtctgcgacattaaggtgtgtctcgtcagaaactatgcaacactcgtattcacactatggac

SEQ ID NO: 70095 - DNA, 467 bp, Zea mays
  unsure (1)..(467): unsure at all n locations
tgtggcgtnctcnggcgtcctgccgcagccgaagtaccaagtctcttacctggaagcctcggggccgaacccctcgggcgtggtagcgtcgcatagaccgctgataccgcgccgagtgtagtaaggccatgtcccaagcctcttccagctggtccagtgagtcttctcggctggcctggttgctttggtcatcgtacgcctttgtcctcggggaaccgtattctaagtctgtgtgttagatagcctcagccccatagactagaaagaacgacgagaaacccgtggctcggcttggcgtcgtcctcagactccataccaccgagggtagctctttcatccatcgcttgccaaacttgttgagatcgttgtagatccttggtttaagtccatgcaaaatcataccgttggcacgctccacctgcccattcgtcatggggtgagctacggtggcccagtccacacggatg

SEQ ID NO: 70096 - DNA, 481 bp, Zea mays
  unsure (1)..(481): unsure at all n locations
actaagcttcgatgtcatcggtagcacctgtgtctcgcgcctgcgctctatcttcttacagcacgactgtggcacatagcgaagaccccgacaatccccttcgccaggcacacaaataggcctcgaccctgacccctaccttggccctgtcctctacctcgaccgctacggtccatcagacgccaggcaacggcagcacgagatgaggtctcatgaagtgaatgctaaggagctggctcatcaaaagaagtagggcctcctgaccctgcgggagcccgcttggatcgtgccgctgggttactagagtcaacccagtacgacacgtagtgcgagtgtttgatgggctcgtcaaaatgaatctgggtaacggctntcattatcttcataatgtatggagcatggagacaccccttcagaggagaccaagatgcccatagaaattcttcccagatcatgtcagacacattgaggcgggcaatgc

SEQ ID NO: 70097 - DNA, 470 bp, Zea mays
  unsure (1)..(470): unsure at all n locations
tatgaaggttcttcatcccaacatgtgctagacggcgatgtcttattcagcccatattaatcttagctattaagcatgcatctagatcggcattctctttcgaaaaatcaactaagtagagcttgtcgtctaatacacccttaanagctaatgaacaatcactccttctaaagacagacatatcaacatttgtaaacaaacaattgtaacccatgtgacacaattgacttacagacagaaggttgtacccgagcgactctactaaaaatacatttgatatggagtgctcgtttgtgatggctatctttcccaatcctttgaccttgccttgattcccatctccaaagatgattgtatcctatgaatccttgttcttgatgtaggaggtgaacatcttcttctccttcatcatgtggttcgtgcatctgctgttgataatccagcttgangccccgaatgcataaacctac

SEQ ID NO: 70098 - DNA, 485 bp, Zea mays
tggtgccaatggagaagcagaaatccttgaagtcttggctgtctatctgcttgccgttgtcaactgttagttcggacggtactccgaagcggcaaacaatgttctgccaaaagaacctttgggcagtttttgatgttattgtggaaacagcccttgcctcgatccatttggtgaagtactcgacagcgacgaaggcgaacttaatgttcccctgagcggtgggcaggggcccgacaatgtccaggtcccagcgctggagaggccatgtgtgggcgatcagctttgtatactgcgatgggctgcctgaccgaggagaaaatttctggcaggcttcgcaggaccttgtgacccgatttgcggcgcagatcattgcgggccagtaaaagccttggcggatcaccttagcagctaggttggccctgcgtgcgagccgcacgtgccactgtggacttcgcgtaggatctggatgccttcggattcggtga

SEQ ID NO: 70099 - DNA, 339 bp, Zea mays
  unsure (1)..(339): unsure at all n locations
cagagcaacttcaggctcatttatgtcagaattcttcatcggactaaggcatgaattctatagaaaagtcattctccttccatagatctacaatattgatgtggtgacctagggcaaaaaccctataatttgaaagatacaatgctcccaagttgagccctcaacactgaatttcagacttagaatacaacctaattgaggtccatcttgcatttaagtccagaactcaatatttggctttcaagtccacacatttgtgaaccaaaggacttaagaaacttatttgacttgngttttgcactttagtcccaaaagtggactaattttgcacatatgccc

SEQ ID NO: 70100 - DNA, 461 bp, Zea mays
  unsure (1)..(461): unsure at all n locations
tgacggatagtgatgaagctgntgcgaaaaaagcactatagattatttttgaattaactttgtaaaagatactgtaatttatgaatcaaacactactctgtaaatntgtccataccttgtaatatatntttacctttccatccatgtatgaactgctttgatgtggacaaaacttgtattttttgagccgaaggcgaaaaacaccttcccttcttttcgtacacaacgaagcataaatttgcttcttttgtactcatcgaagccttgtcattagagccgaagcaactgtctgtacactatgatatgatgatgatgattctacgaatgtctaaatgaatgtgtatgaatgtgatgaatgatgtgatgtaatgtgcanatgaatgtccaaacacacacttacgaagccacacccagactctgcatccncttangaatgaacttggagtcttattcaccattta

SEQ ID NO: 70101 - DNA, 500 bp, Zea mays
  unsure (1)..(500): unsure at all n locations
gacacttgaaactaagcttagaatgactcaaaaggacttccttctgaagtcgcaaagagaatgacattctaagagcagntaactagagaaacttggacaaggaaggagcaacacaccagcaccttcatagcacccctccaaaggactctacctaaaatctcgggacgagattcctttaaggggggagggttgtaacaccctatgtgttacttagagttttcactcaaggctacacaagcaaagcccatcatcacatgtggtttaaattgaggaaaatacaccaaacatgggaatcaagatcctaagtaagtgcaacccatcttagaagtcatgccttggctttatcatgcacatatagtgaggaaatgccaaaaccctagtttaaacccctttgtggacaaatgggagccctataagtgagcatgaccaaagggctatgaaaaccccatgatcatgactngggccaattataacaattgtagtacgcctaataccctact

SEQ ID NO: 70102 - DNA, 427 bp, Zea mays
ctacattttctacaacccatgtttaattctgttgatacaatatcctaaatcttaagagaacagattctgtgcagaattaagagactgaaaaactgctataataaaactgcaataactctccgatctgatgtacgactgaggtgttcttctcggtcacggaaagatctacaaattatctacgacttatatatagactgtgtatttttctgaggcctctatgaccacagataactgggattaacagaaactgtcgaatctgccattctgcagaaaactaaattcgagatcaaaacctaaccccacatctaatccaacctataatcctttaatttccatgatccacaacctccaaaaacacataattacagagtggaacaaggatctcatccatacctagggattcccaagaaattctgcaagaagagat

SEQ ID NO: 70103 - DNA, 481 bp, Zea mays
  unsure (1)..(481): unsure at all n locations
tgaaaagaaggggaaatggtnnttgcctatcagctcaaaaactgtacgtacgaagaattcccgctacacaaagaaatatattacaacatgagatataaaattgataattgttttttacataacagagtagtacacaaaaattccacaagaaacataaaatctattcatcctctttcagaattttntctgcagcttcgtttaatagtctattcacagcttcgtcaatgccttcatttgttatcctaatcacatcaagagcgcccttcaaggctggattagcctcagggtcgtacgcctctggaggaggataaagtttcgctacataaaaaattggtttgtcagatacgaagctagagcacttacgaagataaagtgcaacacaaacatatctatacgcctttcctgctctgcagcttctgcaactcttctcgcttctctaaagctcagtgggcttcttcttcattttgtctgatagcttcgt

SEQ ID NO: 70104 - DNA, 456 bp, Zea mays
  unsure (1)..(456): unsure at all n locations
ctaagcttgaagtaaaagtgaaaagaaagatagccagccaagcttacattttaacatggaaacacaaatgatcctctcacaagtcctaatgcgctagagttgaattggggactctgagcggattgatcacttgaattgtgtctttggagtggagtctattgctcttgtattgaatgcaatgtgttgaatgcttggatggttggagtgaagttggttgggggggtatttatagccctcaaccaccaaaacnaaccgtgggggtggctgttgtcgatgggcgcaccaaacgctgtccggtgcgccaaccacgtcacccaaccgttagggttctggcggtttcgaccatttgagctttgtcttctagtggcaccggacaagtactgttcattgtccggtgcgcctctgacttctgttttgacttcagtcgcgtactggagcgcttgcagggcactgtac

SEQ ID NO: 70105 - DNA, 470 bp, Zea mays
tgtgaagattcttcatcccaacatgggctagtcggctatgctatagccaactcatattaatcttagcaatcaagcgagtattgagttcagctctattaaaatcaactaagtatagctgaccctctaatactcccttaaatgctactgaatcatcatttcttctaaagacagtaacacctatatccgtataaagacagttgtaaccgattttgcataattgagaaactgaaagcaagttataatctatagaatctataatacaaacattggaaatggaatggtcaggagatatagcaattttaccaagtcctttgaccaaaccttggtttccatccccgaatgtgatagctctttggggatcatcgctattctcgtaggaggagaacatccttttctaccctgtcatgtggtttgtgcatccactatcaatgatccaacttgagcccccggatgcataaacctacaaaata

SEQ ID NO: 70106 - DNA, 410 bp, Zea mays
  unsure (1)..(410): unsure at all n locations
tgacattgtctcccttttggaatccaatgccatccataatgctatggcgtctcccactatagagcatgctatgagcaaatttaaatttctcattntctagttcatgctcggcaattttagcatctagtttagctatatgatcattttgttgtttaatcatagcaagatgatcatgaataacatcagtgttaatatctatacatctagtacaaatagagacatgatctacgctagatgtagagggtttgcaatcatttaattcaacaatcttagcacgtaaaatatcattctcatctctaagattggaaatagaaacattgcaaacattttgtcggcgtttcgagaccggnggtccctcgggccgacgagtgagtgtcgccgcgtgccccagcccatatgggtctagcgcg

SEQ ID NO: 70107 - DNA, 486 bp, Zea mays
  unsure (1)..(486): unsure at all n locations
tggtggttgcagctatgcttccattggtttcgccacttaatttctgcaagcaagaagcacaggcggcaataaggccagaagcacaggggtggngggaaccgctctaatggcgagcaagcaatcaagagtcaagcatacagatactgggaagacgaagacgacggtgacgagaagaagtcaacgaggcaataattgtacgtgagcaaagcaactgagcttgcggttgcggcaaggaagaactggcaatccagcaccagcatcagcagtgaagcgaacagatgctcagagaagagaagaagccgagcaagcacacagcagggaagaccggcaagctagaacttaccaagagaaggagaagcatcaggcccaccccagcttcctcgaactctgtctggacatggaaagaaagaggagagtggagagaagtatcagcactgagagactgagagggtgtgaagacaatggaatggtcaaaattatcggagc

SEQ ID NO: 70108 - DNA, 471 bp, Zea mays
  unsure (1)..(471): unsure at all n locations
tagtcatggcaactctatatgaatntagtgataaccaaccatttttagccaaaagggagaactaacaattaatggagcacatgcagatatttatgacagcagcacagcagttactagttttaatcatatctcttcaaatgttaatccaaaaatagcaaactaggactttctagaaagcttgaaaagtgctttacaactttggtattgtcatcacagcatgattaaacacttagcacggtcaaaaggtgttaacacaacagcgcggtctagatttggacagattcagacttatgactttaaaaattcataactgaagattcaagcatccaaacaaggtgattctagactttctggaaaggtaataaaattgtctacatatcatatataaacattttaaggtgattcaatatttaactaaagataaaatacactataaagctttgctgccagaattggacagattcagtcttc

SEQ ID NO: 70109 - DNA, 483 bp, Zea mays
  unsure (1)..(483): unsure at all n locations
tncagatctctccaagntccataattgtgagtagtgatcattagtgattagngacttgagagagtgtggatttgtgtcttttcttattgcttctgtttcttggcttatattcgtgctttcttcatctctctctaaactttctaagtgatttgtaaagcaagcaagagacatctaattgtgtggtgatccttgcgggatcttagtgacccgtgagattaagaagaagcactcaaccagtctaagtgatcgattgagagagggaaatggttgaaatagactggcctttgtggcatcctcaatggggagtaggttctttataacggaacctcgggaaacaaatcaccgtgtccacttgtgttgatcctcaccattcgatttgtttctcccctctcctccctctctaaagttctcttactcacattgttttggagttgctcccanagttatccgcattgattgagcaactcatagcaagaagaacta

SEQ ID NO: 70110 - DNA, 434 bp, Zea mays
  unsure (1)..(434): unsure at all n locations
tgttaaaagtcttttcatccagggcttggtgaagatactcgtctaattggttgtaggtgctaacataagcaatgttgatatcctccttttgttggtgatctcttagaaagtgataccggatgtctatgtgcttagtgcggctgtgttcaacgagattatccaccatgcagattgcactctcattgtcacataagagagggactttgctcaacttgtagccatagtccctaagggtttgccgcatccagagtaattgggcacaacaatgtcctgcaacaatatactcggcttcggcgggtgatagagctacaaagttttgtttctttgaagcccaagacaccaacgatcttcccagaaactgacaagtccctgatgtactttttctatcaattntacatccggcataatcgacatgagaatacccaattagatca

SEQ ID NO: 70111 - DNA, 463 bp, Zea mays
  unsure (1)..(463): unsure at all n locations
ngagttntgagggccctatattgcataggaccagtgactctctcaatcaaggactttgcaacccaaatttgtctaggtctactcttgattggtggacctaagaatgtaaccttgacttttccatttgctacttttcttagaacataatgagcattgaaggcaaatggtcttgagtgcttattcaagggagttggtggtttggctttgcagttgtgggcaaagtgaccttcttttccacactcaaagcatttgataggcctatgagtctgctttggcttgtattgagtagtagctttcttttgcacaaaagcattgtatccaataccactcttgttgtttttcatgacagtgttcatgagcaattcattttggaggtattggcccttgttgaactcttgcacacttgttgcaagatgttcattntcactcttaagtttcttgacctcattnttaagcctttcat

SEQ ID NO: 70112 - DNA, 468 bp, Zea mays
  unsure (1)..(468): unsure at all n locations
tcaaatacaactcatattcttctcanactnggtggtaacaaatgtatataataataagcagcggttttgtatatcaatgtattttatcatattggattccgtagcaacgcacggacatatacctctgaaacaagctattttatttntgcggaacttctaaggataatccacctatcacttttgttgttgctgcctgcgaaacttaagatgtgaatgtgacagtcttgcaagtgtttggtctttctggagaaaaccatgttttcgcaaaagaaatgtggaataccatgctacaggtaattacttctagcttgggttggaaacacttgcaagcgtcgtcactggaagtaattacttctagctataaatatgtgtttaacttatgatgaaggtttgcagactgttgggggtatgcttcgtagccgaagatcctanagaaataaacaccttctgcagatcctcttcaaagca

SEQ ID NO: 70113 - DNA, 489 bp, Zea mays
  unsure (1)..(489): unsure at all n locations
actaagcttcgcatctgaaggaatttccttgaagtaaaagataatctcattctccaatcttcgctataaacaggagatatattgaggactgctctttcaagaagttccaccgaaggtgcttttattgtttcgaagaagacatccgaaggtaagggcagcccctgtgctgctgacttagctagcaaatcagcatgctcattttgtcctcgaggaatatttttgacagagaatccctcgaacgaagcttcaactctttcaaccatatccagatacttttcaagcttcggatctttagccttgcaactcttgtcgatatgacccgaaacaacttgtgaatcagntttaagaacagcccttctgaatcccattgcttntagcttccgaagacccacaagcagggcttcgtactcggcaatgttgtttgtgcaactaaaatcaagctntgccgcataacaagttctaactttggaaggtgatatcaacacaaca

SEQ ID NO: 70114 - DNA, 501 bp, Zea mays
  unsure (1)..(501): unsure at all n locations
ctatgatactaagcttagacgacttcaacgcaaacagaggtgaagaagaatagacttatgtatacttttcatctctcatttgtcagctntttatggtaaagagactacaatatacaacaatctttgaatatgctataaatttgtgttgaacacatatctttatatctcaataaggtaaaggatgttagaccgatagagtgtcccataaaatttcgttattgtagataattggaaatgtatagcatttatttttctaacgtaatggcaggagctctgcctctcaattaataagaaatgaattgacccatatttaaaggaaactgggcccaaaacctacacagggcgcataaacaacccagacaacaacagcaaccccacacacaatgtncatcccgagtcatctgtgccaaatatcttttagcatgtgctagtaagatagatatagaaagtgaaatcaacagcaagtatgcaagctgaatatatatggcacacatcctagaa

SEQ ID NO: 70115 - DNA, 427 bp, Zea mays
  unsure (1)..(427): unsure at all n locations
taccacatntgaagcatgagtgcttcccctttgtcttggtcttgcttggctgcccctcgcgaccttttagcgtcgtcttgaatctcttgatgatgagagccatctcttcatcattaagtccgaccgcctcaatttgtgccaccttgctaggtagcgtctccttgcttcttgttgccttgagagcaagagggtgaagctcattgattggaccattcaatgacgtcgccacgtatcttgcttccttgatcatcattcgcccgctcacgaactttccaagtatctcttctggcgtcatcttggtgtacctaggattctcacgaatattgtttacaagatgaggatcaaggacagttaatgaccttatcattaggcggacgacgtcgtggtccgtccatcgcgtgcttccatagcttcttatcttgttgac

SEQ ID NO: 70116 - DNA, 472 bp, Zea mays
  unsure (1)..(472): unsure at all n locations
tggtcctagatggggttcttctctgcttcagacactccatagtataaatgngagctttgcatagttcctgtccgaggctcaccgaggtgtctcgaactgtcccccgaaagggcttggacggtccgtgcacatgtgaaatttccaaaagcttctcatgtctgagataatctacggtattccagagagtcgacttagaatttagatggttgaacttatgcacctgagaattaagcaactaggcaaactagttagtccattatgttgtgatggtcatcaatcatcaaaatcaatttagagaaaatggtgaaggccatttccctttcaatctcccctttttggtgattgatgccaacataaaccaaatcaagtataaagtgtagaaaaagctcatttggagactttctaagtacatatgaatgtttgctatagttaaaatttggaccacatttgcccattagcttgttttgcaatc

SEQ ID NO: 70117 - DNA, 436 bp, Zea mays
  unsure (1)..(436): unsure at all n locations
tgccgtctagaatacccttanaagctagtgaaccatcacatcttctataaacagacacatctacattggtaaacaaacagntatatcccatattgcataattgactcacagatagcaaattatatccaagagactctactaaaaacacattagagatagagtgctcatttgagattgcaattttacctaacccttttaccttgccttgattcccatcaccgaatattattgaatcttgggaatctttattcttgacgtaggaggtgaacatcttcttctcccccgtcatatggtttgtgcatccgctgtcaataatccagcttgaacccccggatgcataaacctgcaaggcanatttaggcttgggtcttaagtacccaactcatgtngggtcctgcaaggttagcacaaatatccttagggacccaaatgcaag

SEQ ID NO: 70118 - DNA, 473 bp, Zea mays
  unsure (1)..(473): unsure at all n locations
acctataaaactcagcttgtctagggtgcctcggtccggatgctgccttattttatntggggagccaccgccgatcttggccgtccagcaacgggatggtcgatggcgagcacgccgtattcctggatcgatttggagaacatacaaaaactgtgggacctatgtgcagctgtcagtgagacattatatagtggctaagggctccttcattatttgttntaacgggggccttttctcaagaccgaaaacgcgtgcgcgcgcgggtttcctcccttctgcaggctggttgggctgaatttancccaacactgttcataagttttctttttctttttctgccagggttagggagtttctagaaaatcgtagagaatgctaanaatgcaagaccaatgttgctaggttcctaattttctatagtatttaatanaaattgtagtatgatgtttaatccacatagggaattatggagt

SEQ ID NO: 70119 - DNA, 441 bp, Zea mays
ctttattgtctcttattgactctatgttcaagagttggcttcttgttgtgagaagtgttgattatgggagaaaggaggagtttatgatatccgcggtcaatatcttttgaaatgactctctttatgcttcaatatgtgtgtttgacttatagatagagaattgagtctgatgttgcaatacaaaccaattggtggcgaaggatgatccatatatgccaaaatggaatctcaaccaatttgagtttctatttgaagtgatttcgcacttgctccactagctatatgtgagttggcataaatcaccaaaaagggggagattgaaagggaaatgtgcccttgggccatttctaagtattttggtgattgagtgcaaacacaagggcctaaatgtgaatttatgtacatggatgatcaacgtgaatatcatggaagagaggtttg

SEQ ID NO: 70120 - DNA, 372 bp, Zea mays
tgctgcgagcctttacacagttctagtgctcttgatctagatcgtccgtcgatgacagaggggccatggatctggagcatcactggactttgctgaactcaggatccagatgcactagtcatggaatcaaactatacgaccgttctttcattttttgtgtattaaagcaaattgattaatatggaaaattaatgtctatgaactgaaaccacagagatcatctgtcattgtcatcttggtgaagagcaatgcaacctgtccagtgctgctctctataaatatcatatcaatgctagtaattcatcaccacaggagaagaaaatcggtacggcccagcttgatcagcaccgtgcgttattggagtcatggagc

SEQ ID NO: 70121 - DNA, 409 bp, Zea mays
tcatgttccaattaaagataataataatcttgacatgaacataaataaaataacagaataattggaacatggatataatgaagtattaacccaaaaccatatagagcaatagcaaaaactacccaagtgattcaggggtaaacaaggtaaaagataatcagactagggtgacctattgggtcccatcaaaaataaacctatgtattgaacagtgataataaagaacattattgggtaactgaaagtgatcaatggcacaacttgcttggcacttgagaatccacgtaccaagatgattcttcaaatcctcgtgaccgcactgctagtcgtagcaatacaaacaaacatggtatagacaaaattaacatcacaccaaacataagatcaaactgcataataatgatctatg

SEQ ID NO: 70122 - DNA, 474 bp, Zea mays
tgtgaagattcttcattccaacataggctagtcggcgatgcttaagccaacccatattagtcatagcaattaagcaagtatcgagttcagctctattaaaatcaactaagtatagctgaccctctaatactcccttaaatgctactgaatcatcacttcttctaaagatagtaacacctatatccgtaaaaagatagttgtaacccattttacataattgagaaactgaaagcaagttataatctaaagaatctacaagagaaacattggaaatagaatggtcaggagatatagcaatgttaccaagtcctttgaccaaaccttgatttccatccctgaatgtgatagctctttggggatcttcatttttctcgtaggaggagaacatcttcttctccccagtcatgtggttggtgtatccgctatcaatgatccaacttgagcccccagatgcataaacctaccaacacaagt

SEQ ID NO: 70123 - DNA, 374 bp, Zea mays
  unsure (1)..(374): unsure at all n locations
ntgtcgtgcagcgacctcngccgaatcgccttcttaaccgaccgtatcgcatgcgcatttaatgcgaggatcgcctgacaccttatcctgacacacacgcctcagtcggcaaggtcgaagtgaccgcagtcacttcgccccctttactgatcgttctaacaggaaaacaacactattcaccccgttccgactactgtgccaaccaccaaggtaaaattgagtcacaacctccccccgagttcagcctcgggcgcaacagggagctccgcctcgcccgacctcaggcctcggtctcagcctcagcctcgggagaaggtctccgcctcgcccgaccccaggcctcggcctcagcctcggcctcgggaggagtcaca

SEQ ID NO: 70124 - DNA, 496 bp, Zea mays
  unsure (1)..(496): unsure at all n locations
cctatgaatctcagctatttaattggaacacatccnnctttgattgtaacctgttgatttacaagggggaacctttngatttacaagggagggaaggacatgagagagagtcagagaagcttcttttgtgctcccggcttccctcagtctaggaggggggcaacttatttctatttttctatttttacaaagaagtcaatagaggagccactcgttttgtagattttttgaatgggctgttagagaagcctttganacagccctaccacatgagacctataaatacacaaaaaatatgtatcctaaaaatactcacaaaaaataggagtctagactaatgttataagcaataaaaaccattagttctatttcaaattgtaaataaattacttaccattgccgttttaaagcatcataaaataatccataagtttgcatctaaattattcacataagctattaatataatatataaactaaangtatctattctaat

SEQ ID NO: 70125 - DNA, 459 bp, Zea mays
  unsure (1)..(459): unsure at all n locations
tntcttttttgtacaaaacattaaagactacttcatctctctgccgaagcttttcttttncggacaaaacattaaagactacttcttctttctgccgaagctttntctttttgtacactccagaacataaaagaatacttctcctttntgccgaagcaaccacttagtaacacagatgccatgaatgaatgcttatgaatgcaaatgctatgatgtaatgtgatgtgcgaatgaatgtccaaaacatataaccgaagccacactcaaccattatttccttggaatcaaccacacatcagctctgcattcccttatgaacgactttggagcttcctcgtcttttacttagacgatataaactctgcattcccttaggaacgtctttggagtttcttcgncttttacttaagcggtataagctctgcattcccttangaacgtctttggagcttcttcgtc

SEQ ID NO: 70126 - DNA, 485 bp, Zea mays
  unsure (1)..(485): unsure at all n locations
tactcagcttanatacccatcccgcccagacgtncaagtgctcaacaactttacttttgccattccagcaagaaaggtactgcttgcttgatgcttgtcatcgttaattcataagttgtttgactggaggtggaggggtagttagttattcattgatcattgggagtaacaggggataggaacttgggtggttgatcttgctaggttagtaccaagttagaccatgctagacacttcacaaaagcgttatggcaattcttgggcagcttaaataataggaaattatcagatattggctacaaatacagtaactgtttgctactttgctcaggtaatcagtgctcattactcaattcatcttaccttaacataagtttcagaaaagttgtgtacaggtgctacgaaattcattaagccttctgcaagatttagttcaaactccttttccaaggagtaaaaaggcaacaatatatatgaagtaataa

SEQ ID NO: 70127 - DNA, 477 bp, Zea mays
tgaatttggaaatgaaagaataagacaagggaaaaattgatatatgtgaaaacactgcttgagctgttctccttcacttcggcccatcttcagttctctgtgtggcccagctgctaatcggcgccgacatgtgggccatcctggtcagttgtgcccatgtcttcctcctctctgttacaccgacccatggggcccagctgcctgttgcactcgcctcgtgcatgctccccttactcccactagcgtgtggagccgcgcggtcagaccccacctccttcaacagaatcatccgcgtcctcgggtggccggcgcacgacgtgagatcttcggccatgaccgccctggcctcgtcgtgtctatacaacccgtccgcgttgcgttcctatgaccaattgaatcacatagacgaccggaactcaaaccgagagggtgaggggagtagcgacctttcctcgatttgaccaacgccgccactac

SEQ ID NO: 70128 - DNA, 361 bp, Zea mays
  unsure (1)..(361): unsure at all n locations
tcttgacacaatctgaactcaccaaattattgtagcttccaccatctatgataacacgtgcacaccgattctcgatggagaagaaagtctggaacaaattatggcgttgctgcttctctgatgattcangctgagaactaagaacatgctccaccatgatgcttcgaaggtttaccgtagcatcagcaccaagtttggcatcatcattagcagcaacatcactggagtcatcatcgtcaccctcaccgtcggaagcactaatgtagccatcatccgtagcaatgtatgttcactgactcgggcaatccttcttcacgtgaccaatcccatgatagcggtggcaaacaatacccgaagaacg

SEQ ID NO: 70129 - DNA, 471 bp, Zea mays
gagatggtatgaaactctcgggtgcttgttatagttaattcaattcttatcaactcaagctatcaatcttcaaatgatctacatattcaagattgacccaaggttacttcaatttattgtattcaaaacccatatcatcttggggaagatattgatgttgtaggaattgaagaatcatcatgtgcggaaaatcaaggtctacaacatggaggactgtcaaaggatggtaacacttatgcttttaagtgcaagtaccttaaattatcatttcttatgtgtcttgtgtagtcacataggaaaaggaagcacttaagatgtttttaaatttatgtcaccattctttgaagaaattcctctcatatggtagattgcatattcttcatttctatattatgacaatctacatgctttatactggtgcaagttcccatggcatattttactttaattatcctattatcgccatgatct

SEQ ID NO: 70130 - DNA, 447 bp, Zea mays
tgagcacattatcctccacactactgaattgaccatatgtgcttataatgatgatcggttgtcttggtgttcagaatgatatccataatggatatgatgaatctgtgatagattcgtaaatttcagatcattaatgaccatcagcaatgaattgtcatttccaactggatatggttggagtcaagaagattagcacgctcctgacttgcgattaactgcatgtactggatgacaagttcccctatggtgtttagtacgtgagaatccgtgaaagattttccatgcgtacattgggtatgtttccaatctcaccaccgcagcgtacatgtatgggcacacataaagctgaggatctatgtgagaatacattctacctcgatcattaagctcttaaatctcttcatgagaatctatttacggttcgtacgcttgtctgaatcatgagct

SEQ ID NO: 70131 - DNA, 481 bp, Zea mays
tcttcaccatgtgatcacagttatcttgagaatgttgttctatgcacttccctttaagttgtgtcaagctcatctttagcctctcattctcttctttgagattttgatatgtaccatcttttgttcctgcaaattatagcttaaaggaagatttgcttgtcgacgaacaacaagctttagcacatggtaatatagtttcaatttgaatacatgtgcatgagtgaggttgttgggattttaagttttctattacaacctcatgagcaatgtttaatatgatatgatcatccataagattttcattagaatatagaagcatatcatattttttttgaaaagctagattttcattttttagcttttccatttggtccttaagcaaggcattcctatttactaattgagcgatacaatgtaaagagttatcttgctcaattgaaatagtttcatacctctggaccaaatcaacatgagagcactt

SEQ ID NO: 70132 - DNA, 362 bp, Zea mays
  unsure (1)..(362): unsure at all n locations
tattacggacctataaaactcagcttataacacccttcggcacatactgcttcgtacgtatgcccttatgcctaanaaaggcctgctccaccatttcgcggctaacaaacacagtacttgaagagcagatagggtgcaatgtctttacttatgtcgacgacatagttgttgcaagcaaaaacaaggaggatcacatcgctgacctcgtggaaacatttacaaaaatgcgtgaagccagatttttcctgaacccagaagagtgntgtttcngagtccgctagggcaaaatattattgggctacctcatgtcccacagaggtatagaagccaacccaaccaaaataaaagccattatagacatg

SEQ ID NO: 70133 - DNA, 474 bp, Zea mays
ctatgaaactcagctgaagttatttattggtaatacaagtaaatatgatagatcttggttgataccaaacaacaaccaacagcgatgacaaaagcttatgatgttagagagtgcattgcatcaagtaagctgtatagcaacctttgcttaccctataacaaaataacatgaacataagtaatcttctcatgtcaaaacagacaaatatcaacccaaaaaaacttggtgaactatgttctcccatggcattaatgctatgcaggaatctgaaattgaataccaagatacacatttagtttagctttgtgaactgttggaaacataggtcactatgttgtattttgctatagagcaggatatttgagtttttttaaatgtcacacaagagaattaagaatctgatgatgtttgacactgattctggacttcttcagttcttgcattgcacatcctcatccagttctttactattat

SEQ ID NO: 70134 - DNA, 63 bp, Zea mays
atctaatataactttatataatagatgcttatcgaagttattatacatgacgtcggactttca

SEQ ID NO: 70135 - DNA, 400 bp, Zea mays
  unsure (1)..(400): unsure at all n locations
atggactcctcccataaatcgtgatgctgcggagcgagttggtgcccttctggctgctggcttcggaccagagcangtgctagcggtggtggtggtgggagctgggcccactaagcttgagaatggcttgccgaatcgacagaggccataggctgttgattacctacgtattctgggacgtatggagaatagcatgaagcaatatgtagtacttgcttccgatgattctgccatgcttcagcttcggtaatctctttctgcttctgaatcgagacttggcacgttcttgtggtatggcctttggcttcgccacagaacaaactaaacagtctcctatgctgatcttcgtatcttcctccgaagcttctgacccctctgcctctttgagctggtggcctaa

SEQ ID NO: 70136 - DNA, 360 bp, Zea mays
  unsure (1)..(360): unsure at all n locations
ggttattaaacacgaatataaaattcacagcgcttaccggtccaccgattattcagtacgcatgtcttggtgggtcaccttcttctcctatggggctatataaacagatgagttggtgagaagttaccacaacattcattgctattgcaccgttgtgctgctgaaaatttttactgaagccgaagcttgctgctataggcttcgaacaaacgttccatcgcttaagtgtaacttcgtctgtcaaatactgaacactgaaatagctagagtaagatctaatgttatggtggcacgcgaaggagatgaggctaggacttttgagatagcccccatttctgagatgatngaagcgtctgggtt

SEQ ID NO: 70137 - DNA, 365 bp, Zea mays
  unsure (1)..(365): unsure at all n locations
ctcaagctaatgccncanaaagattgtcntaatttgttaagggcaaggctcccatggttcatgacagtgagggttacattttatgtcctgcaaactatcccgaacataagattaggaagattcatgctaggaaacctcataatgtttctcaccatgcatttatgtacaaaaatgaggcttctagatctaggcacaccacacatgttaaaatgcctagaaagacaattcctgctgcatcaaatgagcataatgtttcatttaagatttttgatgcttcatatgttttaactaacaaatcangcaaagtagttgccaaatatgttgggggcaaacacaagagttcaaagacttgtgtttgggtaccc

SEQ ID NO: 70138 - DNA, 154 bp, Zea mays
ctcttgatcttgtagggtccaatatagcgttgagctaacttgcctttgatcccgaatctgtgaacacccttggtgggtgataccttaaggtatacatgatctcccacctcaaactgtagaggctttcggctcttatcatgatacctcctttggc

SEQ ID NO: 70139 - DNA, 389 bp, Zea mays
  unsure (1)..(389): unsure at all n locations
tcggttntaaggacacattntcgtgatttctgaagataatatgtctcaagacaaaaaaaattctgctgagacgaagctcagcgaagaggagaagatccttgaggagaagactgctggatttattgagtcaatagcaaaaacaaatacagagaagattaccaaagagattctagaaagcctatctgaagatactgatgacaacgacaactacgatgcggaaagtggagccgaagactctgaagatcggccctggcgaccaagtcatgcagtctttgggaaatcaactatcaaacagagtcatcttgataatattagaggaaggtattttcgagttatgtctattgtgagggctaacgcagacagggctatttcttgctccaaagaaaatg

SEQ ID NO: 70140 - DNA, 448 bp, Zea mays
  unsure (1)..(448): unsure at all n locations
tatccttanggtcattntatgactnttaccctaaagtatttatgttttcttaacttgggtaaagttttacccctataatccccatttagggttaagttccttaaccagggtttcatttgcaaaacattaaaacaatacaacttgtttgaaatttttgcctagtgaatgcactctaggtgtatcaaacatatgcaatgccaatgctatgatgtcatgctcaagttntagttatagtaacaccaggggtgttacaggtatgtacccattgccatctctagttccacggtttccatcgttgttatgctcctccacatttaaatagtaaaaatgctaaaattatataaaatggggattcaaaccatttgtgggctcanaactcatgttcacacccaactaaccaatagaacacacatgtctttatattttatattttataattaagtataaa

SEQ ID NO: 70141 - DNA, 458 bp, Zea mays
  unsure (1)..(458): unsure at all n locations
tatgcaattatttacatcccagagttgaagccataccggtttgagcaaatttggcacactggacagtccggtgtgcaccagacatcccatatgttgctgcagttttttcagcaattccgactttgtattgtgggcataacgtttagctccgatctccgattttgatgatcttagactttttggaaagcttataaaattatctacatctcagatttgaagctatgtcagtttgagtagatttgattntatgaaacaattccaattcagtcagcccttcctctcaactatgtcaacttcactttgttttgtctttgtatctcacttctacttcttgatgtgttggactcttagtatgtataaagtgtcttcaatatgactttgtaatgtcttctatgggtcttataatgtcttctttgaggtggtgcattcttagagcctcagtccaattcacttcattt

SEQ ID NO: 70142 - DNA, 437 bp, Zea mays
  unsure (1)..(437): unsure at all n locations
atgatatgaagccttgcggtgcttgatagagtcaatttaatttctattaactcaagctatcaatcttcaatgatatatatccatgattgaccccaagctatttcaaattactatatcttaaactcatatcatctcgagggaagatattgatgttgtacgaaacaaagaagtatcatgtgccaaaaaaatcaagacctacaacatggaggaaagccaaaggatggtaacaattatattttcaagtgcaagtatcttagactatcatttcttatgtgtcttgtgtagtcacatagaanaagaaacacttcaaatggttttcaaatatgtcaccattctttgaagaagatacactcatatggtagatngagtattcatctgttctataatatgacagtctacatgcgttanactggtgggtagtacccattggcatgtct

SEQ ID NO: 70143 - DNA, 441 bp, Zea mays
taaagccatggtaagtagcatatgccaataatatgtgaattgactcaagcctagctacgggtgcataggtttcaccgaaatccaaaccttcgacttgggagtatcctttggccacaagtcgagctttgttccttgtcaccacaccatgctcgtcttgcttgttgcggaaaacccatttggttcctacaacattttggttaggacgtggaactaaatgccatacctcgttccttgtgaaattgttgagctcctcttgcatcgccaccacccaatccgaatcttgaagtgcttcctctaccctgtgtggctcaatagaggaaacaaaagagtaatgttcacaaaaatgagcaacacgagatctagtggttacccccttatgaatatcgccgaggatggtgtcgacggggtgatctccttggattgcttggtggactcttgggt

SEQ ID NO: 70144 - DNA, 393 bp, Zea mays
  unsure (1)..(393): unsure at all n locations
gtgcggcgtancctgatacgatgtcgtgcatatgagagtatggacggggtcgaagtatggacggtgtcgccctgtccccttcgcctctcactgtaacgggtgtcatgatgacggtttcccatgcacagcgcagagagtcaatggtctctgcttcggtaacacgcaggtaacagtgtagcccgtgcattgtgggctatgcgcgccgcttgccaccagagtagacaggtgcacgtcttatctgtatttaatgcanggacgccttatgctagaggcttacgttaggctntgcttgttggctacgtcacgcatcacaagccacatgacgacatcgggactccgctagtgcgggaagcatgggccaggagctactggacacgtggcaccatcaaacat

SEQ ID NO: 70145 - DNA, 347 bp, Zea mays
tcagcttcaaaccccaaataagctctttgtgtaatcggttcggtgtcggatcctgtgcacattggactatctgagtgctacgtagagcaacagacttaagtcttttttgggattttcttccatgtctttgtttggctaccttcttgagcacttctattgtgacaccccagtgtcacctagggtttctcttaaaaatgccaaatcaagaaccatcattttatgtgaaccaaagtaagcatgagcatcaaattaacatatgaataaagaattccccaagcatatacttaaaagtatcatgatcaaagcaaatgggtctttccaaaaggtaataatgttgcaaccctaat

SEQ ID NO: 70146 - DNA, 471 bp, Zea mays
  unsure (1)..(471): unsure at all n locations
taggctcattattcctcagcatcatcatcctgtacatattataacggtataagagaagagtagagttcaagaagaaggtaatgtaacaggcacaaattttttaccggcttaagctggcttcgagcttcgttgccagccatttttcgcccgccttttacccaaacttgagttatgaatctatttcctatactccaagctaggctggggatatcaattaaatcagtcggtgataagctaaaatttggtctgttgacaatctttccatgttcacagccagattntatgaaggcaacagctgtgcctcgagaagctagcagagcgcagaaatcggcgtgtccagctataactttgtcgagcgcatcaacttcgccttcaatatgttcgaaggtttccggcaggttctcaaccgaaggactgaatttctcagcgctggctccaactgagttaanaacctattttagccgctacagg

SEQ ID NO: 70147 - DNA, 403 bp, Zea mays
  unsure (1)..(403): unsure at all n locations
tagcaaatcttagtgcacaagagctaaaaattgagtgagtgtgagcagttggccagagagcgtatcaaatgagtttgcggtatggccgtatttatacgccaagtgcgttgaaaattaaaagaccccgcttgtcagtgaatgttgctattctagcaaagggaaggtgttttttcggaccttcggcgtaaagccttcgtccatgtcgcaatctaaatttattattttaaacaaattaatattgcgaggggctactgttggggaccttcggcatccgaaggtcctcanaaacaggatttaacagtatttctggagtataatgtgtgaacatgtatcttcggattcaagtcagcatcacagtagaccagagtaatacgaaggtttatacagagccgaaggtgtgagc

SEQ ID NO: 70148 - DNA, 421 bp, Zea mays
  unsure (1)..(421): unsure at all n locations
ctttaaactctgctnngtgacaagtgtagagctaataattgaggtataaaatactcggctctatattgtcatatgcatttattagcagtagtggcatggatctaaatattttacaactggtgtactgtgacgactgatgacaacataaaactcgtggttgcatgcagggagtanggaaggcaatgtcaatctcttcttgaagtcagctgagtatttggactgtgcagttcatcatgtactcatacatataccacctcaaagacgccttattaattctatttttattgcattaattcggagcactgaacataggagttcaccgtagaagttcagtggtaacactaatgatgactacatactcttttatgaaagccttgcccaaacaagatgtcattctcatagttgagtacaagaataaata

SEQ ID NO: 70149 - DNA, 369 bp, Zea mays
  unsure (1)..(369): unsure at all n locations
gcattacggacctatgaaactcagctacccatgatatgcattgactagctatatgtgctctatatcagcctacttgacagggccttatgactcaacggaacactacaccgaaatctctttctgcaagtacccgcccggtctaagctttatcattttaaaccgaaggttggtaccctggggaaggaccatctattcggaggttgaacccatcatggcctggagggatcaccctataggtttatatttggaaaatatccaacccattttgaagctttatcttttgtcaaaataaaacatttggttnttctagagcaaactacgcataagaaaaacctttttatagaacatggaattaaggaattaaatact

SEQ ID NO: 70150 - DNA, 429 bp, Zea mays
tcatctccatctatgttatggattgcttttgagtcagtccagtttccctcggcccttctggcagcttcctgacttccatgaatagcaatgggtccttgatccgaaggtatcttcatgcaaaggtaagcaggatgaagaattgcttcgaaagcattgagggtgccacgaccaataattgcattgtaagggtattccatgtcaacaatgtcaaacacaacttgctcagttctggtgttgttgatgaatccgaaggtcactggcatggtgatcttgcccagtgctacaatctgtcttcctccgaagccacagagagggtgtgtagcatcatgaatcttatcttctcgctcttgcatttgtctgaaggccttagcaaatatgatatcagctgcacttgctgtgtcaaccaaggcattgtggaccagaaaccct

SEQ ID NO: 70151 - DNA, 456 bp, Zea mays
  unsure (1)..(456): unsure at all n locations
tgtttatgctcaaacttacgaaaattaagataagggattattaagggaaacgagggggcaaccatatttttcctagcatgcctaagttatgtagttcactagaaaaatatgttgaaccatagtccagtgaaaggaaattgcattcacaattattcatgaaaaacagagaaaactttgaaaagtcataagaaactaatcctaaggagaaaacacccctaccttaggaatgactattcttgtgctaagaagaacctaggaaaaatacaagttctgttgtttaatatttttcaaatagcaagttacttataaatgtctttttggcattaaactntataaaatcataactgaataatcactaagtaaccccttatgatttttggcacagaagcatgttattacccatagataccagcaaaaataactcttagtccagacctacacctagatctgagtcat

SEQ ID NO: 70152 - DNA, 193 bp, Zea mays
gatatacctaagacaactttcactacatgatattgattgtataagttcttggcatgtctttggactgactaatgcaccaacttactttttgaacttgatgaataaagattcatggaatacttcaaccagtttggtgtagtactcatcgacgacataatggtatactcttagaatgaagaacacatgaagatca

SEQ ID NO: 70153 - DNA, 405 bp, Zea mays
  unsure (1)..(405): unsure at all n locations
tgcaccccggttcattggcgcatttctcaatcgngaatatttgtgtccagtggcctaccgacttcaactacccaaaacattgtttgctatacatgatgtgttccacatgtatcaattaaagaagtgtcttcgggttccagatcgaaccattgaaataatatatattgcctgataaccagacctgacatacttaaaacatcctattcgagtcttggatcaaaaggacagaattactcgaatgagaactctcacagtttacaagatgcagtggaaccaacatacgaaggatgaagctacatggtaaactcaagactctttataaaagaatttcccaagctttttaacctcatgtgatttctaaagtatgtacaactggtataaagaggaatgaaccccataccaccc

SEQ ID NO: 70154 - DNA, 430 bp, Zea mays
acatctgatgcccacacaccataacgcacgctagacagagggcgcccacaaccacctgtggcaaaacacatgcgtaaagaaaacgtaagcctgcctctacccgcctcggcatttgtgcatccttgcaaaccccactacaccctctgccctgagacagccttgtcgtgcacgccgagctgctatattaaagtgtcgggttgcagaccttgaaatgatacgtcagtgcagaaagccacttcggcaagacctcgtgcacctgcctaagcacacgccagtcacttgtcacaatcacaactaaatgaatgccccaccatgagccaagttactctgccaacctctggatgttgcgactgcactgtggcaacgtcaccactcacagtacatcggtcaagactccctccattataaactggtcgtcctatgcctataa

SEQ ID NO: 70155 - DNA, 424 bp, Zea mays
  unsure (1)..(424): unsure at all n locations
tctcttcttcatgtgaggtaaggtcttcgctgatagtgactgtctgcttgtgcgtggcctgatcgagggggaccgtcttggtcccgtcttggctctgcagctgtgccttgtcgtgctgtttatcggttgggctggcgggcgcagggacctcgcactgggtcgtgagacagtgcacgttcctctgaccgggcacgaagtcccgctctatgttgcgcgccgtctgctggttgccgtagaccataatagcgcctagcggacttggtatcttcatacataggtacagtccgtggatggcagcttcgaacttattgatggagccccggcccatgatggcgttgtatggatataccatgtcgacgatatcgaaggttacttgctcacttcgggcattgngtgctacaccgaaggagaggggcaactctat

SEQ ID NO: 70156 - DNA, 468 bp, Zea mays
  unsure (1)..(468): unsure at all n locations
tgtgaagattcttcatcccaacatgggctagtcggcgatgtcagagccaacccatattagtcttagcaattaaacaagtttgaatttagctgtgttctcattaaaatcaactaaatatagctgaccctctaacactcccttaaatgctattgaatcatcgcttcttctaaagacagtgacacctatatcagtaaaaagacagttgtagcccattttacataattgagaaacataaagcaagttgtaatctaaagaatctataataaaaacattggaaatagagtgatcaggtgatatagcaattttaccaagtcctttgaccaaaccttgattttcatccccaaatgtgatagctcgttggggatcttcgttnttctcgtaggaggagaacattctcttctcccctatcatatggtttgtgtacccgctatcgattatccaacttgaaccaccggatgcataaaccta

SEQ ID NO: 70157 - DNA, 397 bp, Zea mays
tgaaatgtgtcttcctccatcattgtctgatatgcaagtacacctaatcatacatctcgtggatcagataaaaatattagggccactatatttacatcatatgtttcagttggagcgatacctgcgagtattaaaaggttatgtgcgaaatcgcgctcacccagagggttcaatcatggagggatacactacagaagaagtgattgagagctgtatagattacatcaatgacggaacaatgataggtgtgcctgtacctaaacatgagggtaaactatgtgggagagggagaatgggcaagaaaacttttcgcgttgaggattacaagctagtacattgtgctcatggtagtgtactacaacatctcacgatagccgagccttacatagaggaacac

SEQ ID NO: 70158 - DNA, 451 bp, Zea mays
  unsure (1)..(451): unsure at all n locations
atcttcgntatgtccctgggcccacatgtcggggcccatgtcctttgtgcatgcccncttcatctataaaggaggaggcatacgactttacagaggaggctcttagacctagctttagagagacactcataagttcatacaagctccaaacaatacatcacacagtggagtagggtattacgctccggcggcccgaaccactctaaaccctcgtgtgctctcgtgtgttgatccaccagcctcgtagcaagaaaaacgcttaggcccctcctctcttcaggatttagggcgggtgcaatccgccacccggccggngagatttcctctctgacaatgtgttataccagatgcattaccaacatgtaactancaatttgatactcacaggtgtatggaacagagcanggtcaactgcanggaacattggaggtggcgcagcgaaaccctatgc

SEQ ID NO: 70159 - DNA, 353 bp, Zea mays
ggcgtaatagcacaaaggaaaccgacttatagatgaatatgctattcagacctcggtggattactatagaattactaccaaatgtaaagggcatggagtgtattttacatgggctgtgtcccgcgccttataatatgtgaacagtgcccccgtacttgttacgaagacttgacatttgcttctgcgtcacgcttgtacttatacctttcttttagccgaaagtacatttggaatttgatataatttctatttttccatagtaataatatacaaatgaattgaaattatatataattgtatacgttatcctttacatttcatatggctgtcttcttcatattatttggtgggtt

SEQ ID NO: 70160 - DNA, 431 bp, Zea mays
  unsure (1)..(431): unsure at all n locations
ttctgcgcacagcttcgtgatcaccttatccttcgtcataatcacctttcgtctcgctcaggcttcgtcctgaccatgctcttgtatactcacgacccaattccgaagatacctgttcacatatttcacttggaaaacattgtcaaatcatgtttttgaggaccttcagaagccgaatgtccccaacagtagcccctcgcaatattaatttattagtgataaattcatattgcgatatggacgaaggccttaagccgaatgtccaaaaaaacaccttccctttgctagaatagcaacagtcattgacaagcgggaccccccggtttttaatgcactaggtgtataaataagagctcaccacgagttcatttgacacgctntcttgccatctgcttttgctcactcgactattagcccttgcgcaacaatac

SEQ ID NO: 70161 - DNA, 377 bp, Zea mays
  unsure (1)..(377): unsure at all n locations
ntaccaaatggacgtgaagagtgccttcctcaacggaccatatcaaggaagaggtctatgttgagcaacctgccggctttgaagatagtgagtaccctaaccatgtgtataaactctctaaggcgctttatgggctcaagcaagccccaagagcatggtatgaatgcctttgagattttcttatcactaatggattcaaagtcggaaaggctgatcctactttattcaataaaactcttaaaaatgatttgtttgtatgccaaatttatgttgatgatattatatttgggtctactaacgaatctacgtgtgaagagtttagtaggatcatgacacagaaattcaagatgtctatgatgggggagttgaagtacttc

SEQ ID NO: 70162 - DNA, 397 bp, Zea mays
tcggccttcggaggccgaaggttgaaatgaatgaagttgtctaataatgcaagatggccttcggcgcagtctgttctttcattgggacaagagacttagtacaagagcatattgccttcatggtatggccgctcgcagagaattgggaaatgccacaagaaaccgtaaaagaggccgacgaaggaggacttatcatgttgaagtacacttttaaatttggagataaattcgttgagccaaatgatgactggttaaaaagtattgaaaatttaagtgatgaactgtttggggcttattcgaaggccgaagacactgcaatgtcagcagccttcggaggccgaaaaaagaaaaggctgaatcgggtatttgatggcaatcgggttgtctaccctgacta

SEQ ID NO: 70163 - DNA, 421 bp, Zea mays
  unsure (1)..(421): unsure at all n locations
taaacaaaggcctggcacgaccacgcagtctttccaagatatattaacgaaggagacctcgtactcgtccgaaccacccgggcagagtcacggtgcaagctatagccaaagtgggaaggtccattcatcgtcaagtcgaaggtgtcccccagcgtgtacaggctgacaacgccatccggcgaagacctagagcattcctggaatattgacaatctccgcaaattttttgtttaaatcctcagggcccacgcgttcttgtaactcaccaaacagtatttttctggcccgcactctnttcctcccggngggtgaggttnttaatgaggcggagccatgtaatatacctgcaaaaatcccccgcaaaaactaagacgcaacatgtcgaanaagaccgcatcgacggtcttcgacattcgatcac

SEQ ID NO: 70164 - DNA, 336 bp, Zea mays
  unsure (1)..(336): unsure at all n locations
nttactggaaaccgtgagctatctacctgtagttntaatgtaaatgagtcatgttctagcacaactaatcgttcatgtctgtgattangtaccgagttatcgagcaaccactgtggaggctgcaagcctttggtaaggaaagaaagttgacttgttggaagcctatgaaaaagtggacgcatgggcacctgcaacttgtgttatctaagattatctggtggtcccatacttgaccagatcaattagatactttanggtgacggtgatccctgctgataagctctactactattatgtgagcactgtangcgttcacttcgcgcggtgcacgttctg

SEQ ID NO: 70165 - DNA, 444 bp, Zea mays
  unsure (1)..(444): unsure at all n locations
ntatcaaatggacgtgaagagtgccttcctcaatggaccattcaaggaagaggtctatgttgagcaacctcccggctttgaagatagtgagtatcctaaccatgtttataaactctctaaggcgctntatgggcttaagcaagccccacgagcatggtatgaatgcccaagagatttccttatcactaatggtttcaatgtcggaaaggccgatcctactttattcactaaaactcttgagaatgacttgttcgtatgccaaatttatgttgatgatattatatttgggtctactaacgagtctacgtgtgaagaatttagtaggatcatgacacaaaaattcgagatgtctatgatgggggagttgaagtatttcttaagatttcaagtgaagcaactccaagagggcaccttcttaagccaaacaaagtatactcaagatat

SEQ ID NO: 70166 - DNA, 436 bp, Zea mays
  unsure (1)..(436): unsure at all n locations
tgaaaccaaaccatccaagcacacatgtaggcgaggatatcactaccaaaccgtttttatggtgcttatccaaatcttaacaaatgagcttaaagttggataaggaacataagaactttgccaaactagcaatttacacttgtgtgaaaagctagcttggaaaaagaacaaaaacgataaatctttgtagagttgtcatcaattaccaaaaagggggagattgtgagaccctgtttggttttggtaattgattgacaacttatatggactaataagtgtttatgttgagatacacaggtgattagtccacaggtacactagtgtgagttattntagccatggtggtgatgtggcttgatgatattgagatgctcaactagtgtgataaaggagctcattgcatatgaagacatgacatggtgtcatgtggctatat

SEQ ID NO: 70167 - DNA, 471 bp, Zea mays
  unsure (1)..(471): unsure at all n locations
actcagcttcaaagatgtctgaggaatcaagagtttcatcgaaatggtcggttactatctgtgtttcattgaaggcttctccaagaatgacagactaatgacagccttgctagcaaagaaggtcgagttcaaatggaccccagcatgccaacaatcatttgaaatgttgaagcagaagttgacaacagcaccggtattggttctgccagatgttcacaagccattttcagtatactgtgatgcttcgtacaccggactgggatgtgtgttaatgcaagaagggaaagtagtggcatactcatcccgacaattgaaagttcatgagaagaattaccccactcatgatctggaactagtagcagtggttcatgcactanagacctgcagacatatctttacgggcagaagtgtgatatctacacagatcacaagagcctcaagtacatattcactaagtcagagttaaacatg

SEQ ID NO: 70168 - DNA, 451 bp, Zea mays
tcgtgatcgtctcaacaccgtcagggccaacagctacaatgagttggtcaacatggttatctcctaggaggactgcatcaccgctcgacaggcagaaaagaagaggaagacccctatggcaggaccctcagctcagccacagcgcttcaggattgtgtccgacactcagagcaggggaccccagcagcaacaagggagatgggtgatccgaccacaaccgcagcagcaggcacccaaccgtacccagtttccagctcagaggagcaaccagcagcagcagcagtaccgccaggcaaatgacaacaggtgtttcacatgtggcaacaccggacactatgccaagaattgccccaggaaccagcagaggcaggggcagaatgttaatcagagtcagtgcaagagacaaaggtgcaagtgaggctggcatgctaaacttcaccaccatggctga

SEQ ID NO: 70169 - DNA, 343 bp, Zea mays
tctataatcgtgttgctatcaataaccaccaacggggagattgaaagctctcttgtgagttttggtgtttggatgacaactcaattaaaggactaacaagtgtactaagtgttgaacaggtgcttaaagtaaagcctacagggttctacacaagtgaacaaatgtgatggtccaagaactggattatggatacataatggacagcacaagtaagatggacattgcaaaagtgagactcgggtgcgtagctcggagacaactgatcaagccaaggacggaggcaagaagagcttcgagggaccaagtgcacgggagaaggtcaaggaggctgaggaacccaaag

SEQ ID NO: 70170 - DNA, 458 bp, Zea mays
  unsure (1)..(458): unsure at all n locations
tacccatgacgaagcatgtggccagttaaagggtcctagatcagcaagcctactttcggtgcggtccttaattgacagagacaggcgacctttcctgctcaatgtctggtctcacattaaactttttctgaaaacctggtacccatcagaggtaccctactaaaatgatgaagccatcaaggcctttggtatcttcatcactccagtctcttttctttgtaaaaacaagattcatagatcaaaacattttttttcctagtctatgagcatactaagcacaactagcttttcaaatcaggtatcaaggatgataatcaataactcaaggaagttatgcagcaaagggttaatcattcaactcctactacctaatgcaacatataagtgataaaaaaattaaaataacaaggaggtgacaaatgcaccggngcttgcctgtgataacacactaagtcagt

SEQ ID NO: 70171 - DNA, 429 bp, Zea mays
  unsure (1)..(429): unsure at all n locations
tcggtgttatagcgtatccgaagatgaatgatcgaaccgttttanagatagaatgaccttttagccaatgagggtctgagtcattgttgtaaactcttataaggggtatgattgtaattccttacaggctgtgtcttgtgcctataaatagtgaacaatattcctttactattcacggtatctggtaattgcaaacgcattgctctggaattattgtttcctgccaaggctaaggtataaatatgcctaagcattatgttntgatatttaaattcatataataaaatatgtgaataatgttatctatctatggcatatctctctctgatactccatgttttatattttatttcatattggtttataagactgatcacgaaggtataaccttcgtgaatattttgtcatggtcttcatccgaagttcatt

SEQ ID NO: 70172 - DNA, 466 bp, Zea mays
  unsure (1)..(466): unsure at all n locations
tatcttatcttctttccaacggatctgaccttatctcaaaattcattctgagcgctccgcaatcatcgtagagatttctggactctctatattaacaagatttgttaaatctgatttaaaggggctgttagcaatatctttattgtttgggttgtcatagtgaaaaaaagggtttaggcccctgcaaaaaaaagaagaagaagaagaaaaagaatagaaaagagaaaaaaaagaggaaaagaagaagaagggggctgaatctctaaatctgttgtttctctttgtgctgtgctagttgttctttttcagagactacctttgtgtctaggctcacgtctctagcatggtttagcctangaccagcacagtaccaccgttgaacgattattcagcttgcttttgtaactaacgtggtactagtgtattccttgctttagcccacctacaactctacatatttcgacta

SEQ ID NO: 70173 - DNA, 398 bp, Zea mays
  unsure (1)..(398): unsure at all n locations
tcttgctaaatggaccttctctattctgtctgtgaagaaacaggggagagaagcaagcagcagggagtggtttccggcgtccgcgcaggaggcatccgcgcacggagctcctgcgtccgcgcatggtgggggtctccggcgtccgcacaggaggcgtccgcgcagggagctccggcgtccgcgcagggagggggtctccggcgttcgcgcatggagaggggtctccggcgttctgcggagaagcaagcagggggtatcccgtctccagcgttcgcaagcagggggtaaacctatcgcgtcttccctttgccttttgcgtcgctcccttatcccctcccgcgcgcgcgctctttctctatcgcgcgcactnttccgcgcgcctagggcccgtcttcgcg

SEQ ID NO: 70174 - DNA, 336 bp, Zea mays
  unsure (1)..(336): unsure at all n locations
agaagtttttngtcattnnggagaagacaattatgtgccatattgcatagttgactaacagatagcatattgtcaccaagagactcaactaaaaacacattggagatagagtggtgattaaaaattgcaattttacctaacccttataccttgccttgattctcatcaccgaatataattgaatcttgggaatccttattcttgacgtaagaggtaaacatcttctttttccccgtcatatggtttgtgcatacgctgtcgataatccaacttgaacccccggatgcataaacctgcaaggtaaaattaggcttgggtcttaagacccaactcatg

SEQ ID NO: 70175 - DNA, 434 bp, Zea mays
tgtagctactaggcaagctaactcgactcatgtggcttctctcttatcaggtgtaaagcggtgcaatttctgtcagatatgttttgcttgcagatacaccttccgtttgtgctcggttagttccttgggaactccgggcatgtctgcggacagccatgcaaacacgtctcgattgtcctgcaggaaccggatgagcgtgtcttcctatttggcggtgaggctagagctaatgatcgttgtcttgcgtgcatcaaggagccaaggttggccttcttggtttcttcaactgaccgtatggaagtggctgatgtttcttctttcaccgagatcatgaggtcatcccctagtgatgtgttagcttcgtcgttggttgtcgtggtggtcccgaggggccgatggtgagggtcgtttggatgccccccggtagcactctg

SEQ ID NO: 70176 - DNA, 331 bp, Zea mays
  unsure (1)..(331): unsure at all n locations
tggagtgaccgagactaacaaagtggtccctctgggcgtgtgttgcatgatggccgtctactaagctaacgctgacctanatggttgccctcatcctagagtggcggacaactaattcaactcttagggtgaaaccgacggcgatgttgacaaaccctaactcatatctgtccgtgatgtggccggatatgagcacctccagccgtcgctatgtcctctagcgagacaaatacacggcgcnagttgatgatgatgagagtcgtaacaaagagggatcctcatgtaggagagcatatacccgcctgtgactctaagatagggatcgtacatg

SEQ ID NO: 70177 - DNA, 412 bp, Zea mays
  unsure (1)..(412): unsure at all n locations
atctcatggncgtataactggacttagacagaacaattagctgagtaaatcatgccacatacacgattcttcgtgtaactgttcacgatatacggatactatatctgagatatatcactcctgcttatagtaggcggacttttaataaaaacaatattgatggttgacactgaatcgaaatggcagcacaactgtggacattgttagctgctactgtcgactatgaacagactgcaaagcagtggacggactgaatacataagtgtctaaagaagtacactgtgttacttgcatatgtgtaagctgcttgcgaaagtactttcagtatcaaacatcgaagagaaaatcacagaattactatcatanaccatattaatcactgcacacctaaaattntacgtgatcacacact

SEQ ID NO: 70178 - DNA, 355 bp, Zea mays
  unsure (1)..(355): unsure at all n locations
agtccttntgagtgtattctagtatccttctcccanatcacaacgtttttttttgatgaagaacatgatctaattctagaggcaatccaccaggatcttttcttctgcaaataactggatcatgttgaaactcattttgttcaacccagtatattggcggacgcagaacaggaagttttcatagggacaagaaaaccacgtgacaaaatcaagcaagactataaaaaactagtattatatagaattcaagtttcatattaatacacgatacaagttcaaagaataaaactatagaaacaaaagaaataagcatactgctaagttcttgctgaccgaatcaaagccatacatacct

SEQ ID NO: 70179 - DNA, 372 bp, Zea mays
  unsure (1)..(372): unsure at all n locations
gatatgcacanaagattgcgtagcagcatctacgagaggtgaatgcatatatgttataatgaagttccaatttatagttattcaataattattttacttatattgatgcatatttgtgtcattcaaggtgctacatattttccaacaatgatcggtgatctcgaggtgctagactcttattactgctgcaacaaatcatgagaatcatatggatgaggtatttaaagattattatttacttcgtgcatgggctattaatttgttattattcactactgttttgatgcatgggctgtttgctgtcgccttgctttgatgcatgcgccttgctgctatctcccagcccgtgtatactccctgcatggcttgtac

SEQ ID NO: 70180 - DNA, 397 bp, Zea mays
  unsure (1)..(397): unsure at all n locations
actcaagcctataataaaagaatagaggcaagagctcgtccgtatatcattatagaatgttagttatacaagcatggagtttgtgccccgctgctcaagtgcttgtctagagccgaacgtatagaattgatgaaggagatacatgcaggcctttgtggatcccacatcggatccaggccgttacttggaaaagtgttccgtcaaggattttattggccgaaggcagcttcngatgcagctgagttagttcaaaggtgcgaaggttgtcagaaatgtgcaagagatcaaaaacaaccttcgtctttgacacagctaatacaacccatctggccattgcaaaggtggggcctcgatctgctgggcccattaccaccggctcanggcaatttgaaatatg

SEQ ID NO: 70181 - DNA, 455 bp, Zea mays
  unsure (1)..(455): unsure at all n locations
ttagaaactcaagctttgtggggggcaagcagacactncttcttctgtcgttctgatncaagcttnggattcttcttttccacatttgcttcatattttgatgtcgcgaaaccgaagccctctccatcgatcccgttcacgcgctagccctttggagctgaagctccttggttttgtttccgcttcacgtgttacttcaaatgaatgtcagcttcgctatctttttagggtacctgaaacatacttgctttgataatataatggcttgaggaccttctgcaatagagacccccaatagtagccactcgcggaattatgttgtttttcataacaagcttagaccgtgaaatgaattanggaggccttgcaccgaaggtctaaaaacactatcccgaagctcgttattaaaagcacgcttcanatatcttgtcagtgaggactatcgtgtagtgagt

SEQ ID NO: 70182 - DNA, 467 bp, Zea mays
  unsure (1)..(467): unsure at all n locations
gcttgttcactcccgcagnggtgttatcctgtggaggtcggatttgtttggctntgcttttcttgtcatacaaagccttgccaaggcgagccacttcttgctttaattgttcattttcctttgcaacctcatccaaacatgtctctacaacaatattctcaacaacgacttggttgcaggggttagaatcatcaattaaatcaaagcaggaagtagaagcatctttcttaattatttcaggtatttcaactaaagatgctgctggggtgctaccaatgttttctagcttagtagttagctcattattgtgtatgctaagaatttccattttctctagcaaattttcaatagcttcttgggagctagctaacttagccttaagttnttcattctttttaataaagctatcatcggtagcagtggatggagcactagaatctaatagctcaatattagttgatagctca

SEQ ID NO: 70183 - DNA, 318 bp, Zea mays
acactatcaaactcagcttaacccccgtcccggagaccttagcggtttctttctatccataatggatgcgacaatcgaatgtcatacttgatgcatattcactttatttgttcccttgtatgatgtactgtttgtgtcccaatttgaatggatgaatgtatgtatgcttgcaatcgcatagagaacgatctggtcgaagagcccgatgaacatcctagagaagcccctgatcagcagtcgttatgtggaggcaagtgttctttgacctatctcttgcctattcattctttaattcacctgccgctatacacatttatg

SEQ ID NO: 70184 - DNA, 335 bp, Zea mays
tgtgcacacctccgtgaggctccccgagcgaggaatcggtgtttctcttcccggatataccagtccacgctcgccggagctctcgaccccgccggagtacgtggaccgggtaaaccactccaccatccttcgattccttgtgcacacagtcgttgcgtgaccccgtgaagctcaccgtgccctcggattgaaccagatcgccgtggttaggccggtatactcgccgccgacgaggacacccgcctgcccgcgtggaccgggcgatttcggccatctccgacgtcgagccgtacctcgacgtgaccaccagagtctgcccgagccgaccccaccct

SEQ ID NO: 70185 - DNA, 468 bp, Zea mays
  unsure (1)..(468): unsure at all n locations
tcgtcctcttttgtgaatcatggtaacaatgattatgagtttagcaagcatcctactcgaatctaagttgttaaaggatttagcttgtggtttagatgatggaggggatatggaggatgatgggtcttttgaggaacctaatgaagacacggtagccattcgtaagctagcagaagacaatagtcaagaattatatccgggttgccaaaactactcaaagctacgtttcctagtttgtttgcttcacatcaaacttcttggaggatggacagatagaagttntgatttgttggtagatttacttgttgatgcactacctaagggttcgacacttcctagaaactttcatgaagcaaagaaagtggtcaaatctgtaggagtcgggtacactacaattcatgcatgtgaaaatgaatgcattctattttggaaggagcatcnaaaacttgattcatgctcagtatgtag

SEQ ID NO: 70186 - DNA, 332 bp, Zea mays
tgtccagagcgcccatgtatggatgttaatgttatcacattttttcgccgactgtactattgtcggtgacgatgaacctattgttgcccagttcgattatggtcctatagaagccgtctttactaaaccaaaggaatccgtgaatcatctaaagccgctcttcgtgcgcggtcacattgatgggataccgattgctaaaatgttggtagatggaggggcgactataaatctaatgccttattcattgtacagaaaattaggtaaacaagatgatgaacttgtcaaaaccaacatgaccctcagtggtgttggaactgatagttcgatcaaag

SEQ ID NO: 70187 - DNA, 469 bp, Zea mays
  unsure (1)..(469): unsure at all n locations
tgctcgcgccgctcgctgacgcgttttgcgaggtcgatgatctcgcgacactccgcgacgctgtgtttaccgttggggtgcatagggcatgagccgctgttacccctctgcagtcgtgggcgtttgttacggtcgctctggcccgcagtcgcggctgcgacgactagagcggtggatcgcggcttctggtggtcgcggtccttcttctttttctttttaccgtcccaggggacggtacccgagccactcgtctgggtaaccccggtctgcggggccgagtgccatgcacggccctcggcggctctggcgcacttgtcggccagagcgaagagtgtggagacagtctccacgtcatgtgtggccaacttctccaacattntctcatcacgtactcccaggcggaaggccgtgatgatggaagcatcggaaatgcgaggtatagtacctcgcaccttggtgaagcgggaga

SEQ ID NO: 70188 - DNA, 471 bp, Zea mays
actataccacactcaagcttcagctccatctatgttatggattgctgttgagtcactctattttccctctgcccttctggcagcttcctgacttccatgaatagcaatgggtccttgatccgaaggtatcttcatgcaaaggtaagcaggatgaagaattgcttcgaaagcattgagggtgccacgaccaataattgcattgtaagggtattccatgtcaacaatgtcaaacacaacttgctcggttctggtgttgttgatgaagccgaaggtcactggcatggtgatcttgcccagtgctacaatctgtcttcctccgaagccacagagagggtgtgtagcatcatgaatcttgtcttctggctcttgcatttgtctgaaggccttagcaaatataatatcagctgcactgcctgtatcaaccaaaacattgtggaccagaaatcctttgataacgcaagaaataaccat

SEQ ID NO: 70189 - DNA, 354 bp, Zea mays
taatacatctacgttatcttaaaagacactctattactttattagactcatcttatcttgaagagactttatctcaccttaatagatctaactgacctcaaaagattccctcttatcttaatagatccatcttatcttaaaaaaattatatcttatcctaataggttcatcttatcctaaccactttacttatctcatcctaaagtaacaaccatgatctaattaagaaggtcctatctagtctatctagtcataacaatctaacctagatctgatccagtgtgatagaataatctaacctaatgaaggctaaccttaagttgagctaatctagagtaagttacttaatgtggg

SEQ ID NO: 70190 - DNA, 356 bp, Zea mays
tgtctgtcggaatcaaacgaagctccagtttgaagcctgcttcgtcagataaaacttcggaagaagaaagtattaaatttccacacattcataattaaatggccagagtgcgttctaccgccagggttgagcgtgaggggggcgaaactgaagcttcggagactgttcccatctccgaagccatgcaacgatccgggctggtgacttcagaaaagatccctagtgatgatgcagaacaagcagaacaagcaatcgctgaagcagaagaagaagatattgaggaaactgatcccgaagatgattatcgcattgccatgccaagcaagcccagccacttggacttcgggaaatctact

SEQ ID NO: 70191 - DNA, 471 bp, Zea mays
  unsure (1)..(471): unsure at all n locations
agtgttggaaggcagctgattagttctcataatggagaattgtttttcttgatgttgaaatgcaggagtttgttcatttgctcccttatttaatccatgtattccctaaccaagtcagttcatcttgcatgaagaaacagatgagcaacctgaccaaatggatttctacccaaatgcatgatctcttgtaacaaatgtgaactcccaacccttggcttgctgatggatactaaaaggacctactcaatgtcgaaagtagttcaacaagttggttttactaacttgtaactgccttatcaacaaaggttgagtttagagattgttttatcgagttgtctaaactcactntagttcagtctatcctgaagaaacccttatcaagatcaagtgaaggttatgaacatatgcgcagatcttgtgccatattggtttagattatgagcatatgcatcttaactccacatttgtgat

SEQ ID NO: 70192 - DNA, 412 bp, Zea mays
atcgaaactcagctggccctggccaggatgggtgcagttattacttgttttgccaacgacgcacatacggatgccgaggatgatgccctgctcctggcacatgcaagcatataagccatctgcagcggcaccgggcacagcggcactcctccaccttgatgagtcgaaagcacgcgctttcctctgcgacggatccaacaaggacatgatcgaatgatggtgcctcgacaccggcgccactcatcacatgaccggccgacgggagttcttcaccgagcttgactctagcgtccgatgctccgtcaagttaggggatgcctccggcgtagagatcaagggcgccggctcagtcgtcttcaccggcgcgtctggtgagcacaagctgcttacctgagtctactaaattcccgcg

SEQ ID NO: 70193 - DNA, 434 bp, Zea mays
  unsure (1)..(434): unsure at all n locations
actcaagcttcggaaaccccatacttctagccatctcccgacagacggattattctttgctgtctgggaggcagtataggaaatcttcttcgttcgtcccattgaacactagtgcccccttcagatatttcaattctttggcatagtgattagcttcaaaaacttcttcttccgataactttttccccgaagcatgtcgcacgatataatcgtatattttggaagatgctntgggtgcagcggtatcaatttcttcaaccaaagttggctctgacattgtcatttttccggttgcctatgcaatttttgtttcttctgcttccaaaggtattaccttggttggttctgaatgcccggtttcaattccagtctgttgcttcggagcttcagcaacggatacttcagcaagcgccttagaagttccagaagtcttc

SEQ ID NO: 70194 - DNA, 397 bp, Zea mays
tcggcaatctgcttgtacctagcgaaggatatggtagtattgcgctacatacggccggccctctacttgaacctcgactaggttgagccatgcatgatgcatgggaaacttccaccagttgctagtttctatgcacagcgcaatcacgaaaacctacctaaaacccggccggtggtggccaagtcgcgttggcctcctttcggaaccgtctcagaaggaccggcggccggggacccttgaccactcaccacatgacatgaagaccaccagaaacaaaggccaaagccatcctttttcgacccacacacacccgggcgcgccaacctgcaccggtccaagcgacaattaatgcacgcgaatgctggcagcgccgtgacacccaaccggtcggcgatcg

SEQ ID NO: 70195 - DNA, 465 bp, Zea mays
  unsure (1)..(465): unsure at all n locations
tcggcgacggctaanagatttggcagcaaaacagtgcaaatagcaatgaatgctgtggtaacttcacacctactcgtctgtttatatagtgctgcaggtaagaaggcgaagcgccagaatttttacaccaggcggacacccgctcgcactcgctgcgtggtggaccgcagagaccgaacagtaactctgcatggtggggccgctacacgctgggagattgaatcgtttctcgacaacgagctcagggaaggtgttttttagaccttcggcgcttcgaagcttaagagactntnttcacggatcaagctcgttacgaaatacgatctagcaccgcgaaaggggctactgttgggtctatgcttcgtcgccgaaggtcttatataaagaagtgatcctcggctgaagctgtttgcataagatagccgagaggtcctcttcgtgaagcttcggtattacaaaccgact

SEQ ID NO: 70196 - DNA, 465 bp, Zea mays
  unsure (1)..(465): unsure at all n locations
cggaccttgaaactcagcttgggagccctgagaagttctgtgggatagttccattgatcatgttgtgcgacaaatcactgccacataactagaatgagatcgatgattaacgaaaatagacaaacgttatcttaattacatacattgtagtgatattggaagcgagcttattagttggtatagatcctgtcaactggttccagctaatatccctgaaacatgaatctgagagttattaagacataagacatgtcctgaactgtgtgaactgaaaagttgggtgcctattgaaaagggataaaaccacactaatctttntttcgaaaagagcgcaggagaactgtgcacccatatattaaagtagaggggatagggggggggttagaaaggacccatatacaacacactccttatggaggccagaagcaggcatttcacaaactatccataaagatcaaaactaaa

SEQ ID NO: 70197 - DNA, 388 bp, Zea mays
  unsure (1)..(388): unsure at all n locations
tccacaggaatccaacacacagtggagtagggtattacgctcctgcggcccgaaccactctaaatcctcgcgtgttcttgtgttcggtgaccgcttagcaagataggcaaaacgcttaagccccttcctcatcttaggatttagggcgggtgcactccgccacccggccggagaattccctctccaacatttacttactcagaactaaagatgaggcactagacactntaagatctataagactgaagttgaaaaccagctagacaagaaaattaaaaggctacggtctgatagaggaggtgaatacctttccaacctttttgatgagtactgcanagagtgtggaatcattcacgaaaccactgctccatattcacctcagtcaaat

SEQ ID NO: 70198 - DNA, 463 bp, Zea mays
  unsure (1)..(463): unsure at all n locations
ttgaacgtactaagcacatgccgngaaanatggtaaccgttaaacctagtacctgagtgaagccgggcgcggactttatccctcatgcgacctgagactgggtctcccatgctagctatggtgggtacaagtgcgatcactgcacgacggcagccggggtcagtggagcattgtatgcgaaggcagtgaggcctggacgcgaacggggaatcgatggggacggttgtcatgtgcggggtcggagtaccctgacatgccgtgtgtttaggtttaccttgcaaggataaaactcgattcaaatcgtctgcttctcgcagctaatgagactgcttgaccccttgtactacatcgagtaagaagtgaaatgaggttacatgagataatttgatgattgaactaaatgcttgttaacatgtatgcttagaaggagcaaacctagctaagatanacgatgctagaattg

SEQ ID NO: 70199 - DNA, 460 bp, Zea mays
  unsure (1)..(460): unsure at all n locations
tactcaagctttataggagacgtcaatggacatataggcacaacgagtgcgggtttctttgcggtttatggaggttttggatatggtagttagaaacttataatcatgagggaggagccttagactttgcggtagcttttgacgtgttggtagccaacaccttctttaggaagtgagactcccatttagtaacatatagtagcggctaccactctagtcagattgactttgtcctcacaagaagtgaggatgaacgagcatgcttggattgtaaggtgatacctanagagtgtgttctctctcaacataagcttgtggtggcggtctttcattatcagttgtgtgctcgtacaaataaaaaaagcctagatagctagaacaacctaaagaagtacaagctataaagtgtggcaaaaggtaggacgtatgggcatctttaacaatggacatatataggatg

SEQ ID NO: 70200 - DNA, 372 bp, Zea mays
tatgcatgagaagggacctgttaccaaggattgtttataattatatgaataataatctgaattaatgacgccaattcctaactatatgcaaaaacaaaaactggctatatgtacttcatggaattatacatgcttaccttgacttatatttacgaaaaattatgcaggccctctcattattcgaggagccacccagtgatgaggaaaaagagtttcttcgtttgcaggttagtgtaagcatatcattgtgacgtaaacaactctgattatacattcgtttatataattatgtatattcattgtgggctccagattattattttgtcactgcaggctagtctaaacgagagagaaaatgacgttgtgcgttaa

SEQ ID NO: 70201 - DNA, 428 bp, Zea mays
  unsure (1)..(428): unsure at all n locations
actcagctcctccgcattttgagcccnncgggcatccgaaggtaacaataagtatcactgggagttatgaagcttgcctttggctcatcctctttcttcatccaaatttggtgatagcccgagtagcagtccaataagctcatgagttccaaagaagctgctgcatcgacaagggagtctattcttggtaaagggaactcatccttcggacatgccttgttgagatctgtgaaatcaatacacattctccatttcccattagccttcttcaccataacagtgttagctagccactctggatatgttatttctctgatgacaccagcactaagaagtctctttacttcattatgagcacctcagccttatcctcagacattntccgaagcctttgctttcttggcctaaaagatggatctacattgagt

SEQ ID NO: 70202 - DNA, 479 bp, Zea mays
  unsure (1)..(479): unsure at all n locations
actcaagctggacattgtctccctattggaagccaatgccatccttaatgccagggcgttttccattataaagcatactatgagcaaatgtaaatttctcattttctagttcatgctcggcaattntagcatctaatttagctatatgatcattttgttgtttaatcatagcaaggtgatcatgaatagcatcaatgttaacatctctacatctagtgcaaatagaaacatgatcaatcgtagatgtagagggtttgcaatcatttaatttaacaatcttagcatgtaaaatagcattctcatctctaagattggtaatagaagtattgcaaacatttaagtctttagccttagcaattaactnttcattctcattcttaaggctagtgagagagggcattcaattttcaatcttagcaataaactagcattatcatttctaagattggannatgaatatcacaaatatttgacttctc

SEQ ID NO: 70203 - DNA, 387 bp, Zea mays
ttctattctggagggaggcagagatggtggtgcttcctcttttcgctcagtctggcatccttggctcttggtctgcttccggatcttcttagtgggggcgagcttctttaacttcttatcgtagtccatcttcagagttcggtaggcctcacgagtgttggcctcttcaccttctgctatttcgagactctcttggagggatgccattttcttctttaattccttgatttgttgttctaggctttccacccgggaatatatgtgggtgcagtgggagaaaaggcgtcatagtggttgtcaagagtgtggagatatccggccatgtagactatggtggggtcatcctcattatgatctctccctgacagggcctgaagtcttttcctc

SEQ ID NO: 70204 - DNA, 444 bp, Zea mays
  unsure (1)..(444): unsure at all n locations
tctanaaagatggaaaggaatgcgacatcagctggtattttagtggcccgatgagttcctccaagaacaactcatgtttcttcttatcttcagcaacctcctcaggagcatatctggactactggatgaatttatctttgtactcattcactgacatgttctcctgcgtgagggagaggaactccttcttaatcttcatcaagctagcacgaatatgatagtttctgaaattagttgagaattcttcccaggtgatggtgtcagcaacggcatgagcagcacagggagaatcccaccagtcagcagtagtgccagtaaggtgcccaatgcatatagtaccttctccctattagtgcattgtgcgatattgagcatcttttccactaactatagccaatcattcgcctaaagtggatctaaggagctagaacatgtgggtagctt

SEQ ID NO: 70205 - DNA, 322 bp, Zea mays
  unsure (1)..(322): unsure at all n locations
ntaatggctgtactgcatgcttaaactcacatgcaagctgttttatgtcgattcatccataaattgatactcccttcgttattttttatttgtcacgttttacttcaaaaataaactaatggacgacaaatattccagaatagaggttatattaaagagcctgcctatactacggtgtaccccttaaacttctcgtattttggacaagtttttcttggtttcatcacctgcagtctgcaattatgttgtgaaaattctgctttcattttgtgatggcagcttccaaactgatggggaaggcaaacaccctcaacaagttatt

SEQ ID NO: 70206 - DNA, 406 bp, Zea mays
  unsure (1)..(406): unsure at all n locations
nngaaatagtgccaaagcttcctggatgccattaaaacagtatataacactntctctaattctgtgtagttgttctttgacatactaagaacttcagatacaaaatacactgggacctgcctcttgacttggccatcaagcttctcctggaccagtgctgcacttaccgctgagtgcgaagctgccacatataataacaaaggagcccctggcgtaggtggagttagtgctgttagatcaatcaaatactgtttcagctcttcgaaggccttctgctggattggtccccattgaaagacttcngctgacttcagcacttcgaagaatggtaaatntctctctgctgatctggatatgaatctattgagagatgcaaccctcttgtaaccctttgaacccctttttt

SEQ ID NO: 70207 - DNA, 448 bp, Zea mays
  unsure (1)..(448): unsure at all n locations
ttgagtgactgagactaacaaagtggtccaactaggcatttgttgcatgatagctntctactaagctaacactgtcctagatggttgccctcatcctagagtggtgaacaactaattcaactataggggtgaagccaatggaaaggtatacaaaccctaacttagataggtaggtgaggtggccggatatgaacacctccagcagccgctatgtcctctagtgggaaaaatccgtgtcgtaagggtgatgatgttgtgagtcataacaaagtggaatcctcatgtagcattgtatagacccacctgtgactctaggatagggatcttacgtgacattaagcctatttttcatatcatctangatgaatatcttaagaattcaaagttaggggatttacaatatgggcttcgtggatccagtgatgaataatcaaaataacataacatg

SEQ ID NO: 70208 - DNA, 441 bp, Zea mays
  unsure (1)..(441): unsure at all n locations
nggctcacataggctaaagggtgattatcctgcagtagcactgcccaatgcctttactcgaagcgtttgtttcaatggtaaagggtttatcaaaatttagaagtgctaggacaggagctgaagtaagtgcatgttttagtgtttggaaagttgtgtcatgcacttatgtccacacaaacactacttccttttttaataaatcagtaagtgggcgagcaaagaccctgaaagtcgcctagaggggggtgaatagggcgaatctgaaatttataaacttaagcacaactacaagccgggttagcgttagaaatataaacaagtccgagagagagggcgcaaaacaaatcgtgagcaaataaagagcgagacacggtgatttgtntaccgaggttcggttcttgcaaacctactccccattgaggtggtcacaaagaccgggtc

SEQ ID NO: 70209 - DNA, 447 bp, Zea mays
tcgtaattatactctcatcaaccttcgttcaaggcccattatcctcaagggaataatgtttcatgaacgaaggacgttaacatttaatattttatgttgccttgttcttaattcatagcatttgagaacaagtccccaacaaatacaaagtaatgtaaaacgtgaaacattaaagataaatatattggaaataaatgacatcattcacagatcttattatatgaatctaagatgtttgaatataacgtttaggtacatttatacctttgccttgacaaacaataattcccgagtgatgcgtttgcaattacaggaatgcgtgaacagtaaaggaatattgttcactatttataggcacaggacacagcctgtgaggaattacaatcatgcccctcataaaagtttacaacaatgactcagacccttatggactaaaaggtcattcta

SEQ ID NO: 70210 - DNA, 376 bp, Zea mays
  unsure (1)..(376): unsure at all n locations
ctttaaactctgcttntcagaaggaaaggagccttcagtagcgaagaagccagatgagccgaataacgaagaattattcatgtagttgaagttatcgagcagacaccgccgctggcatcggcgtcaaagactccagctattaagagcactgctgctgtcgaagctgcacccaccgaagccgaaagtgccgaagttgaaaccactgaagatgtaaatctagaggccacactctctgaaattgataccatgcttctggatgcggtcgcggaagaagctgctgcagccgctgaagagatccagggcacagtggctggaaaaggaaaggagaaagtcgaggatacttcagaagaagaggacttcaatttccaagatatac

SEQ ID NO: 70211 - DNA, 379 bp, Zea mays
  unsure (1)..(379): unsure at all n locations
tatctcggcgtgctggccgcatttggtttatggaagtatctgtatcactgtcgtcctgngatgngccgggggcaacatcagttggtcggaggtgccagtttggagatgcgtcgtgggcggaaaaccgagtatctctaaatacccctcaaagacagcattaaaggttggcgtctggagtggtttatagttgataactatggaaattctctcccctcccggtcaggaagacagccagacattcgtactccgagttggactgagtttcccacggatcaagaggtggccgaggcangcgtgttgctttctgaagttggattactgaaagagagaggtctgaccgctgaagctgtggtcacagattttggtttcaagaacattc

SEQ ID NO: 70212 - DNA, 274 bp, Zea mays
tcccatcttacactgcagcctaaattactccaacaatacaaatgtagaattgtggattttattgaacatttttggagaaaaaataattacatccttcttaaggtgaatgtcttttgcctttattatttgtatcaatggacacagtattgaaaatgagccatatacaagagaatcaattcatcatgtactcatttgtccaaataaaccattacatgctcctaactcacctggagaactatgtcaatgagaacattaccatatagtcctagggggt

SEQ ID NO: 70213 - DNA, 422 bp, Zea mays
  unsure (1)..(422): unsure at all n locations
tggaccgatcaaggtttgtttcctacgatgatatctatttggatcggtacagtgttcggagaacttagatatatcaatgttagttaatctacattaggatcactaataagatagtgtttggtttcagagtctgttgggatggagcagctctataccagagaacgactctattcgagagattttgggagcataatggttgagtattcgaacataattnttttagtcaccctgtcttatatgaaaccaatctaaacaataataaattataaactaagtagctctgtcccctctatactcggtaaccaaacattaaaatattctcgtcagattagtccacctccggctggtggagcgttgttatccggtgcatgcttatanttgtgacgccgtgctaattcaatgacagggacttgactacttga

SEQ ID NO: 70214 - DNA, 317 bp, Zea mays
tgagatcatctgtttagtctatgctaatgagttcgactgctaattagcagcgccttccagtgcaaaacagcatgtgtaatgtataactgtcaatattgccttaatttgaacaaacttgttctttttgccagaactttattttggtaatccgaaatgattaggttgtactattttccgtatcaaacagaacgaaaactcttgatattcacctgctcgaggtccgtatcagctgctggcagttgaagcgtgtgttgtggtggagttgcaaatctttagattgacgacaaggatattcatacggaagatgcctgatgcgt

SEQ ID NO: 70215 - DNA, 356 bp, Zea mays
  unsure (1)..(356): unsure at all n locations
ntgcacgggaaaggagatgatatgaagctttggaggtgcttgagcgggttaattcaattcttattaactcaagctatcaatcttacaatgttttatatctctaagattgacccaaagttattttgaataactatatctaaaactcatatcatctcgagcaagatatttatgttgtatggaataaaggattatcctgtgtggaaaatcaaagtctacaacatggaggaaagccaaaggatggtaatacttatatctctaagtgagagtatcttcaattatcatttctcttgtgtcttgtgtagtcacatagaanaaggaagtacttaagaatattgttaaattatgtcaccattctt

SEQ ID NO: 70216 - DNA, 365 bp, Zea mays
  unsure (1)..(365): unsure at all n locations
cggaggcgtcnattggaagcctgcttggtgtatactccctcttctcttcttctgttgccttgaatgcgacgggttgcacctcgggtgtggaggaggcgccttgctctaagttgacgatgtgtttggagtctttgatcataagatcaaagctcacaaacttgcctatcacttcctcgggagacattaatttgtatcttggatccccacgaattaattgcacttgagtaggattgcaaaaaacaagggatcttagaataaccttgaccatttcatggtcatcccacttagtgctcctgaagttgcgcacttggttcaccaaagtcttgagccggttgtacattgcttgaggctcctctcccttgttg

SEQ ID NO: 70217 - DNA, 414 bp, Zea mays
tgaagccatggtaagtagcataggccaataatatacgaattgactcaagcctagctacgggtgcataggtttcaccgaaatccaaaccttcgacttgggagtatcctttggccacaagtcgagctttgttccttgtcaccacaccatgctcgtcttgcttgttgcggaagacccatttggttcctacaacattttgattaggacgtggaaccaaatgccatacctcgttcctagtgaagttgttgagctcctcttgcatcgccactacccaatccgaatcttgaagtgcttcctctaccctgtgtggctcaatagaggaaacgaaagagtaatgctcacaaaaatgtgcaacacgagatctagtggttacccccttatgaatgtcgtcgaggatggtgtcgacggggtgatctc

SEQ ID NO: 70218 - DNA, 393 bp, Zea mays
  unsure (1)..(393): unsure at all n locations
ntaacatcgatgtttctcgaggcatctttagcattgatattatttattttagtgcatatatataaggcttaacgctcaagtaaaggtttactcctttgctcttcgggaaaaaaaaatgtgtcttaagctatgacacgtgtccatccctgcttatgtcactgatttgtccttggcctcttagtacttgaaacgtgtccagttcaaggcatacgacttcgtgcatgccccaacattctcctttcacgtcactagaaaaataaaaccctaattgagcatacaaagaatataaataaatgtacgggtatagtgtatcanaaggagccaaaagggaatcattcataccattggatgacacgggtatctccctgcttggggtatctcgagggttttaat

SEQ ID NO: 70219 - DNA, 454 bp, Zea mays
  unsure (1)..(454): unsure at all n locations
tcgacttagaggtggaaaatgtaatcgacttaaaggggatatagctgtttagtcctcggtaaattaccccttagtcaatagtaaatgtcaagggcatggttgtaattttacacaggctgcgtcctgtgcctataaatagatgaacagtagcaccgtactgttcacgctgacttgtattcactcttacgtcacacttggattcttaccttctgtcgagccgaaggtacaaatgtaatttaatatcgttaatgcttattcatggtcattcaataagaatataaataatctgatgatttgagataattacttgtactctttatatgtcactcatacttctgctttccattgcttattgagatgatgaaggtatgcccttcataaccttcgtctgaagatcattatatcctaanggagataatgcttcgaaggacgaaggcctttaacgaataacatt

SEQ ID NO: 70220 - DNA, 467 bp, Zea mays
  unsure (1)..(467): unsure at all n locations
ngtgaagaatctntattctaacatgggccagtcggcgatctcttttccnacccatnatagtcttagcaattaagcatgtatcgagtgtagttctattaaaatcaactaattatagctgaccctctaatactcccttagatgctactgaatcatcacttcttctaaagacaataacacctatatctgatgttggcgacttgttctcaaatgctatgaatcaagaacaaggcaacacatagtgttaaatgataatagtccttcgtccttctaagcattatttcccttatgatataacgatcttcggacgaaggtcatgaaggacataccttcatcatcacggttataagataatgaaagatgatacatatgaaacatgaaagattatatgaaccgacatataacagtattcatatattatcattatgtaaacttccacactaaatataatagtgtagtatcattatacc

SEQ ID NO: 70221 - DNA, 451 bp, Zea mays
  unsure (1)..(451): unsure at all n locations
ttaattacttcctacatgcttataatgtcatccttgtctgtgtttgatgccaaagggggagaagtttacggaccaaagcattgaatactatatcaaacaccaaacaccaccaatttaaaatgttatatctataaatggtttttccggtgtttttggttatttggtccacaaatatgaagtaagtgaattatggagttagggtgaggcttaagtccataatatcacattatggggacaatcatgcatcttagcaagtagattgcatattttaattcaaaaacttgtattatttgcttgctttggttgtgttgtcatcaatcaccanaaatgtggagattgtatagaatataggacccgggccttctggctaattgagtttttgtgttcgatgattaacancaacttgcggactaatatgtttgctagcgttatatatatagttcacaggatg

SEQ ID NO: 70222 - DNA, 357 bp, Zea mays
  unsure (1)..(357): unsure at all n locations
atactctgagatagcgaggagcttcagaggaagaatccaccctaagcatgtcaaggcaatccataatgccacctcaagtgacgacaagggaaaccatacccaaagcaacaacacagctctgactcgtcatgagcacaacatagctctttccggccaccggctccaagaggcagaggggggagaagcttctggggaagatatggagatcaacccatgaaattgttctgttgttctgcggtaagataagngcatacccaaaacgtgccagttacatcagaagagataaaattgcgatgtgaacatgctgatcagccaagactgtgcagactgccaatattcaataaagctagcctgcta

SEQ ID NO: 70223 - DNA, 64 bp, Zea mays
tcacctgccgggcgatattcaactggtgataaaaaagcaacactgtataagccctcggctgggc

SEQ ID NO: 70224 - DNA, 369 bp, Zea mays
  unsure (1)..(369): unsure at all n locations
ccatccgcatgatatcgtcgatcttctttggatttgcttcgatacctcggtaactaatgatgaaatcgagtagcttccctaccagaaccttgaacatgcacttgtccggtttaagtttctagtggtagcgcctcagactgttgaagacttgttgcatgtcgtcgatgaagttttctgggtccttcgtcttgatcacaacatcgtctatgtatgcctccacgcgcttgccctaatggtcggctaagcatgtttggatggctcgttggtaggtcgcccctgcgttcttcaagccgaatgacattgatggtntgcaacacccacaaagtgtgatgaagagagtcatctggtcctcctctgctcgacagatct

SEQ ID NO: 70225 - DNA, 436 bp, Zea mays
  unsure (1)..(436): unsure at all n locations
actaagctttaagggaaactgtataggttaactaacgtgctattctaaaaagatagaccttgtgcagcatgtcaagcaggtaaacaagtgggaggagcgcatcacaacaagaatgtgatgaccacatcaagacccctggagctgctacatatggacctcttcggacccgtcgcctatctaagcataggaggaagtaagtatggtctagttattgttgatgacttttcccgcttcacttgtgtgttctttttgcaggataagtctgaaacccaagggaccctcaagcgcttcctaaggagagctcanaatgagtttgagctcaaggtgaagaagataatgagcgacaacgggtccgaagtcaagaaaccttaagtggaagaatttcttgaggangaanggatcaagcatgagttctccgctccctacacaccacaac

SEQ ID NO: 70226 - DNA, 328 bp, Zea mays
  unsure (1)..(328): unsure at all n locations
ttcaagcctagctacgggtgcataggtttcaccgaaatccaaaccttcgacttgtgaataacccttggccacaagtctggctctgttccttgtcaccacaccatgctcatcttgcttgtagcggaagacccacttggttcctacnaacattttggtaggacgttgaactaaatgccatagctcattccttgtgaagttgttgagctcctcttgcatcgccatcacccaatccgaatcttgaagtgcttcctctaccctatgtggctcaatagaggaaacaaaagagtaatgttcacaaaaatgtgcaacacgagatctagtggttacc

SEQ ID NO: 70227 - DNA, 446 bp, Zea mays
tctgctcttcagtcagcattgtgggagcaactaccttcttgtcttgagacattatttcttcagaaatgatgaaaacatgtgtgtttaaaccgaagctcaggggcttgaaaaattaacaagcgctagtgagcaagagctataaaattgagaaaataaagcaaatggcacaagcagcgtatcaaatgcagtcgatgtaagttcctatttatacgcccagtgcgctccaaattggagggccccgtctgtcattgactgttgctattctatcaaagggaaggtgtttttcggaccttcggcttaaggccttcatccatgtcgcagtctgaattcattatcttaacaaattaatactgctaggggctacctgtgggggccttctacttcgaaagtctcaaaacatgagttacaatgtccttcaagtgtacatataacaggtccctcaactc

SEQ ID NO: 70228 - DNA, 467 bp, Zea mays
  unsure (1)..(467): unsure at all n locations
tggctgtcagttgtgatcccattgtcacactggtcatttatcgtcaaggatttggaatcggattacagaggcatacaactctcgcagaggatcaatgccagagaggtctacaaaatctctcatgagcaggtgggacagtatcaaaactcaatgttctacatttgctggatacatgatggctgtgcttcgacaaaacccaagtggcatgactgatgcagataaggtatgtgtatgtactattatgcaaatgttcttcatcaatgtacttgactacatcccagtggtttattaaatgcattatatgttttgcagacatctcttgcggctactcggtttgctgctgttgaaaagaagcccttccatttcttacattgttggtccatattgaaggatcaaccaatatggatggaccagcacatgggtaaccaaaatcctncaccgaaccctatnggtacccaatcaaatac

SEQ ID NO: 70229 - DNA, 320 bp, Zea mays
ctgctcaacatgctgaagctgaagctgagccatgagagctcctttaagaacatccttttgaagccgaagcagtaacatatcctgaacctatattagtcgaagatacggacaccgacatccccgaagcacctgccggcatgcatgattacatcatacgacatgcttctgggaaaaagctatctgaggaagaaactcatgaggccaaccattatgcaaaggagctgacatatcctaagggggcagtaatattcaatggaacaaatgaagatgactccttatactgcctgcctgataacaaagagctatccgtctgccgagag

SEQ ID NO: 70230 - DNA, 303 bp, Zea mays
  unsure (1)..(303): unsure at all n locations
cgggtcccaaattgaggctgctccaatccttgacagagtggtaactatttctntactaanattagagatttcaattcaatgctntatgtctagttttgagcatcctaatggtttaacttgtgaatagggaaactctatgctcgtatctgttgttgaacttgagcgtatctcacagagaacttcagatagtactacgctntcgttactatcagtgagtatcaatgtttaaaagaaaacttgtttattggtatggtggaacatatatctgtaactaatattttcgatatagaaggtatcacgtcg

SEQ ID NO: 70231 - DNA, 327 bp, Zea mays
  unsure (1)..(327): unsure at all n locations
ctcaagcttctaagggagaacacgtgataagtgtgactaacgtgcaattctaatnagatagaccttgtgcagcttgtcaagcaggtaaacaagtgggaggagcacatcacagcaagaatgtgatgaccacttcaagacctctggagctgatgcatatggacctcttcggacccgtcgcctatctgagcataggaggaagtaagtatggtctagttattgttgatgacttttcccgcttcacttgggtattctttttgcaggataagtctgaaacccaagggaccctcaagcgctttctaaggagagctcaaaatgagtttgagctca

SEQ ID NO: 70232 - DNA, 466 bp, Zea mays
  unsure (1)..(466): unsure at all n locations
cggacctataaaactcagctttctgccatctggcagttgaacaaaaagcttatcttaatgcanaacttgaagctgaagttcaacataattcagatttgaaaaaactattgacgagccttcaagaaaaatgtttggaatttagcaacaaatgtattcaacgactaagaaaaattttctactcagttggagccagcagtgagaaatttaccccgtcagctgaagatttaccaaagaccttcgaacatattgagggtgaaattgatgagcttgacgaagttatagccgggcacggtgacttctgtgcctgtgtagcttctcggggcactgctgcagctntcttaaaagatggttgcgatcatggaaagattgtcaataggcccaatttcactttatcaccatcaatcctagatgacattcctgatctcgcccgaattatttncaatagaattgtaaagatgatatggac

SEQ ID NO: 70233 - DNA, 320 bp, Zea mays
tggctaccggcgacaacatatctatccttgttggttcggcttttttctgatgagcttctctgaaaagttggctgtgggaaaaagccggttgtggggagaagttggctgagaagaatctgagtgtttggttcggctgctgtagagtaaactgtcgtactaatcaacacataatttgaaaatagctgatgtgttctttactaaaataagctgaataggatcgaataggtcacgggttcgaataagctgagcaacttcttgtggacgcaggcctagaaccgcttctttccactcgttgtccagccgctgtcgcacaccgcgct

SEQ ID NO: 70234 - DNA, 384 bp, Zea mays
  unsure (1)..(384): unsure at all n locations
tctaaagggagagcacattntatgattaacanatgttctttttgagaaagacaagatttgtagcgcatgccaggcacggaagcaagtcggagtccatcacccacacaagaacatcttgacgaccgacaggccgcttgagctactccacaatgatctattcggcccgattgcttacataagcatcggcgggagtaagtattgtcttggtattgtggatgattattctcgcttcacttgggtattctttttacaggaaaaatctcgaacccaagataccgtaataggattcttgagacgggctcataatgagttcgccttatggatcaagacaataagaagcgacaacgggacggagttcaagaactctctaattgaaagcttcct

SEQ ID NO: 70235 - DNA, 302 bp, Zea mays
  unsure (1)..(302): unsure at all n locations
acatttcccttcaattgagacgagctcccttatagcctctcattttcttacttgagctctttataatcttgtgtgatagaaatatcactaattcctgacatgtctagctcaatgagacagttggacttgctcgaccacaacatnttgatagcacatggggatacagtatctatattagctcatgtgcatatgagagggcggtatgatttcaaattagttaacacaacctcatgagccagtcttaacacgatatgtgaatccataaatntattatgagagtacataagcatatcatgtctttc

SEQ ID NO: 70236 - DNA, 462 bp, Zea mays
  unsure (1)..(462): unsure at all n locations
ggtgaagattcttcatcccaacatgagcaagtcgactatgctatatccaacccatattagtcttagcaattaagcaagtgttaatttcagcattgttctcattaaaatcaactaaatatagttgaccttctaacactcccttaaatgctattggatcatcacttcttctaaatacagtaacacctatatcggtaaaaaggcagttgtagcccattntatataattgagaaactgaaagcaaattgtaatctaaagaatctacaagaaaaacattggaaatagaatggtcaggtgatattgcaattttacccaagcctttgaccaaaccttgatttccatccccgaatgtgatagctctntggggatcttcatttttctcatacgatgagaacatccttttctcccctatcatgtggtttgtgcacccgctatcgattatccaacttgaaccactggatgcat

SEQ ID NO: 70237 - DNA, 410 bp, Zea mays
  unsure (1)..(410): unsure at all n locations
taatcttgtgtttggtctcttgcagcaatttctattgggatgatatatgggaggaccgatgagattggtgttccatttgttgtggcaatggattcaacaaacgtgacgatccgagagagggatgacaaggagcagatccgtgtggacatcaacgaggtggcgtccgtggtgaagtagctgatagaaggccaaagcacctgtgcagatgtttttgcaaagcatactgcccatatataaatagacatggtatgtcgtctctttntaaacatgtgcttacctaatgaatcaatggcacatggtgtacacaattcttaaaagtttcatagcctatattgaaantgaattctttataatatgaatgtgtgtcgtgatagtgctagaggacttntctggctataatgacatcatta

SEQ ID NO: 70238 - DNA, 248 bp, Zea mays
  unsure (1)..(248): unsure at all n locations
aagaaaccacagttaatcccattaatgctcacggaaagaaaacaagcagagagaagccacaacataagccatatggacttcaagaccaaacatgctacanatgtggtgtgtggagacattggtctaaaatatgccagtcaccanaacatgtcatagaagcatataaggcagagaacatgcacaaacagaaactgaggcccacttcaccatggcaaccaacaatgaagccatggaagaagaccctacac

SEQ ID NO: 70239 - DNA, 387 bp, Zea mays
gcttccgacagtgatatgtctcaagacgaaagggtgaaccgtcttatagataaaatgacttaaagacccataatattctgtgtcattattgtagttcattgtaaagggtataaatgtaattatatacaggctgtgaactgtgcctataaataggtgaacagtacccctgtactgttcatgtgcttccctgtaatcacgcattgagcatttgtttttgcttcacgctggtatttttgttttccttcatgccgaaggtacatttgtaatttattatcatttttacaacaatgaaatataaataagttaataataataatcatgtgtttaaattattttacatattgtctacccttcttcattatttgtcgtgtttatgaaagataacct

SEQ ID NO: 70240 - DNA, 441 bp, Zea mays
  unsure (1)..(441): unsure at all n locations
acacttcttttttataatnggaggacataccatgaggaaaggcactatggaagaagtcaacgaactcgattatgtcctcgacgtcgtacaccctcacgttgtgtgcaactagagatatacatagagattggagatatatttataaaaaaacatatgtgaaaaagaaagaacaagaaaacacctcgtgggccaagataaggccctaggcccattcaaaccaaaccggcctgatcgcgagcccatgcatcctgtcaccctcctcccatataaatcgaacgacaaccttggccttgccgggcctccccttcatcgatctcctncttccatataacccattcgcggggatagggctatcggctacctgtctcatcgccgaatcactgtagctttcgtctgtgttgcccatgcgattcttgtgtcgcgcctagactacccgagcca

SEQ ID NO: 70241 - DNA, 217 bp, Zea mays
gctcatcatccacacaaaaacataaagacgaccgacaggccactggagcttctacacatggatatatgcggcccgatcgcttacataaacatcggcgggaggtaagactgtctagttattgtagatgattattctcgcttcacttgggtattctctgtacaggaaaaatctcaaacccaagagaccttaaagggattcttgagactggctcacaata

SEQ ID NO: 70242 - DNA, 307 bp, Zea mays
tgttgcgcatgtcatgcggggaaacaagttggtgttcatcatccacacaagaacatcatgacgtctgacaggccgcttgagctactccacatggacctattctgcccgatagcttacataagcatcggcgggagtaagtactgtctggttattgtggatgattattcttgcttcacttgggtgttctttttacaggataaatctcaaacccaagagaccttaaagggattcttgagatgggctcaaaatgagtttgacttaacgatcaaaaagaatagaagcgacaacgggaccgagtacaagaact

SEQ ID NO: 70243 - DNA, 217 bp, Zea mays
aaggagaagagaagggttattaaaaagaaaagaaaaagggaggaaaaaagagaaaaagaaaaagaggagagaaaggggagagagaaaaaggagaaagaaggagagaggggaaaaggaggaagagagaaaggggaagaaagaagaggggaggaaagggaaaaaaggaaagaggaaaaaagagaaagaagagaaaggaaggaaaagggaaaaaggggaa

SEQ ID NO: 70244 - DNA, 351 bp, Zea mays
  unsure (1)..(351): unsure at all n locations
tgcagcaaatgatgctgtgtgtgattacctccgatgggtttaagaaggcctgcgtgtggaacatccacacttggcaaggaagaaccagctggagaatgatctggaggtgctgcaccagaagcctgtggataaaatggtatcagaaatactcgatataaatgaaaatatagaaagagtgctaggagaaaaatgaaaccatgcatattgggctcccactcatattactgtagtacttgatgtttggcaaaaaaaagaagaaggaattcactcgattacagacattgaggaaaggcaactcgatgcttgactatgagagtttgataacatatanatatctaaatattctgatta

SEQ ID NO: 70245 - DNA, 490 bp, Zea mays
  unsure (1)..(490): unsure at all n locations
tactcagcttagagcatgtatgatgatggtttgttatattttccaccttttatagataatattgaaaaaacgaaatgcatctcttcaccatatggacaatgaacatcatttggaatacattttctccgaacatttggattcttctcatttttcttttcttcggggagaacatgggattgttttgagggagagtttgatgtattagtatcatttgcgttctttatctcctttgtatttcattttgcataatataaaaatatagaaaatatgaaagtgtgatgaacattttataattcatatatgacatttgaagtcagggttgtgttagagtatatttgcattattatatttgtgcatatatggtatatcctttggcaaaactctgctaatggaatgacaacttataatatatcttaccatgctcgaactctcttgactactttgaacttgaatanacagctaagaataaatatcagagtatatgtactgc

SEQ ID NO: 70246 - DNA, 321 bp, Zea mays
  unsure (1)..(321): unsure at all n locations
accttgtgcagcttgtcgagcaggttaacaagtgggaggagcacatcacagcaagaatgtgatgaccacttcaagacctctggagctgatacatatggacctcttcggacccgtcgcctatctgagcataggaggaagtaagtatggtctagttattgttgatgacttttcccgcttcacttgggtgttctttttgcaggataagtctaaaacccaagggactctcaagcgcttcctaaggagagctcataatgagtttgagctcanagtgaagaagataagaagcgacaatgtggtccgagtcaagaaccttcaagtgga

SEQ ID NO: 70247 - DNA, 374 bp, Zea mays
  unsure (1)..(374): unsure at all n locations
cagccgctaccgacgacacatatcgtcgatagtttgttctattctaagttcaaggtaaaaacttttctttggcttttcattgttttaacgatgaaggagttttctgatgaaggttgtttttgcaaaaagtatgctattaagtaaggctttgaagatgcaacaggaccttgaagacaaaaacatgaggttataattgaaggtttagagagcaaaataaaagatcatgcagctgctcttgaaaagaaagactntaaacttcaaacaatggagggtttattggcagaagctgaagccaaaattgcaaaattgaatagtgaactcctctcaaagtcagaaagcttcgagcaagagaanaaagatttcanaacaaaact

SEQ ID NO: 70248 - DNA, 228 bp, Zea mays
gaagctaaatgagttgaattagctaccgagcgtgcggggcgtatatgtacccttattgagggtagcttcaaaatcgtttttacttcggaatacaaacatcttttataatgtagctgaactttcaccttcaccggagccatataaccccgaagctgacctggccatgaaggaagcgttagatatgataaaaatcgctaatgaagttgttgacgaagctatctacaaact

SEQ ID NO: 70249 - DNA, 409 bp, Zea mays
  unsure (1)..(409): unsure at all n locations
tgaagtgaattaatgagatctatcttgtttattggccttaacaatntatctttgttccgtttgagttcggtctctatttcacggataattcacagaacctgcataaaatagatgttaccgtcaactcttatttcgccgctcttgatggtaaaaaggtgtacaatcgggacagaacaataaatttggttgtgaatccagaacactatacacttattgatttagagaaagatgtggattcatatttcanatggggtagctgccataagccaattttctgggttgttgaaaagggtgacatatggcaatgtaagttgacttcagatgctcaacttagtgacctggtaagttcattcgatctcgtgaagttatttatgacaatgggaagatgtaaggagggagacgagacact

SEQ ID NO: 70250 - DNA, 478 bp, Zea mays
  unsure (1)..(478): unsure at all n locations
ctcagcttgcataattatgaatattgttagtaacaattgcatatttattaatgttgttagtgtatatataggataaatatgagaatataaaacgacatgtcttacatctgtcagtggggttttatcgaactgatgtgcaccagatacaggagtatcatgcgtaacagatttttgtccttcctgtaaccaataacattattaatataaacgtaatgaaacataggttataattaatattagcataatatgatgaaggtgtaaatacttacactatttatatctggtgttaactcaggagcagcaggcttgtcggttgtgggagcctggtgaattaaaagaataaagcatgcatatatactaatgttacttgcatacattgtagatgaaataataataatttgtgatataagggagtcaaacatttgattntggagtcttgtaaatataggggcttcataactcatctttttgagacgtc

SEQ ID NO: 70251 - DNA, 365 bp, Zea mays
tcaagctaccgcatttgagcatgatcgctgtcgcttggtcttattcttgcttggctgtccctatcgaccttttagcgccgtcttgaatcttttaatgatgagggccatctcttcatcattaagaccggcagcctcaatttgtgccaccttgctgggtagcgcctccttgctcctctgtgccttgagagcaatgtggtgagggctcgtgattggaccattcaaggcgtcgtcgacgtatcttgcctccttgatcatcatccgcccgcttactaatatttcgagtacctcctcgggcatcatcttcgtgtacctgagattctcacgaatattggtcacgagatgaggatcaagatacggtaatgacc

SEQ ID NO: 70252 - DNA, 371 bp, Zea mays
  unsure (1)..(371): unsure at all n locations
atccattttgcatcggntcggcatccggagtcaaatggacttgtcgaaagagctaatggcattataatgacaggaataatgaagttaatcttcaaccagcccagggggaagtggccagacgaattaatcaaagtggtgtggagccacaacacaacaatgtcaaggtcaacaggttntacaccattcaaattgctgtttggtgacgaagcaataaccccagaagaagctaaagcgggatcaataagaacagtggcttcggcagaggatgaagctgattattttgtggcaaaagatgttatagaagggatcaggcttcacgctgtggagaatatcaataaatatcaagccgaaacaataaaatggcatgacag

SEQ ID NO: 70253 - DNA, 401 bp, Zea mays
  unsure (1)..(401): unsure at all n locations
cctcaagaactcggtcctgtagttttccggagttccaaaggtgacaggcatgtagatgtgtccaagcaggtattctccttcggtcggcacaatgccaaagaaaggagtgtctgactcgtggagctctttgagtgcaactcccacgcctaagagtgtcatggggaaggtgacattgatgttgcttctcccgtccaccaacaccttctttaccctgctctctcggatcaccggatcgacgaggagcgagtacttgcccggatgatcgaagttgagccattgatccgcccgagtaaaggtgattgggtgttctgaccaccgatagggggcgggagcactggtggtcgccaccagtatctgtcggtcgttgagcttctattgccttntgttctcttatgacccgt

SEQ ID NO: 70254 - DNA, 381 bp, Zea mays
  unsure (1)..(381): unsure at all n locations
tgggaaaatcttcacagctgtcaagaagatgctccttgatgaaaaaaagggcagatggaccgatttgttacctgaggcagtctgggcactaaacacgactgagtgcagggcgactgggtttactcccttccgccttctatacggatcggaggccatgaccccgcaagaaataaagcatgggtccccgcgaacagctccgtcagccgtccccgacgtggacgagccaacttcaaaggatctcattgacggagaccgagtcttcgccctacaggccctanacaaataccaagcccagaccatagcatggcgcgaccacacagtcatcccgagggagttcagcgaaggggacctcgtactcatccgaacagctcngacggagtc

SEQ ID NO: 70255 - DNA, 280 bp, Zea mays
ccgagccgagggattcccacgcctcagggagacggatacctcactcgtaccttccgcgagaagcaactgtcgctcacacaaacatagcctgttacacgacagagactataatgctcgaaacaagaggaaaaaagacgcaacttctctagcacggcgagggtgtgttttctggcctcggcggtccgataacgcacactctacaagacgatctgatcctgcaagctcgggtcttcacgctgaatggatgccgatcaccctctgtatcgacgacgtcttcatc

SEQ ID NO: 70256 - DNA, 347 bp, Zea mays
  unsure (1)..(347): unsure at all n locations
cctgcatctgtaggacacacgtcgatctcgcatatgcatgctaagacaacccacatcttcttggcgaagtacatatatttaggctacttatgattcttcgggagaacctcacccatatagtgaacgatgtcgctgtgagcactgtgtgaaatgtcgcgctacgacatctatcgccattagtctttgtgagagtcccaataactgacatctaagtgtgctcgagcagtctctcttctcctgcggcgatgtagtcggaacgaattcttgagcatcgngtggatgctgcccctgtctcgtcagcgttctatttaagctgcctacctagatcatgcaacatatctgccatc

SEQ ID NO: 70257 - DNA, 176 bp, Zea mays
  unsure (1)..(176): unsure at all n locations
catcatccacacaagaacatcatgacgaccgacaggccgcttgagctactccacatggatctattcngcccgattgcttacataagcatcgacgggagtaagtattgtcttgtaattgtggatgaatattctcgcttcacttgngtattctntntgtanganaaatctcaaaccca

SEQ ID NO: 70258 - DNA, 368 bp, Zea mays
acatttaggaagtcattatacgccccatctggtaccgctttggcctctgaaggccgaaggtcgaaattgatgacgccgccaaaacgtgtcaaaaggccttcagtattgattgctccttcattggcacaaaagatttaattcaagaacatatagccttcagagtatggccgcttgtagagagctgggaaatgccgaaggagaccatcactaactctagcgaaggtgatttggtctggctgaagtatacattcaggttcggggataagttcgatgaacaaaacgacgactggctgaagtgtattgaagctacaagtgatgaactgcttggagcatattccaaggcagaatataatgcactgtctgtagcc

SEQ ID NO: 70259 - DNA, 408 bp, Zea mays
  unsure (1)..(408): unsure at all n locations
tctgtagccactggttctttatctgacgtcctttctcttatggaggcccgaagccagaagaggaaggccactagtccaatgcctccggaggacgacttggaccatgaaatccaaaacctggagatgctccatcaacaggtgcaacgaaagaaggagaagatggctcgtctagctgaccttcagaggcagatagatgaagcttcggaagaggttcatcatcttgctcaagatgaccagaaccgaaggcctccgcgcagagagcttcatcaggagggcttctacaatgaggacgactggtatgaagatttccatcatggannatttgcctttgatgatgcttctcctctatcaacagaattgcaggctacaccatgagcccagtcttacaagccaccccagctccccatg

SEQ ID NO: 70260 - DNA, 399 bp, Zea mays
  unsure (1)..(399): unsure at all n locations
tagttgagccatctgatagttgtattagatgtcacataatgttgaaattcctttacttgttgataacagtagtacaatgtgttccctctgtggatggcgctgaagaattggtgaaggatcttaactgtaataatgatctttacaaatttgtgagggtcgtgagagacagactccaggctgctataatcagtggtacgtcatgctatatattcctattacctttttctgtcccataggaaaactgcctatagtgtggaacttcaatcaccacatangtcccaggctcaggagcaaacatggtttgggttttgtttcttcgaagtcttttgaacttacatagatattnggttggttgaaatgtagcaactaactcatcattattattcattcagagctatg

SEQ ID NO: 70261 - DNA, 475 bp, Zea mays
  unsure (1)..(475): unsure at all n locations
ctttatcctatctatcctgggttgatcggacccataatctctgtcgaggagaatggctagggatccactatgatgctttcacaaaatattcttagtacaaagccacccgctaaggttgacacgtcactattgatggccctctgagtgaggtaacttagccaagactaccaccccatgttaacatgagctgccaccaaaccactgccacccnctcttgcccatctttcatgtatggttgctaagcactaagtctatagagctaattaccaaagccagagccattatagcactcgtggntgcactgttatcctgngtggtcactccatgttccatttaacacaaaatattctctgttaaccatcgggttaacatcataataaaacttcatttctggaacatagtattattaatagagtgacatcatatctatcaaggtgagcaatagcaagaattgctaagcatagcatttatccca

SEQ ID NO: 70262 - DNA, 400 bp, Zea mays
  unsure (1)..(400): unsure at all n locations
ngaatgcnggctatctgctatgccagaagagcagcttgtttattgtccgacatattataaactcgaaggttagcattctgaatttgtatatattctcatggatgtaactcttttagctaatgttttatgcttctttacacacagtgactttgtaagagaagaatgatgccatagataagagcactctgatagcctttggaaacctacgatccgaaattatcgagcttcaacgccagactgaagtgacggaaacaaacttgaatacccttgctaacaagatgattgaagatcatgctaattttaagaaattatctgaggaaaatgatgacacggttttgaaggtagaagctcagatgtctaaattgaaggagaaacttgttgatgaacgtgagaacttgga

SEQ ID NO: 70263 - DNA, 386 bp, Zea mays
  unsure (1)..(386): unsure at all n locations
agatagaccttgtgcagcttgtcaagcacgtgaacacgtgggaagctctcatcatagcaaaaatgtgatgaccacatcaagacctttggagctacttcatatggacctcttctgacccgtcgcctacctcagcatcgggggaagtaagtatagtcttgttataattgatgagttttcccgcttcacttgggtattcattntgcaggataaatctgaaacccaatgtaccctcaagcgcttcctaatgagagctcaaaatgaatgtgagctccaggtgaagaagataatgagcgacaacgggtccgaagtcaagaaccttcaagtggaagagtatcttgaggaggaaggagtcaagcacgatgtctccgctccctacacaccacaac

SEQ ID NO: 70264 - DNA, 411 bp, Zea mays
attctgataattgagtaatgctcactgattattaccaagaacaacagtcagaactcaaactactagactcactctagctttaaaacaaacatctctttgctgtcaactgtggacttgtcttattacgaatacgcagacattgagcataggtattattgtttccaaaacagctaacacaatatgctttccgacaaagataaaactaaactaaccattatcttgctgaaattacaataaaacgagtaatgtctcgcaaataacaggtgcaaaaatgaaactgtgatagggacttattctaaactacataactacaagacaaaggaggaacagagtgcatataccaatgaaatgtgtgtgtacaataccaaaactaccacaactcaaatgagtgcatgcctaaaggcattgatc

SEQ ID NO: 70265 - DNA, 443 bp, Zea mays
tcttagaggaaagggatagatacacataggttatcatactttgacgacactaactctccatactatagtgctataatggcttgttacctagaagcagttgatctaggtgtttggagagtcctcctgatgggatgatacttgtttagaatcgcgagaagctcaacgcgagtgatgaaaatattcattcgaatgctagagccaagaattgtttgtatgaatctcttagcatagaaatcttcgatcaagtactcaccttgaaaaatgctcatgagatttggcttatattacatgagctccatgacatcacatcacatgtgcatgatcaagaacattgtctaggctcgatgaatattattcttttcgaatgaaagactatgagcttgttagacatatgtatatccgttgagttgattataatgactcagtttatataattatagcta

SEQ ID NO: 70266 - DNA, 428 bp, Zea mays
actaagctaggtcccgccgggcgctgctactgctcgaagaggctgctctatggagagcccggatccgtcactaggctgctttaagattttggactatgatgtaataagttatacttcgcgttagacgatgaaactctctttaaggtatcatattaataaataccaaccatgtgatggtgattgattgaaatttttgattggatctttgtatgagtgcaatggtcttatggaatgatggccataagaacatataaaaaagattaaaactcaagccacttcccccccttagaatcttttctactcctcacttttctaaggacttcacttcctaacatatcagatggtgaacccacgtcaaggacctaacaaccggaaccagcgtggactacaagcaccaccaccaccatataccaatatggagcagttca

SEQ ID NO: 70267 - DNA, 264 bp, Zea mays
cgaaacactagaagagttactacttttgtgaatgactctttaaagtgtttgctaatatgtgccaaacataataacatgtgttggtcttgtgaatgattttgttgtggtgcttgctgatggttcatgcgatgttgatctatcattgcgccatactaattaaactttgatatctatgtgattatgtgtataaaaattggtgatttgtgatgctcttgtatatataacaatctgttgaatgctcattaatggtctactatcattatt

SEQ ID NO: 70268 - DNA, 352 bp, Zea mays
  unsure (1)..(352): unsure at all n locations
tgccagtacttgtcgaaacaacaacatgtaccagcacagtttctgataccataccggtgacctggccctttgcatgctgagggctagatatgattggacctttcaagatagctcaaggaggatacactcacatgttggtagctatcgacaaatncactaaatggatagatgtcatacccattgcttctttaacctcagctaaagccgtggaattcatacaagacataatattcaggtttggaataccgaacagtatcataaccgacttgtgggtccaacttcacaagttcagagttcttcgatttctgcgagccaaaaagcattcagatcaagtatgcttcggtagcacacc

SEQ ID NO: 70269 - DNA, 347 bp, Zea mays
  unsure (1)..(347): unsure at all n locations
tcggcgacgggttaaaaatttggcagcaaaacagtgcatatagcaatgaatgttgtggtaacttcacacctactcgtctgtttatatagtgcggcaggtaagaaggcgaagcgccaggatttttacaccaggcggacacccgctcgcactcgctgcgtggtggaccgcagagaccgaacagtaactctgaaaggtggggccgatacacgctgagaaattgaatcgtttctcgacaacgagctcagggaaggtgttttttagaccttcggcgctccgaagcttaagagacttttttcacggatcaagctcgttacgaanaacgatctatcaccgcgaaaggggctact

SEQ ID NO: 70270 - DNA, 413 bp, Zea mays
  unsure (1)..(413): unsure at all n locations
cgcaatgaggaaatggcgctcgtcaataagagcttgcgccttattctcaagcaaaggaggggaatgagtacaagtcccgctccataaaaggttgctacaagtgtggtaagcccggtcattttattgctaaatgtcctatatctagtgacagtgaccgaggcgacgacaagaatgggatgcgaacggagaagaagaggactacaagaagaaaggcggtgatgcccatgtttgtcgggagtgggactccgacgaaagctcaagcgactcctccgacgactaggacgccgtcaacatcgtgcgtaccaatggactcctcttccccaacgtcngccataaatgcctcatggcaaatgacggctaatagaagaatgtaaatccaactcctccactaaatatgaatccttcaaggatga

SEQ ID NO: 70271 - DNA, 479 bp, Zea mays
  unsure (1)..(479): unsure at all n locations
nctattctagtgatnaccataagattacaaggtgtatcatatctaccgaggctaccatattgaaaaagtatcactgtcatagctccatgatattcaaagataagcatctacgatcaccaactattatagagcatgagcaacctttatatacgtaattactcacaactctagataccaattactcgacttgtggaggtacccaagtcccgatcgctccatttcttgctcatcttcccttttccaccttgagactatataggatcactcaaaaaacagttagtctcaaaagacacaagttatgcgtgcatcccctaaagatgtgcatcaagtatatgaatgacttgcaccttgcacattctaacatcctcacaagtaaagggaaaacataccttggtctatgcataatatatcaattacatcacaaanagataccaattgaatagatgagataatacaacttatgactagtggaaacaatg

SEQ ID NO: 70272 - DNA, 347 bp, Zea mays
  unsure (1)..(347): unsure at all n locations
ggttcaataaggatctctgaaattcaaatntctgaatttcagcccttgagccaaacaccgagcgtgttcaccttgatcccaagctcaaatcctaatgaccccattgacaaaaatgtgcctaactaacccctctacctcatatcagaagatggcatcgggacacgtgctctggacacgtcaaacccgggatcttctctctatgcgcggcagtgagacaaacccgatttctcccctctctatctcttgatctagtcagcaaaacctgcaagcctccacacacaaatgacaaaggaatgtcaggggaagagatctctcactgnggtaatggctataatctcaaagatttg

SEQ ID NO: 70273 - DNA, 453 bp, Zea mays
  unsure (1)..(453): unsure at all n locations
ctacgcacccattcaacaattagcacacctgttatttcactaatggggttgtcatccaaaccaccaaaacccacaagagagctttcaatctccctttgtggtgattgatggcaacacaattaaagcttacacaatattaagatttaaaggacaattttgaattcttagctatagaatgccccctgagtatgtgcttatatgaaattatcaattttggtctcatatgccanatagcacatacttaggctaagtgtgaagcattactacaacttatcatccgtggggtgcattatgttaggaattgaaccatgattcatatgacacacanatgcacataatcagatgtaagcaccaaataactagatacaacacaggatagcaacctatcactattcaccataacgataccaattaaagcatcatgaagatagacaacacatgaatatgtatcac

SEQ ID NO: 70274 - DNA, 332 bp, Zea mays
  unsure (1)..(332): unsure at all n locations
taagcgtgcttcgagcgaattaaaaattttcattttcaagatcatgctcggcgaatttagcatcttagttagctatatgatcattctggtggttaatcatagcaatgggatcatggatagcatcaacattaatggctctacatctagtacaaatagtaacatgatcaacactagatgtagagggtttgcaacatttaattcatcaaccttaacatgtaacatggcattctcatctctagaatggaaatagaaatattggcaacatttaaatctttagccttagaaaataatctcgtattgtcaattntaacgctagaaagtgattcatttaa

SEQ ID NO: 70275 - DNA, 477 bp, Zea mays
  unsure (1)..(477): unsure at all n locations
tatatggaccacctgaaacaatgatggagtagcttctttgtgctctgagctccggtggccatgtatcttctatatatggtgggcgcaatgtctttgacaaatcctctatatttaaccatttcggtcctagctttgtgctactgtatgtactaaactaagaagtcctatgactctcttttgttcaagaagaataatatgtcatgactttcttgctaaataattaatgaatggccgatgagacgactagagaagtgtgaataggaaccaatcaattttttttgctgtcaaacactgaaaatgagtacttgacttcaatcanaatgaattaagcactcanaccaaaatcacatcagcaaaccagtggtctcatgatttcaaaatatttctaatattcacatgagaccagcanatataccgataanaaacgaacaccgaatagtatgaatcggtcccaaacagtatcacgaacaagtaatg

SEQ ID NO: 70276 - DNA, 312 bp, Zea mays
  unsure (1)..(312): unsure at all n locations
cacatctactgacactctttgtagaaatgcaatatttctctcataaatgatattggtgtttgtgatgactcacaaattattgttgagaatgagtttttagtaagaaaggtcaatgatctaactcaagatttggagaaagcctatggtggcaaggccaaattggatttcatcttangaagccaacaatgcttacttaactgtgagggccttatgtatgtccctaagaatgacaagaatgcttttgcaaagcaaaagaccacatttgtgaaggaatgtgacaaagtgtgtcataaatgccacaagatgggatat

SEQ ID NO: 70277 - DNA, 371 bp, Zea mays
gtgcagcttgtcagcagggaaacaggtgggaggctctcatcacaccaaaaatgtgatgacaacatcaagacccttggagatgctgcatatggacctttttggacccgtcgcctatctgagcataggaggaagtaagtatggtttagttattgctgatgacttttcccgcttcacttgggtgttctttttgcaggaaaagtccgaaacccaatggaccctcaaacgcttcctcaggagagctcaaaatgagtatgagctcatagtgaagaagataatgagcgacaacggatccgagttcaagaaccttcaagtggaagagttccttgaagaggataggatcaagcacgagttcttcgctccctacacaccac

SEQ ID NO: 70278 - DNA, 318 bp, Zea mays
cccttaaccatgggtctattagcataacacttaaacaatacagcttgtgtgaaatttatgcctatcgtatgcattccatatgtatcaaacatatgcaatgccaacgcttatgatgccatgctcaagttctagctataataacaccagaggtgttacatccttccccccataaaagaatctcgtcccgagattaatatcctagggtaagtaacggtgaaggaaacacatcacatctttatttcccatattctggtacaaggcaggggtgatgtgggagtcacttctttattacacagctatacagactttacgattaca

SEQ ID NO: 70279 - DNA, 395 bp, Zea mays
  unsure (1)..(395): unsure at all n locations
tgaagccatggtaagnagcataagccaataatatacgaatttgctctagcctagctacgggtgcataggtgtcaccagaatccaaaccttcgacttgtgaatacccccttggccacatgtcgggatttgtttcttgtcaccacaccatgctcgtcttgcttgttgcggaacacccacttggttcctacaacattgtgattatgacgtggaaccaaatgccatacctcgttcctagtgaagttgttgagctcctcttgcattgccaccacccaatctgaatcttgtagtgcttcctctaccctgtgtggctcaatagaggaaacaaaagagtaatgctcacacaaatgtgcaacacgagatctagtggttacccccttatgaatgtctccaaggat

SEQ ID NO: 70280 - DNA, 378 bp, Zea mays
  unsure (1)..(378): unsure at all n locations
tactcaactcaataggtgatatgngcctggcttaaaccaaccacggtgtcaagggttaccgaacacatattcatgtgatccagataattgagcgtggccaagcatggtaagatgagccgatgagtatcatgagcgtatatgggtgcttatacactatcaagaagagcatgagcagacctgtgagtggtttggcactgagcgcggatgaatttcactcgctggtgactgagatagaggaaaacggtgtcgcgacgggttctggtggaattaggaggtgaggtttgtgctacacggtcgcaaagaactacggattctccatgcaccaacaattgttgggagagatggagaggattgcgtgaatttggctctacctaactc

SEQ ID NO: 70281 - DNA, 309 bp, Zea mays
catagagtgatacaacccactatattagtgtgattgggagctctgtactgccattaagaggatcataagatacatacctgcgacacttgattttggtgtaaaattcagaataggaggaacagcagaatactctctagttggcagactaccttaaggattgataattcatgttttagctgaaacatatgtatgctgaatctgcacaagttcatcttgtgctagtacaagtaagttgaaacatctatctgtacaggcattttgctcatcaaagttgcagacttgcagatccaaataatattgtagagtcta

SEQ ID NO: 70282 - DNA, 420 bp, Zea mays
  unsure (1)..(420): unsure at all n locations
atcaagggaacaagagggagataaagaagaactataagaaggcaaagggcgaggctcatcttggcaaggagtgggattcggactgctnttcgtccgactccgacaatgaaggactcgccgccaccgccttcaacaagtcatccctcttccccaacgagcgtcacacttgcctcatggcaagggagaagatagtaagcactcataatactagtacttatgcttcttcaagtgaggatgagtctagtgatgatgatgagatagattactcatgcgtattcaagggattagatagaaccaacgtagacaaaattaatgaattgatggatgccttgaatgataggagtatacctttagaacagcaagaggatttgttgtatgaagaacatgataaatttgtagaagctcagaaatctcttgctc

SEQ ID NO: 70283 - DNA, 345 bp, Zea mays
  unsure (1)..(345): unsure at all n locations
taatcctgagaagtgtgtcttcagtgtgccccgatgcatgcttctanggttcatcgtctacgagcggggcatcgaagccaacccggagaagatcactgccatcaccagcatgggacccatcaaggacttaaaaggggtacagagggtcatgggatgcctcgcggccctgagccgcttcatctcacgcctcggcgaaagaagtctgccactgtaccgcctcttaaggaaggccgagtgtttcgcttggacccccgaggccgaagaagccctcggcaacctaaaggcgctccttacaaaggcgcctgtcttggtgccctcggcggacggagaagccctcttggtcta

SEQ ID NO: 70284 - DNA, 476 bp, Zea mays
  unsure (1)..(476): unsure at all n locations
tcgggaaccccatactnctagccatgtctcggcatacatgatattctttgttgtctgggaggcagtataagacgtcatcttcgtctgtgccatcgaatactaaagcccctttcagatacttcagttctcgggcatagtgtttagcttcaagaatctcttcttcagataatctttttcccgaagcgtgtcatacaatataaccataaacttcagatgatgcttcgggagtagaagtgatagctgtttcaagcataatttgttttgcagcttctctttccgtatacttntctccggtttcaaaggatgtctccttggcgggctctgaatgcccagcttcggtctcggtctgtgtctttacagctctcgcttcggttatgtatgtcttattcttgcgttttgagacttccccagtttccttaagtatagcttgaagtctttatcgtctcaacacatctagtacgtgaccatccttttcc

SEQ ID NO: 70285 - DNA, 388 bp, Zea mays
  unsure (1)..(388): unsure at all n locations
tcaataagctagctgcccagtgaaagcatatgcctgaagatgatctttgagtaccagaatcagcgtgtgcaatcagcaactaaatgctcctcataggccagatcttgttgaagttccatctcctcgaagagtctgcaaagtgaagatatgtagctgaagtaaagctatacccataacccttctaagccgaatctcgaggacgagattccttttaagtggcgtagatttgtagcatcccaaaaattcaaatcctgaaattntctcanactcgctctanattcataatgaatttcaaatcntgtttcataatgtctgttggaagttgaataaacaagaaaatatagtggctatatctctccaaatcctctcaaatatctacaatatttcc

SEQ ID NO: 70286 - DNA, 372 bp, Zea mays
  unsure (1)..(372): unsure at all n locations
ttccttcgagctcacctttgacttcgctgcgcatagcattaagccaggntcgatttggggcgtcgaggccctggatcacctgcattccggcgaggctccgccgtacctatcgcatgtgtctctgcctgagctgcgggaggtagaagatggcccctgaccgttggtcccttgatgaagggctgagatcagttagcatttaccacttcgcattattagaactcaggccgtcaatcgtcgatccgtgggctgggatgattctgcggcctgaatgaattattagccttgngattgtgatccgacggctacgatcacatactaattccggatcgttcccagggctctagatctaatctgactccttaattcttgatc

SEQ ID NO: 70287 - DNA, 474 bp, Zea mays
cttgtgaccagacgcgggagctgtctcaggcaaactctgttcaatagcctctccctctgctgccttctcttcgaattccgaaagttgtttatcagcaagctctgaaggctcagcttcgtcattagcctggcttgctgcagcttcaacttcggccagttttgtttcagcttcgtgttgaaattttgaagcctcggcgactttctttgaaggagtagaccttaaagacgtcactgtttctagcacatctagtacatctaccatcctttttcttttcagggttaccgcaagactttcttgtgcttttggcattgctgcttctgccgaagggattaaaatttctagctcttttgcttccttgaattttggctcttcaggtatacctttattagcctgcgactcaaccaactccgttgatggcgccttcggcatggtagccggctctcaatcttctgtgtggatgaacaagtctttctc

SEQ ID NO: 70288 - DNA, 448 bp, Zea mays
  unsure (1)..(448): unsure at all n locations
tctcagcttattgagcggccacaagcacgcgaatntgcaaatatcaaggagatattatgtccatgcatcgattgtgataataagatagcttggagagatatatgagtaatccaatcacatctgcttaaaagagggtttaaaaacaattacacgatatggtcagaacatggtgagttggatccgtgtgaagtgcctggtaatgacgagagagttgtcggaattttagatcttaaagttgatggtgaagtggataatgtggatgctaatcaagaatttgaagaatntgattgtgaagagatgttgcgccatatggaaccagaaatgttaagttctgtgggatcgcagaaagggctatctaaaatggagggactggaaagtgcctcanaagaacctttatatgatgaatcananggttgttgacaagagtttactacacttgcgtacagtc

SEQ ID NO: 70289 - DNA, 430 bp, Zea mays
  unsure (1)..(430): unsure at all n locations
tctncttgtcgtcatcaaccttgacgtagaaccattccgatttccagcctgccggccacttgcttcgatagctgatgacaggaaactttgtggttttccgataggcaaaattatagcaaccaaagttatcatgcaatccatcttttctagccttcgtctgataatgcagctcatgaactcgacaaaagctgtcggcaaacggctccaccgcctggcttcggagggcccagatatagacgctaagcctaacgatagcgttaggagtcaactgatgaaagtagatcccaaacctcttcaatacatctgcaataatcccatgcagggggaatctcaacccagcctttagaaagctcttgaaaatgactatttcatccttctctggcttcggggtagtttctctcccccncccgaagcgtagtagcttcttctg

SEQ ID NO: 70290 - DNA, 402 bp, Zea mays
agcaaaatgttcatagaaaatgaccagtaaatgtcagaagtgtggaattgctgattggcacaacagtaggacatgtttgttaatggatgaaaatagacaaaggttggcaagcctcgctggacgtaagataggacgacctccaggatctaggaacaaaggtggcagtaaagctcctgattggaatgagacagccacatctataaaacacgcatatgagttctatagtagttagtcacacagtgattataatgttgtatgagatacgagtaatttgttcttacacataaccttgcttgcctggcaactgatttatatagacgcagacattgcaatctaattaatggtgcgtttatttgctaatcatgttgcagacctgaactacaaacatagaattaacttgtg

SEQ ID NO: 70291 - DNA, 367 bp, Zea mays
aagcttcagagctatgtacttagcagatcacagtgcacaagagcttattaatgagtgagcaggagtggttggccagaaagcgtgcaatataagtttgcggtatggccgtatttatacgctcgatgcgttgaaagttgaaagaccccacttgtcattgaatgttgctattctagcaaagggaaagtgtttcttcggaccttcggcataaagcctttgttcatatcgcaatctgaatttattattttacacaaattaatattgcgaggggctactgttgggggtcttcggctttcgaatgtgctcaaaaacatgatctaacaatgtctctggagtataatgtttgaacaggtatcttcggacttgaatc

SEQ ID NO: 70292 - DNA, 386 bp, Zea mays
aatacaatattgtcttctttcggcttcgatgtttgttcctcccaagtaaagagaatccgattcttatcttctacatatccaatgtttgtatgatattcatcttctcgtgacttacaatggacttccccatctcgatataactgtccctcgtatgacgaaggtcattgtcctcctccaatgctttttccttcttggaaccagtattttgttcaccatattcgacatcaccagtttccgcatgactcatgacctcgtcggccacattccctttctttgtatcgctctcttggtcatcctcttcatatgtatgcctcttcctcacattcacagtcaattcaccccctcttggctgtacgggtgcaccactagccaacccatacattact

SEQ ID NO: 70293 - DNA, 469 bp, Zea mays
tgtcggcctgctcctggattatcaccaatgtttattctccttgcacccctcatgggataattgagtttctcaactggctgcataatatttctatgccccctgacaaactttggcttctagttggtgatttcaatttaatccgtcggtcggagaacagaaatataattgtgggggatattaaccttatgctcaagttcaatgaagcgataagcaacttagatttgattgaaatccctcttcacagactcacgtacacctggtcgaacagatagcaggaaccactgcttcataagcttgattggtttttcatctcgcaagaatggtcgactgtctttccagactcctttgccaagacattgccgcgggacatcttcgaccatgttccctgcttgagttcatttaagtccaaaaattctacacctacgatatatctgcttgagaaattctcgcttgaattggatgggttcat

SEQ ID NO: 70294 - DNA, 363 bp, Zea mays
ctggcttcgtctgagacccttggaagctggttatcaacatatccttcaacttttgccatgaggtgattgtccctggcctaagggaagagtaccaggtttgtgcaacgctcctgacagccatgacgaaggactttgccatgaccgccgtgttgccaccgtacgaagatatagttgcctcatagctcatcaagaattgtttcgggtctgaatgaccgtcgtacatggggagctggggcgacttgtaagactgtggccaaggaatagcctgcagttctgttgacaaggaagaagcatcatcaaaagcaaaatttccgtgatggaaatcttcataccagtcgccctcgttgtagaagccctcttgat

SEQ ID NO: 70295 - DNA, 303 bp, Zea mays
  unsure (1)..(303): unsure at all n locations
gattttgctaccagcatgaggagacttcgagcttcgacaccagctttgctccnaccaccctttgtccatactaacttataaatctgtcagcatacttcgagctagattcgaaacatcatctaagtctgccagtgacaggctgaaattgggtctattaacaatcattggcggggtcacagccatacttcaaaagagcaatatctgtgccccgataagctggcatggcacataaagtcgctatgcctaactatatacttgtcaagatcattaatttcaccttcaatgtgctctaaagcccaagca

SEQ ID NO: 70296 - DNA, 354 bp, Zea mays
  unsure (1)..(354): unsure at all n locations
cccctgtgataccagaaaccctaattggaaccctggaaaaccctaaaactaaaccttaggggcttatgtgcaaaattagtccattttgggctaaagtgcaaaaaccaagccaaataagtattttgagtcatttggttcacaaatatgtggacttgatagccaaaccctaagttttggactcatttgcaaaaaggccccaattttgattcctatgctaagtctgaaatcagggttatagacccaactttggggctgtgtaactntcaaaatagggagaattcatattaggtcaccacaccaaatttgtagagcaattaaagaagaacaactttgcttaaagtggtaagctcactt

SEQ ID NO: 70297 - DNA, 317 bp, Zea mays
ctatgaaactccgcttctcactcgagccccagcatcttgcgagtgtaccatctgtgctatgatgtctttcacagaccaagcttcattcactttagccacggttagagtatcccaactgtattagatggtgtctcgaaaattgctcaacgatgcaaggagggtacacaagatataaagagctttgtcttccttattaaactttacctccatatacgtgccatccgacgcgatctccttagacaccgatatgtgcgtcagaacggatcctgctttctgcaacttgtgggataacaactgtcttttgacatgcatcttgc

SEQ ID NO: 70298 - DNA, 458 bp, Zea mays
  unsure (1)..(458): unsure at all n locations
atcctgtaagcacaacacatgccaccattttttctaccataccagttacttggcctttcgcatgctggggattggatatgattggacctttcaagaaagctcaaggaggatacacccatgtattggtggcaattgacaaattcactaaatggatagagttccagcccattgcctctttaacctctgctaaagccgtggaattcatacaaagcataatattcagatttgggataccaaacagtatcatcattgacttgggatccaacttcaccagttcagaattctttgacttctgcgagcaaaaaaccattcaaatcaagtatgcatctgtagcccatccgagagccaacgggcatgtcgagcgagccaacggaatgatattggaggcacttataaaaagggtctttgacaaaaacgaaaaattcgcacganaatggataagagaattgccttatgtt

SEQ ID NO: 70299 - DNA, 404 bp, Zea mays
  unsure (1)..(404): unsure at all n locations
cactcaagctttggcgaccaagtggtcngattcttcgagttctacacagttgaagtccccgttcttctttctggcgaaggcaagtgttctcggacctatcatgtcctatgttactttataattcactgtccagcattacattattgaaaacttaagaattgactagcctgtatcttaccttatccttgtttacacttttgggttaatcatggttagcttatgctattgctttactttaatccatgaacatgatgtgaatattatgataccacgatgttatcccgatgctgatcttgtgatactttaggggagtcacgccattttcctgagagcctctccgtaaggacctgatcgcggagtgacaacccaggataatagtgcaaccatgacggtggcatgggacg

SEQ ID NO: 70300 - DNA, 324 bp, Zea mays
agggagaacgcggtggaggatttacttctgtcattcagagaaacacagggcttgtagcgcctgccacgcgggaaagcaagatggaacccatcatccacaccctaacattatgaccaccggcaggccactggagctcctacacatggagctatcgggcccgagtggtacataagcatcggcgagagtaagcaccgcctaccatgcgagacgatcaatcgccgctcacttaggcatgctctttacaggaaaacgcttaaacccaagagacctcagagggagtcctgagacaggctcacaatgagctccgcgtaaagatccagaaaa

SEQ ID NO: 70301 - DNA, 477 bp, Zea mays
  unsure (1)..(477): unsure at all n locations
tctanagggagagcacactttgggactaaccaatgttcattntgagaaagacagggtttgtagcgcatgtcaagcaggaaaggaagttggtgttcgtcatccacacaagaacatcatgacaacggacatgcctctggagttactccacatggatctattcggcctgatagcttatataagcatcgacgggagtaagtactgtcttgtaactgtagatgattattctcgcttcacttgggtattctttttgcaagaaaaatcacaaacccaagagaccttaaagggattcttgagacgagctcaaaatgagttcggattgaggatcaagaagataagaagcgacaacgggacggagttcaagaactcacaaatcgaaggctttcttaaggatgagggcatcaagcatgagttctcttctccctacacacctcaacaaaatggtgtagtggagaggatgaatagaactctactggacat

SEQ ID NO: 70302 - DNA, 450 bp, Zea mays
  unsure (1)..(450): unsure at all n locations
tatcttatcttctttccacggatctgaccttatcttattattcgttctgagcgctccgcaatcatcgtagagatttctggactttctatattaacaagatttgttaaatctgatttaaaggggctgttagcaatatctttattgtttgggttgtcataacgaaaaaaaaggtttatgcccctgctaaaaaaaacagaagaagaagaaaaaaaagaatcgataagaaaaaaaaggtaaagaagaagaagggggctgaatctctaaatctgcctgttctctttgtgctgtgctagttgttctttttcagtgactacctttgtgcctatgctcacgtctctagcctggtttagcctangaccagcacagtaccaccgttgaacgattattcagcttgcttttgtactaacgtggactagtgtattcttgcttcacccacctacaacttacata

SEQ ID NO: 70303 - DNA, 479 bp, Zea mays
  unsure (1)..(479): unsure at all n locations
tgcattgtggactatgactgccagcaatgaagctgtccatgttagttttcaaaaccaatctaatcagttcattgctaatatcttcttacgcacgtagtcattaaagcgataaggagagcgaccgccctttttaccttttaagcggaaagacgagatgacaccttactgatcatatataaagataggaaaatatagggcattagtcccaaataaaagttgtatagtaccaaacagaagtctacaagttcaacattaacaaatataataggctaaaagtcaacataactagtttctgatatctcatctctcaatgaagtcttaatatccattgtcaaactcatcgacaatgagatcaacattgtcttctccactttcttcccncaccagaaggttcattagcatcactcacatttatgtcatcttgtggatcagtctcaatgtgcttcttctccatactcttcaacttcttgtgtacacat

SEQ ID NO: 70304 - DNA, 314 bp, Zea mays
agcaacactccggctttgaagataacgagcatcctaatcatgtgcataaactctctaaagcgctttatgggcctcagcaagccccaagagcatgggatgaatgccctaacagatcttccttatcactaatggctccaaagtcagaaaggccgatcctactttatttactaaaactcttgacaaagattggtgtgtatgccaaatctatgcagatgatattatatctgggtctaccaacgaatctacgtgtgaggaagttaggaggatcatgacatccaacttcgagatgtcgatgatgggggagctcaaaatct

SEQ ID NO: 70305 - DNA, 362 bp, Zea mays
ccctagcaagctgttgtactgcggagtactgtgctctcacgtttcgagagccccctgtgggcttgagaatcccccacgttggttgacatataccacgcccttttgctgcctatgtcctctggaaggagatccctaacgatggtgcatcgatacggatcgccttacttcttagatctgaagggaggatctcttaccctccttgaatataacaggcgaagctcacgctgctttgatgacgcctccggcggacaaatgaatggtctccattacgctcatctatatcccgagatagacagcacttgtgattaacagttctctacggactcactctaggaactccttcttaaattgagtttctgatt

SEQ ID NO: 70306 - DNA, 252 bp, Zea mays
ccgcgccgccacaaacacacgatacgttattttctttgcccgcggcaacactgccgcgaatcaccactacggaatcagtgactcaccagaacgcattcactcggagcctgcccatatgagcccaagaggctgcgcgggatgtgcaccgagggattctgtggagaggtgtacaccgggtaggcgacagggcatccacccaaagcgccgtgctaacgaacggacgtcaccaccggagcctgtgtgaacaaagcg

SEQ ID NO: 70307 - DNA, 418 bp, Zea mays
tctttcgaaggttctctgtgaagaatattccatgaggataaaatgagcatgctgatctactagccaagtcagcggcacaagggctccctctaccttcggaagtattttttgagacaataagagcaccttcggtggaacttctcgaaagagaagtgctcacaatatctcctgttcatagtgaagattggaggactgagattatatctttcctccaaggtaactgtctctcggatgatgaggtttataacaaaagaatggaggcaagaacaaggtcatatgccataatagaaggggaagtgtataaacatggagtttgttccccacttctcaagtgcttatccagaaccgaaggtatagaactgatgaaagagatacatgcaggattgtgtggatcccatattgtgtccagacctcttct

SEQ ID NO: 70308 - DNA, 453 bp, Zea mays
ttccaggttctgcaattcaaatgttaatacttctcagcatataatattatgtagtccaacatacagtatttataccattattacctttctggcattatcattttggtcactgacaccactaacattcattattgggtgatcatgcaaattaatctgtaattgacaacacattttgttaagctcaatcataacccaataactcaaacgtataaatcatgtatatgtataactgccaatcagtaaagttgttaaagatattacctcttctaatggacgtactggtatatgtatttgatcattgaccacaccttgttcaagtataatagatacgtcttgaatttcctgaacatttggatgaaagatcattatacatcatttacacataaacattaacaacagaacgattcaaaccttgtattcctttcgtcaattcatcatcttttcgttgctcta

SEQ ID NO: 70309 - DNA, 247 bp, Zea mays
ccccacccaccagcgggggcggaggagaaggtcttgtcccataaccatgcaaccattaactctattcccagacacccaccgcagagggacattctcccaccttgtaaaggtaaagacaccccttttcctcgggaacaactcctttaaaacataaaccaaaggatggggccttaacaccgggcgccccaataaataaaccggtggggaaaagtttttaaccagacttgacatatacacccaaggttcc

SEQ ID NO: 70310 - DNA, 352 bp, Zea mays
gccgcactcactgcagagtgcgaaactgccacatatcaaagaatggagcccctggcgtacggggagataactgtgccagatcaatcaggcattgcttcagcctcttcaagcctctaagccgaactgggccccactgaaagacttcacctaactttaggatttcacagaacggcaagatcccctccgcagacctacatataaaactatcccatgaaaccaatcttcccctcaatcggagggcccccttcctcgactcggcgggccattccaacgatggcttcgatcatgcgtggaccgcgctaaacccctccgttaacacaaagcatccaaaaaacttacccttcttactccc

SEQ ID NO: 70311 - DNA, 415 bp, Zea mays
  unsure (1)..(415): unsure at all n locations
agaatagaggcaagagctcgtccgtatatcattatataaggggagttatacaagcatggagtttgtgccccgttgctcaagtgcttgtctagagccgaatgtatagagttgatgaaggagatacatgcacgcctttgtggatcccacatctgatccaggccgttacttggaaaagtgttccgtcaaggattttattggccgaacgcagcttccgatgcagctgagttagttcgaaagtgcgaaggttgtcataaatgtgcaagagatcaaaaacaaccttcgactttgacacagctaatacaacccatctggccattgcaaaggtggggcctcgatctgctgggcccattaccaccggctcanggcaatatgaaatatgttgtagttgctgtggaatatttttccaagtggattg

SEQ ID NO: 70312 - DNA, 466 bp, Zea mays
tcttcacgcgtcagaggaaaaagtgcatgacgacaccactgtgtccgtgttgcacgtggttacacgtcttatgggaatgaaggcaaagtataacttctcgaataattgctataacgatataatcaatctgagtattgatctcatcccatcgaaccataagatgccgaaagacttataccagtctaaaaagattgtgtgcggtcttgggatgaagtataagaagattgatgtgtgcgaatataattgcatgttgttctggaaggaatatgaagcggccacccattgtcaaaaatgcggtaaatcaagatatgcggaggtactaaaagaggatggagctacttttgctacaaaagtggcagattaacagcttcgatatatgcccatcactgctaggcttaaacatatggtgttaaccctagaaactacgaaactaatggttgtgcataatgaaggagaacgtgagatc

SEQ ID NO: 70313 - DNA, 483 bp, Zea mays
  unsure (1)..(483): unsure at all n locations
gaccttcgtcatgccgccgaagaaagcttcanggctatgggctgcgctgcatccactggacatcaatcaggaaacactacgtgaagccagaagtcaaaaaaggaaggatacaagtccaacgcctcaggaggaggagctggaccaagaaataagggacctctaagccatccatcagcaggtctagaggaagaaggagaagatgcttcatctttccgatctataaaagaagatcgatgcgactgctgaggaaatgcgtcatctcactcaagatgaccaggaccgaagacctcaacgtagagagcttcatcaggacaattcctacgatgacgatgaatggtatgatgatttccatcatgaataatttgcttttgatgatgcttctcctctatcagcagaactgcatgctaccccatggcccccatcatacaagccaccccagctccccatgtatgatgggcactcagatccgaagcagtttctgat

SEQ ID NO: 70314 - DNA, 468 bp, Zea mays
  unsure (1)..(468): unsure at all n locations
cttgatatggaaagtgaagacgaagatgcgganaatcggctctgtctaccatttcacaccatcttcggaaaatcatccattaagaagagtcaaattgacgctatgaaaggaagatattttcgagatatttcaattgtgggagctggaggggacagtgccgcacctgctcccgaagaagatgaggtggttgtttacaggagcttcatgaaggcagggcttcggttcccactaagcaaattcctggatgaagtgctgaagaccttcngaaattccttcatcaaattacccctgaagccattatcaggatgggggtttcatttgggtcgtgagaagccaggggctagagccaaacgcaaaatgcttctgcaacatgcacgaactactatatgagacgaaagccacttggcaagagcaatatcacaacaatttcgggtgttatggcttcgttctcattctgatgaagctatc

SEQ ID NO: 70315 - DNA, 404 bp, Zea mays
atgcgtattgactcaagcctagctacgggtgcataggtttcaccgaaagccaaaccttcgacttgtgaatatcctttggccacgagtcgagctttgttccttgtcaccacaccatgctcgtcttgtttgttgcggaagacccatttggttcctacaacattttggctaagacgtggaactaagtgccgtacctcattcctagtgaacgtggtgagcttctcttgcatcgccaccacccaatccgaatcttgtagtgcttgctctaccctgtgtggttcaatagaggaaacaaacgaataatgttcacaataatgtgcaacacgagatctagtagttaccccttattaatgtctccgaggatggtgtccactgggtgatctcgttggatgcttggtggactctcg

SEQ ID NO: 70316 - DNA, 366 bp, Zea mays
actcagcttggcatctcaagcacctggcctctgcttcatggatgacttcgctgtctactaaactggcttctggatggttcggaccccctatgatggatccgagccctcaaactcttgaccctccatcaccatcgtggtggacgaaccaccaccttctcctaagggaactttctcactcccctagggatgatgagccgtgcttttgacgaccatcaccatgcttaccagctctgtatctgctggactggataaatacaacggctcccctggctctggatctaccactattcggacggacacagagagctgcttcaacttttgaaaagctagttctaccttctcggaccaagagaatgggccggactt

SEQ ID NO: 70317 - DNA, 219 bp, Zea mays
cagctctactatgaccttttgcccgataggtacattgcatcggggtagcaaactgctactattgtgatgatatctgctcattggtgttttttgcagaaaatttataccctgaacctttacggttctgaacgctccaatgagtcgcctagataaaccatacacctcacgacgtgtcacactcttaatgagctccttagagaggatagctgattttctttc

SEQ ID NO: 70318 - DNA, 473 bp, Zea mays
  unsure (1)..(473): unsure at all n locations
tatggctatgtagtattgagatttacaggatcacctattctcccgcccccccctctaagtgctctcaattggtatcggagtcgatctcttcacgtaagggactaatcgccccaagagatggatcctaacggaaagggatggtggtcaacgataaggagaaggagtccatcttcaacgagccaagagatgacaagccaactgactctggctcgagtcacaagaagaaggacgggaagaagaagaggcgcatcaagaagatcgtctactactacagcgacgaatcttcttctttaccaagagacgacgacaacaagaaaaagaaaccggttaattcaaattattcattcgattattctcatattcctttcaattccaatgctcatttgctntcaattcctcttggaaacctccacactctgatggagaggactatgctatttggagtcacaaaatgtgtagtcacttattttctc

SEQ ID NO: 70319 - DNA, 407 bp, Zea mays
agcaacaacacttacccgcacagctgttgcagaccattcctgtaacatggccatttgcatgctgggggctggacatgataagacctttcaagaaagctcacggaggctatactcatatactaagtgccattgacaaattcacaaaatggatagagtacaagtcaatcgcttctttgaactcagccaaagcggtggaatttatacaagacataatattcacgtttgggatactgaacaacatcatcactgacctgggatccaacttcaccagttctgaattctttgatttctgcgagcaacaaagcatctagatcaagtacgcgtcagtggcacacccaagagccaatggccaggtagaaagagccaacagaatgatactggaggcactcagaaagaaaagtgttgac

SEQ ID NO: 70320 - DNA, 442 bp, Zea mays
agatatattcatgctcattatcagagggaggcagcgttggatgatatgattgcaatcatgtcaaggagtggtgtgccaacacaggcagcaatgaatgtaatgtcagaattatttggaggccgccaaaactggttgttcacagataaagatggccaaaacaagtaggtcataaaaaacactgacatcatatatttgtgtgatatattgaggccagcagatttacttgttgtttcttttatggtacaagaaagctgatcaagcaagggaggagagggatggggacatggataaacttgtccaatatttcatggagtgcaaagacaacaatgaatacttttactgggatgtggatgttgacccaaaaacaaacgtgctttggagcattttttggtgtcatgcaagtcagcatgcagaatacaaagaattttgagatgtagtcaca

SEQ ID NO: 70321 - DNA, 408 bp, Zea mays
  unsure (1)..(408): unsure at all n locations
ttctaagatgactaagggcttctgaggaagaattcaccctatgcatgtgtcggagaggaaatctctccgaccgggtggcggattgcacccgccctaaatcctaagaagaggaggggcctaagagttctgcttgttactagattggtgaatggacaaacgagagcacgcaacggtttagagtggttcgggccgccggaacgtaataccctactccactgtgtgatggattgcttgagagcttgtatgaacttgtgagtgtctgagtgagcctaagattggctcccccttgcaacgtcgcatgcctccccttttatagttgaagggggcatgtacaaaggcattggcccncgacatgtgggcccacggacataaagaatatatcgcttggagctacaaatgtttgttgct

SEQ ID NO: 70322 - DNA, 355 bp, Zea mays
taaactctctgaaagcctcagaagcgaaacgctgaaaatggttgcaacatgctttcctcactgcataaactgtctagagcatcacacatatgttatgacacaatgcacttactttctctatgagatacactatgcctcattaacctaattatgtgcacttggcattggatgacaaaataagtattcctctcacagcacatatgtatggggagaaatctatattatatagaactataatcatatctctatcattttggtacaaatgcatatattctattattcccgtaccatgacgacgactaatatgattgcaagaatattactatgctaagccgcatattgaaagggaaatgga

SEQ ID NO: 70323 - DNA, 277 bp, Zea mays
aaaaaggctatggccgataactaccggggcatctgggcgctaacaaactgaggcagggcgaccggggtactccttttcgcccgtcatccgaacggcggcatgacgccacagaataaagcagggtgctcgcggcagtaccagcgcatcccctacgtggcgaagccacctcaaaaacctcatgacgggacccggtccccccctaatgacctaaacagaacaagccagaccagacgtggcggaaacgcctcatcccgagagagccaccaggggactcgca

SEQ ID NO: 70324 - DNA, 435 bp, Zea mays
tggacgttaagagtgccttcctcaatgggccaatctatgtagatgtttatgttgagcaacctcccggctttgaagacagcgagtatcctaaccatgtctataagctctctgaagcgctttatgggctcaagcaagccccaagagcatggtatgaatgccttatacacttccttatttgccatggcttcaaagtctgcaaagcccatactactttatttactaggactcttgcagacgatttgattgtatgccaaatctatgttgatgatattatatttgggtctactaacgaatctacatgtgaggaatttagtaagatcatgacacaaaaattcgagatgtcaatgatgggggagttgaattattttgtatgatgtctagaccaccaactccaaggggctccttcatttccaaacgaatgcactcagacattct

SEQ ID NO: 70325 - DNA, 470 bp, Zea mays
  unsure (1)..(470): unsure at all n locations
gactgtcttgctgattagaccacgtgtatttactctcaaaaagtggaacctcattgagactcaagtgctcaaccaacttcctaaatcttcccatcatagctctgttaatatttgaattattcttatctgaagccttgtagatgagattgaagtcaccagcaatcaactagggtccagtgcaagcagccctgacgtctctcagttcttgaagaaacaacatcttatcactgttactttcaggaccataaacacaagttaaccaccaacagcgattatgcgcattgcagaattggattgaaatgctgtatctgtcaatcctagacaacccagtcactcccagatgacgcttccaagcaaccagcacaccaccactatcaccacaagatggtagataggagaactggcagaaatccgaacccaatgctgcnagaatggttcttgtagaaatgacagtcactttagtttcctgg

SEQ ID NO: 70326 - DNA, 467 bp, Zea mays
  unsure (1)..(467): unsure at all n locations
catcaagcttcagaccttggcttctcacggcccttactaagatgttcttctttataatcgcctcgggggttagttgatggagatcgatttcgaatattttcagcacctccacaacgaagctgctcaagggaaatcgtagtccagctttcgaaaagcttccgcacactacaacttcattctcttctggatgtgggcaagttctttccccttcgtccgccctcacaatggacaaatcccggaaataccttcctctcatattaacaagatgattttctttgatagttgatttaccataaactgaatggcttggtcgccaaggacgatcttcagagtcttacccatcactgtgcacatcataactgtgactgtgaccactatcctcagacaagccttacagaatctncttggtgattttgtctgtgttagaccttgacatcgctataagaaaccccaaatcttctcttcgt

SEQ ID NO: 70327 - DNA, 245 bp, Zea mays
aacactctactattatgagcgacattgcaccatacgattctccatttaggggtatcctagcaagcatctgtcttttatcttgcatgcttctaaccgaaagagttgatttgcggtatgaggccctgtaccataattccagtgggtaaaaagcaaaaactacggttcaatatcttttgctgaggacattatattgcttattgagatcgtgaagtggacatgaatcgtgtttgtctgattacgttcaa

SEQ ID NO: 70328 - DNA, 360 bp, Zea mays
gcctgtccgaaacccccgttcgggacgagctcgaccagctcgcaacatgcgactttcctagctatatatgccagacccgagccatgatatttctcatggcagcgccgtgtctcccggtgggcactacacgttccaattaatatgcaatgatcttatttaaccattctgttgacaacataaatgtaaacttaccatttcggaacattaatgtcatatgcgggagtgactgcataaagttatgtctctctatagcataactacttgatatctcataatcccacgtaacacaacgagtactgttggaaggctattcaatacgaacccggccatatgctatgtttcaaagaataacttattaat

SEQ ID NO: 70329 - DNA, 197 bp, Zea mays
ccgcgagggaaggacaagacacccacaagccaacgcagatggccaaaagacgccgccgacccggcggacgcagcccccgcgacacataacacgacaccgagcaaacacgtcgcaccccaggacaacggagaccggaacccaggacccgaaccgccgcacaccgggaaacccggggacacaacgggaatccgagaaac

SEQ ID NO: 70330 - DNA, 324 bp, Zea mays
aagacatgatatgtagcgcatgccaagcaaggaagcaagttggtgaccatcatccacacaagaacatcatgacgaccgacaggccactggagatcctacacatggacctattcggcccgattgcttacataagcatcggcgggagtaagtactgtctagttattgtggatgattattctcgcttcacttgggtattctttttgcaggaaaaatcccataccccagagaccttaaagggattcttgagacgggcttaaaacgaattcggcttaaggatcaagaaaattagaagcgacaacaggatggagtacaagaactctcaaa

SEQ ID NO: 70331 - DNA, 473 bp, Zea mays
tcggtgttacaacatatccgaagatgaagggtctataccttttaaagatagaatgaccttttagcccataaaggtctgagtcaatgttgtaaacttttatgaggggcatgattgtaattcctcacaggctgtgtcctgtgcctataaatagtgaacagtattcctttactgttcacgcattcctgtaattgcaatcgcatcactcagaaattattctttgccaaggcagaggtataaatgtatttaatatttgaatacatcaagtttatataatataaaaatgatgtcgcttacttataatttacttgtgtttaatttaatgcttcatatctcgcattggtttatataaactttgagagttcggttacgaagattcaaccttcgtaattgtacacgttataaccttcgtccgaagttcattaaatccttgaggaaataatgcttcagtgggcgaaaggcattaacatttaaca

SEQ ID NO: 70332 - DNA, 446 bp, Zea mays
tcgcgggagaaggttttggccttggagtgagccttctttttagccttcttcgcgtccgcccttccttgtcccttgggaaggccctgtgcatccccttttatagatacaaggagatgatccagctgtacatatgggggtgtagctatgtgctaacgtggcaggcgaagaagttgaaagggaactaggcttacacctatttcctaaatgattttggtgggtgaattgcccaacacaaataaattggactaactagtttgctctagtgtataagttatacaggtgctaaaggttcacacttagccaataaaaagatcaagaacagggttcaacaaaagagcaaagggataaccgaagtgtgccctggtctggcgcaccggactgtccggtgtgccaccagacagtgtccggtgcaccaggggacttcacgctgaactcttcaccttcgg

SEQ ID NO: 70333 - DNA, 219 bp, Zea mays
ggtgaccatcatccacacatgaacattctgacaacctacaggccgctggatattctacacatggacctattctgccccattggtaacatgcgcatatgagggagtaagcgctcgctagctatggcggatgatctatctagcttcacttgagtgttcacaatgacgagagatctcataccccagacaccctatagggaatcttgagacgggcttaaaacg

SEQ ID NO: 70334 - DNA, 384 bp, Zea mays
actatatattaccggcatttacttctgatctgattgatatttcaacaatcattgagtcattgtcatatggatgaagatcctctgaccacaaattataattaaatattttcctgcaagtgatgcatgctgcatgtgattctgagaactattttgtgaatacaggccccactcagaagcatttcaaggtgacagctttattgcttgaaggtaccatgaagatgtgaagatagctctgctgtgaagatcagcttattgctaaaagttaccatgaagatatgatagaatggttgactcagataaagatgtctacaacaactgctttacaataagcctctaattcctcaagtaaaatacgttatggtgcccttcactaagccagtctgg

SEQ ID NO: 70335 - DNA, 424 bp, Zea mays
  unsure (1)..(424): unsure at all n locations
ccttgacatagaaccactctgatttccagcctgctgtccacttgagttggtagctaattacagggaactttgtagttttccgataggcaaagttatagcaaccaaaattatcgtgtaatacatcttttctagcctttgtttgataatgcagctcgcgaacccggcagaagttgtctggaaatggttccactgcttggcttcggagtggccagatataaacaataagcctaacgatagcgttaggggtcagntgatgaaaatagataccgaacctcttcagtacctctccaataatcccatgtagggggaaccttaatctagcctttagaaaacttttaaaaataacaatctcatccttctctggcttcggggtagtctcttctccaccgaagcgcaacaacttcttctgattntcagtaaaaaa

SEQ ID NO: 70336 - DNA, 479 bp, Zea mays
tgtcacgtcacatgcaacatagctcctcctccggggagaggggctgtcacaccctgttttagaaggcaaaccgaatgcgaaccatgtacatgcctgttggtcacttgttctcaaatactatgaatcaagaacaaggcaacacaattgttaagtattaaagaccttcatcttccgaagcattatctcctcatggacataatgatcattagacgaaggtcatgaaggacttgccttcatcatcttatagataaacaagaatgcaaagagatgaaaacatcaagtatataattcattgattcattcgtatttgtattccataaaacatgtatgaataccaatagaatttatattacattgataccttccgcttgctcgaaggtgttgatgcgagggagattaccaatcagcgtgaacagtacgatgctactgttcatctatttataggcacggtacgcagcccaggtaatagtacatttata

SEQ ID NO: 70337 - DNA, 438 bp, Zea mays
taggcttttttcaaaatatgtcatatttatagaaccttttatttcttgtcttctatcatatcaagcctgataaaccatctatctcctgtgtcagaccagtttaacggagtacgacactgtcgtccatacaaagcttcaacacgtgctactttgatgctctcttgatagccggtactggatgaaaactccgctaatggtaagcaatcctctccattctgtgggaattgcataacacatgctcgcaacatgtgttccagtataagaattactttcttagtctgcccgcctgtttgatgatgattagccaacctgggaccacttggacccaatgattatacatggcttcccaaacttggcacatactgggcccacgaccgatctatggcttttgaccgcatgcagactagaatctagcaataacaactgggctagacatta

SEQ ID NO: 70338 - DNA, 422 bp, Zea mays
atactcaagctttaagggagaacacgtgataggtttgactaacgtgctattcgaaaaagataaaccttgtgcagcttgtcaagcaggtaaacacgtgggaggagcacatcacagcacgaatgtgatgaccacttcaagacccctggacctgctacatatggacctcttcggacctggcgcctatctgagcataagagggagtaagtatggtctagttattgttgatgactcttcccgcttcacttgggtgatctttttgcaagataagtctgaaacccacagggaccctcaagcgctttctcatgagagctcaaaatgagtttgagctcgaggtgaataagataaggagcgacaacgggtccgagttcaagaaccttcaagtggaggagttccttgaggaggaatggatcaagcatgagttc

SEQ ID NO: 70339 - DNA, 314 bp, Zea mays
agccactctttttcctgagcacaagcgcctgcacagaacgtgtcacacaactggacttaccctatgatgagcacccacacaaagtaactttgtctcatgacgaaaagacgaactctcaagttccaaatatataaacgtgttagctattttagacacatatgtttcactatatacaccctcagggtgaaccgcgagctacaagccagcaaaactatgttctagaaaacccaaacatttcaaatccggacggaggagggttgatactacagaacctgcgaacacgggtcctctcctgaaaccactccaactggtag

SEQ ID NO: 70340 - DNA, 361 bp, Zea mays
atagagaaatatacgaaaggtgacgaccatgtggcctctgatgcctaggctcaaaagaatgtgacgtcgaatcaactatacgctaaagttgcgggacttgaacaattgaaaaaaatcgaaatgatgagccgaattccaaccttcagtaatgtaatatggaaaaagtcggaaaaatctcatatccacgagggatccccgactatagctaacacactgtacttaccaaactctacggatggcacgcttgtatgcaggagcgcatggaagagactgaaagtcatattgtacatagatgactaacgacagagcagataatgctgctacaaatagatcatccgccagccaggcgcgaccacacatc

SEQ ID NO: 70341 - DNA, 294 bp, Zea mays
  unsure (1)..(294): unsure at all n locations
ctccatagtaagaaaattaacgatcatactatttgctctaacaatgtgcctatgtgccncaacaaacaaatatcaaatagaagccgtatcaaggtgcttttgatgccatgaaaaagtgtatgaaaatggtttctgcctccacatgaagaacaaagacctttgcctatcaagaaagatgatcattattaacgatgaaagccaaaagcatatgcatcttatagacaagcaccgcattagctacaattgccgtcaacaaagtcatctattcatagattgtacaaaaggtaaaacttc

SEQ ID NO: 70342 - DNA, 377 bp, Zea mays
  unsure (1)..(377): unsure at all n locations
attgatggtatgcggagattctctggtaggcatcagccaaattaaccaggaatgggattggtcaagtgattcaatgggaaaatactgggctgccgtccgaaagctggaagataaattcgagggtctggaatttcatcatatagaaagagatcggaacacggcggccgatatactgtccaagctcggatccggtcgaactcaggtcccaccaagagtcttcgtgcaagaaattctgcagccgagtatctcaatggatcaaacagaagagtgcaacatcataaatcaacacgagtcagattctgacgactggagaagaccgattatttagtatataaagaatgaagaagaaccagatgacangaactcggcagagcgca

SEQ ID NO: 70343 - DNA, 464 bp, Zea mays
  unsure (1)..(464): unsure at all n locations
agtatttgaaagggcaagccaaactgaaccgccggtagtccaatgggttgagtttatcgaaacatttccatacattgtgaaatataagaaaggtaaggacaatgtggtcgctgatgccttgtctcgaaagaatgtgttgttgaatcaactagaagtaaaagttttgggtcttgaaaatttgaaagaaatgtataatgatgatcctgaattntcagaaccatacaatcattgttaagatggaaaaggttgggaaaaatatcatatacatgatggatttttgtttagagctaacaaactttgtgtaccaaattcttcggttagattgcttttattgcaggagtcacatggaggaggtctaacaggtcattttggacaaaagaagacttatgacaagatcaataataatgcatacaagatagaatcttcaccaagctatggcgtgagcaacacgttcaatgttgctg

SEQ ID NO: 70344 - DNA, 344 bp, Zea mays
  unsure (1)..(344): unsure at all n locations
gtcttcttcttctntccctccccccctccacaaggcatgaacgtgatgcacgccccacaccccgcagcagcaacccagccgaaagaaaacaggagtttttattttcctgggaaacagctgcgccgggcccccggggtaacccgaacatacccaccagatcgacccgacgccaccatcacatgaggcgtgacgcggacgaaaccccctgganatccgtcctgacacccgcaagccctcgctctaccgaaacaagggccgcggaaaaagacacggtggcgcggcccaccggcggcgagggaggtccggcgaggcggtcggagacccacaagaagacacgaccagca

SEQ ID NO: 70345 - DNA, 364 bp, Zea mays
gactgagcatgcaagcttataacttctgatgagaagcggctatcctgtttgtttatgaaccaccacaaaaccaatcaagtaagcgacccatggtgagagattcgcaataagaacacagtttgttgttgctgacatccgatgcttccttcaaaagccagtgtggccagcgaaagccagaatcctgcataagatctggatcagccacaatcagcggctgccctgatcaaccggatgctcccgaaagggccaattttgatgaatctccatctccttcgaagagtctgccgagagaagatacggagctgaagtaaagctatacccataacccttctaagccgaatcctgaggacgagaatccttgtaa

SEQ ID NO: 70346 - DNA, 166 bp, Zea mays
gagatctgatttagaccttcatcgtgcacaatgaaagttggaaaaatttatcagaggatttgttaactacaacttggaccaatcttcgtctatgctttttgagaccatgagagatacagcatttacaaaaaactataagatcctcttggtctaaaacttcccactt

SEQ ID NO: 70347 - DNA, 452 bp, Zea mays
  unsure (1)..(452): unsure at all n locations
tctgccagatgtgagtgtccctggcctgagagacgaattttattttgagctacacttttgactgccgtgacgaatgatttcgccatgactgcaatattgccaccatatgaagatatggttgcctcgtagctcattacgaactgcttcgggtctgagtggccatcatacataggaagctaaggtggctcgtatgatggaggccatggtgtagcctgcaactctgctactagaggagaagcatcatccaaagccaaattgccatgatggaaatcatcataccattcatcatccgtcgatggattgtcttgacgaagctctctatgttgaggcctncggtcatggtcatcttgagtcagatgacgcatttcttcagtggcctcatcaatcttcgtctgaagatcgacgagacgaagcatcttttctttattcttctgaacctcgtgatggatggg

SEQ ID NO: 70348 - DNA, 454 bp, Zea mays
tctatagtccacacacattctccatgaaccatctttcttgttcataattagaactggggctacccatggagacggactggggctaataaaacacttttctagtaattcttctatttttttcttcagtatagtcaaatctttgacatccattcggtaagctctttttgaaattggcgcgggtctgggtaatagttcaatagaaaactctatatcacgatcaggtggcctacatggtaattctttcgaaaataaagctgggtattcacacactgttctgatgttctccaaagatttctcttacaaccgaattaccattgcctctactgttgccggcatactgacattaacatcaattctgtctttttgcggactacttaatgtaaccatccttttggatacgatattactccatcatacatggtcaagtagtctattccaagtatcacatcgattc

SEQ ID NO: 70349 - DNA, 366 bp, Zea mays
cagctctatcaaaatctaccaagtgtagctgacccttcaacactgccttaaatgctattgaatcatcacgtcttctaaagacagggacacctacatcagtgaaaagacaggtgtgacccattcttgcatattgagatacagaaagcaaattgtaatctaatgaatctacacgaaaaacatcggaaatagaatggtcaggagatataacaattttacccaatcctttgaccaaaccttggtttgcatccccgaatgtgattgctcggtggggatcttggcttttctcgtacgaagagaacatcttcttcttccctcgcatgtggtttgtgcacccgctgtcgagatcctacttgagccccggatgct

SEQ ID NO: 70350 - DNA, 387 bp, Zea mays
catgctaggcttagctattaagcatgcatctagaccggcctcttcttttgcaaaatcaactaaataaagattgccgtctaatacacccttaaaagctagtgaaccatcacttcttctaaagacagacacatctacatttgtaaatagacagttatatcccatattgcataattgactcacagatagcagattatatccaagagactcaactaaaaacacattagatatggagtgctcattagaaattgcaattttacctaaaccttttaccttgccttgattcccatcaccgaatataattgaatcttgggaatctgtattcttgacgtaggaggtgaacatcttcttcttccccgtcatatggtttgtgcatccgctggcgataat

SEQ ID NO: 70351 - DNA, 471 bp, Zea mays
  unsure (1)..(471): unsure at all n locations
agcttagcaagtgcgagttctggaccagtgagagcctattcttgggtcacattatatactaagagagagtggctatggatccaaagaaggtgacaactatcttggactggaaagcaccacaagatgtctgaggaaccaagagtttcattggaatgaccgggtattaccgacgtttcattgaaagtttctccaagattgctatgccaatgacaaccttgttggctaagaaagatgagttcaagtggaccccagcatgccagaagtcctttgagatattgaaggagaagttgacaacgacaccaatactgattctgccagatgttcacaagccgttctcagtgtattgtgatgcttcgtataccggactgngatgtgtgttgatgtaagaagggagagtagtggcatactcatcccgacagttaatagttcatgagaagaactatcctactcatgatctggagtcagcagatg

SEQ ID NO: 70352 - DNA, 402 bp, Zea mays
  unsure (1)..(402): unsure at all n locations
agcgttntgctgcggcggcagaccttgtgttttcatggcccacccgaagatatgcagccttatgactgcccccggggtaagtagatgaacagagacttccaagatcttcagcacctccacgacgaagccgctcacgggaaatcgcagtccagctttcaaaaaacttcggtacactacgactgcattctcttcacgagagtggacacagcgttatctcccttcgtcggccctcacaatggacaaatcccggaaataccttcctctcatggtgaccagatgactctctctgatcgctgatctaccataacaccgaaagcgctaggtcgccatagacgatctttcgagacttcagcaccacggtccacatcataactggcactgggaccagtatctccagacaaa

SEQ ID NO: 70353 - DNA, 285 bp, Zea mays
aacttactgctttaattgagacatagtgccatagtacctcctttcaagcggcatactttcaactagcaataatctatttcatgaaacagaaatgtcatatgaacgttaatttctttggcatacactttggaaatggcgcatattggtaattcactcatacatgtgcatcgacttataacgaatttaatttatgcctttatgccttataaatgatgatttagttgacattcatctataaatatcacctttcattcaatacttcattgtgctactaatacctctttt

SEQ ID NO: 70354 - DNA, 430 bp, Zea mays
  unsure (1)..(430): unsure at all n locations
ggaaaacaccgattaaatctattgacatccncgagacagagaccttacgggcggcctccacaaacacacacaccagctccatcacagatcacactagatgtacacaccaacattttttttacaagacatattgacgcgaatgggagaaaattggagctatcgatcctcctgggaagttgccttctcaatctaactctgctatgaaggtatgcagctcgccctggcacaggtactcgtcacagtgcgacgccgatccccaatccctccgacaccagaagatgttctccgcgaaggtggaccctgacgatcctatgaatacgtctgatagcgcacagatcgtcttgtcaagcatcgcgtctacctgaacaagcattacagaaacgtatcgttgttagataaaccgcacactcacatgagaaaaatactcaca

SEQ ID NO: 70355 - DNA, 283 bp, Zea mays
gatatataaaatagtcttttcacgaaacatgaaaataatggcaagtgttcttctcaacgaacgctcaacacaagagatatatgccaattctcatgcatcgtatagaactgaactataaacagaatatcgtctacactcaaagtaacaatgtacgacacaagttacgctccaaatgtttctacaatagcataaaaccctccttaagaactatttcatgcaggataagctcacaagctggttcacaacactcgtccaacaatgctccggccaattttctaattta

SEQ ID NO: 70356 - DNA, 470 bp, Zea mays
  unsure (1)..(470): unsure at all n locations
tgattaaagagatattagcgcaagtttatctagtctatttagcgagctctcgtgaacacaaataatcacatagaggaacaacacaagagacacgcgatttttatcccgtgggtcggccatgtaacacttgcctacttccatgttgtggcgtcccaatggacgagggttgcactcaacccctttcaagttatccgatgatcaacttgaataccacagtcttttcctttcaagtgttttcccgtttgcgaggaatctccaaaatttggagcctctcgcccttacaatagatatcacaaagaaagcacagagtaaggttgggaagagcaacacacacaagactcanatacgcagcacacccacgcacacaagtgaagacttgagctcaaatgaccacacaaggagttcacgactcgaatggagctcaaatctctaacacaacgaagcatatgcgcgggagcaaagtctggatg

SEQ ID NO: 70357 - DNA, 259 bp, Zea mays
aatcaactaagcatagctgaccctctaacaaccgcccaaatgctactgaaacatcacttgttctgaagacaggaacacctatactcgggaaaagacaggggcaacccattttgcagagaggagaaacagaaagcaaagtggtatctaaagaagctacaagaaaaacatcggaaatggaatgggcacgcgatatagcaatggtacccaatccttagaccaaaccatgatttccatccccgaacgtgatagctcatcgggg

SEQ ID NO: 70358 - DNA, 480 bp, Zea mays
  unsure (1)..(480): unsure at all n locations
cactcagcttagcctatgctcaaagactgtggtgaaccgtccttgcccaatagtggccttcaagntntttgggcctttcagagtgttggctaagattggtgcgacagcttacaaattggatcttccagccgatgctcaagttcatccgatgtttcacgtttcacagctgaaaccttattatccatcgtatactccagtttttacttctttgccttcattggtggacctctcaaggactggcattgttcctgaagaaatcctggatcgacgtctagtgcgcaaaggcaatcaagctgttccacaggttcttattcgctggtctggtgtgccagtggaatcagcaacttgggaagattactatgtgttgaagaaccgttttccagatgccatcgcttggggacaagcggattctgatgcctggggaattgtcatgtctgagcccgatgcagcttcccaggatgtggatgggcaacagtaagt

SEQ ID NO: 70359 - DNA, 429 bp, Zea mays
catgcagcttggatatcttcatagagaagcatttttatttggtgacatagaaaagaacgtcttcacgaatcatgataagagaggaaggtgcgtttgcaccgaacgctataaaaaaggcgcgtatgcaaagcttgctgcctcgcaaagaagcaaactatacatagagtatatattacattcaaagttacaacatattacacatgtgacgttccatatgtcttcacaaaagcatccaatcctccttaaacactatccctgcagcttcattcaataactggttgacagcctggtccataatggcatcggccatggttctaattacatcatcccccttcagatgaaggcccggaggtgcctcaacacgttctgatgaaagagaagataccggtatattaccattacaaacccgcagccaagcctgcaacaaaa

SEQ ID NO: 70360 - DNA, 380 bp, Zea mays
actccgtgctaaattaaaatatattatacctgtttatacaataactaatggatatatatatatatggaagggcctaggataccgatggtctaccatgtagtggcgaaataactgactaaagataacataatttatgtatgccgatgatcacgaatgaattacataacattttttataacattataacacacattcgtacatgaagtatcatgagattatacagtcacattgcatcgcacgaacacacctagtatatatatataataatgatgtatatgaatatacacataaaacatataaagttaagactactactcttttaagacgaataggtgagcataccactgaagagatcgatttttcgctatggtcgctaatat

SEQ ID NO: 70361 - DNA, 469 bp, Zea mays
  unsure (1)..(469): unsure at all n locations
tgtgaagattcttcatcccaacatgggctagtcggcggtgccattttcaacccatgttagtcttagcaattaagcatgtgtcgagttcagctctatcaaaatctactaagtatagctgaccctctaacacacccttaaatgctattgaatcatcacttcttctaaagacagcgacacctatatcagtaaaaagacagttgtagcccatttgacataattgtgaaacggaaagcacaatgttatctaaagaatctacaagaaaaacattggaaatagaatggtcgggtgatatagcaattttaccaagtcctttgaccaaaccttgatttccattcccgaatgtgatagctcgttggggatcttggtttttctcatatgaggagaacatccttttctccactgtcatgtggtttgtgcacccgctatcgagtatccaacttgaccccncggatgcatatacctagcaaac

SEQ ID NO: 70362 - DNA, 326 bp, Zea mays
agcccacgctaggcgtagctattaagcatgcgtctagaccgacctcttcttttgccaaatcaactaaataaagcgtgtcggctaatacactcgtaaaagctagagaaccatctctctttttaatgacagacacatctacatttgtaaatagacagctatatcccatattgcataactgactaaccgcgggcaaattatattcaagagactctactaacaacacattacagatagacggctcattacgaattgcaattctacctaacccttgtaccttgccttgattcccatcactgaatatgatcggatcttgggaatccttattc

SEQ ID NO: 70363 - DNA, 213 bp, Zea mays
ggcaaatcccctatcacccgcgaaggcacatatgtctccgcggtcatactaaactagctcaaaagcttttgcttcgtggctggtccattcaattgtgccctccgggtcaccctgtaccaaatattgctcgcttgaatacgcgccaaacatcgcgaatctagtcttatcttcttaagacgctctatagactcttcataacacctttccttggat

SEQ ID NO: 70364 - DNA, 429 bp, Zea mays
  unsure (1)..(429): unsure at all n locations
aaaacaatcagaagagaatattggcgaagctatgcattatgcccaagatgtgaagtatcccctatgatccttggtggttaatggcacttatgaaagcgactttctatactgtcttccgggcaataaagagatatttgtnttgtcagaaatggcaaaaaatatagtatccccgaagctagaggttggcctatctgcaatgtcgaaggatgaacttgcatatagccttgtttataatagcttgaaggtatatatanttttgttataaaataagttatgtttatagattgtgttattgatgtgttctcatatatttctataattaggggttaatcctaagtaaaactttgagagcccaaaaagaagcagaagatgagagctgccaaatagctcttgggaatcttcaggcggaggtcattttcctaacgaaca

SEQ ID NO: 70365 - DNA, 478 bp, Zea mays
  unsure (1)..(478): unsure at all n locations
gtgatggttagaatgacatcagcctctcccaaatcttttatctcgaaattgctcgatagaagattnttaacttcctcaatcacattgagatttgatccaaagatcaaaatgtcatcaacataaaggcacagcataacagactcacccccaccataccgatagtatacacacgtgtcagattcatttacaacaaagccagctgctgtaagagtattatcaaatttttcatgccattgcttaggtgcttgttttaagccatacaatgattttatcaacctgcacaccttgttctcttgaacatccgcaataaacccttctggctgatccatatagatctcctcatccaactctccatttaggaaagctgtcttaacatccatctgatgaatgataagaccataagaggctgccacggctattaatgtgcgaattgtagtcagtcgagccactggtgagtaagtatcaaagacatcttcac

SEQ ID NO: 70366 - DNA, 62 bp, Zea mays
caaaagccaggaaacaccccaagagaacaaacccaacgaggaaagggaaacgctccagagaa

SEQ ID NO: 70367 - DNA, 268 bp, Zea mays
  unsure (1)..(268): unsure at all n locations
acacaaaaactcagcttangacgatctgcgctgtcttatagagctgcgctgtcattatccacatggggcccagacatctaggacatttaccggacgcttacatattagggacaccactctaatctctaggatgtgtggggctccaacgccaattgtccgacttaacacactctacgagtcctactctaacgcaagattaggtacatcccttctcctactatggtgctacgacatcgcactgtttctggcataaaagtggaccccaaat

SEQ ID NO: 70368 - DNA, 221 bp, Zea mays
cgcatgttatattgctatgcctatttaccttatttgttctcttgtatggcgaactgtctgtttcctaacttcaatggatggatgtctgtatgcttgctatcgcatagagaatgattctgtcaacgagcccgaataacatcgtacgagaagcctcctgagcagcaatccggttggaggaagcacagtgtccctctgaccctacctctagccctattcatttc

SEQ ID NO: 70369 - DNA, 468 bp, Zea mays
  unsure (1)..(468): unsure at all n locations
tctaaagggagaacacgtgataagtttgacttacgtacaattcgaaaaggatagaccttgtgcagcttgtcaggcaggtaaacaggtgggaggagcgcatcacaactagaatgtgatgaccacatcaagatccctggagctgntacatattgacctcttctgacccatcgtctatcttagcataggaggaaagaagtatgggttagctattgttgatgacttttcccgcttcacttgggtgttctttttgcaggataagtctgaaacccaagggaccctcaagcgcttcctaaggagagctcaaaatgagtttgagctcaaggtgaaaaagataaggagcgacaacgggtccgaattcaagaaccttcatatggaggagttccttgaggaggaagggatcaagcacgaagtcttcgctccctacacaccacaacanaatggtgtagtagataggaataacaagacact

SEQ ID NO: 70370 - DNA, 474 bp, Zea mays
agctctcgggcagcagcaaagatcttttcggccgttagcgcctatgggcagaggcgccatgggcttctggggaaggtttggatatcagccaacaaaaatttactgtctattctgtggtgaagacaaaggccatagcaccaggatgtgccacgttaccatccagaagcagaaggagatagcagaagcagcaacgcaacaaagtcagccgaagcaggtcatgcatactgcttcgtatcattcgccttatattccagaatatgtaggcaaccaccctgcagcttctgttgcttcggcaagccaaccccaagcatcttggcaacagccttcaccgccactgccgacgcagcgaggacaacagccagaatggagtcagcacaatcaccttcagagggacttcagagaggagtccgaagctcacacagtcaatagcactgtgccagagtcgaagcacatttattgataaatatcctacct

SEQ ID NO: 70371 - DNA, 460 bp, Zea mays
tctgaattcttatcagcactaacaatggtgcatccataacatactgcatattgagcaaagagcattacctctcaatctgctttctatgttagaacaattgaacgtcctctcatgagtgctatgacgaacaatcaccttgtgcttctttaaaagtgggtctatcattgcttctcttatatacataccatctgtcagatgtctgatatgaagcagttgtgttcaatagaacatgattagatcagaacaccttataagaagagaaacatgaactccatagtaatctaccaaaaggctactggcaataatgatattcgtttatgatagatgagaaataaataggagtatctaacaacagcttgtggctgatgccatcctcaaattgaatgtcgtgaggcacttattgcccaagaagtacatccatcttctctgccacacacctaaagactgagaatgttgcgac

SEQ ID NO: 70372 - DNA, 141 bp, Zea mays
aacccgccaggccggcatatcaaaacggccacttgcttcaagcctaaaggcccggcttcacgttccgcacgcagatgcggcaccgcctcgcggggccacagggctagaatcgacccctccctcgcgcaagctcacagaacc

SEQ ID NO: 70373 - DNA, 439 bp, Zea mays
ctacacgccacaacaaaatggtgtattgtttatgaagaatatgactctattggacatggcaaggaccatgcatgatgagtacaagacttcggatcggtttttggccgaagcggtcaacaccgcttgctacgccatcatgcgggtatatctttaccacatcctcaagaagacatcgtatgaacttctaaccggttaaaagcccaacatctcatatttcagagtcttaggtaacaaaagctttattctaattaaaagaggtagaaaatctaaatttgctcctaagactgcagaaggctttttacttggttatgactcacacacactggcatataaggtctttaacaagatcactggactagctgaagtctcatgtgacggtgagtttgatgaaactaacagctcttaagtaaagcaagctgatcttgatgagatatgtata

SEQ ID NO: 70374 - DNA, 331 bp, Zea mays
agctataaccctataagctaatgctcagtatgaattcgcctttagccactatgcgcacatgcgacacacgctctagggagcgtgcagattagtacctgacataaatcactgtctattcttgtgtgagccacaagtgtccatagtcaccaccctagagtcccggatcgctatcggatgggccgggtggtacaaaaaccagcccccgatcacactcgggcagtgcatgaaatgcctgccgctattgctcatgcgacttgctattcagaatctgacagcaacccgcccggttctggtgctcgtttgggattctgccgctaccatatctgactca

SEQ ID NO: 70375 - DNA, 437 bp, Zea mays
tggcatacaactggcaatctcgtagcctctaaagtactttcctcaaatgttcctcatgctctttctcattctgggaatatacaagaatatcatcaatgaacaccactacaaacttgtcgaggtagtccatgaacacactgttcatcagatacatgaagtaagctggcgcgttcgtcaatccaaatgacataaccatgaactcatatagtccatacttggtgatgaatgttgtcttcggtatatctgcgggtcggattctgagctgatggtaacctgacctcagatctatctttgagaacacactgactcctctcaactgatcaaataagtcttcaattcaaggcagggggtacttgttcttgacagttacttcattcaaagctctgtaatcaatgcacatcctcttcgtgccatccttcttctccacaaataatact

SEQ ID NO: 70376 - DNA, 481 bp, Zea mays
  unsure (1)..(481): unsure at all n locations
tgctcagcagcatgcgctgcagcaaccagncatggtctttactttttacttaccacaaaaatgataataataacaacctagccaaaagacctcaccttgaagctggaataaaataagctaccggcaatatgtttctgacggtagcagctatatcagcctctagcttcggaaagccaacactcttggatagagtactgactatcttcgccccagcgcagttgcggacgcatcctaagatctcctcgtctaccccgccgaagagcaaagcccctggttgatatccgcatgatacagcaaattcccgcaactctgacttgtcctcttcagacaattcttggccgcctaggtgccgaagatcgaagtatttttcgcccgaaagactagcatcaatttccctttctttgcttgggctacagccatttcttcctctatagccacatctttaaccacatctgatatgagcctatcaatatctgacatt

SEQ ID NO: 70377 - DNA, 441 bp, Zea mays
  unsure (1)..(441): unsure at all n locations
tatctttattntacaataggggagaaataggtatcttatagtggaatcatangacaaacataagatgaagaaagctgatgagtgcattccatgtcatgagcatcacggttattttatgacacactgcaccctatgaatagtatgatataagttgtctatactttgaccttaatatgtgcttatggcatttgagtacaaaaatgttattttctgaaatgcacatgtttatggggaggaaactatatcataggattcaaaatcttatttatcaaatcttatgtaagctttaaatgaggtgtcatccatcaccaaaaagggggagattgaaagcgcattcatcccttttgtgaagttaggtgattnggataacaacacatttaaaggtctaacaagtttactaagtgttgaacaggaaaatcactatgatgaacatactcgaat

SEQ ID NO: 70378 - DNA, 321 bp, Zea mays
  unsure (1)..(321): unsure at all n locations
gaccaaanncccggcgccgccnagagagaggcagcctcaggtgttttcaaggggccaagaccacccacggcagtcttagcaactgaagcaagaggccgagcttcacgtctatcaaaatctaccaactatagccgaacctccaacactcccctaaatgctatagaatcatcacctattgtaaagacagttacacctacatcaggaaatagaccagcgcagccatttgacataatggggagacggaaagcaaactgggcatctaacgaaacaacagcaaaaacatcggaaacggaacgggcacgagatataacaattttaccc

SEQ ID NO: 70379 - DNA, 71 bp, Zea mays
caaactcagctgcatgcgcgagccactctaaagacccttcttcttgtcttattcccctataggagttggga

SEQ ID NO: 70380 - DNA, 466 bp, Zea mays
  unsure (1)..(466): unsure at all n locations
gggtcattntattgctaactgtcccgactatgatagtgttcaggatcaagggaacaagagggagaaaaagaagaactataagaaggcaaagggcgaggctcatctgggcaaggagtgggattcggactgctcttcatccgactccgacaatgaaggactcgccgccaccgccttcaacaagtcatccctcttacccaacgagcgtcacacttgcctcatggcaagggagaagaaagtaagcactcataatactagtacttatgcttcttcaagtgaggatgagtctagtgacgatgatgagatagattactcatgcctattcaagggattagatagaaccaaggtagacaaagctaatgaattgattgatgccttgaatgataggaatatacttttagaacagcaagaggatntgttgtatgaagaacatgataaatttgtagaagctcagaaatctctagctcta

SEQ ID NO: 70381 - DNA, 476 bp, Zea mays
cggacacttaaaactcagcttcagcatctcctcgaaatggtcgatggccttctcggtctaatgcttcctccctttctggcctggtgtggctactaacatatcgtcatgtcgtcgcatgtccttattatttcttttgtcgggttgtccactggtgccttcatcgaactctttatcgtgtttagggctctgcttgcggtgatcgaagatcaaccccaccgcattccctgacgcatggctatccttaatgtcgaggagttccttcatggttcgcaagcttttaggcccaacttgtgcaccaaagtctcacttgtgctccttgagattgaagtgttgataacgtcagcataagcaaagttagttagctcgatgcaatgccgcaagaagcgtcagatgtaatctctcaacgtctcatctggtttctgtcgatgggtcttgatgtcccacaggttgcctgtgcacatgtatgtgccctggaa

SEQ ID NO: 70382 - DNA, 449 bp, Zea mays
ctaccaaatggacgtgaagagcgccttcctctatggacctttcaaggaagagggctatgttgagcaacctcccggctttgaagacagtgagtatcctaaccatgtttataggctctctaacgcgctttatgggctcaagcaagccccaagagcatggtatgaatgccttaaagatatccttattactaatggcttcaaagttggcaaggccgatcctactttattcactaaaactcttgacaatgatttgtttgtatgccaaaattacgttgatgatatcatatttgggtctactatcgaatctacatgtgaagaatttagtatgatcatgacacacaaattcgagatgtcgatgatgggggagttgaagtattttctaagatttcaagtcaagcaactcctagagggcacctttattcgccaaacgaagtacactctagatattctaa

SEQ ID NO: 70383 - DNA, 457 bp, Zea mays
  unsure (1)..(457): unsure at all n locations
ctatattatggattgctcttgagtctgtccaatttccttcggcccttctggcagcttcttgacttccatgaatagcaatgggcccttggtccgaaggtatcttcatgcaaagataagctggatgcagaattgcttcgaaggcattaaaagtaccacgaccaatgattgcattgtaagggtactccatgtcaacgatatcaaacataacttgntcagtccttgtgttgttgatgaatccgaacgccactgacattgagattntgccgagtgctataatctgccttccttcgaagccatagaggggatgtgtggcatcaagaattttatcttctggctcttgcatctgtctgaaggccttagcaaatatgatatcagctgcactgcctgtatcaaccaaaacattgtggaccagaaatcctttgtaacacaagagataccataacatcattgtgtgggt

SEQ ID NO: 70384 - DNA, 467 bp, Zea mays
  unsure (1)..(467): unsure at all n locations
tcgagttagttctgatatttntgcttcagcttccgccagtaagccttcggctgcctggagctcaaagttctttttctcaaaagcatctgattgctcttttattttgttttccaaatttccgattataatttcatgctttttatcttcaagatcttgctgcatttgcaaggctttgctcaacaacatactctacacaaacacaaccttcgtcagtcatgtttttattagaagcaataaaggttaagaaacaagtcattcaccttgaagttggaataaaacaaactaccaacgacatgttgtcgtcggtagcggctgatatctgactccagcttcggaaaaccgatactctttgataaagtaccgatgaccttagccccagctgagtcccggatgcagcccagttgttcatcatctacacccncaaatangagggcacctgacttgtacccgcaagacttgccgtattc

SEQ ID NO: 70385 - DNA, 309 bp, Zea mays
acgaaacggctgcgagagccaaaagctccaaggaacacgaccaaagggtgatacggctcaaaaaccgcctaggagcgccaaagaacgaagaactccgccagccaagtctagatgaacacatcttaaccgttatcccattcatcccggaagcatcaagaggcaccaagactgaaagcaacatcaccggtggacaaagaagaagatcgaaattgcacgctatgtggctaagagtgacacctgcacacgcgccgaggccatacacataaaaacagccggccataacaagtttgccgcacgcaacatggaaat

SEQ ID NO: 70386 - DNA, 448 bp, Zea mays
tgacctataaaactaagcttctaagggagaacacgtaataggtctaactaatgtaactttctaaaaagatagaccttgtgcagcttgtcaagtaggtaaacaggtgggaggctctcatcatgccaaaaatgtgatgaccacatcaagacccctggagttacttcatatggacctcttcggacccgtcgcctatctaagcataggaggaagtaagtatggtcttgttatagttgatgatttttcctgctccacttgggtattctttttgcaggataaaactgaaacccaagggaccctcaagcgcttcctaaggagagcccaaaacgagtttgagcttaaagtgaagaagataagaagcgacaatgggtccaagttcaagaaccttcaagtggaggagtatcttgaggaggaaggaatcaagcacgagttctccgtccctatacaccac

SEQ ID NO: 70387 - DNA, 368 bp, Zea mays
ggacaactcttcatgctcatgagttgtgttttacgcatgtttcccaatctaaccggatcttttatttatggatgcttttatctgcagcgtttggttgaagctaagttgcaagtggtgcagctagatgcaaatctgcttaagtaagaatgtagcctccggctgtgattcgttgatacctatgttgataaaggaacccgagatgtagcaatgtggttctaccaaaaataacagaaatactcataatagccatacagttttttgagaaaagtttggaacaaaaatgaaatataatggaaagacatagttgataaagatatattagtcagcactacaatatgcttagcctcatgttctttgttgcgcatata

SEQ ID NO: 70388 - DNA, 445 bp, Zea mays
gcagcagcaagctcaactaataagaagaggtatgcaatttacttatattacaacacagagtccacaaactacatgtcaccaactatactacaatgtggagaactgacatgctctgaactgaagcttctcgactgagagcacatcaaccacaagagcacgccaaataatgtgtcttcaatcctcattttttcattccggatgaacactaatattaaattctagtctagtaaggaaatttatgacctaaaccaaaatctgcatcgattcacccgagagagaaaaggagcatggcagacccatggaattcaatccttgggtcgggaggatgcacatgccagacttaccagcaagtaccaaatgcaaataaacagcaagcttgctgaacgacagcatctgttctacaagcaagcaaatatccaaagctacgtcaacccagctcggcagc

SEQ ID NO: 70389 - DNA, 473 bp, Zea mays
tgctggacggcacccttatacctgagacgacggtgtagtctttctccgacgtgactttatcggcgatcgtcgaccaagaggtaccgaccgattcccgtcccacgtcatttggattcagactcaacccgcctagcgacctcgctttggcgggcgctctcgtagaggcgagtccaaaccctctggggtttcgcatgcggacgccttgggaccggctgacggacgtctcgacctacgggccctctgggtccgaggaagacgacgagcccagcatctgctgggatatctctggacttggcaaccccagagccatgcgggacttcatgaccgcatgtgactactgcctctccgactgttccgacggtagtcgcagcctcggtgacgaggattgcggcccaggccgcgaatgtttccacgtcgatctatgggggtccctccgaaggcaatcatctcggcatgccggaggacagtgatct

SEQ ID NO: 70390 - DNA, 306 bp, Zea mays
atcactggtatggtccgattaacttaagtgatccaattgcgagtgtgtgattacagagcctgctactgagccaagctttaaaaatgccacaagatgatgaggatagaaaaaatgaagttatcatcagagggttagaggatcaaatcaaagaacttgaggattctctaacagaaaaagatgagtaactgcgctgagtcgaaagatccctttgccaaacgcagattcaaaataagaaattgagccaagaactggtggatgcgcaaatacttttaaaagaaaactccagccgatacaaccgagaatctg

SEQ ID NO: 70391 - DNA, 320 bp, Zea mays
gccgaaggctttgaattcttcctcccccaccccccaatgtctcatggccaaaggagatgcccacgccaaaatcagcaccgattcaaaagacatacccgacgatgacgatatccaagatcgtgatgacgacggctactcatatgaagaacccgccagaatgccaagcgaggcccgcgaccacctgcacacagaacaagaaaaattaaggccgtgaggaactgcaaaaaacctccagtgtctttgaggactcaaacctctccaacgaccgcaagaaaaaatgagaacctgccacgccaaaaacatctattggcatgaagtga

SEQ ID NO: 70392 - DNA, 477 bp, Zea mays
  unsure (1)..(477): unsure at all n locations
tctgaagggagaacacattttgtgaataaccaatgttctatttgagaaagacagggtgtgtagcgcatgtcaagcanggaagcaagttggtgttcatcattcacacaagaacatcatgacgaccgacaggccacttgagctactccacatggatctattcggcccgatagcttacaaaagcatcggtgggagtaagtattgtctagttattgtggatgattattctcgcttcacttgggtgttctttttgtaggaaaaatcacacacccaagagaccttaaagggattcttgagacgggctcaaaatgagttcggattgagaataaaatagataagaagcgacaacaggacggagttatagaactctcaaattgaaggctttcttgaggacgagggcatcaagcatgagttctcttctccctacacacctcaacaaaatggtgtagtagagaggaagaatagaactccactcgacat

SEQ ID NO: 70393 - DNA, 404 bp, Zea mays
tttcccccggcccccaacacacacacacaccagcaccaacacaaatcacactagatgttcacaccaccattttttttacaggacatatggacaccaatgggagaaaattgcagctatcgatccttctgggaagttgccttctcaatctagctctgctatgaagttaagcagctcgccctggcagaggtactcgtcacagtgcgacgccgatccccaacccctccgcagccggaagatgttctccgtgaaggtggaccctgacgatcctatgaatacgtttgatagcgcacagatcgtcttgtcaagcatcgcgtcaacctgaacaagcattacagaagcgtatcgtttgttaataaaacccgcacactcaacatgagaaaaaaaactacacaagaccatatatg

SEQ ID NO: 70394 - DNA, 293 bp, Zea mays
cttaccatctaagcaatgtgtgagaccccgtctattgaaatcaactaaggatagctgaccctccaacacgccctgaaaagcgatagaagcatcacctcttctaaagacagctaccacctagacggtaaaaagacaaccgtcagccattctacagcattgcgaaacaaaacgcaaagtgtcctctcaagaatctacaacaaagacatcggaaacacaatcggcaggagacatatcaattttaccaagccctttgaccaaaccctcgattcgattcccgaatgtgacagctcttt

SEQ ID NO: 70395 - DNA, 424 bp, Zea mays
  unsure (1)..(424): unsure at all n locations
tttatgacaagcacttacaaagcagcgtatgaatgtttccaggcactgattgactctttcagtttgaccatcggactgggggtgataagatgaacgcatgccaagcttatcacctgctaacttgaataaggactgcccaaactggctagtaaaaactgggtcgcgatctgatataacagccataggaaacccatgaagacggtacacctgagacaggaataactgtgcgacagaagcaacggtgttgccaacccggacaaggcagaagtatgattagcactcangaagcaatgagagctaccagagtctaataaaatgagcacatcaatgccttgaaagtgaccgcgaagtcgaaatgatttagaggtagtcttggtagaagctgcttcagtggatagcaatatcatgaattgtcagcagaatc

SEQ ID NO: 70396 - DNA, 271 bp, Zea mays
tgcatctagaccggctctttcttttgctatatcaactaatgaaagattgatgtctagtacacccttaaaagctagtgaaccatcataccttttaaagacggacacatctatattagtgaatagacaattatatcccatattgcgtaatggatcaacggatagtaacatatatccttgagactcaacttacaacacattttaaatagagtgctcatttgagattgacttgtaccttacccttttaccttgccttgatacccatcaccgaata

SEQ ID NO: 70397 - DNA, 461 bp, Zea mays
  unsure (1)..(461): unsure at all n locations
ngcacacatagctcatatgaataccttngatcatatctcttttatatgctatgactaatggtgtttcaagtctatttcaaaccaagtcatacgtatattgaaagggaattggagtcttcggcgaagaaaaaggcttccactccgtaactcatacttcgccaccactccgagcaactctctcttctttgggggagaaatgagcatcaaggaaaaggacttcatccttgggggagagagtaaaagctcataagcaaaaggaccggacctcgtctttggtataatcttaactcatttacttatgaccaaaggggaggaacttacttcgagggctctaatgattccgtttttggcgattcatgccaaaaagggggagaaatgagcccaaagcaaaaggaccgcaccaccaccaccaaattcaaaaacttagtgctttccacaagtctttatcatttggtatccta

SEQ ID NO: 70398 - DNA, 437 bp, Zea mays
ttatccctacatgagctaaacggcgatgttactttcagcccatgctaggcttagcaattgagcatgcatttagaccggcctcctcttttgcaaaatcaacttaatagagtttgtcgcctaatacaccgcttaaagctaatgaaccatcacttcttctaaagacagacacatcttcatttgtgaataagcagttatatcccatattataaagctgactcacagacgacaagttatatccattcgactcaactataaacacattggaaatggagtgctcggatgaaatagctattattcctaacctctccaccttgtcttgattcccgtaccgaatatgattgagtctgcgaatctttgttcttacgtaagaaagaacatctcctctccccggatgtggtagtgatccgtgctataatcacttgactcctgatgataac

SEQ ID NO: 70399 - DNA, 460 bp, Zea mays
  unsure (1)..(460): unsure at all n locations
tactaagcttgttcatggttgccctttaaatactagatattcctcctcctactagatctttcaccaactgaactacatgttctgccgttctttgttgttcttcaaaaatcttgttgattctttccaaccatattctccaccaaaagtaaatgagagggctatcaaaactttttcttgactgcttgctacagaggttccttagtcttctccaccaagcatacaaggatcctgaattanggtactattcaggaaccacatatcatcccaagccaagatcatgctccacactattcctatgaaggggcaatccttacaaaggtgggtcactgtctcaggagatgaattacatagacaacagattgngtgcaaggccatcccctttctgatggttgtctgaagttaaaactctgttgtgtaatagtgttcacgcgaaaaacgaacatttggttcggtctttgct

SEQ ID NO: 70400 - DNA, 439 bp, Zea mays
  unsure (1)..(439): unsure at all n locations
tctaaagggagagncacatttanggttaacaaatgttcattttgagaaagacagcgattgtagcgcatgccaagcagggaagcaagttggtgctcatcatccacacaagaacatcatgacgactgacaggccactgaagctcctacatatggacctattcggcccgatagcttacataagcatcggcgggagtaagtgctgtctagttattgtggatgattattctcgcttcacttgggtgttctttttgcaggaaaaatctcatacccaagaaaccttaaagggattcttgagacgggctcaaaatgagttcggattaaggatcaagaaaataagaagcgacaacgggactgagttcaagaactctcaaattgaaggctttcttgatgaggagggcatcaagcatgagttctcttctcctacactccacaacaaaatg

SEQ ID NO: 70401 - DNA, 266 bp, Zea mays
ttgaatctcagcttcggcctctccctggcgcttccggcgggttcgcggtttcattcgcggggttcacggcggatggcgggttggcggcgtacgggtcgggcggatagcgttggcgggttacggcggggtggggttcgcgacacgagtgcggatgggcggtcgcggcggtcgcgccttgggttggcgcggatggctacgggtcgcgccttgggtggcgcgggatgcggcgggttcacggtacgatcgagctgcgtggcgcacgatgg

SEQ ID NO: 70402 - DNA, 333 bp, Zea mays
cacaaaaccagctatgatctctaaccccaacgtagtcgttgtcgtgaccatgctgacagcgtacctgctgtcaactctctcttctgctcacgcgctggcagccgataagtgcgtcccgggtggattctatcctggaggccatgcggacactgacaggactgatcgattagtggtccgtgatgacggagcttgacgctgtggaggattattatggcgatggtgaccctcgcagatggatgagaactccgtttcctcacaagataagagaaggcataccccgaggggtaataatgtgcaagacatacagatgtgtggacgcatgtgggcatacta

SEQ ID NO: 70403 - DNA, 482 bp, Zea mays
  unsure (1)..(482): unsure at all n locations
ggatgtttagaatgatatcagcttctcccaaatctttcatttcgaatatgctcgatagaagattnttaacttcctcaatcacattgagatttgatccaaagatcaagatgtcatcaacaaaaaggcacagcataacagactcacccccaccacagcgataatatacacacgtgtcagcttcatttacagcaaaaccagcggctgtaagagtattatcaaacttttcatgccattgcttaggtgcttgttttaggccatacaatgattttatcaacctgcacaccttgttctcttgaccatccgcaatgaacccttctggctgatccatgtagatctcgtcatccaactctccatttaggaaagctgtcttaacatccatctgatgaatgataagaccataagaggctgcacagctattaatgtngagaatgagtcaatcgagcaactggtgagtaggtatcaaagaaatcttcaccctcttt

SEQ ID NO: 70404 - DNA, 396 bp, Zea mays
  unsure (1)..(396): unsure at all n locations
cctataaaactcagctttgaagagatcctgagcgatcgcggggatatctgtgctttcactggcgctcgaggtattgcggcaattctggagaaggctggttgcgaccacgttaaagctgcggcccagtctgaagccgccttctccactgacaacacgagagacccttcggccgaagctacttttgtgggtggaaagttttactccgatgtttgggtgaacggtggccgagaattggccaacgaaatcataaagaaaaatgaaaaagaaacccatgatggccgagaagaagctaggcgagccgaagaggctgccgagcgcgcaaggcgtataagtattgttcttgaattttagcttcagcatttattntctagcttcgaactaatgggttggcgatta

SEQ ID NO: 70405 - DNA, 368 bp, Zea mays
  unsure (1)..(368): unsure at all n locations
acctataaaactcagctngaacctcgttaatatcacanattgatgtttcatccagctcgctatgtattttaaatcttgaatgtgttgtgcggccacctggaaggagtagggaagcaacacctgaagatgcaactgttaagactattcttttttgcgctctcaaatgtgtcacgattgcattccaaagaaaagtctttctggtgcctccatacccagataagaagaagaatccagatttatttcataaaacagtatgaactatggtattaaaagcatacagttgctgctcattcaattncatgtgaagattctgcgcttcacttaataaagcattgaaatcgtatgataactcttcttcaatatatcga

SEQ ID NO: 70406 - DNA, 318 bp, Zea mays
actcagcttgcttcgctcatcgccttattatgcagaaaagatgatattcttgtagcaatccaataagctcatgagtttctaagtagctgctgcatccataagggaatctattcttggcaatgggaattcatcattcagacataccttgttgagatatgtaaagtcaatacacattctccattttccgttagctttctttaccatggcgatgttagccaaccactctgggcatgttacttccctgataacacctgcatttaaaagtcttttcacttcatttcatgcaccttcggctttatcatcagacattttctgaag

SEQ ID NO: 70407 - DNA, 416 bp, Zea mays
  unsure (1)..(416): unsure at all n locations
tgaagccatggtaagtagcatatgcaagtaatatactaatttactcaagcctagctacgggtgcataggtttcaccgaaatccaaaccttcgattcgtgaatatcccttggccacaagtcagactttgttccttgacaccacaccatgctcatcttgtttgttgcggaatacccatttggttcctacaacattttgattaggacgtggaactaaatgccatacctcattcctcgtgaagttgttgagttcctcttgcattgccaacacctaatccgaatctcttagtgcatcctctaccctgtatggctcaatagaggaaacaaaagagtaatgttcacaaaattgagcgactcgagatcgagttgttacccncttatgaatatcgccgaggatggagttcacggggtgatctcgt

SEQ ID NO: 70408 - DNA, 320 bp, Zea mays
tgagcaaggctcacggtctcaccaggaagctatctgtgggctctgaatcgaacggagggggactggagaggggttggccaccgcggtggctcttggtcgacactggcgggctgcggggaggtcgccggaggcaacggctggctcgggcgagtccggcgaggtacggaggaagcaatggggaaggcaaccgagcgctggggcgggttttatatgcgcggacgcggccggggcgtcggttcgaccgtttggcgcgacgcgggcacgcggggcgcgcgcgggcgtgccctggcgagctcatagcgcgtcgaacacgtggcgcg

SEQ ID NO: 70409 - DNA, 482 bp, Zea mays
  unsure (1)..(482): unsure at all n locations
aactcaagctnttataactatttatttctatttcagcaaaacaggacaatgaaaacatgctaattnttnncagctaatggtaatacctacggtgcatacagccaaactatgaattacataagtcactgaaaagaaaaaacgaacaaatttaactatttaagtgcactcactttccttatccaactcaatggccttgtagcttgctccgagcttctcgaacaactgcttcacacggacgcagaaagggcaggaagttttgctgcacgtaacccaatatatgaatcagccacagagcatggggaaatagatcaaaagaaaagaaatggtggaataaatgattgaacaatgagatttgaataccaaacatagtactatgacatcaactttataagtcgtaaaaaaatcaattgtttcattgcagggaagtgaacactagaacagtacagaccacagattgtgagcatttagcagtgccaacaagc

SEQ ID NO: 70410 - DNA, 485 bp, Zea mays
  unsure (1)..(485): unsure at all n locations
tatgaagattcttcatcccaacatgggctagtcggcagtgtcatatccaacccatgttagtcttagcaattaagcaagtgtcgagttcagctttatcaaaatctaccaagtatagctgaccctctaacactcccttaaatgctattgaatcatcacttcttctaaagacagtgacacctacatcagtgaatagacagttgtagcccatttgacataattgtgaaacggaaagcaaattgtaatctagagaatctacaagaaaaacattggaaatagtatggtcaggtgatatagcaattttacccaatcctttgaccaaaccttgatttccatccccgaatgtgatagctcgttggggatcttggtttttctcatatgaggagaacatctttnntctcctgtcatgtggtttgtgcacccgctgtcgagtatccaacttgagcccccggatgcataaacctacaaaacaatttatgtcttgactt

SEQ ID NO: 70411 - DNA, 211 bp, Zea mays
gatcaacactaagacctttcaaggggcatacttgcaactagtacaaaaccattctatgaaaagaaatgctaatatgaacgcccaaaacctcctggagaaaaaatgtaaatgggagcatattgataaaccactcatacatgtgcatagaccgacgaggaagttaaaccatgcctttaagccctcacaaacgatgatcgatctgacattcata

SEQ ID NO: 70412 - DNA, 380 bp, Zea mays
  unsure (1)..(380): unsure at all n locations
tcgggccagcagcanagttctttccggccaccagcgccaatatgcacatgcgctaggggcttcggnggaaggtttggagatcaaccaagaaaaatttattgcctattctgtggtgaagataagggccataccaccaggatgtgtcacgttaccatccaaaaacagaaggagatagcagaagcagctgcgcaacatagtcagccgaagcaggtcatgcatactgcttcgtatcattcgccttatattccagaatacgtaggcaatcacccccgcagcttctgtcgcttcggcaagccaaccccaagcatcttggcagcattctccaccaccgccgccaacgcagcgaggacagcagccacaagggagtcagcacattcacc

SEQ ID NO: 70413 - DNA, 354 bp, Zea mays
tagcattttatggagagagtatcttctagcctgtgacgagctgtgctttgctctctcgctctatttagaagattgagcatgaccgccttatcttcttgacttaaatgagtgtcgaggtgcatgaagcttctttcatcctcctcatcctcatttgcgcttccactatcattttcattaaccacacaacatatgtgtgaatcgaaattggaagacaaaccttttggagaggtggattcattggttggtctccatcggtcattttcttcttcttccttcaaagggttagtttcacaatgaacaaaggaagtagaagcacaaaataaaccatcttggttggactcatcaaaattactt

SEQ ID NO: 70414 - DNA, 463 bp, Zea mays
  unsure (1)..(463): unsure at all n locations
tcggtattacaaaccgacttaaagatagaatgaccttttattccttttaggtctgagtcaatgttgtaagcttatataaggggcatacttgtaattcctcacaggctgcgtcctgtgcctataaatagagaacaatattcctttactgtggacacattctggtaattgcaatcgcatattctggaattcaacctttgtcaacgcagaggtattattgtattcaatgattcaatatattaagtaaatataatataattcgtctatgatttatttaccccttttgtaccttttattntatgtcatcttacaatatctattgaaattttattacgaagacttaagcttcgtaattatactctcttcaaccttcgttcaaggcccattatccttaacggaataatgtttcatggacgaacgacggtaacattaacactntatgttgccttggtcttaattcataaca

SEQ ID NO: 70415 - DNA, 340 bp, Zea mays
gtcagcttccctcgctttgaagctttcctctgcgcgagcaatgtcttgagcattgtccatgagatcgtgctggagcttctgcaacttcacctacaccatagcctgctagtcccgctgcttctccagcaccgcattataagctttcagcttatcatggagcattgtgacggcctcctccctttggtctaagcggacctccttcctggccaaacttctctgctcttgggtcacctcttgctctcgggcagacaccatgcggatgtcctccttgaagtcctcacgctcctgctcaaaatcagcccgctctgaggcgaactggcacgacatcgacttggtgcgc

SEQ ID NO: 70416 - DNA, 342 bp, Zea mays
actcagcttataactcctagtgggatatattgttatcttcggatgcctgatgggctcaagaatgctagaggaagcttcagcagaatgactgccaaagttcttcactatcaaattggcagaaatgtgctgacatatgttgatgatatcatagtaaagagcacggaacaagaaaatcatgttgctgatttgcaagagacatttgccaacttcaaacgggctggtcttaagttaaatctagaaaaatgcgtctttggagtgaagaagggcaagtttcttggcttcctggtatcaacaaagggtattgaagctgacccaagcaaaatcgaagctatccttcggatg

SEQ ID NO: 70417 - DNA, 419 bp, Zea mays
  unsure (1)..(419): unsure at all n locations
ttgccttgngcagatcaatactagaaaggccagctctttatgggagtggagagatggcgagagtagcgtgtaccctccgtggcaagaggctgcacagtggtgtatctgtgctcttggttggcgtgaactcgatctggtcttgtgaaacccggtggcgagttgacatatgcaagggttaagtgctacatatgtcgtgtggttggagatcccttgttgggtattaatcgattcagatcgtcgttacttctcggatatgaagacttggtcactgacttacacgtagcattctagtgaacttaaagggtgataaaagacggctagtgtaggccaagtgcttgactatggtagaaagaactctagatgcangtaatgacttaacctgataataaactggatttttaagatccacatttagtaag

SEQ ID NO: 70418 - DNA, 314 bp, Zea mays
cgaccataggccgttggagaggttgctggcgatgggcgctctggacagtccggtgtgccaccggacactcactgttcagtgtccggtgtgccgccacgtcacccaatcgttatggttctggagtagttgaccattggcgcctttgtattcttgtggcaccggacagtctggtggtgcaccaaacagttcggtgcccctctgactcgctgctctgacttctaccgcgacactataacgctgttagagacaatcgttgcgcgcaagttagccgatccctgctggcttaccgtgaattatatccgagcactcctata

SEQ ID NO: 70419 - DNA, 484 bp, Zea mays
  unsure (1)..(484): unsure at all n locations
ntaagctctctgacaagaaaatcacttcacccagatatgacataattaaatgcatcaatgcaggaatgaaatttttgagaggttaaactaggtgtgaagcaggtatatgcatagacatgctttctcttccttttataaaagatatgtaaagaatgtatatgagaggaagatttatgtacatgtataaatgagaggaagtagtttaccctcttgtacctttacatagagatgctctcttcattgtgctttgtccttagtcttggttacttaagacctatattcaagatagtgtatggaaatatttccacaagcgagagttctacaactagtgatccttttctaaagtcatttgtcatatatcaagtagatcacacattgcataacattatcctgaattctccttttgacttagtgcatatcaagagagacattaattgatagtatatgaggcactaagcaacataggtgttaattgaattattca

SEQ ID NO: 70420 - DNA, 363 bp, Zea mays
tgtgaaggttcttcatccccacatgtgctaagcggcgatgccacagccagcccatgcaagtcttagccattaagcatgcatctagaccggcctcttcttttgcaaaatcaactaaataaagtttgtcgtctaatacacccttaaaagctagtgaaccatcacttcttctaaagacagacacatctatatttgtaaacagacagttatatcccatattgcacaattgactaacagatagtaaattatatcctagtgactctactaaaaacacattagagatagagtgctcattagaaattgcaattttacctaacccttttaccttgccttgattcccatcaccgaatatgattgaatcttggg

SEQ ID NO: 70421 - DNA, 388 bp, Zea mays
  unsure (1)..(388): unsure at all n locations
actcaacttcccatctttgttattatcgataggttattccgctgtatttcttacaatgatgactacgttcgctaagactccgatgatgaagtaataaggttaatactccttaatgtatggttntatgctttaatatttgctctgtgcctcaccatcgatcgagtacctggtacttgatcctgtcaaaggcctcgacagactagatccgacggattgacgggctattcccatttatgtgtggtctagcctctaaagcgggacttaggcacttaagtttgaataatacgggcagatgcgccacattgcttgtgctctcagatgcaagaacacttcaacatacgcctgaatgtcctccttgggtcttgcgtgctctggaacaaagactgaa

SEQ ID NO: 70422 - DNA, 364 bp, Zea mays
  unsure (1)..(364): unsure at all n locations
tccaatctctccaagtttcacaattgagacaagtgatcatttgtgattagtgactcgagagagagagagagtgattcgtgtgttatttgtcgctcttgtcgcttggcttttgcaatcgtgctttcttctcttcccattcttattctcaagacacttgtaatcaaagcaagagacaccaagttgtggtggtccttataggggtctaagtgacctcgttgattaaggagaaagctcactcggtctaagtgaccatntgagagagggaaagggttgaaagagacccggtctttgtgaccacctcaacggggagtaggtttgctagaaccgaacctcggtaaaacaaatcaccgtgtcatctgcttta

SEQ ID NO: 70423 - DNA, 366 bp, Zea mays
gcttggttgaccacaatgaatacgatcctagcattattcattctatattaatttaggcaaaatgagtttgggaaatctactattaaggcccaagacttatatgtgctaataagacttgggtattttgggcacaaggacgataccatgattagatttgctggtgatgagatcatcccaaagccgaacagtgatgttgttgttgtgtatacaaacttcttccggactgggcttcgtttctcgatgtatgaaatgattcttggaattcttgagagggttgaaatatatctgcaccaggtaacctcgaatgcgaatgttaggatcaatcgttacatatgggccttctatagccaaggtctaaatgcaaac

SEQ ID NO: 70424 - DNA, 268 bp, Zea mays
  unsure (1)..(268): unsure at all n locations
gctttctaaagacttcacaattgggaacgttgacactactctattcactaaaagaattggcgaagacttatttgtttgtcaaatctatgttgacgatattatttttggatctactaacgaattattttgtgaggaattctgaanaatgatgtcaaaagaatttgaaatgtctatgataggagaatagagcttctttcttggccttcaaatcaaacaattgagagatggaatttttataagtcaatcataatatatgaaggacatgctc

SEQ ID NO: 70425 - DNA, 322 bp, Zea mays
  unsure (1)..(322): unsure at all n locations
catggaaaggaaccttcggccatctcatgcaaacagcttcagccgaaagctgcttctcccttgaagaccttcggcgacgaagcataaacccaacagtagcccctttcgcggtgctagatcngttttcgtaacgagcttgatccatgaaaaaagtctcttaagcttcggggagccgaaggtccaaaaaacaccttccctgagctcgctgtcgagaaacgatttaatttcccagcatgtagcggtcccaccttgcagagtttactgtttgtccctgcgggccaccgcgcagcgagcgcaagcgggtgtgcgcctggtgtaaaac

SEQ ID NO: 70426 - DNA, 206 bp, Zea mays
atggactcgttgaaagagccaatggtattataatgacaggaataatgaagttcatcttcaatcaaccacagggaaagtggccacatcaattaaccaaagtggtgtggagccataatacaacaacatcaaggtctacaggcttgttgggcctgtgcttcatcgccgaaagtcttccatgaagaagcgaccttccgctgaagttgttt

SEQ ID NO: 70427 - DNA, 315 bp, Zea mays
gtacatttttacccagtcagagctgaatatgaggcatatgagatggcttgagctgattaaggattatgaattggaaattcactattagccaggcaaggccaatgtagtggcagatgcactaagtcgtaaagcttcctgtcgttgtcttacgatgaagacttctgacattacattatgccaagaaatggagaagttgaacctgggaatgattcaacatggaactttaaatcacttgaagcttgagtcggttcttctgcaaagaataattgatgcacaaagaaatgatgagggtatgaaacacattcatgagaaaat

SEQ ID NO: 70428 - DNA, 373 bp, Zea mays
  unsure (1)..(373): unsure at all n locations
tatgaagattcttcattccaacatgggctagtcgatggtgccagagccaacccatgttagtcttagcaattaagcaagtgtcgagttcaactctatcaaaatctaccaagtatagctgaccctctaacactcccttaaatgctattgaatcatcacttcttctaaagacagtaacacctacatcagtaaatagacagttgtagcccatttgacataattgggatacggaaagcaaattgtaatctaatgaatcaacaagaaaaacattggaaatggaatggtcaggagatatagccaatttacccaaacctttgaccaaaccttgngttccatcctcgaatgtgatagctcggtggggatcttgtngtttatc

SEQ ID NO: 70429 - DNA, 444 bp, Zea mays
  unsure (1)..(444): unsure at all n locations
tggaggcgtcgatgggttgtctacttgatgtagactcctccttcttctcctctgttgccttgaatgcgaccggttgtgcttcgggcgtggatgggccatctagctcgatgattttctttgagcctttgatcatcaactcaaagctcacaaagtttcctatcacttcctcgggagacattagtgtatatctaggattacctcgaattaattgaacttgcgtaggattaagaaaaacgagggatcttagaataaccttgaccatttcatggtcatcccacttggtgctctcgaggttgcgcacttggttcaccaaggtcttcaagcggttgtacatggcttgagggtcctcgcctttggtgagtcggaaccgaccgagctccccctcgatcgtctcccgcttggtgaatntagtcatctcatcttcttcgtgcgcggtcttgagta

SEQ ID NO: 70430 - DNA, 440 bp, Zea mays
  unsure (1)..(440): unsure at all n locations
tgaagctggccactccgccatgtcaaaagatgacctcgtttacagtcttgcgtacaacagtctgaaggtacgaaagtgatgagcttgaaaatagattatcttatcttgtattgtcgtgctgattctatttttttagggcttaattcttaccaatgctttgagggcacaaaagaatgctgaagatgaaagttgccagatagccctcagcaaccttcggtcagaggtcatcaagctgagaaatgaagccttagaaaaagataaaatcctgctntcattggtagacagagtgaaagaaaacaaagctaaatttaacgctcaatccgaaactcataaagccgaagttgaagaccttcggaaaaaacttgccgaactaatgaggaatttgaactagcanaagtgaaacacgaaataagttgaatggttgaacactatgctggaga

SEQ ID NO: 70431 - DNA, 336 bp, Zea mays
  unsure (1)..(336): unsure at all n locations
ggcatcatggtcagcagttagggcaggcaggcagacatgcatgcttggcaaaattaataaatcagtcaggcggagcagtgccaccctcctcgcctgctccgctatccttgtcctcgacgtgaggcaccggcatactggtagaagaagccgcggtggaggacgccatcgacggtcggccgaacgttgcaggcggtgagccacgcatgaggagtcggcgcgtagagaagtccagaatctgcaccggcgattgctgcgacgacggcgcgaggtcatgggcggtgctggcggaggcggcggctacnttgccgcttgtgaagcaactgcgcgtaccgcatc

SEQ ID NO: 70432 - DNA, 466 bp, Zea mays
  unsure (1)..(466): unsure at all n locations
ggacattgtctccctggtggaagccaatgccatccttaatgccagggcgtctcccactatagagcatacttctagcaaatttaaatttttcattttctaagtcatgctcattaattttagcactaagttgagctatgtgatcattttgttgtttaattaaagctaggtgatcatggatagcatcaacattaatgtctctacatctagtacaaatggaaacatggctaacagtagatgtagagggtttgcaagcatttaattcatcaatcttagcatgtaacatggaattctcatttctgagattggaaatagaatcattgcaaacatttaaatccttagccttagcaattaaattatcattctcaatcttaaggctagaaagtgattcgttcaacttgtcaattntagaaatcaaactagcatttatcatttttanggtgacnagagaatcatcacaaacatttaa

SEQ ID NO: 70433 - DNA, 321 bp, Zea mays
  unsure (1)..(321): unsure at all n locations
tttctctaacaatgtacctatgtgcttcaacaaagaaagatcaaagagaagcgatatgaggtgctatggatgcaacgagaagggccatgaaattgattcatgccctcacatgaagaatcaagaccttgcacgatcaagaaagatgaccatcatacaggacgaaagcaaaaggcaaatgcattgcaaggacaagcatcacatttgctacaattgccgtgataaaggtcatctattcaaggtttgtccaaagggtaaaactcctaagcctaacttgtcaatacattcaaatatgcttatgagacccanatttgactcttgtgc

SEQ ID NO: 70434 - DNA, 345 bp, Zea mays
  unsure (1)..(345): unsure at all n locations
atgtggactgggcactttgttcatccaacctcggtccattacctatccctatattgattaacgacaatatcgagatgtaacatgaaaaaatagatgttcatgaaagtgaaacaagatcatatcgagatgtacctagtacatgagacaaaaaaatttaaaatatccctaattaattgaatttaatccctaaatcatgaacgaattaatgtgcatgataatgaaacaagattgcagcaatataggtaccttgaggtgagacaactcttcagaanaaatctttatattagatcaactacaagtcccaaatcttggaattactgagtatttcttcaaattcgggctata

SEQ ID NO: 70435 - DNA, 334 bp, Zea mays
tcttgaacgggcgcatcctctatagacgaatgtccaatccatttatcaatacttcgctagggcacgaatgtccaatgattctctgcttgaagaactagatgtagatgacatgaggataacaagacatggagcctggagggacgacatgatgatggtactggccacacaaagaaacataaaaaccatgacatatattttctcattcattatgaaaaaaactaaccctaatctatactgcttattaagaaggtaagaagagtctgtccgtcttgcctccttcgtggttttgcattctgctctctcccggtccgcgcgcagaaaaaaaatcaaacta

SEQ ID NO: 70436 - DNA, 369 bp, Zea mays
actcagcttcgtctcttttctttggatctgtatcctttctctttttaatttctagaattcaaatttacattcaaatcttgtgccaaaatttatcttcaagttatattgtgaccttaaggtactaattttggaaatacacataaactttctttatattttatatatcttcttttcttcaaactctcaaattaggtattaaatccttgcttctgccactaatttatttctattagcggtattactcttttcattaaatgcacaaacaataaacgccagcatgttgcatgatttaatggtataccttgttgttatttatttatttggtttcaggtgatgttctcatgaaatgataaatattgacaacacaca

SEQ ID NO: 70437 - DNA, 382 bp, Zea mays
  unsure (1)..(382): unsure at all n locations
tcctggaagccatcanaacagcatacagcaccttctccaattctgtataattnttctttgataaactaagaacttcggatacaaagtatattggggcttgctntttgacttggccttcaagcttctcttggacaagtgctgcacttaccgctgagtgcgaagctgccacatataacaacagaggagcccctggcgttggtggagttagtgttgttaggtctatcaaatattgcttcagctcttcgaaggctctctgctggactggtccccattgaaaaacttcggctgacttcagcacttcgaagaatggtaaatttctctctactgatctagatatgaatctngtgagagatgccagtcttcctgtcaatctttgaccccc

SEQ ID NO: 70438 - DNA, 337 bp, Zea mays
tgccaattcttgtcaaagcaacaacacttaccggctcattagctgtagaccatacctataacatggccattcgcgtgttggggactagacatgattggacccttcaagaaagctcagggaggttatactcacgtgttggtcgccattgacaaattcaccaaatggatagagtgcaagtctattgcttctttaacctcagccaaggcagtggagttcatacaagacataatattcaggtttgggataccaaatagcattataatcgacctaggatctaacttcactaactctgaattctttgatttctgcaacaacagagtattcagatcaagtatgc

SEQ ID NO: 70439 - DNA, 289 bp, Zea mays
  unsure (1)..(289): unsure at all n locations
tataaaggttcttcattccaacatgtgctagacagcggtgtcttatcctttccaagtnagtcttagcaatcaaatatgcatctagatcggcattctctataggtaaatcaactcaaataaagctcgtcgtcttatacatctctaaaagattatgaaccatcacttcttctaaagattgatacatcaatatttagtaatcagcaagtttaacgcatatggcataattgacttacagaaagccaattataaccaagcgagtccacttagaatacattagatattgaaatgc

SEQ ID NO: 70440 - DNA, 404 bp, Zea mays
  unsure (1)..(404): unsure at all n locations
nggaaggtgttctgtgatggatcctgtggaaccttcggttctttatcgcctgctgtcctagtggcaccttcaaaagctagaacatgttatgcagccaagcttgacttcagttgcacaaataatattgctgagtatgaagcacttctgttggagcttcagaagttaagggcaatgggaataagaagggtcatcctgaaaactgattctcaagtcatttctggccatgtagacaaaagtagcaaggcaagagatccgaagtttgaaaaatatctggatacagttcgaaggatggaggcttctttcgaaggtttttctgtcaagaatattccaagaggtgaaaatgagcatgcagaattgctaggcaaatcaacggctcaagggatccctctaccttctgaagtatt

SEQ ID NO: 70441 - DNA, 341 bp, Zea mays
ggggaagattcttcattccaacatgtggtagtcggcgatgctttatctataccatgtcagccttagcaatcaagcaagtgtcgagttcagctctatcaaaatatactaagtatagctgaccctctaacactcccttaaatgctactgaatcatcacttcttctaaagacagtaacacctatatcctgtaaaagacagttgtagcccactttgcataatgtgagaaacggaaagcaaattgtaatctaaagaatctacgagagaaacattggaaatacagtggtcacgtgatatagcaagtttacccacaacctttgaccaatccgttgatttccatccctg

SEQ ID NO: 70442 - DNA, 290 bp, Zea mays
  unsure (1)..(290): unsure at all n locations
ggtggtagtggtgtgctatgtaatgtattggctggatgtaatgaataaaataactagtaaaaaaatggcatgtgcataatagcgactctcttcccatggcagatggcttcggatagaaccacgcctaccgcctccgggattggagcaagacttcctctangagctgagggagaggctggcggagaatggggtgagacccacctccccgcacctccagaactaccactagacctagcccaaattctggccaatcaaaccagactcattgaagtcctcactcgaagcctgga

SEQ ID NO: 70443 - DNA, 354 bp, Zea mays
  unsure (1)..(354): unsure at all n locations
tactcagctgacttgctcctgtggaagcattcctccttatgcttttgtgtctccactatagagcatgcttctagcaaatttaaatttttcattntctatctcatgctcattaattttagcactaagttgagttatgtgatcatcttgttgtttaattaaagctaggtgatcatggatagcatcaacattaatgtctctacatctagtgcaaatagtaacatgctcaacggtagatgtagagggtttgcaaacatttaattcatcaatcttagcatgtaaaatagcattctcatttcttagattggaaatagaagcattgcaaacattttaatctttaaccttagatattaattt

SEQ ID NO: 70444 - DNA, 274 bp, Zea mays
atatgggcagagacaatggatcatctctaggagacaaattatgactaatctattaagaatttgcccatggctgctataacaaagatggagaaggatggtagacacaaccttactgcagagcctcggattagtagccatgtgcaaatgagagaaaatgaagcccaaactctgtctcgcagatggactgaacaccatttccccatgggacagtaaccagacggagcagatctcccgcggcagaaaaatctcaacaccggcgacctctctgcgcgaa

SEQ ID NO: 70445 - DNA, 468 bp, Zea mays
  unsure (1)..(468): unsure at all n locations
tatgaagattcttcatcccaacgtgggctagtcggtgatgtcttatccaacccatgttagctttagcaattaagcaagtgtcgagttcacctctattaaaatcaactaagtatagctgaccctctaacactcccttaaatgctactgaatcatcacttcttctaaagacagtaacacatatatccgtaaaaagacaattgtagcccattttgcataattgagaaactgaaagcaagttgtaatctaaagaatctacaagataaacattggaaatagaatggtcaggagaatatagcaatttaccaagtccttngaccaaaccttgatttccatccncaaatgtgatagctctttgaggatcatgggttttctcaaaggaagagaacattcctttctaccctatcatgtggtttgtacacccactatcaatgatccaccttgagccaccggatgcctaaacctcaaaac

SEQ ID NO: 70446 - DNA, 327 bp, Zea mays
  unsure (1)..(327): unsure at all n locations
tacccatgacgaggtatgtggccagataagggtcctctgtcatcaagcccacattggtatggtccttaatcaactcagatggagacactacatcgagacttccttcttatgcaagtcacccgcccagtcttagctttatcatttataacccaaagtttggtacctagcagaggtacatcctttccaatgttgaactcatcacggccatgatggatccaccatccaatcttttcttttgaaaacttgaaagggaaatgtgcccttgggccatntctaagtatgttggtgattgagtgccaacacaagggcttttgtgtaaactatgca

SEQ ID NO: 70447 - DNA, 363 bp, Zea mays
  unsure (1)..(363): unsure at all n locations
ntaccaaatggacgtgaagagtgccttcctcaatggaccattcaatgaagaggtctatgttgagcaacctcccggctttgaagatagtgagtaccctaaccatgtttataaactctctaaggcgctttatgggctcaagcaagccccaagagcatggtatgaatgccttagatattttcttatcactaatggcttcaaatttggaaaggccgatcctaccttatttactaaaactcttgacaaagatttgtttgtatgccaaatttatgttgatgatattatatttgggtctactaacgaatctacatgtgaagaatttagtaggatcatgacacantaaatcgagatgtctatgattgggga

SEQ ID NO: 70448 - DNA, 351 bp, Zea mays
  unsure (1)..(351): unsure at all n locations
atggacgngaagagtgccttcctcaatggtccaatcaatgaagaggtctatgttgagcaacctctcggctttgaagatagtgagtaccctaaccatgtttataaactctctaaggcactttatgggctcaagcaagccccaagagcatggtatgaatgccttagagatttccttatcactaatggattcaaagtcagaaaggccgatcctacactttttaccaaaacacttgaaaatgattngtttgtatgccaaatttatgttgatgatatatatattgggtctactaatgaatctacatgtgaagagtttagtaggatcatgacacaaaaattcgagatgtctatgatg

SEQ ID NO: 70449 - DNA, 389 bp, Zea mays
cgtggaggactagatcactgaagcatataagtttctggatgagaagtggtcacccaagttccgttgatgaagcaccacaagaccaatcaaggaaggaatccatgtgggagttcgcaagagaaaggtttgcgtgttggcatcgatgcttcttcaataagctagttgccaagcgaaagctagaagcctgaagatgatcttgagtagccagaatcagcgtttgcaatcagcatccggatgcttcgcaagggccacaatttgttgaagttccatctcctcgaagagtctgcaaagtgaagatatgtagctgaagttaagctatacccataacccttctaagccaaatctcgaggacgagattcttttaagggggtagattcgagcatccaaaa

SEQ ID NO: 70450 - DNA, 332 bp, Zea mays
tctaaagggagaacatgtgataggtctaactattgttcatttcgaaaaagatagaccttgtgcagcttgtcaagcagggaaacaggtgggaggagcgcatcacagcaagaatgtgatgaccacttcaagacccctggagctgctgcatatggatctcttcggacccgtcgcctatctaagcatatggggaagtaaggatggtctagttattgttgatgacttttcccgcttcacttgggtgttctttttgcaggataagtctgaaacccaagggaccctcaagcgctttctcacgagggctcaaaatgagtttgagctctaagtgaaaagat

SEQ ID NO: 70451 - DNA, 387 bp, Zea mays
  unsure (1)..(387): unsure at all n locations
ntagataagacattatgccaatgcttaggatgatcagatactatctttttataaggctaatcaatgttcttttactagacccagagtgtccattggcctaagcataatatggagacgaattgagcaatttgatcttatatgattcagcaaacttatgtacctcatttgacataaaagaagtcccctattttgtagtcaaagtctaaggaatgtcgaatctatgaatggtatgctcagctataaactcaattacctctctatgcgccatgttcttcagagcgatgacttcagtccatttggtgaagtagtctacgacgaccaatacaaactgatgcccttttgatgatgaatgatgaatttctccaataaatcaatccccatcccttg

SEQ ID NO: 70452 - DNA, 427 bp, Zea mays
tacttatacgatgagcaactctatgaccccataaagatacttatcttttgataaaaaacactattttgttttaatcccaggagaaattgtcttaaagaagcttgagtggttggcgggtaaaggaccacaattgctttcctcacaagctgcaatttgcagcaaagcacatggccttttcttttaatatataccaatttctgcaagacagttattcattagtttatgcccgccaggaatctaaccagcctgcagcattatatatacaagcatcgtcttttgaattccaggtcataattagtcaccaaatattaaatacccacttatatattaacagaaatttttcaaaaggtattaattataagtgaatccgggcagcgaagactaatatatgtacatgcagatgaatttctaaactatttatatgctt

SEQ ID NO: 70453 - DNA, 346 bp, Zea mays
  unsure (1)..(346): unsure at all n locations
tagcacatcttagtgcacaagagctaaaaatagagtgagttgtatttttggccagagagcgtgtcatatgagttagcggtatgaccgcatttatacgccaagagcgttcaaaattgaaagaccccgcttgtcagtgaatgttgctattctagcacagggaaggtgttttttcggaccttcggcgtaaagccttcgtacatgtcgcaatctagatgtattattttaaacaaantaatattgcgaggggctactgttggggaccttcggcttccgaaggtcctcaaaaacacgatttacagcatttctggaagttaatgtgtgaacaggtatctttggactcaagtcg

SEQ ID NO: 70454 - DNA, 361 bp, Zea mays
  unsure (1)..(361): unsure at all n locations
tcctanattccttgcactcgatcccatcgtgccatggcacatgttagcgagcacagaacagcctgtgacagtggggacattctgtttccctgatcttcgccgaatcatcatttagtaacagtgccgagcaatccttgaacggacagtagaacttatcatcacccagtagctcctcgcacagcacgacactccaccggtcaaatagttcaggcgggatgatatcccgacacagatccatctcaataaaccccgtctcacacgcggngtcagggcacccgatcacggctacgttgtcggctaccttgccggcgacataaccttcgatgcaactggtgcagaacgcgtgaaggcagtgactcac

SEQ ID NO: 70455 - DNA, 287 bp, Zea mays
  unsure (1)..(287): unsure at all n locations
atctgcactggccgataatgcgacgaccggcgctcctgagcggcggacatcacaactgacctacctcgagtgtatcccctaacctaatngcacaaacggcgagccaacaagctctgtccgcgtgaaccgaatgggaggcggacagataatcgtgctcccaatgataggtgagcccgcaactcacattggtggttcagcaagcatcgtatgcatgtgagaaagcttaaacgaggaagcacgggatggtgactgaccgaaaatggctggcgacggtgaagctcgttcat

SEQ ID NO: 70456 - DNA, 451 bp, Zea mays
  unsure (1)..(451): unsure at all n locations
tataaaactcagcttgagtggatttgaaaagaatccattcaaaagtcttcatcttatgctttagaaatcagcattttgtcatcatcttatgctntagaaatcaacattntatcttcatgggactaaaaatctattgtgtgtagcccccgagctttgagtggatttttaaaataatccattcaaagggcttcatcttatgctttgtgaattcaaacgatgctatctgtccacaccttgttaggtttgaaattaatttgatcgatgacagattggatgtttggctggttgaggcagatggctctcatctggacatcaccctgctctgtgcttcaatgcttctgctgattagacttacacttcagtagccacatttagacnttcttccatctcagccgaatctctccttttgtcgtggacattcattgcgatattttgggatatgacttttcaa

SEQ ID NO: 70457 - DNA, 379 bp, Zea mays
tctacaccatgtcgctgctagccaaggtgaagcagctatctctattaatgatcaaacgacatgaacgctccttaatgacacactatgttagaaacaacgtatgtcgctgattctgctctgccctctccatttgtgcactaagcacacgcttgacaatgaggctctcataatgctctgcatcatctgcaccaatctgttcttcggggagttcttatagcctgcatcatcagccgcaagcaaagcaagtgtagcttcatccaaatcactagcagaggaatacccaccatcgtctatacccaccaaacacgctgaataagacaatcacgctgcgcgtgtccatagcccttgccacaattacaccagaacatctcttgttcta

SEQ ID NO: 70458 - DNA, 446 bp, Zea mays
  unsure (1)..(446): unsure at all n locations
ttaccaaatggacgtgnaaagtgccttcctcaatggaccattcaaggaagaggtctatgttgagcaacctctcggctttgaagatagtgagtaccctaaccatgtntacaaactctctaaggcgctntatgggctcaagcaagccccaagagcatggtatgaatgcctaagagaatttctcatcgataatggcttcaaagtcggaaaagccgatcctactctctttactaaaacacttgcaaatgatttgtttgtatgccaaatttatgttgatgatatcatatttgggtctactaacaaatctacatgtgaagagtttagtaggatcatgacacaaaaattcgagatgtctatgatgggggagttgaagtatttcttaggaattcaagtgaagcaactcaagagggcaccttcattagccaaacaaagtacattcaagacatact

SEQ ID NO: 70459 - DNA, 166 bp, Zea mays
agcgatctgactgaaagaacccatcaactccgtggagatacgatgagagcctgtgcgtggtaagaaaaccccggaggggacactagaacaccttatgcggaggactcctataacaacagttaccaggcttgcttggagatgtcaccaattcacgcgctttacggaa

SEQ ID NO: 70460 - DNA, 334 bp, Zea mays
ggacattgcttccctgttggaaaccaatgccatccttaatgccagggagtcccccattatagagcatgcttctagcaaatttaaacttttcattttcaatttcatgctcattaattttagcagttaattgagctatatgatcattttgttgtttaataagggcaaggtgatcatttatagcatcaacattaacatctttacatctagtataaatagaaacatgatcaacaatagatgtagagggtttgcaaacatttaattcatctatcttagcatgtaatatggcattctcatctctaagacatgaaatagaatcatttgcaacatttaactc

SEQ ID NO: 70461 - DNA, 465 bp, Zea mays
  unsure (1)..(465): unsure at all n locations
nggtcattntattgctaactgtcccgataatgatagtgatcatgatcaagggaacaagagggagaagaagaagaactataagaaggcaaagggcgaggcgcatctaggcaaggagtgggattcgaattgctcctcttccgactccgataatgaaggactcgccgccaccgccttcaacaagtcatccctcttccccaacgagcgtcacacatgccttatggcaagggagaagaaggtatgtactcgaaactctacttatgcttcttcaagtgaggacgaatctagtgatgaggatgaaatagattattcatgtttatttaagggcctagatagaaccaaggtagataaaattaatgaattgattgatgccttgaatgataagaatatgcttttataaaagcaagagggatttgtgtatgaagaacatgactaatttgtagaacacaaaaatcttatgctctataa

SEQ ID NO: 70462 - DNA, 376 bp, Zea mays
  unsure (1)..(376): unsure at all n locations
taatgcccctaagannatggtctaatttgttaagggtaatgctcccatggttcaggataacgagggttacattttataccctaccggttatcccgaacacaaaattaggagaattcattctaggaagtctcactctggctctcatcatgcttttatgtataagagtgaggcatctagttctaggcaatccactcatattaaattgcctaagaagaaaactcctattgcatcaaatgaacctaatatttcatttaagacttttgatgcatcatatgttttaactaacaaagcaggcaaagtagttgccaaatatgttgggggcaaacacaaggagtcaaagacttgtgtttgggtacccaaggtgcttgtttctaat

SEQ ID NO: 70463 - DNA, 368 bp, Zea mays
tgtctgcctcgatgaagtgaacaccatccgtggcggacgatcagttcttgccatcattattcactgttgtattcaaactccacacaggccgtgccataccaagttagatagatatatcagatgagctgcctgattcacagaatataattggcttaacatatgaaaggaggagctgagccacgctagctagctcatacttttctcctatatcacagatattcaaactgcactatgaactctgtaagaatgagcatttaactaagcagactgaagttaataatagacgtgacagatatttataagtggcgccgctgtcggagatccctgaccccgggtcgcccgcgtgacaggcgggagtgttacaccac

SEQ ID NO: 70464 - DNA, 368 bp, Zea mays
  unsure (1)..(368): unsure at all n locations
ntagatcactatagcttacttttaagctctaaagctntaatttatagctctgcctctaaactttaggtagagggtatgcaaacaggcccttaattagcaacagtaatttagtttacgctccagccaatagtggaagaaatccaacagtaacatgttgactaactggcagtgacaggaaacaagtttgcagcataatgcgattattaaatacgatacaattatattttgcaggtacatcatggtccgcgacaacttgctggaacacgtctaagatgagaatgagctcgtcagtttcccaggattcccaacgccgcttgagctgacgaaagcaagatgccctgtaagtgtatctggtccccgtctggatc

SEQ ID NO: 70465 - DNA, 378 bp, Zea mays
tattgagaaaactcaagagagatgttaatagcacacgggagtataatatgaaggatgattctagataagaaatataaacaattcatcatccacaagtcacacagacatgaagtaaaatccttaacattaatgcacatcattagaaaaggggaatatgcaccttttaaacattttgatcaatcataggaattttacttcttcatattgagatttttatcataacttagaagcatatcaatatgagaatagatatagcagagacatgaattagattctaatggacaagtgcaattatgataacgagattgaatgcacatctagctaatttatgtccaataaggaatctattcttcacataggtagaatatgataatttaa

SEQ ID NO: 70466 - DNA, 294 bp, Zea mays
tgtgaagattcttcctcccacatgggctagtcggcggtgccagagccaacccatgttagtcttagcaattaagcatgtgtgagttcagctctatcaaaatctactaagtacagctgaccctctaacacacccttaaatgctattgaatcatcacttcttctaaagacagtgacacctacatcagtgaaaagacagttgtagcccattttgcataattgagatacagaaagcaaattgtaatctaaagaatctacaagaaaaacattggaaatagaatggtcaggagatatagca

SEQ ID NO: 70467 - DNA, 336 bp, Zea mays
  unsure (1)..(336): unsure at all n locations
tcagaaacgaagccttcatgttccagaatttagttggagatnatctgtcaaaagctgaaacagaagagcttagagagtatgccaaatcctgcggatacaaacctggagcactcctcttcggaggcattgatgatgaaaaattagattgtattcgagatcaaactggagccaaagttatcggtactctgtcaaagagtatcggttttccgaagctataaacaaacataagccgctaccgacgacaacatatcgttggtagtttattttattccaatttcaaggtgaactacttttcccttaacttttattggttctaataatgaaaacatgtctgac

SEQ ID NO: 70468 - DNA, 363 bp, Zea mays
  unsure (1)..(363): unsure at all n locations
tgatggccaagtcaagaagcaggtcccagtgtattttgtatctgaagttcttagcatatcaaagaanaactatacagaattagagaaagtgttatatgctgttttgatggcatccaggaagcttcggcattattttcaagcatacaacatagttgttccttctttacagccgttgaaagatattatgagaaatagagaagctactgggcggattggaaaatgggctgcagagctcaatgaatattgcattgattatgtgcatagatcttcgattcagtcccaagcgttagcagacttcattgctgactggacgccacgggctcatgatgaagaaacaaataaagatgccgaaatattgacagt

SEQ ID NO: 70469 - DNA, 455 bp, Zea mays
tgaagccatggtaagtagcataggccaataacatgcgaattgactcaagcctagctacaggtgcataggtttcaccaaaatccaaaccttcgacttgtgaataccccttggccacgagtcgagctttgttccttgtcaccacaccatgctcgtcttgtttgttgcggaagacccacttggttcctacaacattttggctaggacgtggaactaaatgccatacctcgttcctcgtgaagttgttgagctcctcttgcatcgccatcacccaatccgaatcttgaagtgcttcctctaccctgtgtggctcaatagaggaaacaaaagagtaatgctcacaaaaatgtgcaacacgagatcgagtggtacccctttatgaatgtcgccgaggatggtgtcgacagggtgaatctcgtgaattgctggtggactcttggtgttgcgggcttggtctt

SEQ ID NO: 70470 - DNA, 335 bp, Zea mays
  unsure (1)..(335): unsure at all n locations
nntataattgngtattacaaatcctaccccccttaacaagaatctcgtcctcgagatttaggaaggactanggaaaagagggggaaaatctatgcggagtttttttcttctctttctcatggtgactccgttgcactttgcacatctttattaccttgtttcttgtaacttgagtcaatgtgtcaagaatcttgatcggatactctgtataagtcaaatcaccctanacactgagctcttccattggtgattgttccttatggacatgaagatacttctttagttgagacacatggaatacattatgcacatcaactagattatcaggtaactcg

SEQ ID NO: 70471 - DNA, 426 bp, Zea mays
  unsure (1)..(426): unsure at all n locations
tatatctacctactagaccaagtaaaaatgttaaacctctctgtctactccatttaaattaattntaccccttaatctatgatatgcttaaagataaggaaaatggaaaatgtaatttaattaatgaaccagagagtacctctatttttgttaggttacttattcaatatagatcactggaaaaatatatcataccctgttttagtataaaataagtaggatcccttttgttttaataaaacaagtgaaacttagaaaacccctacaaaaatgaccccaaggtaaaaacacccccacccttgggataactaatattttattaagaagaacttaggaaaaataggagatctgctgtttgacattttttcaaatataatggagaaaaaaaagccttttgactttaattttagaaaatcattactaata

SEQ ID NO: 70472 - DNA, 381 bp, Zea mays
  unsure (1)..(381): unsure at all n locations
ntgacannagaaaaagaaaataccttggagaggtgtaatcttcttcagagtgggagaaggaggggacagtgaagacagcaacagagaagaaacaagtccaggttgtttttttagctcttaggcctatgataagtatatgatagtaagtgagtgagtagtaggcataattagtagtagtagtagttaattagtagttgctgccagtgttaagaaggtgatgaaaaggcacactccggctctcttctatgctcgtttgtggcatggatggatctctcactgttgctatgatatgttgtttgatttacaatatcgtgtgtataaatatttcatgtttttcacttttatttgattgcgataccacacatataacgatttcatatg

SEQ ID NO: 70473 - DNA, 391 bp, Zea mays
cgaataacaaaggagataaaaattgtgagtttgcttgctctgttaacggacggagaatataaaataaggaacacatggacatgatttttttgtctccctcttgatagagaactaaataaagaaagtcgagcaaaataaatagcagaacgactcttaccttttctatttgattattatatatgggttcaattttagagtactcatgatctgaggaacctgtttagattaagattcatactccatattggtctagatgaagtctggacaaagaaagtctctattgtctggtagttagagagagacgggcctaaaaaatggatagacaaacaataggctgaagttttgcctctttattattagctatatattagggactacttctttattcatg

SEQ ID NO: 70474 - DNA, 445 bp, Zea mays
tcgtcagttgctgccctagacgacttgataggcaatgattctgtcattacctttaaagtttcttctacttcaacggcataagacattgaagggggttcctcttctatctcagctgcttttggctccggtgttgcagcccttctcttcttcgaaataaccaccttcggcccaagattggattttctgtttttcagagcttcttcatactctttcaccatcctagcaacctgtctgctcagaacactgacaactctttttctctatgtccctttggcacccttgcttagtcgttcataatcagggtattcatagtttaaagcgtccattacccgattcaaccttcattttcgtcgggtgcccaaggctgcactcatcagatgaacttctttttgtgtataatacccaaatttcgtgcacatagttgcaacattttagccctcttggc

SEQ ID NO: 70475 - DNA, 350 bp, Zea mays
agagattgatgtcaccaccagtgtttgttatgtcagatctgtagaaaggatttgacatttattgtgatgcatgtggccaaggattgggatgcgtgctcatgcaagaagaacatgtgatcgcctatgcgtcacgtcagttgcggaaacatgaattgaactaccccactcatgacttagagctggcagcagttgtgcatgcgcttaagatttggagacattatattatgggaactaagtgcctagtgtacacggaccataagatgttgaagtatatattcactcagaaggatctcaacctgaggcaacgccgttggttggagcttattaacggatatgattttggaattcac

SEQ ID NO: 70476 - DNA, 315 bp, Zea mays
  unsure (1)..(315): unsure at all n locations
tatatctacctactagaccaacgtaaagtgtggagacctctttgtttactctatgnaaatgaagtgtacccgttaacctctgctgagcttaaacatgccgaagttggttatttgagctttaataatgaaccacagagtacctctatttttgttgagttacttattcaatatagatcactggaaacatatatcataccctgtcttacgttaacataaggatgatcactgttgctttaataaaactagtgaaacttataaaacccctacggaaatgacaccaatgtaaatacaccgccacccttgggataactaata

SEQ ID NO: 70477 - DNA, 142 bp, Zea mays
tgctgaagcaaagtaatttgttttgagagcctggaagagaggctccaacagggttatgatctaaggctcaagatgatctttgaatgcggctccaaaccacatgacggggagaatggattgtttcttccgacgtcaagaacaa

SEQ ID NO: 70478 - DNA, 443 bp, Zea mays
  unsure (1)..(443): unsure at all n locations
tattacggacctataaaactcagcttctaaggaagaacacattntgggactaacaaatgttcattttgagaaagacaggatttgtagcgcatgttatgcagggaagcaagttggtgttcatcatccacacaagaacatcatgacgactgacatgccactcgagctcctacacatggacctattcggcccgattgcttacataagcatcggcgggagtaagtattgtctagttattgtggatgactagtctcgcttcacttgggtgttctttntgcaggaaaaatctcatacccaagagaccttatagggattcttgagacaggctcaaaatgagttcggcttgaggatcaagaaaataaaaagcgacaacgggacagaatttaagaactctctattgaaggtttcttgggaggaggcataagcatgagtctcctctcctacac

SEQ ID NO: 70479 - DNA, 186 bp, Zea mays
  unsure (1)..(186): unsure at all n locations
tctaaagggagaacacattntaggactaacaaatgttcattttgagaaggacagganttgtagtgcatgtcaagaaggaaagcaggttggtgctcatcatccacacaagaacatcatgacgacgattggccgcttgaactactccacatggatctattcagcccgatcacttaggtagtgtttgtc

SEQ ID NO: 70480 - DNA, 238 bp, Zea mays
catgtgctactcggcggagttagagactacccatgttagacatagcgagtgagctagtgttgaggtcagcactatcaatatctactaagtttagcggaccctgcaacactcgcatcaatgctgatgaaacatcacttctactccagacagaagcacgtacatctgtgatgagacagatgtagcccatttgacataatctgagatacggaaagcctattgtgatctaaagaggtactag

SEQ ID NO: 70481 - DNA, 482 bp, Zea mays
  unsure (1)..(482): unsure at all n locations
actaagcttccaaatncgttggaccaatgaacatgagaataattggatttcacctctaatagacaaagcaagtagcattgcctatgaattgtattgattntattattaagaaaacaatcactgagacataaaattgctaagatgcaatccaagtgtgcacaattaaagaagaaactaatcctctcatgtttctgaaaaaactgaccaagaaatgtgtccctcataaaagcatgcatatgatacatgtctaactggaagtctggaatgaaaattagtatgatgaggtatgcattactactatacaggaaataacaacaactaggcttcatagttaatcaccacattacaacagttntgggacatgcacgtaaaacatcacattagtacagccgtcgcatatttcaaatttgtataagtgtataacatatgtgatntggantctctacagactacgtgtgcttncatgctgtcagaaattaaca

SEQ ID NO: 70482 - DNA, 400 bp, Zea mays
  unsure (1)..(400): unsure at all n locations
gctggcccctgcggcatgacgaaagacgatcttgcatatagcctcacatataacagnctgaaggtacaaaaaatgtatatttggaaagttacaaattctgaattattcttttgctcttatattaactcgttcattcttttcatatagggtttaatacttatcaatgccttaagggcgcacaagaatgccgaagacgagagttgcactattgctctcaacaatcttcgaacagaggttattaagctgaggaacgaagctttgaaaaaagataaaattctactcactctggtggataaggtaaagggggatgaagctgactacaagacccaatatgaaatccaaaggggcaaaatcgaaaccctctcaaagcaactggctgaagctaaattgaaatgcgcta

SEQ ID NO: 70483 - DNA, 467 bp, Zea mays
  unsure (1)..(467): unsure at all n locations
tgtgaagattcttcattccaacatgtgctagtcggcgatgccagagccatcccatgttagtcttagcaattaagcaagtgtcgagttcagctctatcaaaatctactaagtatagctgaccctctaacactcccttaaatgctactgaatcatcatttcttctaaagacagtaacacctgtatccgtaaaaagacagttgtaacccattttacataattgagaaactgaaagcaagttatagtctaaagaatctacaagaaaaacattgaaaatggaatggtcaggagatatagctattttacccaatcctttgaccaaaccttggtttccatccccgaatgtgatagctcgttggggatcttggtttttctcataagaggagaacantcttcttctccctgtcatgtggtntgtgcacccgctatcgatgatccaacttgagccccccgatgcataaacctacaaa

SEQ ID NO: 70484 - DNA, 456 bp, Zea mays
  unsure (1)..(456): unsure at all n locations
catatccttgagagtcttttctttagtcgagtaagtcttgctgagtaattgcgtactcacggttttattccctgttgtttttcatgttataattttgntctgctgtggatggtgctaagtgctggtgggctcggtcttctcatatgtataagcatatctcatctatagtttctttattgaggattgtcacataagctagcatgtattttaaaacttataaatgttttatacatttctaagtgtaattctgttgaatcactttcttttgtaatcactccgataattgtataatgtaaacttattgtaacttgtaaccatcttgtagtaatgaatttccgctgcaaatattggtgtgtgatttgtgtctacttaatcctgcgatcttggtgataagttggttatccgaggtccttggaacactcggacagatcttgtgagttgtttggacacatgcat

SEQ ID NO: 70485 - DNA, 410 bp, Zea mays
tctccaccatgtcgctgctagccaagttggtgtttctactttcatcaacgagcaaacgacatgaacgctccttaatgacacactttgtttgaaacaacgtatgtcgctgattctgctctgccttctccatttgtgcactaagcacacgctgtacaatgaggctctcataatgctctgcatcatctgcaccaatctgttcttctgggggttccttactgcctacatcatcagccgcaagcaaagcaagtgtagcttcatccatatcactagcagaggaatacccaccatcgtcttttaccaccaaaacacgctgattaggacaataacgctgcacgtgtccatagcccttgcatcgataacacagaacatctcttgttctaccttgggaagctactgaaaggcactacctg

SEQ ID NO: 70486 - DNA, 487 bp, Zea mays
  unsure (1)..(487): unsure at all n locations
ctttatcctatctatcctgggttgatcggacccataaacactgccgaggtgaatggctagggatccactatgaggctttcacaaaatattcttagtacaaagccacccgctaaggtttccacgtcactattgatggccctctgggtgaggtaacttagccaagactaccaccccatgttaacatgagctgccaccaaaccactgccaccccctcttgcccatctttcaggtagggttgctaagcactaagtctatagagctaattaccaaagccagagccattatagcactcgtggttgcactgttatcctgngtggtcactccatgttccatttaacacaaaatattcttgtttaaccatcgggttaacatcataataaaacttcatttctggaacatagtatcattaaaagagtgacatcatatntatcaagttgagcaatagcanaaattgctaagcatagcatttatcccagggtaattcaag

SEQ ID NO: 70487 - DNA, 461 bp, Zea mays
tgccttcgcttcagtctatcatccgcagtccatctgagtctttgagcgtgccaatgggaaaatcttcacagccatcaagaagatgctcctcgacgagaaaaagggcagatggaccgacttgctaccggaggcagtctgggcgctgaacacaaccgagtgcagggcgaccgggttcactcctttccgccttctatacggatcagaggcaatgaccccgcaagaaataaaacacgggtctccgcgcacagctccgtcagccacccctgacgtggatgagccaacctccaaagatctcattgacggagaccgggtcttcgccctgcaggccttaaacaaataccaagcccagaccaaagcatggcgcgaccgcgcagtcatcccaaaggagttcatgcgcggggacctcgtactcatccgaacagctcggacggagtccaagggcaagctggagcccaagtggg

SEQ ID NO: 70488 - DNA, 410 bp, Zea mays
  unsure (1)..(410): unsure at all n locations
tctgctatgtctgtttttcctcaagtgtggcatgctccgtctcggtgggcactgaaagcccagcttcagcttcaacttgagcttgcgtagcttccgcttctgcttgcccagtttcagctttggcttgtgttttggcagcttcagcaattttctttctaggagcagggctcaaggcctttgtagtctccagcacagcatccagcacgttggccatcctcctcctcttgggagttgcggcagaagccttttgcaccttcggcagttntgcctctgtcggagggctcagaatttctggcattctcattgtttcttccgcatgtggctcttcggccttatcatctttagatatggttggcccgactgtaggcacctntagcactacagtcggctctccaatgctctgcacaatc

SEQ ID NO: 70489 - DNA, 459 bp, Zea mays
  unsure (1)..(459): unsure at all n locations
ngaactgacgtacagggggtggccacggcgaattgttcactgtggcgcagaaaacggatttgggggaaatgcgaaattaggaggctctggtgaatgatcatgggtgcgagttggtgcactggtgcgtaataacctagcagagctcactggggcatcaatttatagactccatcggcagtggcgtccaatttgaagaaagcgcgctggcgaccggagggagggaaagttactgacgcgagtgttatcgtggctttcaccgtggcaaagcttccggcgatggacggactcactactatgattcactgcgatgtgttaaagctcctaagcacgtggcgcanagacggcaagcggccaacgccggtgaggatcatctcggccggccacagacaaagtgggtacggtgaactatccagtgacctggtccgagcttatctgggaaccaagatcttttacttccct

SEQ ID NO: 70490 - DNA, 417 bp, Zea mays
  unsure (1)..(417): unsure at all n locations
tcttcttcattctgatgaagaccaagctcttcgatcacttcatcaaaacgaatgttccaactccgagatgcttgcttcaacccataaatggatttctgaagtttgcatatctttccagcattgatcggatcgacaaaaccctcgggctgtatcatatacacgtcctcatctatgtttccattaaggaaagctgttttgacatccatctgccaaatctcataatcgaaatatgcggcaatagctagaatgatccgaatagatttaagcatcgctactggcgagaatgtctcgtcatagtcaactccttgaacttgtcgaanaccctntgcaacaagtcgagccttatagatgtgaacatttccatccatgtctntcttcttcttatagatcccattgcattctataggtctaacacca

SEQ ID NO: 70491 - DNA, 458 bp, Zea mays
tcgtcatctgagagacaattaccttgtatgaaatatattatttcagtcctccaatcttcactgtgtactatggaaattgcaagcactgctctctccataagttcaaccgaaggtgctgttattgtttcaaaaaatacttccgaaggtagagggagcctctatgccgctgatttggctaacagatctgcatgctcgttttctcctcttggaatattcttgacagaaaaacctttgaaagaagcctccaaccttcgaactgtatccagatattttcaagctctgggtgtcttgccttgctacttttgtctatatggccagaaatgacttgagaatcagttttcaggatggcccttcttattcccattgcccttaaattatgaagccccaacagaagtgcttcgtactcagcaatattatttgtacaactaaaatcaagccttgctgataacatgttatga

SEQ ID NO: 70492 - DNA, 432 bp, Zea mays
  unsure (1)..(432): unsure at all n locations
acaccctctccaatccattaacgagggcctggtgtgacatgcatcactggtagcccttgtccctaatggggttccgatgtgccatgtgtttggggtctctcgccagagccactccaccaaccacaataggatgcaccatatgcccttaggtcctcaatgcccctaaagggctctgggaactccatgtttctagctgcccacgccacggttagtcaaggagttggtggaagagagttgttgtgcctatacgacgggacatgcatgaccgtgctcatagcctactccatgctggctgttaggcctgagcatcctangtgtggcgctagtgtggcattgtgcgcacacgcatggacggcacctgccacatccggtaacgacatccactgtgatgtgtgggtgacaattctacngngcanagatggacatttacac

SEQ ID NO: 70493 - DNA, 344 bp, Zea mays
ctcaagcttctggcttgctcgacttccttcctctctcttcccatggcgttcattcttctgcgcccggcccccaacgccaccggtcatcttctgctcgccgagcgtccctgtccctgctcgccgttccgagcttggccccgcggtgagctcgccgctggccttctctggtgctccctgctcgcccctatctctgtcctctgcctggtcgccatccccaagctgcgcccctctgctcggctatggcccccgcacaccatgctgtccgaatccccgctcctgctctggctcatctgcgccaccaccgcatcacttctctcctatggcgcccggggatctcactccct

SEQ ID NO: 70494 - DNA, 470 bp, Zea mays
tactcagcttaggctggctgctcataagtgatgctgctattcttggttttaacagttaatcatcaacagacaacttactccacctcttccaagaaatccttgatctctgatgggcttagaactctgttatttgtatggaaactgttagttctcaccaaaccatttgaagtagcaaggagtttgtaatatcaaatagccttagatttccaacaacaaaaacatagtaaacagattcatttcccctacagctagaggagcacaagttgttaccaaaccctaaagaacagaatgggagcaatgagtgatgcagtgatttgatcatttgatgaggcaagaggaacatggatcatataaaggtggcagtaataattgagtctgtgtaacttacttgaactcacggtcagctcgaataattccgatttcaatgttgttggaggaaatatgcccctcatatctgcaagtccaagatg

SEQ ID NO: 70495 - DNA, 476 bp, Zea mays
  unsure (1)..(476): unsure at all n locations
agattctnggcaatttgaagataaatttgatacacttgctcatataggaaaggtatgggttcaaatatctttgatatatattagtgtctttgaagtgcagatgacaataatttcacccctccctattcctttacggtgatgtggtaagttgtttatgacttaatgcctaatatgttttatctctaaatctttatattggtntattaatgtgattgatatcgctagtctttggtaagatcgaagttgttattatgcttgtgatatacaagtatgcctatgttgttttcatcatgtttttcgtggttgagttttattgcaataatattgttatatatgcttgattgtggatgttcctaagaggagtgtgaattgcgtggtttgggttacaacggaaccatcaatttgaatttaaattggtgagtgggtggtggatagttccaactatttttgcacagaatgattggttatatcgagaa

SEQ ID NO: 70496 - DNA, 427 bp, Zea mays
  unsure (1)..(427): unsure at all n locations
ttagcacttanattttactttntatgcaattgttggttcttgaaatatgcacgaggtactgcacttagggggagtattcaaaactcaaatcactcatgaaaacccctagtgcaagccaaaatgcaaatttcaccatttgcctattttctctaaaaattctctagcctatggcaaaatattntgaaaagtatatgagggtgccaatacctgtcctgttantttgtgtgattataagttgggatttggtttggatggaagttagatagaaaaattcaaaattttccaatcttccctctgtctgggctcaccggacagtccggtgcaccggcagccgcgcgctaaatatcctttttcctgtgcgatgtccggtgtgcaccggacaggcactgtagactgtccggtgcgcccatatcgcgttttgaaaaac

SEQ ID NO: 70497 - DNA, 441 bp, Zea mays
gcagtcttagcgttagtctcagtctcagagatgttttatcttttatcagggcagcccgctatatcctgtgcatctatgtttgtcataatgaactatgtctggtttggatctttgtcatgactgtcaccagagtgtgggtatgccctgcgttttggtttacctattatgtgaatggagttagttatatagttgggaaaccccctttattccactttcctctttatctgagaagctgtgtggtctgtgttggagatcagtgaagatgctcatctgttcactgctgctgaagaattctattctcttttcttatgctgcaagatctgccagatcaattctgatgtgtggttgcattctgcacatgtcatacaacatgcgcacacgatgaaggcgtgctcagcaagagctatccgctcaacatgaagatgtgcctcatcattagca

SEQ ID NO: 70498 - DNA, 481 bp, Zea mays
  unsure (1)..(481): unsure at all n locations
ggtatcagcaatctattggcctcatgactccatatgtagtcacatatgcagcanagntagtgggggaatcccttcattgtattctcacgaaaggaatggtccaatccacctaatactattggaaagggttattttgcattgattggtgaaaatccaaactcccttttggatgttactgagagtttatcaaagtctctctcaacaaattgtgcttcttttgctccacttgtttacatctttcatgtcatggctctgcagagactcaatgaccttaatagatagattaaggcattntattttttacttgaagatgatgcttgcaaatagataataaagatatagaaaatactcaactattaaaggaatcttgcagcctggaggctactaaattgatgggttttatgatgaattatgtgaagctattatcttcaggagaaaatggcccttntgaacactccanaaagtctacccaatctgagtc

SEQ ID NO: 70499 - DNA, 472 bp, Zea mays
  unsure (1)..(472): unsure at all n locations
ggtcaattgtgtgaacttgagtngatccctgtctaacctgtttatatantttttntggtgcctgagaacaagtatgtacaatagatgcttgacaattgtgtgaacttgagttgaacatgaattttgataatcacaactcaccacccgtttcaatatgcttagaatatagctttttataatttttcaccctacaatacaaaattgttctatgaaggtcatggtacatcatcatattctgtattatcaacctaggatttgcctatttcgattaataatggcattgagtcaaattttggttgtttcaaatgatagacttcgacatttgttatgattattgagttgattcttgatagcattactaaacaatgacctatgtatacacaagtgtcttccgttgcaacgcacgggcatttacctagtggaaaatgaanaacacaggtgtggaatctttgcccccttgctatcaaaaaaa

SEQ ID NO: 70500 - DNA, 483 bp, Zea mays
  unsure (1)..(483): unsure at all n locations
gaccttagaaactcagcttatgaatagtggtagcnagacttgagcttgtttgngctgctcttnnggggctntgtcacacggcgcttcaatagatccatctgctgctgaagaatccggttgtgtagtggaaaattgtcaccatagggaacctcatctccttgccggtagctggattgggaagtttgctgggcatctgcaccaccttccacaccgcatcgtaggtcattgcatgctctgctccttgatgcagagaagtgcgacacagaatacatgaatgaccttgtgtgcatggccgacaacctanggccaatgatcttgattatctgctcattgtttgtgtttgtcatcaacttgacccgatggacaatgttgatgtcgtcccanaactcacctactggcttctttcgatgaccagctcaagaagcaagacactaaaggtgtatacatgctcttctcattgaccttaggggtatacgttcatgt

SEQ ID NO: 70501 - DNA, 493 bp, Zea mays
  unsure (1)..(493): unsure at all n locations
gacctataaaactcagctttgaagaaatttgaatagtcgtggagacatatgtgccttttcgggtgccagggggattgctaccatgttggagaggaaaggctgtgaccatgtgaaattcttggcacaatccgaagccgccttatcctctgaagatataaaagacccctcggccgaagcgagcctggtcggtggaaaattnttcaccgacatctgggacaatggtggccgggaaatggcccaagaaattatacgaaaaagcgagaaaggcattcatgatgctagaagaatagcagaggccgctgagaaaagtgcggagctcgaagggcaaataggtattgactagtggttnttggctctttgttgtaatttttgatttcgaacgtgtttacgctttgtaacatagcccgatcttcttctccttaaagccttgcgagccatcngcggacccccacgtgaaggggaagacganattagaaaatgggcgaggcatcat

SEQ ID NO: 70502 - DNA, 434 bp, Zea mays
  unsure (1)..(434): unsure at all n locations
tgtgcanagtccacttgaattaatcttctgagaaacccgttctcgttgcaacatgacaccagaaggtccaacccaacaagcgttggatgaattcagaattattgcagagcatatcagtacaagagacctggttcangagtttttggctttcaaggtttttcctattttaaaagaatgggaaatgtcgaagctaaagggggagaagaaagaaggtgaacttgtgcggttaccttactattacaagtttaagaaatactttaaaacaccttgccaagagtggttggaaacagttgaagtaatgtgcaatgaaatacttggcaattactccaaanaagaagatcagttgatgactgcngccttcgcacccgtccgaagcgaagactgaattgagtgttggacgccttgggttttgaataccctgactatgaaaatct

SEQ ID NO: 70503 - DNA, 474 bp, Zea mays
  unsure (1)..(474): unsure at all n locations
tcttcttcattctgatgaaaaccaagttctttgatcactttatcaaaacgaatgttccaactccgagatgcttgcttcaacccataaatggatttctgaagtttgcatatctttccagcattgatcggatcgacaaaaccctcgggctgtatcatatacacgtcctcatctaggtttccattaaggaaagctgttttgacatccatctgccaaatctcataatcgaaatatgcggcaatagctagaatgatccgaatagatttaagcatcgctactggcgagaatgtctcgtcatagtcaactccttgaacttgtcgaaaaccctttgcaacaagtcgagccttatagatgtgaacatttccatccatgtctttcttcttcttatagatccatttgcattctataggtctaacaccatcaggcgggtcaaccaagttccaaacttgattnntctccatggaatctatctcggat

SEQ ID NO: 70504 - DNA, 486 bp, Zea mays
  unsure (1)..(486): unsure at all n locations
tgagttatttattacagaccagactaaaagtgagtgcggagtagtaatatcatacaaaccaagggaggcaagaactcctcccgaaaagatatacacaaaagatcctaagtggaggaccgagtcctcccgcacttcagtcttgtttttcctcatttggtaccacaagtaatgttgctttaaatcttggtacatcttagtgcttccaggatgaatagaataacgactaagatgtgcttcatcaagaatttgttggtggagctcttcgtgctttggcactactatgcggnttttaaaccatatcacaccttgatcgtcttccttgaaacacttggctactccagcctctatcttctctcgaatgtgcttcatacccagattatccttttgagcatcaattattctttgcaaatgattgactcaagccttaactgatttagagtcccttgttggatgatccccaggtttagcttttccatttcttgacat

SEQ ID NO: 70505 - DNA, 417 bp, Zea mays
  unsure (1)..(417): unsure at all n locations
aagaatgacattaagttcaattggtcttctaagtgcaatgaaccctntgagcaactgaagacactattgaccactgctccggtattagctcaaccggacatcactaaaccttttgacgtatattgtgatgcatctggcagtgggctcggctgtgtactgatgcaagagggccgagtgattgcgtatgcttcaaggcagttgcgccgacatgaggagcattatcccactcatgatctggagctagctgctgtggttcatgccctanagatttggcgtcactatctgctgggaaatatctgtcacatatatacagaccataaaagtttgaagtacatcctcacccagtcagagttaaatatgaggcaaagacgatggctngagctcattaaagactatgaactggagatccattatcac

SEQ ID NO: 70506 - DNA, 478 bp, Zea mays
  unsure (1)..(478): unsure at all n locations
gtgcttcattnntcattgcaagactaactatttatgttntatcaaaacctatnttttctctttatcctctatagatattttgactaaagacatttccttagtcaatacttcaagcatttcatctttattggatagcaatccttgaagctctaggtttatctcctttttaaggatgagtaggtcttattgagcatcaaggcttgcttttcttttatctagcttcttcattagtttagtgattacattatatccatttaagccaaattctttaatcattttatttttcatatcaagttgttcatcatcatgatctgattggaattgcattgtcccattttaaactcacatagggactgaacagaccacgagcacttgagtgaagtgaagaatatgctgcaagctgcatcatgaccacaaactgcttgtgcatttcaacgaagaatacaaacaatngaccaattacatgtccttgattcta

SEQ ID NO: 70507 - DNA, 488 bp, Zea mays
  unsure (1)..(488): unsure at all n locations
actcaagctgatgtccanatcaagaacttcaagtggaacttgaaaattgcaagatcatcaatgcctcatctttatcgattgaatctaagtctagctcctcaaataataccttttgcaaacattgtgccaaatatcatgcgtcttgttgtttaactaaccatgcaaggaagaagagcccacaggtgaaggtcaaagaaatattgaagagatgctctagcaatgatgggttaaagaaaattgaacccaagtacaagtccctaaagcccaacaatggaaaagggggcttgggttcaactcatccaaggaaaaccctagcatagtgcataaggggtggagatcccccaagttcatagagggaaccaccctatatgatngccttgggaggattcacttgagttccacacagagtaagatgaaggaagtgggatccacaagtggagaaaaattaatgctccatttctactcttattttgtgttatatgttgact

SEQ ID NO: 70508 - DNA, 409 bp, Zea mays
  unsure (1)..(409): unsure at all n locations
tngagtcatccatcacttctaagcaccatgagtgcaagatgtatatttagatgcccctacgctatccccgtatttcaaaacgtgctccattacttttcgtacccctatgtttaccaccatatnttgatggtgaagattatggtatgtggagtgataaaatgaggcaccatctaacctcactccacgaaagtatttgggatattgttgagtatggagcgcaggtacctaaggtgggggacaaagactatgacttggatgaggccgcccaaattaggcactttaactctcaagccacgtctatactcttcgcctccttgtgtcgagaggagtataacaaagtgcaagggttaaagagcgccaaagaaatttgggacgttcttataaccgcgcatgaaggggacgaggtgac

SEQ ID NO: 70509 - DNA, 454 bp, Zea mays
  unsure (1)..(454): unsure at all n locations
ngcagatctcgtcggggttactctcggaccatatgtgctatatgtattcctcgaaagcaagtatggctcacctaaaatagtcaatgatggtgtcactgtggctaaggaggtgcacatctgactacaaacttaccatcgtttgttcttgctcgtactgcaaccataccctgctctaacttcttgtggctgccgagtttcctcatatgttatagactgtggccatgcaccacgtagaacttgaggaccctgttgaaaatattggtgctaaattggtccgcccagctgctgctaaaacaaatgacttggctggtgatgggacaaccacttcggttgtccttgctcaatggatgattactgagggtgtcaaggtacacgctagtatataacctcatgtattggggtatctatatcctcactgtccggccatgtctcaatatctagaggattttgctac

SEQ ID NO: 70510 - DNA, 482 bp, Zea mays
  unsure (1)..(482): unsure at all n locations
tatcaaccgcgtctgtaaccaagcgatgtggtcgaaccgtcggtgttgtcgtggaagctccagcaacctcaagtatgccacgccgtggctctttactgcacagtagtaactgtggcacgcctaggcttaccatctcagaaccgctgcaccgatgaacgccgcgactgagccaccagtgaccttcttcatctccggccgccaccacgccatgcccaaattaggagccaccacccttggatactataaattggtgccccagcctgcttcgctaagtagttgtgcacccagtgaaccagccctcaccttcaatcgtcccccacagctccccaatttgagatttcccccaaatcagtcaagaattccgccgtgtgtgagctcgccgtggccagctctccataggtccgatcacgcnctcctcgctcttgtttctgcactcttgtgtgctatngatgcttctcaacccgaccaattgagctagaaca

SEQ ID NO: 70511 - DNA, 413 bp, Zea mays
  unsure (1)..(413): unsure at all n locations
cttgaaatcangcgagagctagtgaacaagagcttatagttttgtanaataacacaaatggcaaaaatggcgtatcaaatgctgccgctatggttcatatttacacgcccagtgctttgcaacttggtggaccccgttagtcattgactgttgctattctagaaaagggaaggtgttttttggaccttcggcttaaggccttcgttcacgtcgcagtctaaattcgttgttataacaaattaatactgcgaggggctactgttgggggccttcgtcttccgaaggtcctcaaaaacatgattaacaatgtttcccaagtgtaatatatgtacaggaaccttcggactcggaatgaagctgtacacaatatgaaaagcatggtcgggatgaaggttgaaccagctctgaagcta

SEQ ID NO: 70512 - DNA, 414 bp, Zea mays
  unsure (1)..(414): unsure at all n locations
tggacgaaactgtccncaggtgatcgatcacagctaccatctttctcatatgtaaccctttgtaccctccagaatccttcgcatgcatgagagtagagctggagcacacacataataactccaagaggggagaaaaaaaaggtgacgtgtcttgtgaagtgtgaaccaatgtgttcgtggggtgacagaacgagctagggtaagcttattacatcttcttcttgtcggtgctgaggaacgccttggcgcagcagtccgccgcttcgtgcagctgagaccgcagatccttgagctcctgcacggcccaagacagcggcaacaatgccgcacggcgtcatgacaggaaggcccaacacgacacgacacgacgcgacagagcgaaactgacgagccgttcaacgtaccctgagcgcg

SEQ ID NO: 70513 - DNA, 459 bp, Zea mays
  unsure (1)..(459): unsure at all n locations
ggtgaaggttcttcatccncacatgtgctaagttgcgatgccacagccagcccatgttagtcttagcaattaagcatgcatctagaccggcctcctcttttgtataatcaactaaataaagtttgtcgtctagtacacccttaaaagctagtgaaccatcacatcttctaaagacagacacatctacatttgtaaatagacaattatatcccatattacataattgactgacagatagtaaattatatccaagagactcaactaaaaacacattagagatagagtgctcatttgatattgcaatcttgcctaaacctttcaccttgccttggttcccatcaccgaatatgattgaatcttgggaatccttattcttgacgtaggaggtgaacatcttcttctcccccgtcatatggtttgtgcatccgctgtcgataatccagcttgaacccctggatg

SEQ ID NO: 70514 - DNA, 235 bp, Zea mays
caccacaagtgaacaagtgtgatggtccatatactggaatatctatagataatggacataacaagtaagatgaacattacttaagtgagactcggtgtgcgtaactcggagacaactgatcaagtcaaggatggaggcaaaaagagcttcgaggtaccgagtgcaccggagaaggtcaaggaggccgacgaacctaaagccagtggtgaagacgaagacctgcaaagtcaaagtt

SEQ ID NO: 70515 - DNA, 461 bp, Zea mays
  unsure (1)..(461): unsure at all n locations
tattcaacacatgttngncaatatcttgaggaagttgagcatggcgtcttctcctcaattgtctttgtttcttgttcccaagcaatttcctttttgaccctacaacttgtttctcaatcaaggattggcctttcttgggggcagtggaggtcagcacatgataatactttaactaattgatcacttgtgcaagaatgaggttcacatgtgtttaaactagtaattactaccttatgagcaatattgagcatgatgtggtcatcaactaattcactatgagaatatgacaacatatcgtacttttcacctagagcaagtttttctaaattcatcatttctacttgactcttaatatagaattctcagntttaagttgagcaacatcagataatacatcatgattatttctttgctcaaataaaacagaatcataccgctggaccaaattatcatgagagcac

SEQ ID NO: 70516 - DNA, 359 bp, Zea mays
  unsure (1)..(359): unsure at all n locations
tcgcttctgcttnccttnntacaccaagcaggacctgccggtgccaaacgcacgccgcatcacacagaagccaacaaggttgagaagagactgaggaggtcagccagccacttgcccacctccgagctgtcccccatgacaccaccgccaccagcaacccaagtaccaaacgactgggccgcagtcccgcaatagcgtcaagatctcccctttgacctcccccttcgccttccggccatggtctgctgccatggcggccggcgccgcagcgccgcgctcctattcttggccgtggccgtggtcgcctgcgctgctgctgcggcggcgcaggagcccaacaccgacgcctacttcgtctc

SEQ ID NO: 70517 - DNA, 480 bp, Zea mays
  unsure (1)..(480): unsure at all n locations
tgtgaagccaatcacaagtttgttgaagaatgacatcaagttcaattgttcttctaagtgcaatgaagcctctgagcaactaaagacactattgaccactgctccggtattagctcaaccggacatcactaaaccttttgacgtatattgtgatgcatctggcagtgggctcggctgtgtactgatgcaagagggccgagtgattgcgtatgcttcaaggcagttgcgccggcatgaggagcactatccaactcatgatctggagctagctgctgtggttcatgccctanagatttggcgtcactatctgctgggtaatatctgtcacatatatacagatcataaaagtttgaagtacatcttcacccaatcagaagtaaatatgaggcanagacgatggcttgagctatcaaggactatgaactggagatccattatcacccacgcaagggcaatgtggtggcagatgcgttgagtcgt

SEQ ID NO: 70518 - DNA, 378 bp, Zea mays
  unsure (1)..(378): unsure at all n locations
acccctttaactcactatttatggttaagtcctttaaccagggttctatttgcaaaacattaaaacaatacaacttgtttgaaatttttacctaatgaatgcactctangtgtatcaaacatatgcaatgccaatgctcatgatgccatgctcatgttttagttatagtaacaccaggggtgttacatccttccccccataaaagaatctcgtcccgagattcaaaatcctanggtaggtaatggtaaaggaaacacatcacatttttatttcccaaattctggtacaaggcangggtgatgtgggagtcacttctttataacacagctatacagactttacagtttacaagaggctataaagcctgggaaattctta

SEQ ID NO: 70519 - DNA, 487 bp, Zea mays
  unsure (1)..(487): unsure at all n locations
ntagtataaatctgctctactacaacgggttgctcttcctggcttggcccgtcctttctttgtgttagtgctgagtcatggactgccaattgtcacaccacattttagatccatccaccgaggccccaaaaaggtcttcaaagataattcgatggaataaaccaaaatatgatgtaaacaaggctcccacaaagagaaattttgtcgccttgtcatgattcgctccattgtagaacaaaaacatcatcgttattgaagattcatcgagtacaattagccatattgccgcataaacattttggttgcatttactatgagctctattgtacgtcaaatgcgcacctaacacctttcttatggaggtggagttagaacacagcctagctagatgtttctttgaaatagacttcagaatttgtgtcaaattgtttattagaaacctttgaatataattattggtattatgaatntgtatatgtatttttta

SEQ ID NO: 70520 - DNA, 353 bp, Zea mays
  unsure (1)..(353): unsure at all n locations
cttcattgatctgctttgagtttagcgttcttttctaagatttcatgactccgttgggtgcaccaaaggttcccccattttgtgtagctctcgagctttgaattgatttgaaataatcaactcaaaggtcttcattgctcgcttttgagtttatcgttcctttctgagatttcatgactccgttgggtgcacccattgngtgtagcccttgaactttgaattgatttgaaataatcaattcaaaggtcttcattgctcgcttttgagtttagcgttttttctgaggtttcatgacttagttgggtggatcgaagttgcacccaatgggtgtagcccccgagccttgaactgat

SEQ ID NO: 70521 - DNA, 317 bp, Zea mays
tatgctgagcaacctcccggctttgaagatagtgagtaccctaaccatgtttataaactctctaaggcgctttatgggctcaagcaagccccgagagcatggtatgaatgcctaagagaatttcttaccgctaatggcttcaaagtcagaaaagccgatcctactctctttatgaaaacaaatgctaatgatttgtttgtatgccaaatttatgttgatgatattatatttgggtctactaacaaatctacttgtgaagagtttagtatgataatgattcacaagttcaagatgtcaatgatgggggagttgaaata

SEQ ID NO: 70522 - DNA, 401 bp, Zea mays
  unsure (1)..(401): unsure at all n locations
ttagtaagaagctcgttgacaatcggcgatgctgtccactttatgtcggcgagggccaagtcggccatgaaattgtattggtttgtgcttcctcttactttgtgagcgaaatgaacaacatgaagatgtaggatgtatgtagaatgggtgaacgatggaaagctgttttttttctttntttctctgcagaaggcaagcagctgataaagaccgctacggagtggagaaaacctgnggttggaaagacgcataaaattagtgaatctagatgggaaaacggggaaatagcagctaacacagcaagcagtggagattgtagatcttacaccaaataaaataaatcgagggcgcatggatctggtgtcgacaggtgggcgcaatggtggagtagactcttgaac

SEQ ID NO: 70523 - DNA, 462 bp, Zea mays
  unsure (1)..(462): unsure at all n locations
tggacagtgttntgcgatggttcttggggagacttctgtgcangagcagctgcggtcctagtggcaccttcaaaagtcaaaacatgttatgcagtcaaactggatttcagttgcacaaataatattgctgagtacgaagcgcttctattgtggcttcagaaactaagggcaatgggaataagaaaggccatcctaaagactgattctcaagttattgttggccacgtggacaaaagtagcaaggcacgagatccgaagcttgaaagatatttggatacagtttgaaggttggaagcttccttcgaaggtttttctgtcaagaatattccaagaggtgaaaacgagcatgcagatttgctagccaaatcagcggctcatgggctccccctaccctcggaagtattttttgaaacaataaaagcaccttcggttgagctcatggagagagcagtgcttactatt

SEQ ID NO: 70524 - DNA, 445 bp, Zea mays
  unsure (1)..(445): unsure at all n locations
accctgaaggtaagagatgatctcggttctccaatcttcgctaaaaacaggagatatattaaggactgctctttcaagaagttccaccgaaggtgcttttattgtttcgaagaacacatctgaaggtaaaggcagcccctgtgctgctgacttagctagcaaatcagcatgctcattntgtcctcgagggatatttttgacagaaaacccttcgaaggaagcttcaactcttcgaaccatatccagatatttttcaagctttggatccttagccttgcaactcttgtcaatatgacccgaaacaacctgngaatcagttttaagtatggcccttctgattcccattgcttttaacttccgaagacctagaatcaatgcttcgtactcagcaatgttatttgtgcaactaaaatcaagctttgccgcataacaaagtttgactttt

SEQ ID NO: 70525 - DNA, 460 bp, Zea mays
  unsure (1)..(460): unsure at all n locations
cattacggacctatgaaactcagcttannagcaccaagtgagactgaagcttagccttcagagtccgctaaggtgaaatccttggaaaccaaagaaacagaagcagcagaacaaatttcagctgaagaaactgacactgccgcccccgaagcattttccgaagctttcaattatattttacgacatgcttcggggaaagagatgactgaaaaagaaaagcaagaggctcagttctatgcccaaaaactgaaatatccaaagggggcgttaatattcaacggcagcggagaagaagacttcttgtattgtctccctgacagcaaggagatttctgtctgtcgggagatgagcaaaagcttcggattcccaacactagaagacgggctctcagtgttgtcaaagaacgagctggccgacagcttagcatacaatagtttaaaggtgaagaaaatgagatctt

SEQ ID NO: 70526 - DNA, 483 bp, Zea mays
  unsure (1)..(483): unsure at all n locations
actcagcttcgctggcttataggcgcgggcgcgggcaggggacactgtcgtggcttggcgcggcgcggggtgcgcggngtctggcgctgggcgtgctctatcgcgttcaggggcgcgtcgaacacgtggaggtgttcttctgcccatgttcaacagctcgccgagatcgcaaacgtgcgaatcttggcaaaaatccagcgcaggcctcttcctggcacctatggctatctcttgtatgtgagttccaagggaagataagccctatgtgagaagattttaggatgccaaaactggcttctcccactttccacctcatgacaaaaatgatgccaaatcttgtcaaacgaatttacctcggtttaaaacttttccagtgggtgccttatgtggtttggcacctctttggtattcagaccaagtggttttggcgccatttactaagtgaacacaacttgatgttagattannnggtaaaattgactt

SEQ ID NO: 70527 - DNA, 469 bp, Zea mays
  unsure (1)..(469): unsure at all n locations
tgtggaggttcttcatccncacatgtgctaagcggcgatgttctctttctttccatgcaagtcttagccattaagcatgcatctagaccggcctcttcttctgtaaaatcaactaagtaaagcttgccgtctagaatacccttaanagctagtgaaccatcacatcttctaaaaacagacacatctacatttgtaaacaaacaattatatcccatattgcataattgactcacagatagcaaattatatccaagagactctactaaaaacacattagagatagagtgctcatttgagattgcaattttacctaacccttttaccttgccttgattcccatcaccgaatattattgaatcttgggaatctttattcttgacgtaggaggtgaacatcttcttctcccccgtcatatgggttgtgcatccgctgtcaataatccaacttgaaccctcggatgcataaacct

SEQ ID NO: 70528 - DNA, 485 bp, Zea mays
  unsure (1)..(485): unsure at all n locations
actcagcttaacagaatgacttctaaagttctctacactcaaattggtatatatgttntgacatatgttgatgatatcattatcatcaaatttggatgaagaaagaagatgagcctaaaacaaacttcaaaacacctagtggaacttattgctctcttcggatgcttgaggggctcaagaatgctagaggaagcatcaacagaatgacttctaaagttctctacactcaaattggtagaaatgttttgacatatgttgatgatatcatagtcaaaagtacaaagcaataaaaccgcattgatgacctacagaaacatttgccaatttcagaaaggctggcctcaagttaaacctagaaaaatgtgtcttcggggtaaagaaaggaaattccttatatgtctagtatcaataaaagggattgaagctaacctaaacaaaatagaagttattattcggatggaaccaacaaagtcatgaaaagatgc

SEQ ID NO: 70529 - DNA, 462 bp, Zea mays
  unsure (1)..(462): unsure at all n locations
ctaagcttacggccctcccagngagctatctgagggctcggatcgttcggatgttgactggaaaggggctggccacggtggttgctctcgggcggcactggcgggtctcggagatgtctccaaagctaatggctggctcgggtaagtcaagcgaggtacggaggaggcaacggggaatgcagcctagcactgaggcgggctttatatccgtggcgcgggtgtggtcacgggcggccgcgggcgtgctctgagcgcgcccccggatgtcagctcgcgtcgaacacgtggaagcttgcttctgccatggttcaacggcggattagagcaccatagcgtgcgtatcttggcaaagtcactgtgtacggtcgcttccctgctccatantcctaccttttgttgtgagttccaagtcaagatatggtcacggtatggagatacaggggggagaagtggctgtgtcac

SEQ ID NO: 70530 - DNA, 487 bp, Zea mays
accttaaaactcagcttgcatgttgttacagaagacacgtctgggttgtctcttcttatttgagcaaggagaaggcatatgttgaagagatcgatgcttttgatcttatggaagatagttcttctcctaagaactctgcctcgtggaccaaaggaatggggcagaatctcataattcatgatctgcctgcaatattggagagatggaaaatttctacccttgcaagacgtgtgtcatctgagcccttgtttgacattgtggagacgccaatcttaccatcagtcctcagtaacagcagtacatctaacaacgggtcagagacatacaccgctggaagggcaatctctgtaagctacactgatatcagtttaaagagcattgcataagacagtctgattacatcattcgtgtaagtgaaaaataaggaagagcctggtgaagccagcattccatggaatggtgaagctctgacctgctttgatcagct

SEQ ID NO: 70531 - DNA, 453 bp, Zea mays
  unsure (1)..(453): unsure at all n locations
tgtgaagattcttcattccaacatgtgctagtctgtgatgtcttagccagcccatgttagtcttagcaattaagcaagtgttgagttcagctctatcaaaatctactaagtatagctgaccctctaacactcccttaaatgctactgaatcatcacttcttctaaagacagtaacacctatatctgtaaaaagacagttgtagcccaatttgcataattgagaaacggaaagcaaattgtaatctaaagaatctacaagaaaaacattggaaatggaatggtcaggtgatatagcaattttacccaatcctttgaccaaaccttggtttccatccccgaatgtgattgctcgttggggatcttggttnttctcatatgaggagaacattttcttctcccatgtcatatggtttgtgcacccgctatcgatgatccaaattgagccctcggatg

SEQ ID NO: 70532 - DNA, 236 bp, Zea mays
gtgcatatactggtgaactgctggacctacgggatgcgctcaccacctaccgatggaccgctttcttactcagtggtggtcatgatccctcatagaatacggcgaatcagctgatcttagttagggtgacaggaggatggagacttattcaattcctaactgcactgctgagcttaccactttacgctcccgatagagccctcttgcgaccaccttgtgttgatccggctatcata

SEQ ID NO: 70533 - DNA, 478 bp, Zea mays
  unsure (1)..(478): unsure at all n locations
tggatggacataaaatntatatagaaatcgtatagctcgttgagatcntaaaatttggaggacattacatttttatttgaacacatatttatatcaaaatcattaaaatagtgtctaaatttatatcaaaatgacaaacaatacatcacatgtataccttcaatactccgtatcttattaacattggaatctattgtgttaaactatcttttgttgtattacactattatgtgtttcgaaccttgtcattatgtttgttgttcacttgttctcaaatactgtgaatcaagaacaaggcaacaaaattgttaaagattaaggaccttcgtgctcctaagcattatcttctttggatataatgatcttcagaccaaggtcatgaaggacatgtcttcatgatttatgagaattagaatccatagagacgatatatgaaatccattcattcatacacatatgtatttcataatatacacat

SEQ ID NO: 70534 - DNA, 343 bp, Zea mays
acactgtatacacgtcatctcggcgcggagggtcttcagctgtcgcgcacctctgctcgttatctggacagctggcgagcgcacaccaggggcacgcatggctagcgcgcggaccttgaatataatacggcctggagccccgaaactcccatgacgagatctgatcgtagaaatatatgagcaccggcaaccaataggaacgggatgcacctggtgattccactactgtggcggtgtctcggtgaggagatgaacaccggctgatgtgatgatcgccacctctagcctcagctgcttggatgggcgctactacagcgactactcagcacatgggacgaatgac

SEQ ID NO: 70535 - DNA, 471 bp, Zea mays
  unsure (1)..(471): unsure at all n locations
ntaccttgaatcccacaagccaccctattcttgagagtcttttcctttgtcgggtaagacttgcgaaagtacactccgtactcagggttttcgaacccttgttattgtaggtgaggaaacaacggatttttgttatttctgttcaaaggtggtaccaaaggaggagccaaatctgtgatcgtgtgtgcgggaggatgtttgcctcccaatttgaaaacactaaacttctgttcgggagggtgttttgcctccctagtttgtaataatactttatgcactcataacgccggtactataataactactccatctctatattttatgaatgtacattaagttattgtaatccgattccgcttattctatcctctgatgtgatgtaatgtatgtgtgacaggtgaagcgctcttgggcggtatgatgttgatacagaagaccgaacctgtcaagtgattatgtgcatctacatgg

SEQ ID NO: 70536 - DNA, 465 bp, Zea mays
  unsure (1)..(465): unsure at all n locations
gcttataaatggacgtgaaaagtgccttcctcaatggaccattcattgtttaggtctatgttgagcaacctcccggctttgaagatagtgagtaccctaaccatgtttactatactctctaatgcactttatgggctcaagcaagccccaagagcatgatatgaatgccttaaagatttccttatcactaatggattcaaagtcngaaaggccgatcctacactcttcactaaaactcttgaaaatgacttgtttgtatgccaaatttatgttgatgatattatatttgggtctactaacgagtctacatgtaaagaatttagtacgatcatgacacaaaaattctagatgtctatgatgggggagttgaaatatttcttatgatntcaaggaaagcaacttcaagaaggcaccttnctaagccanacgaagtatactcaagatattctaagcaagtctgggatg

SEQ ID NO: 70537 - DNA, 157 bp, Zea mays
ttgggaatcaagcaacgacctgagagaaatcaacttgcctccattgacggacctgtgatcttaacacattagcgcaatcaccatgctcgtaacctggcacaacaatattgagtgctacctgtcttgagcactatgattgaattccatcggggaaccc

SEQ ID NO: 70538 - DNA, 486 bp, Zea mays
  unsure (1)..(486): unsure at all n locations
ctcagctggtattcttttgaggggttntgtgcatgccactattgttctcttcttaagctntttcaccatactatcaccggtatcttgagaagggtgagcatgacactttcccttcaattgaatcaagctcccttttagcctctcattttcttccttgagctcattgttntcttttgcataggaaacattacttgttcctgaaagttttagctcaatggaagattggctttcttgagagcaacatttgttagcacatgataatatagtttctgtttgagtacatgtgcataagtgaggttgggatgatttcaaattagttaacacaaccccatgagctatttctaaaatgatatgtgaatccataaatttattatgagagcacacaagcatatcatgtgtttcttgcaaagctagaatttcaataattagcctttctatcgtggtcttgaacataagcattttattttctaatngagcaatatatga

SEQ ID NO: 70539 - DNA, 441 bp, Zea mays
  unsure (1)..(441): unsure at all n locations
tccacagcaatccaacatacagnggagtagggtgttacgctccggctgtccgaaccactctaaactctcgcgtgttcatgtgcttgatgttcgcttagcaagataggctttacgcttaagccccttcctcatcttaggatttagggcgggtgcactccgccacccggccggagaattccttctccgacatttggcgcgccaggtagggggctaggcattagggttttgcttgcatccttgctcagcatgatggtgcaaatcgtggagcaccgcgccgagacatcaacggatttcctggtggaggaagaagttgtttcttccatgccacaggttcccaatcgcccagtgccgggcactgctgctgtgcacgctgcacggcagcatacaactgcacagacatcccggacaccgtcgagggcggctccaggagcgttttcagca

SEQ ID NO: 70540 - DNA, 394 bp, Zea mays
  unsure (1)..(394): unsure at all n locations
attcatcaaggaagtctttcatcccaagttgttggtatatctcgtgttantcacgaaacgggggaaaggaaggatgtttatacactacactggtttgaataaagcatgtccgaaagttccctaccccctgcctcggattgaccaaatcattgattccactgcgggatccacaaccctgtccttcctcgatgcctactcttctatcaccacatcattgattccactaattcactatatggtagggccctcgggtcaaaacactgacaagtggtaagtcactcttttatttttcttataacatggcattatctaggcatatcccagaatagaagagagaagagcatatttttactcaaccaccactaagtttctcgctcccatggtatgctttctt

SEQ ID NO: 70541 - DNA, 447 bp, Zea mays
  unsure (1)..(447): unsure at all n locations
tagcccgttcggcctactttcagcacgtcctgtttcatgttcatgaaactggccatgcacggaccancgtgcgcgtgcgtgtgtgcgctgcattctctcccttctcacttctctctcgtggcgacagcgacgagccgacgactgtgcggccgtcgctgccactctactcgccagttgcccggatcttcttcgtccccttggaaatcgacggccacaaccaggtaccctttggtcttctctacctgctgtgcggaactgagcactcaaagccgaacctactatttgtattcggatctgatctgattgcaactgtatatgcatgtattatgcttactaacttcgattggtttgcaaaactccgcccctgccttcacttcgtgttataatagtataagccgcttggtgccacgtgtgtatttaactatntattatgtttttgctcggtct

SEQ ID NO: 70542 - DNA, 454 bp, Zea mays
tctctggctctgtaaggaaccctcggctgctctgcaatgttccggagccggaggcagcagtgtcagcatggacagaagcggagttggcttgagaaggaacttcttcggcccaggagcaagtgacttcccaggccgaagaggcgtagcagcggcggctggaacctggccaggtcgtccgctggcgggaccgacgccggagtcgggctgccgaggccacgagccaggctgatgtcctcgggggatagctggctgaggctacggaacggctggtcaagccgtctgcttgggccgggtttctgcatgagaccctagcggcgatggcccaggcgcggtgctgacatcttccttcgaggtggagatcctccgaccgtgtcgccgtccgaggccgggtcagattccgccgaaggtggagacgatgccgagggtgctgctgctccccctattgatgtctgaa

SEQ ID NO: 70543 - DNA, 234 bp, Zea mays
  unsure (1)..(234): unsure at all n locations
tgaatagccacacgccctagataataatgtatctccacgcgaagacatgctggatgaagaaatgccactacacgaaaccggttaaagaacgtgggggaaaaacccgcgaactcaatgtaataggccgtcgaacttaccataagaacgtgggcttaccgacgaatatagccgacggccacnttcggacgaacctacacaagtaagctcgaccgccccgacgaacaaaacagtgag

SEQ ID NO: 70544 - DNA, 393 bp, Zea mays
  unsure (1)..(393): unsure at all n locations
ctcagcttaactccaaggcaccagctgttgagagcacaacagctaccgaagctgcaccttctgaagctacagctgccgaagctgccatagccgaatatattcacttattaagcacaattgctaatattgataagatactgctagacatggccacagaagaagttgttgcagccaccgaagagactatggccccagagcccgacaaggagaaagaaatagccgaagacactttggaagatgaaattttcaattttcaaaacttagttgaacaagagttcacgaaggctgaaaaagaagagctaaaagaatatgccatatcttgcggatatcagccgggggcacttctctttggtggcgttgatgacgaannagtgggctgtgtcccggatcata

SEQ ID NO: 70545 - DNA, 500 bp, Zea mays
  unsure (1)..(500): unsure at all n locations
tacctgcattacggaccttaaaactcagctgagaaatatatcctcctgcattntttgatgtcatgggtcactngactgtccatttacctgaagaagctatcctaagaggcccagtgcaatatggttttatgtacccagtcgaaagacggntatacactttgaagcattctgtgaggaacatggcacgacctgaaggctcaattgctgaagcatatgttgctaatgaatgctngactgcttgttcacgatattttgatgatctcgacacaagacataatcaggagggaaggaacagagagcgtgttgatatgagcaagggtgatttatctgttttccaacatggagtccatttactcggagctcataggattacataccaagaaaatatgtatgacaagatggtttggtatgtgttaaacaattgttcggagggtgaacaatatatagagtatgtcttcgtatccacaattatgcttcatttgtctaanaaacctaatact

SEQ ID NO: 70546 - DNA, 453 bp, Zea mays
  unsure (1)..(453): unsure at all n locations
cgcacacatagctcttttgaatacctctgatcatatctcttttatatgctatgactaatgtgttttcaagtttatttcaaaccaagtcataggtatattgaaagggaattggagtcttcggcgaagacaaaggcttccactccgtaactcatacttcgccaccactccgagcaactctctcttctttgggggagaaatgagcatcaaggaaaaggacttcatccttgggggagagagtaaaagctcaaacgcaaaaggacttcgtctttggtataatcttaactcacttatttatgaccaaaggggaagattgcacttcgagggctctaatgattccgttnttggcgattcatgccaaaaagggggagaaatgagcccaaagcaaaaggaccgcaccaccaccaccaaattcaaaaacttagtgctttccaaaagtctttatcatntatccta

SEQ ID NO: 70547 - DNA, 394 bp, Zea mays
  unsure (1)..(394): unsure at all n locations
tataaaaatgtctacatctcacagttaaagccatgtcagtttgaacagatttgatgttgtgaaacacttccaattcagtcagcccttcctctcaactntatcaacttcacttttgttttgtagctttgtatctcacttctacttcttgatgtgttggactcttagcatatataaagtgtcttcaatattactttgtaatgtcttctatgagtcttataatgtcttatttgaggtgttgcatcctcagagcctcagtgcaatccactttgcatcctgtgaactacaacacacaaacacttgggaaatacattagttcacggattgtgttgttcatcaaacaccaaaactcaattagccaaatgacccggggtccatnttccttacatggagcata

SEQ ID NO: 70548 - DNA, 467 bp, Zea mays
  unsure (1)..(467): unsure at all n locations
cccggctattccatacatganaagacaatcgcgcactttgcgtggagagatggcgagagtggcacgtaccctcctggcaacggatcgcctaanaggggtggtgtactctctggtggcgcggacctgttcatgcagtggaggatccgtgggaatagtagacatcaagatttacgtgaaacatatgtcgtgtgggtagagatcctcagctgagtaaatcgattcggatcgccgttatatccccggagagtggagacttgagctccgacctacaacctaagtcaggatgtgaacacgatggataaaaatgatgttgtcttgatgtgatgtgaaattagactagatgcaaatagagtctattaataattaatatggcgttaaaagaatgaaagtaaggactcactctattaagctacttctgcaaaagtataagttgaattttgctaaagcctctccttgactnctactta

SEQ ID NO: 70549 - DNA, 287 bp, Zea mays
  unsure (1)..(287): unsure at all n locations
tggcttggagcgcaagtagtctgggcgctattgccgtgtattcactattgtttgangatcggtgtgcttgttgtgaaacgtggattgctgtgctnggctttgaaatgttataaatcccataaaatggacggaaaaccttttattcccaagtgttcctaggttntacaaaagcttcagcctgtacaagatcattcctttttgtaagaaagcgttgtgcatacagcttagtatgtttgctctggttgctgtttacagctttggtagcatatttatggggtgtgtgaata

SEQ ID NO: 70550 - DNA, 390 bp, Zea mays
  unsure (1)..(390): unsure at all n locations
actaagctgcttcccggaaggccagtccacggtcgcgggagttctcaaccccgtcgaagtacgtggaccgggtaatccactcaaccattttccgattccttgtgcacacggtctctacgttaccccgtgaagctcaccgtgcccttggattgaaccagatcgccgtggtttggccggtacacttgccgccgacgagaacacccgcctgcgcgcgtggaccaagcgattccggccattcccgccgtcaagccgcacctcgctgtgaccgctagagcctccccgagccaaccctgcccttcgtcggacctatctcgctgccggtaagccgcgccacccttgtctttctcgcgggtactgtttacattgngggaaggactgcgggtgagagaa

SEQ ID NO: 70551 - DNA, 462 bp, Zea mays
  unsure (1)..(462): unsure at all n locations
tataaaactcagcttgtaaaagtttaggttgagattatcatcacatatataattttcttttatcagngngcattntgacttacttgaattttctaaattaatgaaactcctaacaacattcatgttacctgcattagagtaaaagcaatcttgtcgatagagttatgaactcctgttcctgtcaacgactttggtatttttatcaaagtatcgagtagaacgcacaattgtattagtcgtaccagagaggcttgtagtcttgtgagatcacatcaaccgcgtttatggtgtggccaccaccatttattagagggaacgaggctttcgacaatcgaaaactcgatagtgaaggcatcgaagagcatccgggagagcccacaccaaagcaccacttacgcgtggagaaggtccggngctatccatggagtttcatgaccattgtgttanggtccaatgtctctt

SEQ ID NO: 70552 - DNA, 402 bp, Zea mays
tcatgcaactctacgctcatctaagcctagattataatgcggtcatgcttaaacttctgaaaagagcgagagagcaaagcaatgctcgtcaaatgctagaagatatactctccataaaaatgctaagctttgatgagttgactaaagaacatgaggagctaaagtgctctcatgttgacttggtccaaaggtatgaaactatttcaattgagcaagaaaactctttatattgtatcgctcaattagtaaataggaatgccttgcttaaggaccaagtagaaaagctaaaagttgaaaatctagcttttcaagaaaaatatgatatgcttctatattctcatgaaaatcttatggatgatcatatcatattaaacattgctcatgagggtgtgatagaaaact

SEQ ID NO: 70553 - DNA, 450 bp, Zea mays
  unsure (1)..(450): unsure at all n locations
ngagntntattntanactaatgtatacaaaagtttcatatttcaatacttcattaatcaagacaagaactaaccaaatctagttacccacacaaaatagacattaactaaccaaatctagttacccacacaaaataaacaaaattattacctgcatcagcattccctgcatcatctgaacttgttgagatagttgttgaacttgttgttgttggtgtcttaattgctcatcaagctctgattccctcgaagttgaagttcgagatctactccccaccgaggaaacagatcgacgaccaaagctatcgcgactcacaaccccatcaccgatccccaacctagaaacatcacaagttatgaaccaatagtntttatatatcacaactttgatcttatgatacctcccatgtggtagcccaccagcagcaacatatgttgcatccggatcgaa

SEQ ID NO: 70554 - DNA, 441 bp, Zea mays
  unsure (1)..(441): unsure at all n locations
cgctggcatacagctgacaatctcgtagcctctgaagtacttttctcaaatgctcctcatgctcttgctcattctgggaatatatgagaatgtcatcaatgaactctactacgaacttgtcgaggtagtccatgaacacgttgttcatcaagtacatgaagtaaactggcgcattcgtcaaaccgaatgacatgaccgtgaactcatatagtccatacttggtgatgaatgatgtcttcgatatatccgagggtcagattctgagctgatggtagcttgacctcagatctatcttcgagaacacactgtctcctctcaactgatcgaataaatcctcaattctgggcagggggtacttgttcttgatagtaacttcattcaaggatctgtaatcaatgcacatcatctntgtgccatccttcttcttcacaaacaacactg

SEQ ID NO: 70555 - DNA, 432 bp, Zea mays
tgtgagcaatacaagttcagaaaggataaagctgtttcttctgaccagccgaaacccatgctcttatgtgaggatatagcagagcagaaggtgctttttggatctcaattgtccgaagagcaggagaaaaccttgataaggtttttgttcaacaataaagatgtttttgcttggtcagctaatgatctttgcggagttaacagggatgttattgagcactcgctcaatgttgatccatccttcagacccaggaagcagaggcttctaaagatgtctgatgacaaggccgaaggtgctcggaatgaagtgaaaagactcctcagtgccggagttattagagaggtaaaatatccagaatggttggctaacactgttatggtgaagaaggccaatggtaaatggagaatgtgtatcgaatttactgaccttaat

SEQ ID NO: 70556 - DNA, 451 bp, Zea mays
  unsure (1)..(451): unsure at all n locations
ctattaccatgttcagggatgtccttttgctcatcatcatggctattgccaggtagattatcaacacttccagctaggttcgtgcttgcatcctcttcaatctgatagaagattgaaagcgaagtcagataatatcatttgctaaaataggtcacccaggatccatgacagaagagaacactgcataatagatgccacacacaaacagaactatctgcgaaatatcctaggtgcaactcattactagcataaataacaattgtaaatttagcttgagtaacaaaaaagaacaatcacctctgctttctgctgactttctgattcatctacgatgcagcttgatgaatcaccactactangacatgtgccttcgttaaggcccaactgcaaccgtagccttcgcatagcagttccctggtgagtgaatgaactctctgagcttgaactttgg

SEQ ID NO: 70557 - DNA, 437 bp, Zea mays
  unsure (1)..(437): unsure at all n locations
tcggtttagcgcanagacggtgatggagaatgaaaccagcctaaagggaaaaagactgcttagtccttgacagattactccttagtcaatagtaaatgtcaaggacatggatgtaattttacccaggttgcgtcctgtgcctataaatagatgaacagtaacactgtactgttcacgttgacttgtaatcacttgcacgtcactttcggattcttaccttctgtcaagccgaaggtacaaatgtaattcaatattattaatgtttgttcatgatcatataatgagaagatagataatctaatgatttgatatcatcattcatgtcccttatatgtcccctatgttcttgctttttattattacatgttgagatgatgaanngtttggccttcatacccttcgtctgaagatcattataccctaagggaaataatgct

SEQ ID NO: 70558 - DNA, 477 bp, Zea mays
tgttcatgctttcgctacgctgtgtaggcaacattagcctacaataatgattcttgaaaaaggcaggcacccaatccttatgtattccatacatcttgttgagggtaatgttatcgtgcagatggaaatcttcaagtagcattgaccatgcagtctcaaactccaactcagtcaaaggatgatgtattatagattggaaccttgtcttaaagtccatttcctcaaaccttgcatacaactcatttagaaaaggcatatacctattttgcacatgccatagacacaactgatgtattatgtgtgggaaaaccctctcgagtgctactggcattgctggatcttgatctgcattcatagatgtcaaaattgtatgaatcttattccatgtcagaaataaaataaaatcacatctaagacatcatttatgtatatacatttcctgcattattatcagtcgtacctgtcagcatcacttgt

SEQ ID NO: 70559 - DNA, 419 bp, Zea mays
  unsure (1)..(419): unsure at all n locations
ntagtgattaaagagagtaattgntggggtcatttgagctcttgcgcttggattgcttcttttctttctcattcttcttgcgatcaactcaattgtaaccgaggcaagagacaccaattgtgtggtggtccttgcgggaacttattgttccgtttgattgagaagagaagctcactcggtctaagtgaccgtttgagagaaggaaagggttgaaagagactcggtctttgtgaccacctcaacggggagtaggtttgcaagaaccgaaccctggtaaaacaaatccttgtgtcacactctntatttgctcgtgatttgttttacaccctctctctcagactcgttcttatttctaacgctaacccgacttgtagttgtgcttaaagtttgtaaattcagattctccctattcacccccc

SEQ ID NO: 70560 - DNA, 425 bp, Zea mays
  unsure (1)..(425): unsure at all n locations
tctgcagcatcatcaatttcaaccttcggccttcggaggccgaagcgggaccaaatggggcgcataatgacttcctttatatcttctcttgccttcaaatcatttttcacgtaaaaccattcctccatacaagcttcgggccaccttttccggaatgttggcaccgagtggcttgtgttggggcgagcgataaatcaataacagccaaaattgttatgatattgttctttgcccatggccttcgtctcatatacaagttcgtgcatacttgtcggcgtttcagacccacgtggaccctcaaccgactagtgaatttgtcgctgcgtatccctgcccagatgggttgatgcaagatggaacacaagaaggaggatgaggcttantattatcttgcaccgggtgctcgtagtaaaggttacaagcgt

SEQ ID NO: 70561 - DNA, 328 bp, Zea mays
  unsure (1)..(328): unsure at all n locations
taatacccctaagagaatgtctaactttgttaatggcaatgctcccatgtctcaagataacgagggctatattntatatcctgctggttatcccgatcacaaaattaggagaattcattctaggaagtctcattctagttctcatcatgcttttatatataagaatgagacatctagttctaggcactctacacatgctaaaatgcctaaaaagaaatctcctactacatcaaatgatcataacattttatttaagacttttgatgcttcttatgtgcttactaacaaatcaggcaaagtagttgccaaatatgttgggggcaaacac

SEQ ID NO: 70562 - DNA, 453 bp, Zea mays
  unsure (1)..(453): unsure at all n locations
ctatanaaactcaagctnggngaagcggcccgagccgttggagctcaattgttatacttttactaggcccnagaggctggcgaccacattccttaccgcgaatagtacagactctgatattatggtattactataccgggggtacaagctccagagtgagccaaaattataaaatgcaatggaagataaattagcccaagccatcggcagaacttggtgaagacatagccccttcaatcaagcatagcagaaaagaagacttcagcggctcacaaacataataaatctggggaatacactaggtatttcgaagcccacccgctcccgcaagagaaaagacctatatatacatgctcatatggtgaggtgaagcactctttctntctcataaaaagaagacttgttgtacggtttctcgaaacaaagaaatgaccttgctaaccaccactggct

SEQ ID NO: 70563 - DNA, 483 bp, Zea mays
  unsure (1)..(483): unsure at all n locations
ctaagcttctaagggagagncacatttgngactaacaaatgttcatttttagaaagatagggtttgtagcgcatgtcaagcaggaaagcaagttggtgttcatcatccacacaagaacatcatgacgaccgacaggccgcttgagttactccacatggatctattcggcccgatcgcttacataaacatcagcgggagtaagtattgtcttgtaattgttgatgattattctcgcttcacttgggtattctttttacaggaaaatcacaaacccaagagactttaaagggattcttgagacgggctcaaaatgagttcggcttaaggatcaaaaagattagaagcgacaacgggacggagttcaagaactcacaaatcgaaagctttcttgaggaggagggcatcaagcatgagttctcttctccctacatgccacaacaaaatggtgtagtggagaggaagaatagaactctattggacatg

SEQ ID NO: 70564 - DNA, 448 bp, Zea mays
  unsure (1)..(448): unsure at all n locations
tacggacctataaatctcagcttgtccaaggacgagttcccattgccaagaatttactctctattagatgcagcagcttctttagagctcatgagtctactggactgttacttaggctatcatcaaatttggatgaagaaggaagatgagccgaatactagcttcacaaccccagtggcacatattgctatcttcagatgcctgaggggcttaaaaatgctggaggaagcttcagcagaatgacagccaagatccttcattctcaaataggtaggaatgtactgacctatgttgatgatatcatagtgaaaagcacgaagcaagaaaatcacattgctgatttgcaagagacattngccaattttatgcaagctggcctaaagttaaatccagaaaagtgtgtttttagggtgaagaanggcaagtttcttggctgttattatcaaca

SEQ ID NO: 70565 - DNA, 474 bp, Zea mays
  unsure (1)..(474): unsure at all n locations
nggatagtgttctgcgatggttcttggggaaccttctgtgcacgagtggctgcggtcctagtggcaccttcaaaagtcaaaacatgttatgcagccaaactggatttcagttgcacaaataatattgctgagtacgaagcacttctgttggggcttcagaagctaagggcaatgggaataagaaaggccatcttaaagactgattctcaagttatttctggccatgtggacaaaagtagcaaggcaagagatccgaagcttgaaatatatctggatacagtttgaaggttggaggcttctttcgaagatttttctgtcaagaatatcccaagaggtgaaaatgagcacgcagatttactagccaaatcggcggcccaggggctccctctacctttctgaagtatttttgaaacaataaaggcaccttctgttgaactcatggagagagcagtgcttactatttctctggtacat

SEQ ID NO: 70566 - DNA, 472 bp, Zea mays
  unsure (1)..(472): unsure at all n locations
ntaaggaacatttctttaactgtcattttattntaatatatttttagctctataaattaagtttatggatcatgtgtatggctaatttgcatgttattatatctagtaataagatcttgagctagtaatatgcattttactgttgtggaattacaggctatactggataacaaaaagagctggggaaaaggaaggcagtggtctgatgaaagctaatgcatggcaccatcgtgcagatgctatttcatctgtcgttgccctagtangggtaggtaagagctttacaaatgctggtacttgccatgtcacaagaagggaactgctttagaatacgagtggtaggcatcttctcgtcatggattaagaaataatgtttctgtgcanagtgcaatcattgaaacaggttgttcctatattttatanaaattcaggcgcatcttctgatagtgcattctttcttttacttgtaata

SEQ ID NO: 70567 - DNA, 432 bp, Zea mays
  unsure (1)..(432): unsure at all n locations
agccactaatcgcgcatactccagttagcaccatanaggttgttgatgaaaaataggagtaagctgtcacggataagctcgcaggatactttatcatcactggagcctgcaaacagtcagtgcacaaagaggacatgtgtaaatctgcatgagcgatcgattaacatagacagtgaagtcctctcatcttcttgctggcaagaacacacacacagaaaaagaggaaaggggctcgctcgggattaatcgcaagctctaaaggttacctgcacgactagatagacagccaccaagaggcagtttcctatgaggcacaggacgccaagctgccatgcttctacaccctgctcgagcacgggcacggctggtgtgaaccaatcggnggtagcanggtggtaaggagcgctcgtccatgcggtgggcatgcttcta

SEQ ID NO: 70568 - DNA, 422 bp, Zea mays
  unsure (1)..(422): unsure at all n locations
ntgacgactctgggtggcatgttctctaacacttcgtctaatagtctgaanaagactacgaactaaacccactcaagtgcctcagttactacgttctattcatttctacaagagatgacacttactgcttggaacagactgcaactcactacacattaaacatgaataagatggagaatgtgctttaaatagaggtcgggatccggggatttagatcttgaatcatangaagtcttgttggaatgagatctctcaacattatcatgttgagagtgccttgaaggttctgtagagggcgatgaaccctgtgatctttcagatctgcttctctagtgtcttttcttgtttgtttgtggcatgttttcactgtagtgggcatgtcttctgctgtctctcagcctatgcaatctcatattcctctc

SEQ ID NO: 70569 - DNA, 438 bp, Zea mays
cctataaatactcaagctgactctcgtattcagacgaagctcctatgtggtgtctgtttcgtcatgaagaacacttcgagagaaaatgttatctaattctcaagaaatcttttcagacattcgaagctaaatggccagagtgcgctctactgctagaaatgagcgtgagggagactaagccgaaggtgtggagaccggtcctatctccgaagcaatgcagcggtccggattggtgacctctgaaagaatccctattgccgaaacagaacaaagctgttgccgaaacagaacaagctgctgccgaagcggaacaaggagatattgaggaagctgattctgatgatgattaccatatcgtcgtaccgagcaagcccatacatttggacttctgaaagtcactatctccaggctgatcttccaaatggtgaatcggctatt

SEQ ID NO: 70570 - DNA, 242 bp, Zea mays
tatgcacgatgcgggatagacaaaaacggactgttctttttagctggcccacaacagcctgaggcggttctggtggaagctcaaaccaacaaatgtgtcttatgagcgccagcatggcagtcgctccgcatcattgtcagcacacgagaaaatgcagctaagcccacagacaaaccacgctatcatgaggatcgcagcaccacgatcacaacaaaacgagctaacgcttactggatgcatgg

SEQ ID NO: 70571 - DNA, 431 bp, Zea mays
  unsure (1)..(431): unsure at all n locations
actcagcttcagcacaataatcttactcatcactgagaccctggagtctttctgcaatgaagnctgctaacgcctgagattggatcgaagatctatgaacataatcaatattaaatttattgagctctgcaacccattttccaacccttcctgtggcgtctctgtttctcatgatgtccttgaggggttgtgacnaacgcactattatatggtatgctaggaaataatgtcgaagcttcctggaggccattaacacaacatacagtaccttctccagctctatataattcctttttgatagactaagcactttcggagacgaaatatactggtgtttgcttcttcacttgtcatcttgcctttcttgtaccagtgctgcactaactgcagcttgcgaaataactacatataggagaaatggagcctctgac

SEQ ID NO: 70572 - DNA, 461 bp, Zea mays
  unsure (1)..(461): unsure at all n locations
tcctccagcattcttaagcccctcaggcatgcgaaggtatctatatgttctgctaggggttatgaagctggnttttggctcatcctccttcttcatccaaatttgatgatagcctgaataacaatccaacagactcataagttctgatgaagctgctgcatcaactatggaatctatccttggtaatggaaactcatccttcggacaggccttgttgagatcagtaaaatcaatacacatcctccatttgccattggccttttttaccataacagtgttagccagccattctggatacttcacctctctaatgactctagcgctgaggagtctttttactgcatttcgagcaccttcggcttgtcatcagacatcttccanagcctctgctttctgggtctgaaagatggatcaacattgagcgagtgttcaataacatccctggtgacgccacagagatc

SEQ ID NO: 70573 - DNA, 357 bp, Zea mays
ggacctatgaatactcaagcttcccatggccggagcctttcccaagccgcggctactgctctggtgttttccctgcgcgcgtccagccatggccgccaaacaccctctagctccttcctgtcgcgttcctgctccagcccagccgcgcgtctttcccgctcaccgcgcaccttcccccgccgtgagctcgcgctcagcagagctctgttcctgccacgtgttgctccagctctcgcgcgcagctgcgtcttcaagctcgatcttccttccatggcgctcgtctgactgaagttcctaacgcgtgggcctgttcttcgctcctctgcgcgcgcttcttcttgctgcgcacctcgatct

SEQ ID NO: 70574 - DNA, 283 bp, Zea mays
atggatccggataacgaaagcaatattctatttccagctggttatcccgaacacaaaattaggagaattcatcctaagaagtctcactctggctctcatcatgcctttatgcataagagtgagacatctagctctacgcaacccactcatgttaaattgcctaaaaagaaatctcctatcgcatcaaaagagcccacttgttcacttaagacctttgatgcttcatatgtgctcactaacacaacatgaaaagaaatctccaaatatgataggtgcacacaca

SEQ ID NO: 70575 - DNA, 415 bp, Zea mays
tgcatagtctacttcatcatcgctagactcatcattacttgattaagcatacgcaatagtacttcgagtacttaccttcttctcctttgccatgagacaggtgtgatgctcgttggggaagagagacgatctgttgaaggctatggcggcgagtccttcgtcgtcggagttggacgacgaacaatccgagtcccattattttccaaggtgtgcctcgcccttagccttcttgtaaaccttcttgttctctctcttcccattctttccttgttcctggtcactatcattgtcgggacagctagcaataaagtgacccatcttaccacacttgaagcaggatcgctttcccttcgtcttgctcttggtgggatgctccttgcgacctttgagcgccgtcttgaagcgcttgatgatg

SEQ ID NO: 70576 - DNA, 338 bp, Zea mays
  unsure (1)..(338): unsure at all n locations
tgaaggagagaagaaagagggggaactctggctactgctctatcactacaagntcaagaaacatttcaaagcaccctgcccagaatggctggaaacaatctaagtcatgtgcaccgaaattcttgggaattattcttaaaaagaagatccaattaatacagcagccttccgcacccgtccgaaacgaaagctaaacaaagtgatggatgccataggctttgaatatcccgaatttgaacgactggaccaaggtgccaaagggcagaaaagaaaaagagtatcttgcgctttgtacaaagacgaccaacatcaatcttagaagaataaaccaaagtctg

SEQ ID NO: 70577 - DNA, 330 bp, Zea mays
actataaaactcagcttcggacacagcaggttccttccgaccaccagctccaagaggcagaggcgccaggggcttctgcggaagaattggagatcaaccaagaagaatcttttgcttgttttgtggagagaacaaaggccataccaccaggatgtgccatgttaccatccagaagcaaaaggaaatagccgaagctgcagcacaacaaactcagccgaagcaggtcatgcacactgcttcgtatcattcgccttacatcccagagtatgtaggcaatcaccttgcagtttctgttgcttcggcgagtcaacctcaagcttcctggcaaca

SEQ ID NO: 70578 - DNA, 374 bp, Zea mays
  unsure (1)..(374): unsure at all n locations
ctaagctagcaatcgtatgcgcaaagctaatattgagtgagctggttctttggccagagagcgtgtcaaatgcgtttgcggtatggccgtatntatacgccaagtgcgttgaaaattgaaagaccccgcttgtcagtgaatgttgctattctagcaaagggaagggtgtttttcggaccttcggcgtaaagccttcgtccaggtcgcaatctaaatttattattntgaacaaattaatattgcgaggggctactgttggggacctttggcatccgaaggtccttcaaaacagaatttaatagtgtttctggagtataatgtgtgaacaggtatcttcggactcaagtcaggcatcacagtggatcagaataata

SEQ ID NO: 70579 - DNA, 418 bp, Zea mays
taacgacgatgagtgtgtctctcagctggaaatgaaggatattattctcgcgatgactgaagcttttaaaaaataccaggactctgcgacgacatcctatgaacagcttgatcgatgagttgctaaacttgttacacgcatggacgtactggaggctcgtcccccaccaccaactccagccctagctcactctcctgtggacgacgacgatgatgacgacgatgtttatgcaccgctacgacaacgcctcgcacgtaatcaacaaggtatgggaggtaatggtagacgtcgtcatcataattctgaaccagaccatgatccatttgctaagattaagttatctattccacccgtcatgggttcttatgatgcttgaagctacttagactaggagacgactgtagaacaaatatttaat

SEQ ID NO: 70580 - DNA, 424 bp, Zea mays
  unsure (1)..(424): unsure at all n locations
taatgagtntctggcactcactcangggaatcgtactgtgttgcttacgctcangccttcattgacctgtgtcagtatgctggataccacacagacactgatgagaagaagagggataggttcacgaggggccttagtactaagctccgtgaccgtctcaacaccgtcaggaccaacagttacaatgagttagtcaacatggccatttctcaggaagactgcatcacggccagccaggcagaaaagaaaaggaagatccctgtggcaggaccttcagctcagcctcagcgcttcaggattgtatcagacactcagaacaggggacctcagcagcatcaaggacgttgggtgatccggccacagcagtagcatcagcagcatgcacccaaccgctctcagccccaattagaggaacaacaatcag

SEQ ID NO: 70581 - DNA, 462 bp, Zea mays
  unsure (1)..(462): unsure at all n locations
ttncatgttgtgcttgaacattccaatccgagcccgcatctgaccgttgtgaccgccacaagttggtgttcttctgcagtccgaatccagcatgttcaaatccttatccctttcggtcttctccctgattcctaagcaaaacaagagtgcacgggtctccatggtctaaatatgatggacatgaactcaagagtgtaatcacctgatggttgagttgacgagcacgagcgcgagtaatgggaccagaaattggtacttgtattggtatagatgcatcagtagtgtggatgtcttcatcattctccccttcttgcatttgagtcgccctcgactcaagctcaacttcctctctcaagtacggctntaaatctgcaatgttaaatgtggggctaaccccatagtctgcacgcagatctagcctatatgcattggcgctaatttctctacactttaacggccatc

SEQ ID NO: 70582 - DNA, 386 bp, Zea mays
  unsure (1)..(386): unsure at all n locations
atgtgaggaagaagaaanatatatatatgatcacgtctttttgttatctcagctttcatagatactaaattttagagattaaaaataaaatcagagaatatgaatntaccgcttaatactagagaaaatgttctgagtgattagaaaatccccaaaacatccttgagataactttacatatttaataaactttttgcattcataaacactatgcaatggcatgaatgcaacaatcgaagcttctatatgagtttttactactctaaaaacttatatatatatataataaaataactctccattatttagaacaaagaggagaaaagcaagtaaagaagagggtaacacctgatattggtggatataagataagaataattataccc

SEQ ID NO: 70583 - DNA, 177 bp, Zea mays
atgcttattatatgaacattgttattctaggtggtccctgcatatatttattgggccaatgatggccatgggaaaagttgtcttaattgatgcctagggcctaacctctatagtttaagaatgacttccgggaggaagatgtcgaagaacatggcctgctcacctatggctctaatt

SEQ ID NO: 70584 - DNA, 399 bp, Zea mays
tcaactgaaaaattagacacgggcgaagaggggcttttttgtgtgatttctgctaaaaatattcctcgtggagaaaatgaatatgctgatttattagccaagtcagcaacacaggggtttcccttaccttcggaagtatttttcgaaacaataaaagcaccttcggttgaacttcttgaaagagcagtcctcaacatatcccctgtctatagtgaagactggagaactgagatcatctctttccttcagggtaactttctttcagatgacgaagcttataacaggaggatagaggcaagagctctaccatatgttataatagaagaggaactataccagcgttgggtttgctctccgttactcaagtgtatattcagaaccgaatgtatattattaatg

SEQ ID NO: 70585 - DNA, 470 bp, Zea mays
  unsure (1)..(470): unsure at all n locations
ngagtgatgcttcttaggtcattaacaatcttgattaactcatggtctccaagggtcttatgttctccttaagttattaccacttgtggtcacagtccttattaccaaagtgtgctctaaccatggtaacacctgaggtgttacaaccctcccccttaaaggaatctcgccccgagattttatgcagagtcctctagagggtgctacgaggcacgcgggtgtgctactctttcttatactcaagtttctcttgttaactgctctttgaatgccattctctttgcaacttcagaaggaagccctttntaagctaaatccacaacttagactatcctntgtatctaaggttttcttataattgaattcaaagggcacgtggnggtggtgttttggggtacgtacccacttctttgggcagaaagtcgaggaagcgagagcgtataaaaatctcaatcgtccatgtagcttct

SEQ ID NO: 70586 - DNA, 336 bp, Zea mays
acatgttatgccgtaaaacctgatttcaggtgcacaaattatatttctgaatacgaaactttgcttttggggcttcggaagttaaaggccatggggataaaaagggcggtccttaaaacccattcccaagttatttctagtcatgttgacaagagttgtaaagcaagagacccaaagcttgagaaatacctggatacagttcgaaggcttgaaacttctttcgaaaggttttctgtcaagaatattccacgaggagaaaatgagcacgctgatctgctaaccaagtcagcggcacaggggctggccttaccttctgaaagattctttgagaccata

SEQ ID NO: 70587 - DNA, 356 bp, Zea mays
  unsure (1)..(356): unsure at all n locations
ctaagcttcacagcnatccaacacacagttgagtagggtattacgctccggtggtctgaaccactctatatcctcgcgtgttcctgagttcatcgttcatctaccaacgagcaaaacgctaaagccccctcctcatcttatgatttagggcgggtgcactccgccacccggccggagaattccctctccgacatatactatactatgatgctatatcttcaatttgattcttttatacctgctacatgacacttgctaccaatatgtgtcttttccccatgacagttatgagactagttttgattgaatcaccttcatattttcatctaaatcattnttggtgtatctctctatct

SEQ ID NO: 70588 - DNA, 363 bp, Zea mays
  unsure (1)..(363): unsure at all n locations
gacctatnaaactcagcttnctgagaggaggcataagcatgagttctcttctcttactctcccacanaatggggtagggagaggaagaatcgaactctactggacatggctagaaccatgcttgatgagtacaagacttcggatcggttttgggccgaggcggttaacaccgcctgctacgccattaaccggttatatctacactgaatcctcaagaagacatcatacgaactcctaaccggtaaaaagcccaacatttcaatatttagagtccttggtagcaaatgttntatncttgtttaaagaggtagaacatctaaattgctcctaaactgtagaacgtttttacttgattgattaaac

SEQ ID NO: 70589 - DNA, 454 bp, Zea mays
  unsure (1)..(454): unsure at all n locations
gaccaccnaactcagcttccactctgaacaactcgctgaacgaaatcgcttttgcaatataacctgacctgaagccttcccgatagtgttctgaggctgcagtattccacattgcccagcatggacctctcagaagtgcttccagtggacgggagaacgcatttcatgaggatgcctgacgcaccccttctgtataatatctccccaatgagtgtatagtgagccgactgcctggcaatgcgctctgccgagttcttatcgcctggatcttcttcattctttatatacttaatgatacggcttctcagtcatcagagtctgactcgggatgatctatgacgttacactcttatgtatgatccattgagatactcggctgtagaatttcttgcacgaagacttcgggtgggacctgaattcaactggatcctaacttggacagtcatcagctgct

SEQ ID NO: 70590 - DNA, 409 bp, Zea mays
ataactggaatggaaggcagaacatggaatagtactgtttgtttttgaacgtgcattgaaattatgggatcgaatggagcatttttggctggtctgggcatttcaccgagcacgtggcgtgcgacgttctaagattttggtgaaatggctaaattacgcggtgaaacccttcctaaggagctaagaaccttgcaggatgtttgagaggcatataggaacctattcatgcacttggattcacaaattttgataggaattggaatgggcaacaaagggtggaagaaagaggggctggacagagtgacagagaaatagaggaaacaacagaggggggaggagcttaccgagagggaaaggagcagagcctgtacttgatggaatcaccgaagcaccaccgtcggcgatcacc

SEQ ID NO: 70591 - DNA, 501 bp, Zea mays
  unsure (1)..(501): unsure at all n locations
acactacacnaaactcaagcttagtgacgagcttancanaggagtggaccaagcttatagactcttaattcttgacctggcaggcatcgtccttcttgggcaagagaaggatgtaggctgagtttagcagatctaaattcacccattntctgcttcaaacagctgcagcagcagccataatttccccttttatgatctgccagcacgtcttatagaatttcccggtaaaacaaccattcgggccgggagccttatttagaggaagagataggactgtttttcagacttcatcttcagtaaacgggctgtccagcgatgtcagatcatgggcagggatgtcaagctgagccaggtcaatggtgtgcgcccggtcacttgtatttatatgttcaagcaataaagaaactctctcttgggtctcattctcttacaatattcaaacatacaaaattgcaattttagcttcagcgagcgttgtattgttcaactacgacatctcac

SEQ ID NO: 70592 - DNA, 303 bp, Zea mays
  unsure (1)..(303): unsure at all n locations
acacgtgatatgtctaactaatgtgtttttttataagatagaccttgtgcagctagtcaagcaggcaaacaggtgggaagctctcatcacaccaaaaatgtgatgactacatccagacctttggagatgcttcacatggacctcttcggacccgtcgcctatctaagtataggaggaagtaagtatggtcctgttatagttgatgatntttcccgcttcacttgggtattctttttgcaggataaatctgaaacccaagggaccctcaagcgcttcctaaggagagctcataatgagtttgag

SEQ ID NO: 70593 - DNA, 369 bp, Zea mays
  unsure (1)..(369): unsure at all n locations
ttaacacaatgaagnggagatatttggatttgcaatatatgatttattattacccacattgtgggaagatattctcaagtaaatgcatcttccagttcattagctgttcgcagtgcggcagtggcgatattttaatatttattggcatcattccttctcttctgttctgttgctttttgttctttgtttagctttgccgagttccttttgccactgtagaattgtctacttcattccatgctacggtttccattataggttccctttgtgattttcttattgtgaatccttcatttgcaagttatagttatgggttctcaatggctaacaggtgcaatggggattcatatgatgacagtgttattaact

SEQ ID NO: 70594 - DNA, 438 bp, Zea mays
taccttcagtcttatgtaactaagtgttagaagtcttttatgatagggagatataattaactaaagggggtaatcataagaaatacataagatgaagaaagttgataagtgcattctatgtcatgagcatcacgtttattttatgacacactgtacctcatgaatagtatgatataagttgtcttcatactttgacccatatatgtgcttttggcatttgagtacaaaagtgttattttatgaaatgcacatatttcgggggaggaaactatatcataggattcaaacatttgtttatcaaatcttatgtaagctttaaatgtgttgtcatcaatcaccaacaagggggagattgaaagtgcattcatcccttttgtgagttttggtggattggataacaacacatttaaagggctaacgagtttgctaagtggtgaa

SEQ ID NO: 70595 - DNA, 398 bp, Zea mays
tgcacaatgcacgagtgctcctaacgactgaccccctcctccctcacaaccatgagggtgccagcaggagaacagctacagggccactgaagggccacccatgtacggctatgcacgaccctatgaatggcgctagaggaactatgccacccaagggtcactggccgagatccctccagtagaacacaagtcctcattgtaaagtatggcccttgaactataaaagagaaggaccccctccctttctagacacacgagcacaccagttgtagccctcagcaatactacgatcagtactacactagacaagggtgctagcctaaaccagtataacccaccgtctcaatccaccgctcgagttccagcgactcaccattcggagtgaagtcacgctaact

SEQ ID NO: 70596 - DNA, 327 bp, Zea mays
  unsure (1)..(327): unsure at all n locations
tgacagcaatgcatctaggctntcatcatgtgtcggagagccccataatcttaaaggagttgggacattcatggtcgaccacatccactgcctaatttcaaggggactaaattcttgcagatcaatagaagctacaagatcgcaactaataaacggggcatccaaaccagggaatcgaggagattaatagaatagagccccctcacctttattattatctagcatagtctcaatgtcttccaataattggtctttntttgtactggccacaggttcttcgacatttgtcaacagttcatccccacagtttgtagtgctttcagtcat

SEQ ID NO: 70597 - DNA, 350 bp, Zea mays
tgccagtacttgtcaaagcaacaacatctaccagcacagcatctgcagaccataccagtaacttggccctttgcatgctggggactggatatgattggacctttcaagaaagctcaaggaggatacactcatgtactggtagcaatcgacaaattcactaaatggatagagttcaaacccattgcttctttaacctcagctaaggcccgggaattcatacaagacataatattcaggtttgggataccgaacaatatcataactgacctatgatccaacttcacaagttcagagttctttgagttctgcgagccaaaaagcattcagatcaaatatgccttaatagcaca

SEQ ID NO: 70598 - DNA, 453 bp, Zea mays
  unsure (1)..(453): unsure at all n locations
gcttctatcatcctccacatcctcatgtgtgctggcaagagcattgtcattttccacacaacatatgtgggaatcgaaatgggaatacaaacctgttcgagaggtggattcatcgtttggtatccaacattcactttcttcttcttccttcaaagggttagctctacaaggactaaatgaagtanaagcatcatatgaactaatatgtttggactcattaaatctacttttaattctagtccaaatatcatgcgcatcatgaataggttcatcatacctaattatgaaggcatgataatcttctttgctaacagaattaccttagatgtccaaagcaagataatataagcgtaaccatcttcgatcttctcagaatatttttttatatagctagaggtatatactcttgctaaaattgtttattgtggtcttgacctaaagcattatcaccta

SEQ ID NO: 70599 - DNA, 480 bp, Zea mays
  unsure (1)..(480): unsure at all n locations
tattgcgtccaattaatgcaagggccaagggaaggacgatatattctagtgaacanagagttctaaaactgggtgcgaaaggagaaaagaagaagacttgaaagtgccaaaaatgtggcattgctgatggacacaacagtcgaacctgcttgtctatagaggaaattaaggttaaattggctagccttgccgatagaaaaagaggatgaccacctgcgtctagaaacaaaaattcaacaatggccccgcagtggaatgagacatccacatcaaaaaaacataaacataccgattctgaagaacatggttcggatgacgataatttggcaggattgtaaaacatttatacataaataatggatgatattgaaatgttatgatcatgatactatctgatgagtatgaatatttacgctaaaagctcactgtatggattatatcttataatgcgacgcacatatttggtatgagctatgctac

SEQ ID NO: 70600 - DNA, 491 bp, Zea mays
  unsure (1)..(491): unsure at all n locations
acactactacaaactcaagcttgattcaagtgcatcccntntcgttggcgagagtagctatatatgttnttacattagccatttctttttctttatcctttatagttattttggctaaagatatttccttagtcaaaacctcaagcatctcatctgtattggaaagcaattcttgaagctctangtatctctccttttcaaggatgagcaagtcttcttgagcatcgagagttgcttatcttttatctagcttctccattagtttagtgattacattgtatccatttaaaccaaaatctttaatcatcttatttttcatagcaagttggtcttcatcatcattaataaagtcatcattaaacaaatgtaccttgtcttcttttgtcatgaggcaagttggagagtacgagtcgtcgcgaacgctggngaatggctgccagctngaagtacattggatggcgatgttagcacctcttcctcttcttcgagct

SEQ ID NO: 70601 - DNA, 316 bp, Zea mays
cccgcgaccaagagatcaaactctacgagatctactcaagtttattaccctaagcctctggctggagaaagcaagtgtcctctgacccattatgtcctatctatttataactcactgtcctgcactacttaattgaaaactaaggatttactaactgtctattcaccttgtccatgaattaccttttgggttactatggttagctacatgctttcggcttacatttatcaatgaacatgatgagatacaatgatgaactatggtcttattctggatatgaagatatactttgggcatttaacgggaatccggttgt

SEQ ID NO: 70602 - DNA, 466 bp, Zea mays
  unsure (1)..(466): unsure at all n locations
tgtacagttctaatgagcttatgatctgtcatgactaatgtaatctagaagtttatgaagttgcagtgctccagcaagcagccggtatgttgttgaccatttacaaagacacaaactcggtattccatcccctgaaatgaagtgtagaacattccagctggtaatctatgctgttccagtaggatacaatgagatgatcatttctaccaagtatccgacatttatttcctatcctttagggacaattcagttataagtttgagggtggggcttatctgagaggtgcctcagttagcctggcatgccactcaatgatcagttagctaccccaatcagcaggtgtcaaatgatcacactataacgccgcgcatcatatagaactatgatacatttctacatgatnttacactacactatatgagatatnggtttggactacacatgaagaagacatgtttgcttggat

SEQ ID NO: 70603 - DNA, 331 bp, Zea mays
  unsure (1)..(331): unsure at all n locations
ctggaaagccaacactcttcgatagagtactgacaaccttcgtttcagtccggtcccggagacatactaagctttcttcgtcaacaccaccgaagagcaatgctcctggttgatagacgcatgatatcgcataatcccttagctcttccttgtcagccttagacagctnttgaccaagtatgttgtgaaaataaaatcctcctcctccgaagtatcttcggcgatctccttctctatcccgggcactagggccagagtctcttcggcagctgtagcggcttcttccgtggccatgttcaaaatcatcttatctatatcagaaaaagtgccc

SEQ ID NO: 70604 - DNA, 467 bp, Zea mays
  unsure (1)..(467): unsure at all n locations
taatgcgcctcctaanaaactatctaaggttgttagggctttactcccatgcctcaagataacgagggttacattttgtaccctgccggttatcctgagagcaaaattatgagaattcattatatgaagtctcactctggccctaaccatgcatttatgtataagggtgagacatctagttctaggcaaccaacccgtgctaagttgcctaagaagaaaactcctagtgcatcaaatgatcatgacatttcatttaaaacttttgatgcatcatatgtcttaacgaacaaatccggcaagatagttgccaaatattgttgggggcaagcacaaggggtcaaagacttgtgtttgggtacccaaagttcttgtatctaatgccaaaggacccaacaccatttgggtacctaaagtcaggaactaaacatgttctgtanggttatgcatccggnggctcaagatggatc

SEQ ID NO: 70605 - DNA, 332 bp, Zea mays
ttacggacacttaaaactcaagcttggaactatgcccatatccaatctgcctgagctggaactataagcgcttgccagatgcacccgttccggtcgaccacgaccagcacacaacacaagactttcctagttatttagccaatggcatcccataccaccctcatggtagcactgttttcccgggtggtcactccatgttccaattaatatgcaataatcttgtttaactatcgagttaacaacaataaagtaaacttaccatttggaacattaatatcataaacaggagtgactgcataaatttaaagttgtagcaatagcataactacttg

SEQ ID NO: 70606 - DNA, 420 bp, Zea mays
ttgggaaatataaaaccactgtactgataagttgatagtatacttcccttcactgaatgtgtacctgctggcttttagattgtaatctaaactttattattagttttttttctcgaaagcgcaagagagctgcgcatcattatattaagaaaggaaaggtccaaagtggaccgaattacaacaccaagaccaaaccctcaagcctcccccacaagggggaagcctgacgggccctacgagaccctatttaaagcgacaataattcccaaactgtctaaatgcttcgctcccgccttactccaactaataaactcatctagaaacaacctctttgtcaaattaatggaagggctcactccatcaaaaacaaccctattacgagagagccacaagcaccaagctccaaggataatgacacta

SEQ ID NO: 70607 - DNA, 310 bp, Zea mays
  unsure (1)..(310): unsure at all n locations
tgatggtcaagtcaagaggcangccccaatatattttgtatccgacgttcttagtttatcaaagaaaaattatacagagttggagaaggtactgtatgctgtcttgatggcctccaggaagcttcggcactattttcaagcttacaacataattgttccttcttcacaacctctgaaggatattatgaggaaccgagaagctactggaaggattggaaaatgggctgcagagctcaatgaattttgtattgaatatgttcatagatcttcgattcagtcccagacgtnggcagacttcattgntgactag

SEQ ID NO: 70608 - DNA, 360 bp, Zea mays
ctccctgttggaagccatgccatccttaatgccttggcttcttccactataaagcatgctacgagccaatttaaatttctcggtttctagctcatgctccgccaatttagcatctagtttagctatatgatcattttggtgcgtaatcatagcaatgtgatcatgaatagcatcaatggtgatatctctacatctagtgcccatagtaacatgctcaacggttgatgtagagggtttgctagatattacttcaataattctaacatgtaaaacgtctttctcatctctaaaaattcgaaatgggaatattgcaaacatctaagtctctagcccttagtattaatttttcattcccaatct

SEQ ID NO: 70609 - DNA, 408 bp, Zea mays
  unsure (1)..(408): unsure at all n locations
tgngactaaactattgttctccaccacatgctatacactatcttattgccaaactgaagtggtgaatcgtacattgtttatgctgctgcgaacaatggtaaacaagaacttgaaggattgtgatgaatgtttgccacactgtaagtttgcctataacacggcagcacattctacaactaacttatgccccttcgaaattgtatatgggttcaaacctattgctctgatagatttgttgctccttccattgcaggatagaactaatatggaagctttcaagcgtgctgcgtacataataagatacatgagaagaccaaggaagctatttgagctcaaagcagtgcgcattgcgttaagcatgaacaagcataagaagatagtgttatttaaaccggcggacttggttgg

SEQ ID NO: 70610 - DNA, 370 bp, Zea mays
ccacaattgaagtccctaaacaaaacctatgaaaataataaatctataatgagtaaactacagtttgtctaaatgttgctatctctaccacaaagcataagtttcaatcccaaataatctaactaggaaggagagattgaaacttaataacttaatgtaaatgtggaaggtaaagtgcaagtcgataaagcacactctagtggatgacgcaaggtcccgactaatcctcgatggtgcccctacgaaagggtagcccacgcgagggccaatcacctcggtcgaataactccgtagagagtcgtgggccttctccgtgcgcatgtggtgctccgctttcagctcctctcggacgctccctactcgctccact

SEQ ID NO: 70611 - DNA, 414 bp, Zea mays
atatttactacgatgtagattcattgttatggataggggcgtatactacacatgtgtacgttgaatattaaaattcccactcaacgcaatatgtttttttacttctttttaaaccaagagcaattaacaatagcaaccttattcactgcatctctctgtcgatgttggtagagagccgaacaactgcaactccaactgctttatgggcagcctaactgcttgcgatataagatgacagtgcttctctagaatcacctaatattgatcgcttatccttaattgcttatcatgtcgatcgacgtcctatatgacacgtataacacgtgcgacaaacctatctggatagccggatgggagatatagctcctgcactttgttcggttgagccgctaatgcccgcttttcaataaacat

SEQ ID NO: 70612 - DNA, 360 bp, Zea mays
  unsure (1)..(360): unsure at all n locations
acataaaactcaactctaacattatgngacataaatntgagatgagaccgagactatgttttagaaagaaacgaatccacaacaagcccaaacgtataccaatgagattgggggctaatataagagattggacgactcctactataaactatttaccatccaagcgccgaaagtgactaatatccttggtagaatgtaattatatccgatttgcatacatgccataaccaagaaccaccaaacgcttgccgcttaagtgctcggattctgatcaaccaaaggctaatatgggagacattcatgcttattccttgcatcacaagggcaacgattcatgctggctgctacatatcatcttgc

SEQ ID NO: 70613 - DNA, 327 bp, Zea mays
  unsure (1)..(327): unsure at all n locations
ttggcatacttactcgctgcttcgtgctgagccactgtctttcaggcagcaatgaagactgctaacgcttgggactgaatcgaagatctatgcacataatcaatgcaaaactcattgagttccgcagcccattttccaacccttccagtagccttcttatttctcataatatccttcaatggttgagaagaagggacaattatattgtatgcttggaaatagtgccgaagcttcctggaagccatcanaacagcatacaggaccttcttcaattctgtataaattttccttgataaactaagaacttctgatacacaggatattggg

SEQ ID NO: 70614 - DNA, 337 bp, Zea mays
  unsure (1)..(337): unsure at all n locations
ggacacaaaaactcagctcgtaaggttcttcatccncacatgagctaaatggcgatgccacagcctgcccatgctagtcttagcaattaagcatgcatctagaccggcctcctcttttgcaaaatcaactaaatagagtttgtcgtctaatacacccttaaaagctaatgaaccatcacttcttctaaagacagacacatctacatttgtgaataaacagtaccatattacaaagttgactcacagacaacaagttatatccaagtgactcaactaaaaacacattggaaacggagtgctcggatgaaatagctattnttcctaaccctttcacctt

SEQ ID NO: 70615 - DNA, 431 bp, Zea mays
  unsure (1)..(431): unsure at all n locations
acctataaaactcagcttctgagcagtgtacgtgttntgctgcgaagacatggtgtanctaatatcncttggcattgaggttcatcatatttcctttagacttctgttaactcaacgcaaatgtatacgagatctcttaacacgtaccaatatggagaactccaaggctgctcctacaccgatgttacctgctgagaagctctctctacatgatggcacggaacttcttcctgaagatacaactcggtacaagagtgttgttggcacacttcagtacttatcttttacaagaccggacatcttcttctctgtaaaccgggtttgtcaatctttgtcggcgcccacaacatcacattgggctgccgtcaaacgtattctttcgtacctaaaccgatcacttgtatatggtctggctatcaccaagacacaca

SEQ ID NO: 70616 - DNA, 402 bp, Zea mays
  unsure (1)..(402): unsure at all n locations
aatctcagcttctaagggagagcacacncnaggactaacaaagtggcatgttgttaaagacacggtntgtagcgcatgccaagcaggaaagcaagttggcactcatcatccacacaagaacatcatgacgaccgacaggccgcttgagctactccacatggatctattcggcccgattgcttacataagcattggcgagagtaagtattgtcttataatagtggatgactattctcgctccacttgggtattctctttacaggaaaaatctcaaacccaagaaaccttatagggattcttgagacgggctcaaaacgagttctgcttaaggaccaagaaaattagaaacgacaacgggacggatgtcaagaactctcatatcgaacgctttcttgaggagga

SEQ ID NO: 70617 - DNA, 313 bp, Zea mays
  unsure (1)..(313): unsure at all n locations
tcagttntataacgtatccgaagatgaaagatcgaaccttctttaagatagaatgaccttttagtccataagggtctgagtcattgttgtaaacttttataaggggtatgattgtaattccttatatgctgtgtcctgcgcctataaatagtgaacaatattcctttactgttcacacaatcctgtaattgcaaacgcattgctctggaattattgttttctgccaaagccaaggtataaaaatgcctaaacaatatgtttcgatattaaattctattataaaaatgtgaataatgtctatttaaggtttctc

SEQ ID NO: 70618 - DNA, 370 bp, Zea mays
  unsure (1)..(370): unsure at all n locations
tgagttatcgtattacagaccagacagagagagagtgcttattatnnttaccanacacaccaaggaggcacaaactcctcccgagaagctaaaagcataagatactaagtggaggaccgaatcctcccacacttcatgcatgtctttcctctattggcaccaccttggagcataagcaacataagactgtcgcttcctcacctaaaaacaacaaatggataaaccctgagtatggaatactcacccagttttacccgactaatgaaaagactctcaacggcatgctggataaacaagagcaacgagaggctttagcacaatcaacttatagttatgcaaaagaagcttactaaagtgaggtcttactttc

SEQ ID NO: 70619 - DNA, 440 bp, Zea mays
  unsure (1)..(440): unsure at all n locations
acaactgncggagctatcgagtctttgctgacttcctcttctttcgaaggagactgagagccgtcttcgtcatatagcgtgcggggcgccatcattgcttgtctggcggagcgagctatatgggacgcctgtctttgttcccgtagcttgagtcagattggggtagggtaatgatggcgcctcctgttgacgtggtcggtccgtgccctatgttgggcgatgtggaggctcctccgaggtcgaggtcgagtctgtcttccgaggccgaggtcgagtccgagcccctgcgtcgggcaatgcggagaccgttggctgaggccacggctgagtcctagccctatggtcgggcgaagcagagttcgtcagttttcggagctgagctcgagtctcgagccctgggtcgggcggagcggagttcgtcgtctttctggactgagccc

SEQ ID NO: 70620 - DNA, 364 bp, Zea mays
  unsure (1)..(364): unsure at all n locations
tgtgaagattcttcattccaacatgagcaagtcgacgattccagagccaacccatgttagtcttaacaattaagaaagtgtctagttcagctttgttatcattaaaatcaactaaatataactgaccatctaacactcccttaaatgctattgaatcatcacttcttctaaaggcagtaacacctatattagtgaatagatagttgtagcccattttacataattgagaaacagaaagccaattgtaatctaaagaatctacgagaaaaacattagaaatggaataatcaggagatatagcaattntactcaaacctttgaccaaaccttgatttccatccccgaatgtaataactcgttgggg

SEQ ID NO: 70621 - DNA, 431 bp, Zea mays
tggtgccaatggaaaagcaataatccttgaagtcttggctgtcaaactgcttgtcgttgtcaactgttagttcggacggtactccgaagcggcaaacaatgtgttgccaaaagaatttttgggcagtctttgatgttattgtggagacagcccttgcctcgatccatttggtgaagtattcgacggcgacgaaggcgaacttaaggttcccctgagccgtgggcaggggcccgacgatgtctaggccccagcgctggagaggccatgtgtgggcgatcagctatgtaaattgcgaggggctgcctgatcgacgagaaaacttctggcaggcttcgcaagaccttgtgacccgatttgcggtgcagatcattgctggccagtagaaatcttggcggatcaccttatcagctacggcccttggccttgcgtga

SEQ ID NO: 70622 - DNA, 355 bp, Zea mays
acccaagatcacgaagagtatgtgcaagcgtatgttcgaatattcctacgcttgagggcacaagcgccaacagtgcccaatgaaaatgtcattgaagccatgaataatgggcttctgacgggaccttcaacccaatacttcgccataaagccccctcagactctatagaaattgctttataagatggacgaatacatccgcgctgacaatgatcttcgacagagaatggaggaagcttacaggttctccgaaatagccaggggcttctgagggagaattcataccacacatgtcagatcgatttatttcactcagaatgatgacaggggaaaccaacaacagaagccgcaatatt

SEQ ID NO: 70623 - DNA, 423 bp, Zea mays
gaccctgcgcagctcgacaagcagggaaactagagggaaactctcatcatgccaaaaatgtgatgactacatcaagaccctggagttgcctcatatggaccttctcagacccgtcgcctaactaagcataagaagaagtaagtatggtcttgttatagctgatgatctttcccgcttcacttgggtattctttttgcacgaaaaatttgaaacccaagggaccctcaagcgctgtctaaggagagctcaaaacgagtttgagctcaacgcgaagaagataaggagcgacactgggtccgaattcaagaatcttcacgcggaggaagatcttgaggaggaaggaatcaagcacgatgttctcgctacctacacaccacaacataattggtgcagtatgagaggaagaacacggacccttataga

SEQ ID NO: 70624 - DNA, 346 bp, Zea mays
  unsure (1)..(346): unsure at all n locations
gcaataaaactgccaagctataactgtataacgaactgtgcacataaacaacgtataaatcattaagctacacaacccatttatcaatttcgcctcctacttctttatatctcatgactattttcaaccgctgcgaataatgaacaatattattatatgcctgataataatgccgaagcttcctggatgccattagaacggcntacaacaccatctccagtactgtataatctatctttgagacactaacgacctcagacacaaaatatacttggatcctgctacttgattatgccatcaaacttactctgcacaagagccacacctactgctgagtgctaatctg

SEQ ID NO: 70625 - DNA, 189 bp, Zea mays
agagacggcgaaagttacgcgttccctccatggttagaggctggaccgtggagttactgcgctcttcgttggcgcgaacccaatctggtcttgagaaacccaatggcgagatcgacactatgcaaaggttaacagcaacatatgtcgtgtggttggagatccccaactggcgtattaatcgattccgat

SEQ ID NO: 70626 - DNA, 395 bp, Zea mays
acacaaaaactaagcttataaaggacggaaaagtgctgtctaatggtctttcaggaagagtctatgtgagcaacctcccggtttgaaatatgagaccctaaccatgttataacctcaaggcgctctatggctcaagcaaccccagagcatgttgaatgccaaagattttttatcactaaggcttaaagttgaaaaccgatcctactctcttactaaaaccattgcaaagattgttgatgccaattatgttgagatattatattgggctataacaatcacttggaaagttagaggacatgatcttaatctaatgctatatggggattgagatttctagattaagtcagcaactcaaaggccctcataccaacaagacttaaactatcacagttgat

SEQ ID NO: 70627 - DNA, 373 bp, Zea mays
  unsure (1)..(373): unsure at all n locations
tctatagggagaacacattctaggactaactaatgttcattttgagaaagacaggaattgtagcgcatgtcaagcanggaagcaagttggagttcatcatccacacaagaacatcatgacgactgacaggccgctagagctactccacatggatctattcagaccgatagcttacataagcatcagcgggagtcagtactgtctagttattgtggatgattattctcgcttcacttgggtattctttttgcgggaaaaatctcaaaccccagagaccttaaagagattcttaagatgagcttcatatgagttcggattgagaatcaaaaagattagaagcgaccatgggacagagttcaataattcacaaatt

SEQ ID NO: 70628 - DNA, 264 bp, Zea mays
  unsure (1)..(264): unsure at all n locations
actaagctgcaaacttgcaagcaaaacacctgccacacattatctgtttaccataccagnaacttggcccttcgcgtgctggggactggatatgaatggacctttcaagaaagctcaaggaggatacactcatgtactggtagcaatcgacaaattcactaaatggatagagttcaaacccattgcttctttaacctctgctaaggccgtggaattcatacaagacataatattcaaatccggataccaaacaacatcataact

SEQ ID NO: 70629 - DNA, 412 bp, Zea mays
  unsure (1)..(412): unsure at all n locations
ttatcaaatggacgngaagagagcctggctcaatggacctttcaaggaggagggctatgttgagcaacctcccggctttgaaaacagtgagtacccttaccatgtttataggctctctaacgcgctttatgggctcaaacaagcctcaagagcatggtatgaatgccttagaaatttccttattgcaaatggcttcatagtcggcaaagccgatcctactttattcactaaaactcttgacaatgatttgtttgtatgccaaatttatgttgatgatattatatttgggtctactaacaaatctacatgtgaagaattcactaagatcatgacaaataaattctagatgtcgatgatggtggagctggaataattcttatgatttcatgtcagcaactcaagagggcacttt

SEQ ID NO: 70630 - DNA, 386 bp, Zea mays
  unsure (1)..(386): unsure at all n locations
aacaaatccttccaacgatgttgcccgaattcacgactttctatcactcgggcccgngccagagatcttaacttcgtcatgctactgaagaatgagggcccagaagaatagactaccagcccaactgcgtgccatattggacgacctagggttggccgccctaggggctgcgccccctctatttatccaggagctgcgcctcctttattctcgagttttgatatacgttagccttatctactctcgaacacgcgccaatctgcgcttgtttcgtgtattcaaaactccaccctcgagtaatatattagagtgctcgcatcttggtcttgttcgttcttcattgcgcacaggacacgattttcgtgatcaggccgatctctcatcag

SEQ ID NO: 70631 - DNA, 342 bp, Zea mays
  unsure (1)..(342): unsure at all n locations
tgctatattattcccaacaatgaatctgcacctaggggttgttatttatcacgatccaaatgcttcttcacaaaaagttatagcacataaataactttagttcaaaaataaatagaaatggagtctaatcctaatttggttcgattcttaaaattcatagtgttaaatctagataccattaccgtccaccaaacctatgtacgtataatatgcatctcaaggcgaacagataaatggtccgtgtgactaatgattcaaaatccggctgcatnccgttaccgtctgtatctatcagcccagacctaatcgacccactgccactatcctggcatgtatatatgc

SEQ ID NO: 70632 - DNA, 335 bp, Zea mays
tctaacaatatttgaagtctatcgtcatcaactgaccctcgaagcaattatgaagctaaatatctacttgtgggccgtgagataccaatgtctggaacctgaagccaaaagtttttgcaacacacacgatatatcatactagacaaaaccatggcgtaaggaacagaatcacaataatattggctgctacagatctcgatctcggtctgggtcaagctgccccgtgccaacgtttcaagagatggcccggcgactggaagacaaaatgtgtttatgtgaagaatgacctgaacgccccgaagacattatacgataaatatgcgccctatttgcaa

SEQ ID NO: 70633 - DNA, 399 bp, Zea mays
ctttgcaattacacattggaatgctgtttgtgatcaatatgcaagatgggctgaactgtatatcattgacttgcgcttatctcttttttatcctttacagtatttatgtatatgtgttggggcatttggcacgaacatctctgatgatgaacgtcttatcgaccacctttccatccaaaacggatcataattcagtctactcatgagttgctcaacgttgacataccccgtgcttctgcggggactgttagacccgaaacaacgcatgctgctgatgaagatgatgactttacacacactatttgtagatgatctagtacgattatatgctctgtttcttatacttgtcaaaactatacgcatcatattagatatcacgtggagaacaagcttgaaaat

SEQ ID NO: 70634 - DNA, 367 bp, Zea mays
  unsure (1)..(367): unsure at all n locations
aactcaagcttcaaagggagaacacatctggagacgaagagatgttcattttgagaaagacagggantggaacgcatgtcaagcaggaaataaagatggcacccaccatccacacaagaacagtatgatcatagataggccactggagttactccacatggatctattccgcccgaatgcttacataagcatcgacaagagaaagcactggctaggaattatggatgaatatactcgcatcacttgagtgttctttctgcaagacaaacctcagacccaagagacactaagggattcttgagaccggctcaacacaagctggactgagaatcaaaagataagaagccataagggacggagtcaagac

SEQ ID NO: 70635 - DNA, 472 bp, Zea mays
  unsure (1)..(472): unsure at all n locations
tcgggcttggtcaatatgttggcagcaaaacagtgctatttcaatgaatgttgtggtaacttcacacctacccgtctatttatatagtgccgcatgtgggaaggtgaatcgtcaaggtctcccgcaccggacgaacagccacccacactcactgaacggtgggccacagagtccgagaaggtgaatcattagtgcgcgcataactgctgcaagatggggccacctcgcgcgtggattattttaatcgtttctcgccaacgagctcatagaaggtgttttcggatcttcggcatcccgaagcctagaagactttttcacggatcaagctcgttacgaaaaacgatctatcatcgcgaaggggctactgttggggctatgccttcgtagccgaagatcctanagaaagaaaacaccttcggcagatcctctcaagagcagcgccgaagctatncgctatanagcttcggcacag

SEQ ID NO: 70636 - DNA, 332 bp, Zea mays
tctaattaaatcatgactgcgcctaagcagtgttattattttagtgaagggggatgtgctgctacttcccactttccttgatgagcaacaagcacctgcattgagtaatgcaagagtgagatgaaacatctcagcaagcgaataattttgacgagatctttaaaccacaaattgaattcatcaacattttaaaagagtcacaattaaaatcagaaatacttgtagatatggaactcagttagcccactataaccaataccatctcatgttctcgaacaaccataataggttctataacaacttcgtgcgtcaataatacctgccaatatcac

SEQ ID NO: 70637 - DNA, 425 bp, Zea mays
  unsure (1)..(425): unsure at all n locations
gtacaacctatgctgtggatcgtctatccgtactaaccgtctcttncaaangacgtggctccctttcacctccatggtacatgactaccaggagcatttcaatcaatgtactcctttaccatgttcccaaacatacttaggttttgacatcttcgtaaggaaaaggttgatccatctatacctcttctttgagatgcccatgcaagaatgtattcgatacatcaagttgacgcaagatccaatctctagatacaacaacacataggacaaaacgaacagtatccattttaacagccatattgaacgtgtcatcataatcaatgccatatctatgtttaaaatcctttgccaccagtttagatttataaacgcacttgcattctacaacatgacaacctttcatatgagggattaaacaccatgta

SEQ ID NO: 70638 - DNA, 496 bp, Zea mays
atctctccctctttggtaataggtaattacatgtgtacctttaaaatgctcgaaggatgtctagagatgcttgcgcttaagagcttctaatgcagagcgattctggagtgcgtgagcacatgaaccaagaaaaagtctgttttgcatgggcactgtcgccatcccgtaactggggtaccctcccttactgtgccaaggcccgccatgtgtccaagggatgaaaatgcttatggattactaccatgagtctgggcctccgtagttgggatccgggcccttgtgtatgtcgtctagaccctcgacaagtgggggctatgacttcaaactaacatgcgctcttggtttccgctctctgctcggatagaggcccggtgccgccacgtgacccgtggacacgtgccacaagccttcggctagaagcaagctcactcgcacacattcagctgatgcatgtgatgttgtggcacatagcatgggtaggcatttggcatgatgc

SEQ ID NO: 70639 - DNA, 419 bp, Zea mays
gtccgcttgactaatcgtcggagaaacccgattccagttctttatgacacccgaaggtgcaacccaaacggcgcttgctgaattcataattattgcagagcacattggcactatggatttggtgcaggaatttctagctttcaaagtatttccaactatgaagaaatgggctatgcccgagcttataggagagaagaaagagggggagcttggccgactaccctatcattataaattcaagaaatattttaaggcaccctgccaagaatggctcgaaacaatcgaaataatgagtactgaaatgtgtggaaattactctaaacaagaggaccaattgatgacagcatccttcggcacccggccgatacgaatgctaaacagagtgcttgatgctataagcttttaatattctaattatg

SEQ ID NO: 70640 - DNA, 442 bp, Zea mays
  unsure (1)..(442): unsure at all n locations
ctagaggtatcttggtcttgcatgcgggattgccataagactggtgtccactcttaggtgagcggtactggtgctgagtcccgacgggagcggaggaaccaccattcaagtgacgacgttccgagcgctcagcccgcagaatggcgatcttagcacgagccctactcagctcgtctaatgcatggtccacctccgagtttagcacagcggctaggttgactgtgctgctcaacctacgattgccctcaccgacaggtgagacaatcacgcctcctgtgctgccagatgggcggcggcggtaatacttcaggtcaagaccatcagctgccccaccgaataccgagcacgtgtgcgaaagcgcacgccgtgcagcatctngcatggctgcctcagctgagtcccgctcagagatagaatagtgctctgacacgcctctgacctt

SEQ ID NO: 70641 - DNA, 455 bp, Zea mays
  unsure (1)..(455): unsure at all n locations
atgcaatgaaagatacttgttctgctctttgtgtntgaatcggcttagtggacatagaggacaggtggaggaccacttatatcttcatgggatagctagtacatacactacgtggatatatcatggagaagccatggatgacataattaatgaaaatggtgattacgaggatgaacatgtgagtttcaatgatgatgctggtatgaatcaagatgaagaagatcctgatgataggattaatggtatggtagaggagttatacacagccgaagatcaaggtaaaaggaaatctatgtttggagatatactataggagatgaaacaagaactttatcctggtgcaacttatacaagatattcgtttgtggtgaagatgcttcatattaaagtcgtttatcgtatcagcaatgttcgcttcactgcaatacttgaagtgtggaaatcggatttcctaa

SEQ ID NO: 70642 - DNA, 133 bp, Zea mays
tcataataggcacatttatcgaccttgagaatgaactccaatgggttgattaatattcgtagtttagctaaaatgagtggccccattataagacctctattactttaaatatctacaggataattttattctt

SEQ ID NO: 70643 - DNA, 482 bp, Zea mays
  unsure (1)..(482): unsure at all n locations
atactattcaactaaagtaagaagaagttgattatatgcctatgtatgaaaacttcctctccttcagatgttgtagtattctatccttagtgggatgtaccataatatatgttaaattccttgcaatataaaatgtttaatagtgcatataactttgacatcaactatatgtgtgcactaatttaaaggaatttaatctatccttttgggtttcaagaatgatgattcattttccatccacatataaggattatcatttgtgaaaccctcccttgtgtttctaatgctctctnttctaagagtttcaataaggtccttccaagtgctttcaagatggatngaaaatctacngatataagagtcttagttgtttcaatcatctgagttcaattgatctcatatcaagtatgatcgaatcaagaanagatgaaagaaattcatgatcacttggttggatgaaatcgtatatggaaaagaaatca

SEQ ID NO: 70644 - DNA, 495 bp, Zea mays
ctaccaaatggacgtgaagagtgccttcctcaatggatctatctttgaagaggtctatgttgagcaacctctcggctctgaagatagtgagtaccctaactatgtttacaaactctctaaggcgctttatgggcttaagcaagccccaagagcatggtatgaatgcctaagagattttcttatcactaatggcttcaaaatcggaaaagccgatcctactttatttactaaaacacttgcaaatgatttgtttgtatgccaaatttatgttgatgatattatatttgggtctactaacgaatctacatgtgaggaatttagtatgatcatgacacaaaaattcgagatgtctatgatgggggagttgaagtacttcttaggatttcaagtgaagcaactgcaagagggcaccttcattatccagacgatatatattcaagacattctatacaacgttgggatgaatgatgccaagcccatcaagacacccatggg

SEQ ID NO: 70645 - DNA, 255 bp, Zea mays
gacaactcagcaaggtacacgatcacgcgacggtggctctatgatcgtcgaggaccagtgaagctgacacaactcgagttttgaactctgccagagtatgctgcttggaacacgaatctcgcacctcagatcggcgccgttggcagcctgagcgacaacaccgttaagcgcatgttctacggctgacttcctgtgagcaccgtgtgcctggagggccagtgatgctctccatacgcctgattggagatctactat

SEQ ID NO: 70646 - DNA, 305 bp, Zea mays
  unsure (1)..(305): unsure at all n locations
gcggagtccccaaaacaagatgcaaaagatatgggctattacagcttaaggcactttaacggctatctcgcactcaaaacggatgctacggactttattgcagatatcagggaccccgacgcaatactatacacacactatggatagggggtcgataatgcactttgctggggactctttagcaaaaagtctgagctcaacgggtatgctcttgtctncgacgatggattatattcgagcaggcatatatcaatctacatcggcatgaaatgacagacgcacgatctgagaatcaacgacacatt

SEQ ID NO: 70647 - DNA, 329 bp, Zea mays
gcttcggtgtatctatattatgaatagccgtcgaagacctccaacttccttcggatatgctagcagctgttagactcccatgcacagcaacgggcccttgatccgatggtatcttcatgccaaggtatgctgggtggagtatatcttcaaaagcattgagcgtccctcgaccaatgattgcattgtatggatactccatatcaacaatatccagacaacctggtctgtacttgtgttgcgaacatagaccaaggtgaccggcattgctatcttgctcagtgccacaatttgttgtcctccgaaaccaccaatagggtgtgtgcgatcat

SEQ ID NO: 70648 - DNA, 496 bp, Zea mays
  unsure (1)..(496): unsure at all n locations
attgctaactgtcctgataatgaaagtgaccaggataaggggaacanaagggagaagaagaaggactacaagatagccaagggcgaggcgcatctatgcaaggagtgggattcggattgctcctcctccgactccgacagtgagggactcgccgccaccgccttcaacaaatcggccctcttccccaacgagcgtcacacatgccttatggcaagggagaagaaggtatgtactcgcaactctacctatgcttcttcaagtgaggacgaatctagtgatgaggatgaagtagattattcatgtttgttcaagggcttagatagatctaagatagacaaaattaatgaattaattgatgccttgaatgaaaagaatatactcttagaatagcaagaggatntgctgtatgaagagcatgataaatttgttgaggcacaaaaatcctatgctntatgaagtaagagaaatgaaatgctntcttttgaactatctactt

SEQ ID NO: 70649 - DNA, 507 bp, Zea mays
  unsure (1)..(507): unsure at all n locations
tcagtcaattcttctgcaaaggttattgatgcacaaataagtgattatggtatgagatatattcatgagaaaataaaagtcggtaaagcaaactgtttcagaaaggatgatcaatgcatagtatggtttaataaccgtatagttgtgcctaagaatgatgatgtacgccagcaaatnttagatgaagcacatcttagtcgatattccattcatcccggaagcactaagatgtatcatgaattaaagcaacattattggtggacaaaaatgaagatcgaaattgcacgctatgtggcgagatgcaacacttgtagacgtgtcaaagccatacatatganaattgcttggaaatgggaggacattatcatggacttcattgtgggattacccaggacagcaaaaggttntgattctttctgggttatagttgatcgacttacaaaaatagcccattttctaccagtcaaggcatcctatccagtcctcacctatgcccaggtgtatatt

SEQ ID NO: 70650 - DNA, 429 bp, Zea mays
  unsure (1)..(429): unsure at all n locations
attatacagcatactacgagcaaatttaaaattttcattctcaagctcatgctcggcaatttgcatttaatttagctatttgattattttgttctttaatcatggcaaagtgatcattcatagcatcaatgttaacatctctacatctagtgtaaatagtgacatgttcaacagtagatgtagaaatattgcaagcattcaattattcaatcttatcaattgaactagcattttcagttctaagacaagaaatngaatcactgcaaatatcaagctctttagaacaaatttcacattnttctacttcaagtgcataatcantttttggcttatacaaatttttattnttgttaacgagcaagtcctcttgaattccaagatatacatccttctcgtaatgggttctattgaattcgtaaatttcatatt

SEQ ID NO: 70651 - DNA, 479 bp, Zea mays
  unsure (1)..(479): unsure at all n locations
ttcaaactagcttagctttgcaaaatacttacccagtttacaaatttcatttatacaggaatgaaatttttgagaggctaaactatgaatgaagcacggatatgcatagacatgctttctcttccttttataaaagatacgcaaagaatgtataagaggaagctctatgtacatgtgtaaatgagaggaagtagtttacccttttgtaccttcacatagagacgctcttttcattgtgctttgtccttggtcttggntacttaagacctatattcaagacaatatatggaaatattttgcacaagagagagatctacaactagtgatccttttctaagtcatgttatcatatatcaagtagatcacaaattgcatacnattatactgaattctcctttaacttaatgcatcgcangagagattgattgatagtatatgacgcactaagcaacataagtgtcaattgaagtattcaatga

SEQ ID NO: 70652 - DNA, 385 bp, Zea mays
tatattccttattgtccataccatttaataaagatagattcttgattatcaggacaaatcaggaatatagggtcatttaagataacctaaagtatagcttctggatattcataaaatcaataataattccaagaatgcccaaacttcttatatgagatcaaaataatatttagaagccctgggtagatattggtatgatatggaccttgtttgattattataacccaaaacccccaccccccactctttgaacttgactgttgactccataaaccctagtttctctgagaaccgcgaaggagatatgtattcaaggccttagataataaactcttattatctatgcactctcatgagcattacatggcattcattcctatatata

SEQ ID NO: 70653 - DNA, 417 bp, Zea mays
  unsure (1)..(417): unsure at all n locations
cttgaatgacaattttcttcttttgatcagaatgtgcaagctatgggggaacaataaacatagatacacagactactgggggacaaaactttaaatccataccacaactcgcaagctcaactctagctggaaccgcattgaataagaggaagcaaccgaacaacattggaattaacaaaaacactatcagcgcaaagctggaggaatagccaactcacctcagagacctcctctctgtctttcctggacgcttctcgttcaccatggttgacgcagacgccttcacctncagcacgctctatctttcgcttcgatacgtgcgaggacacgagagggattagatccgaagcaagctctcaactaccactgatgggggcgtcagtggagccagctccagtgacataagaacagggatga

SEQ ID NO: 70654 - DNA, 403 bp, Zea mays
  unsure (1)..(403): unsure at all n locations
cagcttaacttaagggactcatgagcgtgctcataagtgttctcttctgttatcgngagtctgtacataaaaccactcgcttgtctaaccaggaagccacttggtgcggttcccaatcacaggaggcttcgtatcagtttaatatgcgaagttatagcatgcgaaggtgttgtgcagagcatctgctctcaccttggtctggtagcggagtatatggactgcataattcttcaacattggcacttattgtcttgcttgggagagcccatatgtagacattgaatcagtttataacgtctggcgtcaactgatgaagatatatctcagagattttaacacttcaccaatattccgctcagcgcgaagtcgaggccgacacggaagatgctcttgaaaaccacca

SEQ ID NO: 70655 - DNA, 496 bp, Zea mays
  unsure (1)..(496): unsure at all n locations
tggacgtgaagagtgccttcctcaatggaccaatcaaataggaggtctatgttgaacaacctaccggctttgaagatagcgagtaccctaaccatgtatataaactctctaatgcgctctattggctcaagcaagccccaagagcatggtatgaatgcctaagagaattccttatcactaatggcttcaaagtcggaaagaccgatcctactttatttactanaactcttgacaatgatttgttngcatgccaaatttatgttgatgatattatagttgggtctactaacgaatctacatgtgacgaatctattacgatcatgacacacatattcgagatgtctatgatggtggagttgaagcacttcttgggatttcaagtgaagcaactccaagaaggcaccttcattagccaaacgaagtatattcaagacattctaaancggtttggaatgaaagatgccaagcccatcaagacacccatgtgaaccaatgg

SEQ ID NO: 70656 - DNA, 487 bp, Zea mays
  unsure (1)..(487): unsure at all n locations
gacactataaaactcagcctgacagtgttctgcgacggttcctgaggaaccttctgtgtttgtgcggctgctgtcctaggtgcaccttcccaagtcaaaacatgctatgcaacaaggcttgacttcatctgtacaaataatattgctgaatacaaagctttacttctggggcttcgaaagttataggcaatgggaataagaaaggcaggccttaaaacagactctcaagttatttctggtcatgttgacaagagttgcaaggcaagagatcgaagcttgagaaatatctggacacagtttgaaagctagaagcttctttcgaaggattntatgttaagaatattccaagaggggaaaatgaacatgctgatctgctagccaagtcaacggcacagggagcttctctaccttcngaagtatatattagacaataagagcacattccgttgaactcctcgatagacagngctcacaatatctcctgtct

SEQ ID NO: 70657 - DNA, 489 bp, Zea mays
tgtgttgccatcaatcaccaaaaggtggagattgatagctctcttgtgagttttggtgtttggatgacaactcaattaaaggactaacaagtgtactaagtgttgaacaggtgcctaaggtaaagctaacagggttcaacacaagagaacaaatgtgatggtccaagaactggattatggatacataatggacatcacaagtaagatggacattgcataaagtgagactcgggtgcgtagctcggagacaactgatcaagccaaggatggaggcaagaaaagctttgatgtaccaagtgcacgggagaaggtcaaggaggctgaggaacccaaagccaagggtgaagaagaatgcttgcaaagtcaatggtgatcgagttgagaagagctatgacacaccaaggatcactacataatgacgtgacttacaaccaataaggtaacagctacagatatgtggtgtagtcataaagatcaagatcaagctct

SEQ ID NO: 70658 - DNA, 503 bp, Zea mays
  unsure (1)..(503): unsure at all n locations
actaagctctacgatatatttcgattaattacaagatccaactctatcgatctatggctctagagttatcttggtcttgcaggcgggattgccataagactggtgtccacgctgatgtgagcggtacgggtgctgagtcccgacgggagcgggggaaccaccatccagataacgacgttccgcgcgctcagcccgcagctgggcgatctcagcacgagccctactcagctcatctaatgcatggtccagctccgtgtttagcacggcggctagggtgactgtgctgctcaacctaagattgccctcaccgacaggtgagacaatcacgcctcctgtgctgtcagatgaacggcggtggtaatacttcaggtcaagaccgtcagctgccccaccgaanaccgagcaatagtgcgaaagcgcacgccgtgcagcatcttgcatggctggctcagctgagtcccgctcacagatagaatagtgctctgaacatgcctccgcatcct

SEQ ID NO: 70659 - DNA, 507 bp, Zea mays
  unsure (1)..(507): unsure at all n locations
ctaagctgagtttgagtgttaaagtgtggagactgaatctgtccatttcttgacagcaaagtcttctagagtcttttatccttaattaagtattgaatcaccttgatatgtttataaatgatatgtagacaattttattatctttctagaaagtctaggatcactctgtttggttacataaatctctagttgtgaatttttgaagttgcaagtctgaatctgtccaaatctggacagagctgctgtgattgcacgttttgaccttgctaagtgctgaatcatgttgtgatgacaataccaaagttgtagaccactttttaagctttctagaaaatcttagtttgctatctttggattaatacttgaagagttatgattaanacgagtgactgctgtgttgctatcctaaaaatctgcaagtgcccatttgatgattgagttcaccctcttggctaaaaatgcttacgtagcacttagcggacataggcttgtaatggataaacatac

SEQ ID NO: 70660 - DNA, 458 bp, Zea mays
  unsure (1)..(458): unsure at all n locations
agctgcacgtaaacttagacagtgatccggattacttactcggccaccttgatctcctgtccaattcagctcatgtttccatctcgaatacaattcggctgcggtctttaaaagcagcagtatattcatggccgtactcaagctccgactctgaattggaccggcacggcagcgggcagcgggcaccgggcagctctgcttctgaagctgcgagcgcacgcgaacgctggaggcctggcgcatggagcggtcaacattgagcagcgctgtgcgagcatgttgccaagagcccaagatgctggccgtgtaaagttaagcagccgacagtatgcactgagtttccgatcgatcggtcgctacggcgatacgccgcgttcttaatttcccccgagcatcaaatctctgtggttccagtcctgcaacaagtatgctntgcttttcggcggtgggaaagcatt

SEQ ID NO: 70661 - DNA, 499 bp, Zea mays
  unsure (1)..(499): unsure at all n locations
ccacgagccgcaccaagccgagccaagggctctgtttatttttagncctactcacaaacttatgttagcccgtgttttcctttgtgtttgttgtccataatgcttacatcatttattttaacaagcatatcaattattatcgagctcaatatcaaactcttttttatgttttatatgttttataggaatcatgctaacattgatctctgtgaaatagagaagaacttgaatcatgaactagcccttatgtaggaaataaaaaaatcaagtgatcaaactagcacatgtactcaagctcgagttatccaaccagtcacaatngcaagatatcatcctttggaccatagttagagaattgagatgtggtgttcaaacaaggtcaaggctagcatccttttatgagcactattcatctttgttattcattgagccaacgaagattgaagaagaaatattggatattgattggggtaatattatgcatgaagagctcaacatc

SEQ ID NO: 70662 - DNA, 417 bp, Zea mays
  unsure (1)..(417): unsure at all n locations
tcatctcaagccatggctntatntctactagcattattgttgttattatttcaatgcacaagcaaacaaaaactccaacagaatgcacaagttatttgaatgtgttttgttatttaaaatgtggcattcacatgtgatggtgaatagatgcaacacacctatatatagagggaatacactttttttatatcattccttacaaattacaagttaggcattacaaatcctaccccccttaacaagaatctcgttctcgagatttatgaaggactagggaaaagatgaggaaaatctatgcgaagctcttcttctctctcccaagtagtttcatcttctccatggtgactccattgcactttgcacatatttataaccttatttctcgtgacccgagtcaaagtatcaagaattttgata

SEQ ID NO: 70663 - DNA, 395 bp, Zea mays
tcttgaccacctcaacgttcaccaagttagtgcagctaccaccgtcaatgatggtatgtacaaggcagtccttgacgatgaggaacatgttgaagaggttgtggcgctgtctgttgtcgtcgtcactagctgtggcactcaaagctcgttgcacaatcaaggccttataagtcttgatcgctgttctaccaagaacctcttcgtcaccatcataagtctctacaatgttagctccaacagtatcttcatcttccacatcagaagcactaacatacccaccatcaccagtagcaatgtatgcccgtttgctggggcaatctcgctgaatatggacaagtccctggcagcggtggcacttgatgtcggaggagcggcctgtggaagaggtggtcgta

SEQ ID NO: 70664 - DNA, 430 bp, Zea mays
  unsure (1)..(430): unsure at all n locations
actcagcttcccgantaaatgttcggtcgggtatgaggcggtccaatttctaagaagaagtcttttccgctccagagattcctcgcctccacgcctgagctgctctctccacacgcctggcttacactcgttcccgaggtttgtatccgacggcgacatcgcctttgtcgtggcgcttctgtatgcgatcgtcgtaagtattacgcgctnttttcgtttctttactcctctttgctgtcttccatattgcacgtttcctagtcttccagcaatatcagacctcaaacacattctagaccgacttcccggtgtatcctggcactacatcatagctacttaaatcgtcaggactgatcaccactgaacaaaaatgtcgggctttatccaaaaaggcgcgaaaaacattctccagaagaaccctaacgacatc

SEQ ID NO: 70665 - DNA, 446 bp, Zea mays
  unsure (1)..(446): unsure at all n locations
tcgcatccctccaggtgcttgccatagatgcatgctacggactccaccggctggctgaatgcctaagggagctctgctctctacgccagctcaaaatcagcgattgcccgaggctggcttgccttccccaatccatgtccggcctcaccttccttcaacaactccagatcatcgagtgccacggcctcgcgtccttaccgagggggatgatgagcagcctcgcctcccttgaaaacctggtcgtcgatggctgcccggggatcaaatccttgcctcaagacacanagggtctcaccactctgatggggttgcggatccgtacgtgccctgatctggagaggcgttgtgaggcangacagggggaggactggcacctcatctcccacatccctactttgatgatagggttatcagcggcctgcatcatctggcgaagttattctgct

SEQ ID NO: 70666 - DNA, 455 bp, Zea mays
  unsure (1)..(455): unsure at all n locations
accctcctattctttcactattatccaacttatataatctaggagagaaacaaacatcccctcacgattnttggaagttaggatactagaggaaattcgaggggctaaaatatcttgttattcaaaattaaatagcaaagtgattttagacccttcaatcctcctcgtattttcctcccaaacaagtcctcaatggtaattttattccactattttcaatgtttatcatgccaatataagtaagataaaataaactaaaaaagaataaaacaatacattctttcaatttagaggttatgacacagtttcatgcacagggctcgcctccatggtgtccccttcgtttatggttgcattagacgacccaatcgtgtaatccaacaaatattttgaggtggcaacacgaacaaaaagtanatatcctacgcaaacaatgtgggtagctggttttgtta

SEQ ID NO: 70667 - DNA, 431 bp, Zea mays
  unsure (1)..(431): unsure at all n locations
tttatagtctcatgcagctangagccgctggaggcaatcttggaaggcaattcctgccttctgtcaagtggtgcaccagacagtctagtgcaccaccggacaaccactgttcatgtccggtgctcgatcgccttccaaatcaggcgcatccgaccattgctcctccgagccaattggtgcaccggacactgtccagtgcacaccggacaatccggtgctctagctgaccattggagcagtccacgtgtcgcccgcagattgcgcgcccgaccgttggcgctggcgactgttggcccaccggacagtctggtgcaccaccggacagtccggtgaattatagccacgttgcctctctctnttnncggagaacagctagtgacgtttgaccagcctgngacaccggacactgtccggtgcgccaccggacagtc

SEQ ID NO: 70668 - DNA, 472 bp, Zea mays
  unsure (1)..(472): unsure at all n locations
gttgggttgcgtcggatgatctctatgtagtggccatttccaacatttgtgtaatgagggctctagggaaaagcctcatagtgagaccttgtcaattcaccttgggaatgatgaatggggagtcatgatcctcgcgtagaaagggaatcatggctcatgggtaaagtctgcaacctatatagagtgttaagaaactgatatatctgtcatgctcacggttaagaatggccttcgtagctccattgattaaagatactatagttctagttatgagaaggttctgataatgataatgatgttctccaatgaagaggtgattcacgggttaaaattcacgagttgatgctaaaacctagcttatcctgatgttaaataccttactaactaanaagcaattgctaataccctaactcaacataaagctagtccaccttagacaaatacgaggctttgtgagtatgttgtgtactca

SEQ ID NO: 70669 - DNA, 336 bp, Zea mays
  unsure (1)..(336): unsure at all n locations
ccatgaatctatattcctcatactctttngccctttctcttgaaatctgcttatagggctcaattaatggttttattggtgttgcacaatttgcctttcttgtaaacccatttgttcatgctcaattttggttcacataagatgatggtccttgggttagcacttgagagaaaccctangtgacactggtgtgtcacaaccttacccccttaaggaatctcatcccgagattcgggtcggagtcctcccgaggtgaaacgaanggtgagacttataggaagttggtgcttattggtattattaaggcaaactgctcttcgaatgtcattctctttg

SEQ ID NO: 70670 - DNA, 424 bp, Zea mays
tgaccggcatgtagatgtgttcgagtgggtattctccttcagtcggtacaatgccgaataaaggagtgtctgactcgtggagctctttgagtgcaactcccaagccttggagtgttcgggggaaggtgacgttgatgctgcttcccccgtccactaacaccttctttaccctgctctctcagatcaccggatcgacgaggagcaggtatttgcccgggtgatcgaagttgagccactgatctgcccgagtgaaggtgatcgggtgttatgaccatcgatacagggcgggaggaccggtggctcccaccaatatctgacggacgttgagcttctgctgcctcttgctttcttgcgacccatgtccgccgaagatgatgttgacttctcccgcgacgcatgagaatgctccgccctctccctttct

SEQ ID NO: 70671 - DNA, 399 bp, Zea mays
atgacaaggatcccatatctgtttgttctcatagaccacatcattcacagcagctggagagtaagcctcgtgtctcagcgaatccgtggcattcgtttccactgacgaaagacttcatgccgggtggccacgtgaaaacgccaccaagtgcggaaggggcctcggcgttctcccagccggtctctgatttcaagaagatgaagaggcagttctattctggtccaatggcaagcggaccagggttaagcatgccatcttcgctgaacgatcgcagatcatccgcggcacaagcacagcatcttgtgatgccaggaaatttgcaaggcctcttctggcagccgtcatctgcgtccccaaaagttcccccaagatgttggggcggcatccaacgaaatcacc

SEQ ID NO: 70672 - DNA, 485 bp, Zea mays
  unsure (1)..(485): unsure at all n locations
tcatggcagtccacgccctgtctttgctcttccatcgcagtcatagccatcttagtcttaaccccctcgcaaaacgaacaagatccagaattccaagaccccccttgctctctgggaggcaagttatgggccagttgataaagcagtgacccccgttgcaagcatctagattgctccctttccataggaagtttcttctcattntgtcaattgtttgcagcagacattcttgaggtggaaaaaccgttaggtggtagattggttgtgcggatagcaccgattntactagagtttccctaccagccttggacagcagtttgcctttctagccagccaacctggtattaatgttatcgattagtggttggagatcaatcctttntacattcctgtaatgaaggggtaacccaatgtacttcccaggtaggctagtgtattntccaggaaacacatctattatcgtaggccataatgatgcatgatat

SEQ ID NO: 70673 - DNA, 414 bp, Zea mays
  unsure (1)..(414): unsure at all n locations
tttggaagcccaaccaaaggcaccctaagtcatttctacttatccagatagcccaacacagtgttgagacacctcgaataatgagattcttagtatttagatccaccttcatcaaccaactcccaaagaaatgtttgacagatctaggacccggtaaacccgaacagattgatatcaaccgccacataaagtgagcaacatgacagtcaataaataaatgctgatttggttcatccaaattataaaagccacacttactgctaccttgccagttgcgttttgctaanatatctttcgtcagcactactccttttaacaagtatcacatatagaatttaatcttaagtggcagtttaagttgatttccttatggttaanaacattcccattattaataagactcctatacataga

SEQ ID NO: 70674 - DNA, 509 bp, Zea mays
  unsure (1)..(509): unsure at all n locations
tactcaagctttttcaccacattatcatggntatcttgagaagggtgagcatgactctctcccttcaaacgagttaagctccttcttagcattccaacttcttccttgagctctatattttcttgtgtgatagaaatatcactaattcctgaaatgtctagctcaatggaagattggctttcttgagagcaacatttgttagcacatggtaatatagtttcaatttcaacacatgtgcacatgtgaggttggtatgatttcaaattagttaacacaacctcatgagccatttctaacatgatatgtgaatccataaatntattatgagagcacacaagcatatcatgtttttcttgcaaagctagattttcaatatttagcctttctatcgtgttcttgaacactagcattttattttctaattgagcaatatatgatgaatgattaacagctntaatntgctcaattgaaatgtcttcatacctttggaccanatcatcatgagagca

SEQ ID NO: 70675 - DNA, 443 bp, Zea mays
  unsure (1)..(443): unsure at all n locations
cgtgggctagtcggttatgctagagccaacccatgttagtcttagcgatgaagcatgtgtcgaggtcagctctatcaaagtctaccaagtatagctgaccctctaacacacccttaaatgctattgaatcatcacttcttctaaagacagcgacacctacatcagtaaagagacagttgtagcccatttgacataattgagatacagaaagcaaattgtgatctaaagaatctacaagataaacattggaaatagtatggtcaggtgatatagcaattttacccaatcctttgaccaaaccttgatttccatccccgaatgtgataactcgctggggatctnggttnttctcatatgaggagaacatcttcttctacactgtcatgtgtgttgtgcacacactgtcgagtatccaacttgagccaccggatgcataaacctac

SEQ ID NO: 70676 - DNA, 392 bp, Zea mays
gtgaggagcagtggcagtggtgttcgggtagcaagcacttccgttgacactgaggtggtcatagcgcggaggggaaccgataagtgcctggtgaggagtgggggccgggcacgcagtataatggagacggttgaggaggtatgtaaatgtgtggagggcctctgcctataaacgtgctgggaggtgcgcctggagaagaagagtgtgaatggtgtcgttggtcgtgcagatcatgtgctcagccttgccgttctgggaggaggtatacgggcaagacatccgcaactgcatcccgtgggagagaaagaagtcactggaggcggagttatcgaactcacgaccattgtcacactgaacgaccttaatggtgagggcgaatcgagtggacaccc

SEQ ID NO: 70677 - DNA, 500 bp, Zea mays
  unsure (1)..(500): unsure at all n locations
tgtngatcttctttgagcctttgatcatcaattcaaagctcacaaaattcccaattacctcctcgggagacattagtgtatatctaagatttcctcgaattaattgaacttgcgtaaggttaaggaaaacgagggatcttagaataaccttgaccattcaatggtcatcccatttcttgctcctgaggttgcgcacttggttcaccaaggttttgagccggttgtacatgtcttgtggctcctccccttggcgaagtcggaagcgaccgagctccccctcgattgtttcccgcttggtgattntggtcacctcgtctccttcgtgcgcggtctttagcgtgtcccaaatctccttagcacctttcaacccttgcaccttattatactcctctcgacttagagaggcgaggagtatagttgaggcttgngagtngaagtgttggatttgggccactttgtcctcatcataatcttcatttcctacggatggtacctgtaca

SEQ ID NO: 70678 - DNA, 384 bp, Zea mays
  unsure (1)..(384): unsure at all n locations
ncggatntccgactatagaagacggactgtcggtgctgtcttataacgatctggctgacagcctagctgacaacagtttagaggtgcgacacacggaattctcatatcttcgtagaactccaaaggttccggctggtaatacaatcgacacagacatattcctgtctgcagggcctgatactcacccatgccctcatagcacagaaagaagctgatgacgaaggatgcactatagccctgagcaacctctcgtccgaaagaattgaaccgaggaacgaaggcctcgaaaaagacaagaaattatactcatcgatcgataaaataaaggaggacgaagctgctttctatagtcaagctgaagctcataaacgcgaaaatgaagac

SEQ ID NO: 70679 - DNA, 434 bp, Zea mays
actcacttcatgtcatcatatagatgcaccaaagaaccatatatagccttcaatgtccatactatcttcgtaaaggaccacacttgtgcttttgaaacaatccaaagaacttaaccaattcagatcagattgtaagataagagggacttaaaatctcaatcccaatgatattcatcaagtatcaatcggatgggaaaatgaccaatagaattatccataactcttcattatattccaacaatgggatgaccaatgcaatcttacccagcatgcgtagtatcatcacttgaaaagttattacatatgctacacttagtatgggaagatgtattgtaaatacagtccatatgaaatgttcacagagacatatgcaatatccatcactatcaccgtgtgtttcacatgatacaaatatatggatatctctataatat

SEQ ID NO: 70680 - DNA, 403 bp, Zea mays
  unsure (1)..(403): unsure at all n locations
aagctatctgaaggcttggatcgtactgttgatgacnggaaaggggctggccactgtggttgctctcaagcggctctggcgggtcgcggtgaggtcgccagagctaaagactggctcggggaagtcatgccaggtacagaggaggcaacggggaaggcagccgagcactgggacgggctttatagccatggcgcgggcgtggtcaatggcggccgcgggcgcgcgggggttcgcgcacgggcgtgctctgagcgcgcccccgggtgtcagcccacgtcgaacacgtgggagctcgcttctgccatggttcaacggaggattagagcaccatagcgtgcgtatcttggcaaagtcattgtgtacggactcttccctgctccatatcctaccttcttgctgtgag

SEQ ID NO: 70681 - DNA, 484 bp, Zea mays
  unsure (1)..(484): unsure at all n locations
tcgcacctctgaactaactccgctgcatcacttttcgctggtggcctatatgatcccgacctgaagaccttcccgactagtgtcttggatgctgcgtgtattccacattgtccagcatggacctcatctggaagtcgcttcccagtagatgagagaatgcatttcatgaggacgcctgatgtaccccttctgtatagtgtctccccaatgagtgtgtagtgagctgactgtctagcgatgcgctcagctgcatgtttgtcatctggntcctcttcattctttatatatcagatgatcggccttctccagtcatcagagtctgactctggttgattcacgatattacactcttctgcctgatccattgagatgctnggctgtggtatttcttgtacaaagactccaggtgggacctgagttcgactggatcctagcttggacaatacatcggctggcgtgtttcgatctctttctacattgatga

SEQ ID NO: 70682 - DNA, 475 bp, Zea mays
  unsure (1)..(475): unsure at all n locations
atgttcaacggagacctccacatgtttttatggttgtgagatcctaaggcgcaatagcaataaaaagagaggaagcggaagaccaaagttgacacatgaagaggcaatataagggtacttaaaaggatgaaatataccgaaagatttagctttgaagaggggcttatggaaaacaactatccatatgctcaaaccttgacttgtaggttctattgggttttaacactagcctatcctgtcttgcttgggataaaaagcgttgtctgtggtgttgtatgaatgaactatgaagtcacatccaccaagcaaagggatctgcaatgaaatggatgaactgaactacccgacccgtcacaggctcacagcaaggtangagatgctgatggacattacttnctcttctatccacaccggtcgcgctataaacaaccccaccaatgcaattgacaagcagatcaatgacaacaagacaaca

SEQ ID NO: 70683 - DNA, 436 bp, Zea mays
  unsure (1)..(436): unsure at all n locations
cacattttaagagtaacaaatgttcattttgagaaagacagggattgtagcgcatgtcatgcatggaagcaagttggagtccatcatccacacaagaacatcatgacgaccgacaggccgcttgagctactccacatggatctattctgcccgattgcttacataagcatcggcgtgagtaagtactgtcttgtaatagtggatgattattctcgcttcacttgggtattctttttacaggaaaaatctcaaacccaagagaccttaaaaggattcttgagacgggctcaaaatgagttcggcttaaggatcaagaagataagaagcgacaacgggacggagttcaagaactctcatatcgaagggcttcttgatgagganggcatcaagcatgagttctcctctccctacacaccacaacaaaatggtgtagtcg

SEQ ID NO: 70684 - DNA, 476 bp, Zea mays
  unsure (1)..(476): unsure at all n locations
gactggcaaatccagnttctgtaattcaaaattatatattttcaacacataatattatgcagtcccacattcatgttaataccattattacctttctggcatgatcattttgtccatggtcaccactctcattcatatccgcgtgatcctgcaaattaacctgtacccgccatcatatttttaagctcaatcataagccaataacacaaatcaataaatcatttgtatgtacaaccgcaaatcaatatagttgttaaagttattacctcttcaaatgaatgtatcggtataggtatntgaacattgtccaatcccacttgaagtacattagatacgtcttgaagtttctgaaaaattggttcaaagctcagtatacatcagttacaaataaacatacacaacaatataattaataccttggtattcctttcacccaattcaccatctctttcgatgnctctattggcttcatcatc

SEQ ID NO: 70685 - DNA, 478 bp, Zea mays
  unsure (1)..(478): unsure at all n locations
tcggcgacaggttaaaattgtggcagcaaaacagtgcatatatcaatgaatgctgtggttacttcacacctactcgtctgtttatatagtgatgcacggtaaaaggcgaagcgccaggattnttacaccaggcggacacccgctcgcactcgctgcgtggtggaccgcagagaccgaacagtaactctgaaaggtggggccgctacacgctgagaaattgaatcgtgtctcgacaacgagctcacggaaggtgttttttagaccttcggcgctccgaagcttaagagacttttttcacggatcaagctcgttacgaaaaacgatctagcaccgcgaaaggggctactgttgggcctgtgcttcgtcgccgaaggtcttctatgaagaagcggccttcggctgaagctgttcgtataagatggccgaagtccctcttcatgaagcttcggtttacaaaccgattaaagatagaatgacc

SEQ ID NO: 70686 - DNA, 498 bp, Zea mays
  unsure (1)..(498): unsure at all n locations
ctaagcttggctacaactggcggtctcgtagccttcgaagtgcttttctcatatgttcctcatgctcttgctcattntgggaatatataagaatatcatcaatgaacatcactacgaacttgtcgaggtagtccatgaacacactgttcatgagatacatgaagtacgctggcacattcgtcaatccgaatgacataaccatgaactcatatagtccatacttggtgatgaatgttgtctttggtatgtctgagggtcggattctcatctgatggtaacctgacctcagatctatctttgagaacacactggctcctctcaactgatcgaataagtcttcaattctatgcaggggtacttgttcttaacagtaacttcattcaaagctctgtaatcgatgcacatgctcttcgtgccatccttcttctgcacanacaacactgggcttgccaagggtaggtacttggcctgatgtaaccttctctgacactcatcaat

SEQ ID NO: 70687 - DNA, 310 bp, Zea mays
  unsure (1)..(310): unsure at all n locations
tctttggctntaatgtctggttcgcgtcccttgagtggggatgcgaatgagagccttccggtggccgcgttcgtcctggggccatagctgctgctgtgggacggaaccggagttccgtttgtattggcaccttgaatgtcggtcttttgttcattgtggctgtcggggcttgaacatgtatgtgttttcggcacggggccatgttttttcttcatttcgagcactaagactcgctagtcgactatctgaaccgcttcaccgagcgtgagtcgcctcgtgcaaaggtgacgagtgaggtatccgtatctcg

SEQ ID NO: 70688 - DNA, 453 bp, Zea mays
  unsure (1)..(453): unsure at all n locations
agaaataattaacaaaaggtggaatcatattatataacataagatgaagaaagttgataagtgcattccatgtcatgagcatcacgtcttatttatgacacactgcaccctatgaatagtatgatataaggtgtctatactttgacctaaatatgtgctttcggcatttgagtacaaaagtgatattttctgaaatgcacatgtgtatggggaggaaactatatcataggattcaaaatcttatttatcagatcttatgtaagctctaaatgtgttgtcatcaatcaccaaacagggggagaatgaaagtgcattcatcccttttgtgagttttggtgaatttgataacaacacatttaaaggtctaacaagtttgctaagtgttgaacacganattcaatatgatgaacatacttgaatagtgtataatgatcagtgaacaacgctcaacac

SEQ ID NO: 70689 - DNA, 448 bp, Zea mays
  unsure (1)..(448): unsure at all n locations
atgttccccacctctcctttatgagagtttgcatttcatatcattacatatgcatccatgtatttgtaattgacttgtagaacacctataagaagtggtgtttgaagaagaagcctgctctaagtactgttgatccagtggcggagtcccatctaactgtaaaaagaatttgaatcttctctgcaacaaggcaagccccggtgcatttcccacattccttgtgtttacaaaaaatttatcacttatatgatgcattangttataggagtngattgattaaacccttaatgcattaccatccttgaaaggttgattatcacacctcttgtcatctggtttataaaagctagagatgcttagtcatgctgataaactaagaaaaaatattttgatctatgactcatgtnntttacaaaagaaaatgggcttgggataatgaaggcatcaa

SEQ ID NO: 70690 - DNA, 509 bp, Zea mays
  unsure (1)..(509): unsure at all n locations
tactaagcttcttgtggcttcatttggtgggatttcatatcctgcaatatctttagaaatatgcccttgcgagccattagattcatcaaatgtcacgtctatcgctatttcaacaagaccggtggtattgttgaaaacacgatatccatgcgcattngatgcataaccaagcaagaagccctcgtccactctaggagcaaactttgagctcttgtctttcttgttaagaataaagcatttacaaccaaatactctaaagtaatcaactttatgtttgttaccagtgagaagctcgtaggcagtcttcttgtagatcttgtgaagataaatgcgattgattgcatgaaaggcggtgttgaccgcctctgcccaaaaattgtcaggggtcttgtactcatccaacatggttctagcggctttcattagtgttcggttcttccttttcacgacaccattntgttgtggagtgtagggaaccgataactcatgttagattccttcttcgccta

SEQ ID NO: 70691 - DNA, 371 bp, Zea mays
ttggacagatttggagagatattatcagtggtctattggcaacttcctccacacatgtgctgttgaatggaatccccgggaaaatcattcgtcttataagagggctaaggtaaggcgatccactatctcccatgctctttatcttggctatggatgtgcttgggagtttggtttccaaaactgaacaggaaagacttctccaacctctatcctcaagagccttacaacatagaatatttctttatgtggatgacgtggttctgtttttgcaaccaaaagaaagtgatattcaggtagtgctgaacattctgcacttcattgtggacgcttctggattgaaaacgaacgttccaagagcagtgttatcctat

SEQ ID NO: 70692 - DNA, 460 bp, Zea mays
ttgactcttggttgcaagaagaaaaatgtatccttgctgcttttctctttattattgacagattgtatcgggattctagcaactcgctgactatcctggagaggagtcatcgcttcaccatggaagagttggacaatcaacgttgtaagctgcaggaatcttcggatgaagtgactcggctcaagcatcttatatcagcgaaggatgctaccattaaagaactccgagcttccaagaaatccattgtccaggagttagaaactgctcgactggctgctaaaggtgccgaagaaacttctgttactctcagagcccagcgcgacagagccatggacaatgctattcgggcggagcgaatcttgatgaggagacccggcgtggttgttcccgaagatataatggctgatgtgaatgctgcccctgattcctcgagtcgtccttcctcatcgatcgctcctga

SEQ ID NO: 70693 - DNA, 492 bp, Zea mays
  unsure (1)..(492): unsure at all n locations
ctcagctgctaaagctatatctagggcttggtaagatatctctaattgggtgcgggtgctaacataagacaattcgatatcccttttgttggtgatctctcaaaaagtgataacggatgtctatgtgcttagtgcggctatgttcaacgcgattatccgccatgcggattgcactctcattatcacattggagagggacttttctcaacttgtagccatactccctaagggtttgactcatctatagtaattgtgcacaacaatgtcctgcagcaatacactcggcttctgcggtggatagagctactgagttttgtttctttgaaacccaagacactanggatcttcccagaaactaacaaatccctaatgtgctcttcctatcaattatacatccggcataatcggcatcggaatacccaattagatcaaaggtagatcctttgnggtaccaaagcccaaacttatgagtgtgaactatagatctcataa

SEQ ID NO: 70694 - DNA, 482 bp, Zea mays
  unsure (1)..(482): unsure at all n locations
gctgacacatcaaattcttctttaccaactgtgagatcacttctatgtnttgcagcagcatccacttcatcataccaatcagtaaacttcctgctccctcgagcacattgggaacccaaaataagacgaaccgtctcttttgctatcttcagttccttgccagcccctgcgcgtatggacatgttatgtggatccaatttatccatcaaccacctaatgagagatctgttctctaaggcatcatttggcaaatcaaatatactggaaaatcccaacctagcgactgcatcgcgctgccgatcgctcattatccaagttgagacaatgacatcataaggaatgcagcggatattcaatttctgagagcataaatgattatgcattaatacacaacgcatatatattggtataactaaggatactacatatacatacaattgatatttatatgacctttgaataatatttacacacttaaaaat

SEQ ID NO: 70695 - DNA, 505 bp, Zea mays
  unsure (1)..(505): unsure at all n locations
tgacaacaccattggacattntacataaaatttctgagatcaagaatatntagttcattcctcaacatgcataagcgggtcttatcaagtggcttagtgaaaatatccgctaattgatcttccgacctcactccttctaaaatgatatctcctttagcaacatgatctctaaggaagtgatgacggatatcaatgtgcttggtgcgagagtgttgtacagggttattagcaattttaacagcactctcattatcacacaacaaaggtaccttctctagaactacgccatagtctagaagagtttgtttcatatataaaatttgtgtgcaacaagcacctgcggcaatgtattccgcttcgacagttgacaaggcaacactacttttgcttttggatatccatgatactggtgatctaccaagcagatggcatcccccagaagtacttttcctatcaattttgcaaccggcataatccanatcggaatagccagataaatcaaaag

SEQ ID NO: 70696 - DNA, 449 bp, Zea mays
  unsure (1)..(449): unsure at all n locations
ctcaagctncgggcccaactactataatctaacagcnagctgacgtgtctctactcacagattaatgtgcagagatcatcttatcctggtgtggacctcaccttaactgctactggatggaatcgagaccctagtgcatgccaatttggagaaaagatactctacattccttgcatctgaaacttcggtgcatctgagtgcatggcagcttcatccatgacagctgcttgtagtaacgatccatatcgcttgcattggaaacccgagcagaacccgatgaaacgacgaccagcccgtgtaactgatcaagatgtccaccatggtgatggtgcattattgctcaacgatctcagcagaacagatgttggagcgaagacagaacgaccactcgatctcttcatctgcacattaagtcctgacagagctaagcgagggcattcaaacggaaa

SEQ ID NO: 70697 - DNA, 251 bp, Zea mays
cttctggatggttctgacccctaccgatggtcccgcaccctcaagcctcttgacctcttcattaccatcatgcgcggtcggaccaccaccatgtcctatgggaactttgtgactccgctagggatgatgtgatccctcttgtccacttaccaatacacatgctcactcgctctgcgaccactgctttgtataagtacaacaagacccctggctctggagctaccaatattggttggacacaagagctgctc

SEQ ID NO: 70698 - DNA, 447 bp, Zea mays
  unsure (1)..(447): unsure at all n locations
gaacttaaatactcagctttacactaacacctattctacacccaagacacatgtttatcctttaatagagttatcatcccaaccaccgaaacccacaagagagctctcatgttcggcgtcgcccctagcattatcgcactccgagcgcaagcaggttgcttcgcctttgaaccactcggtcttggaacgaagctctgcaagctcgcgctccttcacctcagaacaagcaggtctcgcatgcagctgatctgcctcccgctaagtggacagaaacgccttcggcctaactaccgttcgcatgataagacgctacaaaacgcaaaccaggcgatcaacttaaactttggtgggagggtaagaggagggacaatccgaaaggaatcagcgacccgatacctgctcactngacaccgtagtcagatcatgacatgacgcgtcaccaaaggg

SEQ ID NO: 70699 - DNA, 457 bp, Zea mays
  unsure (1)..(457): unsure at all n locations
atggaaaacgaaatcttgaatctgattgtaaactgcttgtccgtgncactgttagctcggacggtactccgaagcggcaaacaatgttctgccaaaagaatntttgggcagtctttgatgtgattgtggacacagccctcgcttcaatccacttggtgaagtattcgacggctacgaaggcgaacttgatgttcccttgagcggtgggcaagggcccgacgatgtccatgccccagcgctgaagaggccatgtatgggcgaccagctttgtgtattgcgaggggttgcctgaccgatgagagaacttctggcaggcttcgcaagatcttgcgactcgatttgcggcgcagatcattgcaggccagtaaaacccttgtcggatcaccttancagccanggcccttggccccgcgtgcgagccgcaatgtccactgtggacctcgcgcaagatttggat

SEQ ID NO: 70700 - DNA, 490 bp, Zea mays
  unsure (1)..(490): unsure at all n locations
acgtgaaaagtgccttcctaatggaccaatctatgaagatgtctatgttgagcaacctcccggctttgaagacagtgagtatcctaaccatgtctataagctctctaaggcgctttatgggctcaagcaagccccaagagcatggtatgaatgccttagagatttccttattgctaatggcttcaaagttggaaaagccgatcctacactctttactaaaactcttgaaaatgacttgtntgtatgccaaatttatgttgatgatattatatttgggtctactaacgagtctacatgtgaagagtttagtaggattatgacacagaaatctgagatgtctatgatgggggagttgaagtatttcttatgattccaagtaaagcaactccaagagggcaccttcattagccaaacgaagtacactcatgacattctaaancaagttgggatgaaggatgccaagcccatcaagactcccatgggaaccaat

SEQ ID NO: 70701 - DNA, 462 bp, Zea mays
  unsure (1)..(462): unsure at all n locations
tactgaatntagtgacacaacaatcgatccatctctttcgttacctgcatnttcaagtgctaggaaggctcacggctcactggggaaagggagagaaacgactgcagttgaaatgaagaagggtgactggttgtgcactaagtaagttctttatgttatgcaagttgagtcttatgacacattcatgggagggaaggaatgatggtttatgtttatgatgttgtttatgatttctctcggcttatggaaagtaaaagctagcgacaataaaaaaactcgaccggtatggaaaagacccgccccctcaatcggagcccccttcgagaaaggtcatgaaaactgctccgtcccccgtgggcatgagttatatctgcatggatttgaatccgctgtcgagctgttattgtacactatgtatttgcaacatatagaagatcatgacattntactttaccacgacat

SEQ ID NO: 70702 - DNA, 500 bp, Zea mays
  unsure (1)..(500): unsure at all n locations
tcgcatcaaatccttcctctcttgttcgaagctntgtgatttagtggagagttcactatttaatctagcaatctcggttggggcttctgccagcgaaccctccattgtttgaatcacaaaatcctttttctccaaagcagcttcgtgatctttaattttgccctctaagccctcaattataatttcggtttcttatcctcgaggtcttgctgcatccttaaggttctactcagcagtagactctgaaaaaataaccttcatcagaagtggccttcatcacgaaaacattaataaaattaacgtaagaatcttaccttgaaattagaataaaacaaactaccggcgatatgttgccaccggtatcagctgagctcggcctcaagcttcggaaagccaacactcttcgctagagtgctaacaaccttcgccccagtccggtcccgaagacatcctaagctctcttctgcaatgccaccgaagagcaatgctcctggttgata

SEQ ID NO: 70703 - DNA, 484 bp, Zea mays
  unsure (1)..(484): unsure at all n locations
tgcttcgtcgtacttctcttgagttatgtcagagcttttctggtgtctaagctcctgtaatatttagtagtatgctgaaagcaaatggttagtcgtgtttttgaggaccttctgaagacgaaggcccccaacacattgatttgccaaaacaagtgtctttgacatagagataggaaaacaaatttgttttgtgaaaataaaccaagtggtggcaaaaatgatccaaatatgccaaatcctatgtgagatgaattggtcttcaaattgtgtcttcaattgcactctttagcttgtctttgaaaatgttgttggcatttgagttgcttttgatgtgttggcataaatcaccaaaaagggggagaatgaaagggaaatgtgcccttgngccatttctataaatgttntggtgattagatgctcaacacatatttgtgttgtgctaagtgtcatagagaagcanatgaaaatggcaggtatgattcta

SEQ ID NO: 70704 - DNA, 438 bp, Zea mays
  unsure (1)..(438): unsure at all n locations
tagctccatctatgntatggattgcgtttgagtcatttctattgccttcggcccttcttgcagcttcctgacttccatggatagcaatgggtccctgatccgaaggtatcttcatgcaaagataggcaggatgaaggattgcttcaaaggcattgagagtaccacgaccaataattgcattgtaaggatattccatgtcaacaatgtcaaacacaacttgttcagttctagtgttgttgatgaatccgaaggtcactgacatggtgatcttgcccaatgctattatctgtcttcctccgaagccacagagaggatgtgtagcatcatgaatcttatcttctggctcttgcatttgtctgaaggctttaacacatatgatgtcagctgcactgcctgtgtcaaccaagacattatggaccagaaattctttgatacaca

SEQ ID NO: 70705 - DNA, 340 bp, Zea mays
  unsure (1)..(340): unsure at all n locations
ngaaggactgcttcggcatgagagcttccgaacgtgatgatctcttcgtgccacagagtcgctttatccgagcgcaagttacttatcgcagaatgggacgagtgaggtatccgtatcccggaggcgtangagtccctccgctcggtcagccttggctgcttacgtgtacctctgcgtttccaggatccgctgtcccaagtagtcaagaagcactgaagaaatcctgctcataagaggtccttgttcgaggaaaaaattcgacgcagagggggtctccccccttttagcccccgatggagggtcgggcttttgcgatgctaggcctgaccttcctagacaa

SEQ ID NO: 70706 - DNA, 414 bp, Zea mays
actcagcttatactcggccgcattgttagaggccgggaatagcagctgtgtagcatactcgaggtgctcgcctccaggtgcagtgaagagaattcctactcctgctccctgcagcttcagcgagccatcaaaatacattcgccatacttctgcggtttctggattatccggcacttgctgttctgtccactctgatacgaaatcgaccagtgcttgagttttgatggcagtgcgaggtctgaactcgatatcatgggatcccaactcgcaagcccacttggctattcggccaatggcttccttgttgtgaagaatgttccctattggaaaaccagtaactactatgactttgtgatcgtcaaaatagtggcgcagctggcatgcacgtagaagtactgcatattatagcttctg

SEQ ID NO: 70707 - DNA, 448 bp, Zea mays
  unsure (1)..(448): unsure at all n locations
ctcagcttcttagggagaacacattntatgattaacatatgttcattttgagaaagacaggatatgtagcgcatgccaaacaggaaagcaagttggtgcccatcattcacacaaaaacatcatgacgaccgacaggccactggagctcctacacatggacctattcggcccgatcgcttacataagcatcggcgggagtaagtactgtctagttattgtggatgattattctcgcttcacttgggtgttctttntacaggaaatatctcatacccaagaaaccttanagggattcttgagacgggctcaaaatgagtttggcttaaggatcaagaaaattagaagcgacaatgggacggagttcaagaactctcaaatngaaggcttncttgaggagganggcatcaagcatgagttctcttctccctacaccccgcaacaaaatggt

SEQ ID NO: 70708 - DNA, 444 bp, Zea mays
  unsure (1)..(444): unsure at all n locations
tagtacccataagcctcatgagcttctgccagaacgtcgttgtgaacactgtgtcgcggtcggagacgatggactgcggaacgccgtggaggcgcacaatgtcggtgaagaatgcctgtgacaccgtctctgccgtgtacgggtgcgcgagtggaatgaagtggcagtacttgctgaagcggtcaaccacggacaggatcaccgtcttcccattcacgcggggtagcgcctccacaaagtccagcgcgatgtcggcccagaccgtcgagggcacgggtagaggcaagagcaaccctgctggatggagatgctcggacttgtaccgctgacaagtggagcacgcccgcacaaattcctgcaccagacgtcgcatgttggggaaatggacatcacngctgagcctgtgcagtgtacggtggacgccctcatgcccgtcgccgtgga

SEQ ID NO: 70709 - DNA, 369 bp, Zea mays
  unsure (1)..(369): unsure at all n locations
ttgtatgcaccccgacacccgttttcngaatgggtgacgtgttgttttataatgcgcaaaaccaccccaaacatgagttntggacctaaagtagtggaatgggcatgttcgttgtaaaaaacgaagaaatggttccggttgcaaaaactcgtgcttgtatgcaccccgacacccgttttctgaatgggtaacgtgcggcaacgaaattgcgcgaaaccaccccaaaatgagatttggacctaaagtagtggattgtgcatgttctttgagaaaaacaaagaatggttccggtgacgaaaactcgtgctttgttgcaccccaacacaccctttctgaatgggtgacgtgctgcaatgaaaatgcgcgaaa

SEQ ID NO: 70710 - DNA, 461 bp, Zea mays
  unsure (1)..(461): unsure at all n locations
tgtcgagaattcagcccaagtgacggtgtcagcggcagcatgtgctgtctaataagcatcccatcgatcgacagcagggccaatgaggtgacctgatgcataaaggaccttttcttgattagtgcattgcgtgatattaaacatcttttccatggcttttagccaatcgtacgcctatagtggatctggggagctggagaatgtgggaggcttctagctcatgaactcacaatgtttatctctgggtggtggttggtgtgggtgatgttggttactgttttgttgggcttgcatattggccattgtgttggacatctattgtagtagctggatttgggcggcgaagaaagcttctgccccagcgggtggagaatttaggggattcatctgtgattctangtggtnggtggtgtgggtgatgttggctactggtttgttggcttgcatattggccattgtgt

SEQ ID NO: 70711 - DNA, 462 bp, Zea mays
  unsure (1)..(462): unsure at all n locations
ntatcaaatggacgtaaagagtgccttcctcaatggaccaatcaatgaagaggtctatgttgagcaacctcccggctttgaagatagtgagtaccctaaccatgtctataaactctctaaggcgctttatgggctcaagcaagccccaagagcatggtatgaatgccttagagatttccttatcactaatgaattcaaagtcggaaaggccgatcctacactctttaccaaaacacttgaaaatgatttgtttgtatgccaaatttatgttgatgatatcatatttgggtctactatcgaatctacatgtgaagaatttagtaggatcatgacacanaaattcgagatgtctatgatgggggagttgaagtacttcttgggatttcaagtgaagcaactccaagagggcaccttcattagccaaacgaagtatactcaagacattntaaacaagtttgggat

SEQ ID NO: 70712 - DNA, 423 bp, Zea mays
gacctatgaaactcagctgagtcagttctttcagagaattattgatgcccaaagaaccaataagggtatgaagcatattcatgagaaaatagatgccgaccaagcaaattgcttcagaaaagatgaccaaggaataatatggtttaatgatcgcatagttgtgcccaaagatgctgcggtttgccaacaaattctggacgaagctcatcttaagcgatattccattcaccctggaagtactaagatgtatcaagatttcaagaaacactattggtggacaaaaatgaagattgaaatcgcacgctatgtggcaagatgtgacacctgtacacgtgtcaaggcagtgcatatgaagacgctggaccattacaatccttgcccatcctaacttggaaatgggaagatattagtatggatttcatt

SEQ ID NO: 70713 - DNA, 414 bp, Zea mays
  unsure (1)..(414): unsure at all n locations
ngacaatgaagagatggcgctcgtcatcaagagctttcgtcatatcctcaaacaaaggagggggaaagactacaagtcccgctccaagaaggtttgctacaaatgtggtaagcccggtcattttattgctaaatgtcctatgtctagtgacagtgaccgaggcgacgacaagaaggggagaagaaaggagaagaaaaggtactacaagaggaagggcggcgatgcccatgtttgtcgggaatgggattccgacgaaagctcaagcgactcctccgacgacgaggacgccgccaacatcgccgtcaccaagggactcctctttcccaacgtcggccacaagtgcctcatggcaaaggacggcaaacggaaaaaggtaaatcccactcctncactanatatgaatcttctagtgat

SEQ ID NO: 70714 - DNA, 462 bp, Zea mays
  unsure (1)..(462): unsure at all n locations
tatgaagattcttcatcccaatgtgggctagtcgacgatgctatagccaacccatgttagtcttagcaattaagcgagtatcgagttcagctctattaaaatcaactaagtatagctgaccctcgagtactcccttaaatgctactgaatcatcacttcttctaaagacactaacacctatatctgtaaaaagacaattgttgcccattttgcataattgagaaactgaaagcaagttgtaatctaaagaatctacaagaaaaacattggaaatagaatggtcaggagatatagcaattttaccaagtcctttgaccaaaccttgatttccatccncaaatgtgatagctcgttggggatcatggttnttctcgtaggaggagaacatncttttctccccagtcatgtggtttgtgcacccgctatcaatgatccaactcgagcccccggatgcataaacct

SEQ ID NO: 70715 - DNA, 462 bp, Zea mays
  unsure (1)..(462): unsure at all n locations
tataaaactcagcttaactctccgagacctttcccaatctttctaccattgttagttcattatcgtatgtgatattctatgcatatttacttcatttgttctcttgtatggtgtactgtttgttccctaatttgaatggatggatgtatgtatgcttgcaatcgcatagagaacgatccggttgaagagcccgaggaactcgcaggagaagcccctgagcaccagtcggttggtggaggcaagtgtcccttgacctatctctgtcctattcattctttaattcacctcccgcattacacatttatgcctaaggattgactagctntgttatccatgtccttgtttacctatttgggttggattattattgcttagctttatgctattgcttaactctaatcaatgaacatgatgagattatctatgatacgctgttctcccctctcttatgatgatagtata

SEQ ID NO: 70716 - DNA, 461 bp, Zea mays
  unsure (1)..(461): unsure at all n locations
taaagtcggccggcgatcgtgcccctccctctcctcggtgtcctctcaccttccctctctataaaatggcaccgagtgccggaccactccaccctatcaccctacccttgctctcacacgctcctcctcgctgctcgctcatctgtgtgtgtgttcgcgccatcacgccgctcgtcgtgattggaggtccctgctccttccccgtcgccgacgaggacgaccacaagctcactggcgccccttcgacgaatccctgcctagagcattgtccgccatagagaaaccggcccggcctcaagctcgttgtctcctctgtcgttgaagccgacagccggaggtagaagatgagtcggttctgttttaatccctgacnntttgtaatatggcgctcatatttataccacgtttataaaaagcttaactagagtccttggtttcttatgtgctagtctataaaatct

SEQ ID NO: 70717 - DNA, 452 bp, Zea mays
  unsure (1)..(452): unsure at all n locations
ntgatcaaagttntaatgtcaataattaactctactttctgttggtgataccagatataaacaagcatcaattaataattaataaaaaagaataaggatgaaatggttcatttgacaaaactgatttactgtaacataaaattgttattgcgccatgatacacagggttgctttcaaggaaaaaaaggaagatttctagtactactttgttccagtgacttctaaatgatagtttcctcataatacccaaggtcatgtaggaacctgactaaactaagcaccttatgttaacacagtgaaaacaaagcactacttcaaaaaatccagcgcttacaaaatgcctgaattcatagggatatatagcataatacaatgtctatcanaacgtagcacaacaacaaatggtgaaatactaaaatgcattctagacaggtactgtagttatagggtta

SEQ ID NO: 70718 - DNA, 379 bp, Zea mays
tacaagaaggctaagggcgaggcacaccttggctatgagtgtgactcggattgttcgtcgtccgactctgacaacgaaggactcgccgccaccgccttcaacaaatcgaccctcttccccaacgagcgtcatacatgcctcatggcgagggagaagaaggtatgtactcgaaatactacttatgcttcttcaagtgaggacgagtctagtgatgatgatgaaatagattattcatgtttattcaagggcctagatagaaccaagggtgataaaattaatgaattaattgatgccttgaatgataagaatagattgttagaaaagcaagaggatctcttatatgatgaacatgataagtctgtagaagctcaaaaatccc

SEQ ID NO: 70719 - DNA, 396 bp, Zea mays
tgagggtctcggcgtagatgatgttgaggcagctgccctcgtccatcaagaccttggtgagcctgacatcgccgacaacggggtcgacgacgagcgggtattttcccgggctcggcacatggtcggggtggtcggcccggtcgaaagtgatgggcttgtcggaccagtctaggtagactggcgccgccaccttcaccgagcagacctcccggcgctcttgcttgcggtgccgagccgaggtattcgccgcatgccctccatagatcatgaagcagtcgcggacctcggggaacccccctgctgggtgatcttcgttcttgtcgtcgtcgtgggccctgccaccctcggcgggtggcccggccctgtggaaatgacgccgaagcataacgcactcct

SEQ ID NO: 70720 - DNA, 401 bp, Zea mays
  unsure (1)..(401): unsure at all n locations
tcangaattacagcttcattagccttgtcacaaaagaagggatccttctntgtgaagcatggatatttttacgaagcatggatctttttctttacgaagcatgaaaagaagggaaggtgtttttttgccgaaggctcaaaaacggtatgtatgtaaagtttcatgcatcgcaaaaaaataatttacatatntgatccaaagctacacacatcaaatattacagtcttgttacaataaaagtttaatgtccattctagtgtctcatacattgaccatttcaaaatgtttttacaataagagctattcctctttgaggaccttttctgcaacttcgttcagtaatttgttaacaacttcatcaacaatagattcagccatattaatgatctccagcgctttct

SEQ ID NO: 70721 - DNA, 449 bp, Zea mays
  unsure (1)..(449): unsure at all n locations
tggacagtngtttgcgatggttcctggggaaccttcngtgcatgatctgctgctgtcctagttgcgccttctaaagtcaaaacatgttatgcagcaaggcttgacttcagttgtacaaataatattgctgaatacaaagcacttctgttggggcttcgaaagttaaaggcaatgggaataagaagggccatccttaaaactaactctcaagtcatttctggtcatgtagacaaaagtagtaaggcaagagatccgaagcttgaaaaatatttggatacagttcaaaggttggaggcttcttttgaaggtttttcagtcaagaatattccaaaaggagaaaatgagcattcatatctgttagccaaaccagcggcacacgggatccctctaccttcggaagtattttttgatacaataaaagcaccttctgttgaacttatggagagagc

SEQ ID NO: 70722 - DNA, 471 bp, Zea mays
tcagcttaagtgggaaggtcctttcctagtggtatcttcgtcaagacctggttcatacaagttgaaagacatggacggcaatgatgttcccagatcttggaatgcagatgagcttcagagatattatgtgtaaactatgtaattttcttatttttttccctacggcacccttttcctttcaagaggggagaaaggttttaatggggccataggttgtaattttcatttttttcttgcgtagccctgtgcaatacaagggacaaattcccctacatgtaaaatgtaaaatctaggattacaccattgagtgtaagaaagtataaagaagctccaaagtcgtccctaaggggatgcagagctaagatgccacctaagtaaaaggtgaagaagctccaaagtagttcctaaggggatgcagagcttatatgccacctaagtaaaaggtgaagaagctacaaagtcgttcctaag

SEQ ID NO: 70723 - DNA, 461 bp, Zea mays
  unsure (1)..(461): unsure at all n locations
tctgacgagctntatcatatgagaagagaagacgatgtagtcttagacaaaaaacactctagatgtctcaacataagaaccgtcttccaagaagagcaaggccactctcaagggatttacagttagtcccttggcatgtttcatataagcaacatttgcttccatcttatgatgggcagtctgatccgaagaaaattctcatgagctatgaagcagctattacatccttcagtggaaacacggtggtcctggccaagtcattcatcatggttgcaagaggaataccttagacttggtacctgtaccttcgcctagattggtaaatacatgtgaacaaactcaagaaccagttgattaccaagtttcaaggctttccaagcaaaccacttatgacatatgcattgctcaataagcccaagaggtagacgaatccctcanaagatatatatgaaggtttgttt

SEQ ID NO: 70724 - DNA, 473 bp, Zea mays
  unsure (1)..(473): unsure at all n locations
tatcttaagggtgaagaattaatttttgtgtgctaaaggactcaatggggtttccttgagttcctttgatcttaaagaaaaatgtgttagtttgttgataatacttatcatatgcttcttgttgtattatatggtgataatgcaaaattagtgcttccattgatatgaatcaattggtatctactgtgtttatcctgtgatagatattcatgtggttctggcgctttaaatcggtatcttaatggtgaatagtggtaggttgatattcctatggtatatttatttaattggtgtttaactctgattctgtgcatttgtgtgttatatgcatcacggtttgattcttcacacaatgcatcccacaggtgctaaggtgtagcaatgcttcgaattagcctaagtatgtgcattntggcatttaaggccaaagttaagattttaatgtaagcacatatttatggggagcattctat

SEQ ID NO: 70725 - DNA, 430 bp, Zea mays
tgggagaacacattgtaggactaacaaatgttcatttttatatagacacaatttgtagcgcatgctaagcatgaaagcaagctggagtccatcattcacacaagaacatcatgcaactgatagtccgcttgagctactccacatggacctattcggcccgatcgcttacatatagcatcgacgggagtaagtactatcttgtaattctggatgactattctcgcttcacttaggtggttcttttgcaagaaaaatctcaaaccgaagagaccttaaagagattcttaaaacgggctcaaaatgagtttggattgagaatcacaaggattataagcgacaatggaacgaagttcaagaactcttaatatgaaggatctatcgaggaggagggaattaagcacgagttctctcattcacacctcaacaaaat

SEQ ID NO: 70726 - DNA, 470 bp, Zea mays
tgaagtaagcacggtccctgtgggacagtcatattggagaccttacgacaatcgattttaccatcacccatacccccagggaaccaggatacccgaattcgcaaaattttcgggtgaccaagaaaagagcacacgcgaacacataggatagttttttgcataattaggagaatcggtcgacatagaggtgtttcgtgtttgtttattttcattatctttaacaggaaccgcattcgcatggtatgccacattacctcctaattctattttgtcatggggggatttagaacaaaaattccatgatcacttctttttcggtaactatgagttagatttggtagacctagtggccctgcgacaaggaaaatatgaatcggttaatgagtacatccgcagattctgggatacaagaaaccaatgctttcaaattcatttagcagaaaatagctagcaggattagcctttaatgg

SEQ ID NO: 70727 - DNA, 409 bp, Zea mays
  unsure (1)..(409): unsure at all n locations
ntctcactaaatcgggacagggcctcatggacgtgtgtaagtacgcgtaagcggcaaggccgaccgagccgagggattcccacgcctctgggatacggatacctcactcgtcccttccgcgaaaagcagctcttgctcacacaaacatccctgttaccgacgaagtccagatgctcgaaacaggaggaaaaaaggcgcagcttcgcaagtgcagcgagggtgttttcttctggcctcggcggccgcagaaagcacacgctacaagacgatctgatcctgcaggcttgggtcttcacgccgaagggagccgtagcaccctcggcatcgacgacgtctacaacaaagcccgacccagcctcgggcggcgccgaggtccaggggctctcccgggaatccggcccgagcaggc

SEQ ID NO: 70728 - DNA, 396 bp, Zea mays
  unsure (1)..(396): unsure at all n locations
atatgtaggatgttccgacttccgggaaggtgtaatgtgtgtaaatcccacataagcaatcctagtagatcaatggaaacataaaatatcaaaataaaatactaagagatgtaatatttgttttgccgatctcttcagagttcagactccctgagtcctacgctataggaaaatagagaaattttgttgaccgaaatagtntctgtggacttctaaaacactccacgaaaaattttcgttgaacagaaccctagtgctcgtgtctccttcaatttattgctatagagagtggattagctaaacaaggtcttaataaaagaatttaacagccgcgtaagttaattggtccattattgttttcgtgttggttgagttgaggccggagcccaatgggct

SEQ ID NO: 70729 - DNA, 489 bp, Zea mays
  unsure (1)..(489): unsure at all n locations
acactatatgaataccttcaagcttgcagtgcactgcagggtctgacttcgtagagggagtcccgtattaacttatgtgnnctagtgccaacacttataccctttcactaanagggggagaagaacaagtcttgggcatggtcctgcagggggtcgactcttagagggaatcccnncgggtacccgagcccctcgaattctgcctcttatatgtggaagtctgtcattaccaaatttcactggtgccgctcgtntttaccaagcgtctgtgacctggggataaacctctcggctgnttactctcacacttatgatcgcncttgggcagtcactaatccctccnttttcgctcagctcggtgcgtagatagctgaaagaaggctgccgcacnncgatctgcccttctccaacatgttggngccacgcttgaatggcngaatggtgcgcctggggatgcggtnattttctttccttaccgcccatctgggg

SEQ ID NO: 70730 - DNA, 421 bp, Zea mays
  unsure (1)..(421): unsure at all n locations
tctggtaccgcttagcccgacgaanatgttactgagaggtgtgtctttcttgttntattggtgctaacaaggtagaaaaaatgtttcagacgccatgaggatatgatccttttattacaacaacttataattattatttatatgtaccaggtgtccctgcactcactggagaaggccatcgagcaggcacaggcgcaatgacctgaggcgaacgttcggggccggatccgctgactcccgttcggcggcctcacgttgtgcttaatttgtggtctgcttaatcagtgtgcagaacagcaaaggaacccaagtggaggaaccaatacgattgctgccacatagtaaaagacttgacacaatntattttgtcgcacaaatactttgtgcctgttgatcttcttagtgtctgcacaacaacttc

SEQ ID NO: 70731 - DNA, 394 bp, Zea mays
tccatctatgttatggatcgcttttgaatcatatctgtttccttcggcccttctggcagcttcctggcttccatgaatagcgatgggtccttgatccgaatgtatcttcatgcaaagataggcacggtgtagaattgcctcagaagcatcgagggtgccacgaccaataattgcattgtaagggtattccatgtcaacaatgtcaaacacaacttgctcatctctagtattgttgatgaacccgaaggtcactgacatggtaatcttgcccagtgctacaatttgtcttccttcgaagccacagagaggatgggtagcatcatgaatcttatcttctggctcttgcatttgtctgaatgccttagcaaatatgaagtcagatgcacttgctgtg

SEQ ID NO: 70732 - DNA, 475 bp, Zea mays
  unsure (1)..(475): unsure at all n locations
actcagcttgggaggttcttcattctcacatgtgctaagcggcgatgttacatccagcccatgctagtcttagctattaagcatgcatctggaccggcctcttcttttgcaaaatcaactaaataaagtttgccgcctaatacacccttaaaagctagtgaaccatcacttcttctaaagatagacacatctacatttgtaaatagacaggtatatcccatatgacataattgactaacagatagcaaattatatccaagactctccactaaaaatacattagagatagaatgctcattataaagtgcaatattttctaacccttttaccttgccttgattcccatcaccgaatataattgaatcttgggaatccttattcttgacgtaggaagtgaacatcttcttcgtccacgtcatatggtntgtgcatacgctgtcgataatacagcttgaacccgcggatgcataaacct

SEQ ID NO: 70733 - DNA, 455 bp, Zea mays
  unsure (1)..(455): unsure at all n locations
ngctaatgtgtggtcatcgtgttcatgttctggtccattcatctcgacagtgttgaaaccctgacgaagcaacttgtttcgaaagtgggcctcctctgtggagcagtttctttgtggaaactttgattcctctttttttttcttttttttgttaccagctttgatgcctaattgctggtggggcatgcagcgtatgcgattatttgtctgctgctgaaggtcatgatggttaccatctatgatcccacaccaaagtgtcattttttttaaaaaaaaagaggaaggtttccatctgaaccatcattcaggttgcatataatattattatgatttcaagggagatggcagtgccttatgatcccctggaatcaggctttattgtgcctgccccattacaagttatatgctccactcttctccttttgcggcgcccctntnnttttctcttcttactg

SEQ ID NO: 70734 - DNA, 471 bp, Zea mays
actaagcttctaagggagaacatgtgataggtttgactaacgtgcaattcgaaaaagatagaccttgtgcagcttgtcaagcaggtaaacaagtgggaggagcgcatcacagcaagaatgtgatgaccacttcaagacccctggagctgctgcatatggacctcttcggacccgtcgcctatctgagcataggagggagtaagtatggtctagttattgttgatgacttttcccgcttcacttgggtgttctttttgcaggataagtctgaaacccaagggaccctcaagcgcttcctcaggagagctcaaaatgagtttgagctcaaggtgaagaagataaggagcgacaacgggtccgagttcaagaaccttcaagtggaggagttccttgaggaggaagggatcaagcacgagttctccgctccctacacaccacagcataatggtgtggtagagaggaagaacagga

SEQ ID NO: 70735 - DNA, 466 bp, Zea mays
  unsure (1)..(466): unsure at all n locations
tggaggcatcgatggggagcctacttgatgtagactcttctttcttttcttctatcactntgaatgcaatgggttgcacctcgggtgtggaggtgccgcctttctcgacgatttgtttggagcctttgatcatcaactcaaagctcacaaactttcctataacctcctcggcagacattagcttatatctaggatcaccacgaattaattgaacttgtgtaggattacgaaaaacaagtgatcttagaataaccttgaccatttcatggtcatcccattttgtgctcccgaggttgcgcacttggttgaccaagggtcttgagccggtgtacatggcttgtggctcctctccttgaatgaggatgaatcgaccgagctcccccctcgatcgtctcccgcttagtgatcttggtcacctcatccncttcatgcgtggtctntagcacatcccacatctctttggcac

SEQ ID NO: 70736 - DNA, 389 bp, Zea mays
tatactgagggactggaatatatagtgcgtcacgcgatggttaataactatcataagagcagatcgccgaagctatgcaatatgccaaggatttgaagtatcccctatgatccttggtgtttaatggcactggtgaagacgactttctatactgccttccggacaatgaggagatatctatttgtcgggagatggctaaaaatataggattcccaaagctagaggttggcctatctgcaatgccaaaggatgaacttgcagacaaccttgtctataatagcttgaaggtatatatatttctgttgtaaaataaattatgtttatagattttctttttattgctgtgttctcatacattcttattattatggtttgaacctcaggaaagc

SEQ ID NO: 70737 - DNA, 313 bp, Zea mays
attttctgaattttatatattgatcaccacatcgttcacattagcttccacacgcttgccccagtgatcggcttagcatgtttgaatagctctttggtaagtcgctccagcgttttttaagccgaacgacatggaggtatagtagaaagcaccgaatggaatgatgaacgctgttttttctttcgcttcttttgccaagctaatctgatgatacccagagtagcaatccaagaaggacagcacagaacattcagcgatggaatctaccacctgatctatcctatgaaacccgaagggatcctttggacagtgt

SEQ ID NO: 70738 - DNA, 372 bp, Zea mays
  unsure (1)..(372): unsure at all n locations
tctaaagggagaacacnatttaggactaacaaatgttcattttgagaaagacaggatttgtagcgcatgccaagccgggaagcaagttggcactcatcatccacacaagaacatcatgacaagtgacaggccactggagctcctacacatggatttattcggcccgatcgcttacataagcatcggcgggagtaagtactatctagttattgtggatgattattctcgcttcacttgggtgttctttttgcaggaaaaatcccatacccaagagaccttaaagggattcttgagacgagctcaaaatgagttcggcttaaggatcaagaaaattagaagcgacaacgggacgaagttcaataactcacaaat

SEQ ID NO: 70739 - DNA, 462 bp, Zea mays
  unsure (1)..(462): unsure at all n locations
tgtgaaggttcttcatccncacatgtgctaagcggcgatgccacagccagcccatgctagtcttagcaattaagcatgcgtctagaccggcctcctcttttgcaaaatcaactaaataaagtttgccgtctaatacacccttaaaagctaatgaaccatcacttcttctaaagacagacacatctacatttgtgaatagacaattatatcccattttgcataattgactaacagataacaaattatatccaagagactcaactaaaaacacattagatatagagtgctcggatgaaatagcaattntacctaacccttttaccttgccttgattcccatcaccgaatattattgaatcttgngaatccttgtttttgacgtaggaggtgaacatcttcttctcccccgtcatatggtttgtgcatccgctgtcgataatccagcttgaacccncggatgcat

SEQ ID NO: 70740 - DNA, 463 bp, Zea mays
  unsure (1)..(463): unsure at all n locations
ttgaggtgcttgagggagttaattcaattcttaattaactcaagctatcaatcttcaattgatctatatatttaagactgacccaaagttatttcaatttattatattcaaaactcatatcatctcgggaagatattgatgttgtaggaaataaagaatcatcatgtgcggaaaatcaaggcctacaacatggatgaatgtcaaaggatggtaacacttatgcttttaagtgcaagtatcttaaattatcatttcttatgtgtcttgtgtagtcacacagaaaaagggagcacttaagatgtttttaaaactatgtcaccattctttgaagaaattcctctcatatggtagattgcatattcttcatttctatattatgacaatctacatgctctanaattgttgccttttcccatggcatgcgttacactaattattctattattgccatgttctagatata

SEQ ID NO: 70741 - DNA, 439 bp, Zea mays
  unsure (1)..(439): unsure at all n locations
ttacggacctatgaaactcagcttacaggctactggtggagctagccgaagcactatctgtgcttgagggtggctggagttggctggccacggcggccgaagctctggcggcaatggcgggcggaaataagctcgccggagctaaggaaaggtggctggccggtgagggtgagtgcggggcgaagagaggtgcgcccggngagactttataggcgcgggcgggcacggccgagggcaggggcgcgcggcggacttgaccggacgccggggtgagcgcgcgcgcgggttgggcgagctctagcgtgccgaccagggtcgaacacgtgtgcccgtgcgttctgcccaagttctggcgcgtgtggtcgctcatccgagcctgctctcgccttggtcagtgcacaaaacctcttctctccctacaagctacctttcttgtgtg

SEQ ID NO: 70742 - DNA, 430 bp, Zea mays
  unsure (1)..(430): unsure at all n locations
actcagctgcattgattttaaattcttgattgtactatggcttgtctaacctagatgagataaccgccaacaaagcgagtgaaaaagcttaactcggatcaaacttgacaagtcttagttttaagcttttagcacttaaattcttacttcttatgcaattgttggttcttgaaatatgcatgaggtactgcacttagggggagtattcaaaactcaaatcactcatgaaaacccctagtgcaaggccaaaatgcaaatttcaccatttgcctattttctctaaaaattatctagcctatggcaaaatattttgaaaattatgagaaaatatatgagggtgccaatacctgtcccaacaagtgttattttgtctgattataagttgggatttggtttggttggaaattagatagaanaattgaaaaatttc

SEQ ID NO: 70743 - DNA, 464 bp, Zea mays
  unsure (1)..(464): unsure at all n locations
taagctgataggaagaggtggacaattcacttatattatattccaacattccccctcacgtcgagcctcttttgggtctctaacgtggaatataggagtgagcaacaattatttatttaattgtgctaaccagaattcgaactcgagacctctggctttgataccatattaaatgatgaaaccctaaccctaacaggggttgggtgatgtattaataggatgagtaaactaggccaggcccattacagaggggtgagatggtcattacacggngaagaccccaaaccctaaacgggtattctaacaccccccgcagtcacaactctaccctgtacagatgttgagactggatcgaaagtctaaaaatacactcgacggtaaccccttggtgaagatgtcgacgaactgcagcgtggtggggacgctgagaacccgaacgtcacaggcagcgacacgctcgcgga

SEQ ID NO: 70744 - DNA, 475 bp, Zea mays
  unsure (1)..(475): unsure at all n locations
ttggagtcatggtgctccatattatgaaggatggtgctgaagctcccatattattgntgnggtagtaagaagatgatccttcttataatgtacgcgtcacctagcttaattaaattaatataattgagcttattaatgattagatttaaatgataattcatgtctttaacaagcttattatctttaattctaaaggaattatattcgtttaaagctacataatgttttttctcacgtacattgcttgtgtcgtcatagagctcgtacaattttaactaaatcttattaaaaattaaacataaatatttgactaaaaatatccatgctaagagaatcatataagcaattnttagtatgagtgttcaagtgagtttatttttctccactcatgctangtttcttaagattcttaatgggtttcatctagtcgtgagtgactcttcanacacctatcaatagtctgtangtagcaagt

SEQ ID NO: 70745 - DNA, 445 bp, Zea mays
tgagctccatctatgtgatggatcgcttatgagtctgttcttttttcttcggcccttctggcagcttcctgacttccatgaatagcaatgggtccttggtcctgaagtatcttcatgcacagatatgctacatgaagaattgctttcaaggcattgaaagtaccacgaccaatgattgcattgtaagggtattccatgtcaacaatatcgaatacaaaatgatcagaccttgtgttgttgataaatgcgaaggttacttgcattgtgattttgccgagtgctacaatctgccttcctgcatagtcacaaaggggatgtgtggcatcatggatcttgtcttcgggttcttgcatctgtctgaaggccttagcatatatgatatcagctgcactgcctatatcaaccagaacattatggaccagataccctgtgatcacacaagaga

SEQ ID NO: 70746 - DNA, 451 bp, Zea mays
  unsure (1)..(451): unsure at all n locations
taacctctgttcgtaggatggggatttgcttattgtagcnctcgtcttcgacattcttttgcgctctcaaagcgttgctcagtattaaaccctatataaaaaagaatttgtataagaataaaagaatggttcaaaaattataaattctcaaatatacaattctcacaccttcagactattatatgcaaggctatccgcaagatcttccttcgtcatagcgcagagtccagcttcaagcttcggaaaccccatacttctagccatctcccgacagacagataattctttgttgtctgggagacagtatatgaagtcatcttcgtctgtcccattgaacactagtggccccttaggatacttcagttctcgggcataatgattagcttcaaaaatctcttcttcagataatttcttccccgangcatgtcgcaccatataatcacgtattttg

SEQ ID NO: 70747 - DNA, 320 bp, Zea mays
  unsure (1)..(320): unsure at all n locations
tctaaagggagaacatgtgataggtctaactaatgtgcatttcgtataaagatatgacttcacagcttgtcaagcaggcaaacaggtgggaagctctcatcacaccaaatatgcgatgaccacgtcaagacctttggaaatgcttcatatgaacctcttcggatccgtcgcctatctaagcataggaggaagtaagtatggtcttgttataagtgatgatttttcccgcttcacttgggtattctttttgcaggataaatctgaaacccaaaggaccctcaagcgcttccttaggagagctcanaatgaagttgagctca

SEQ ID NO: 70748 - DNA, 454 bp, Zea mays
cttctccagaaatggatgaatacattcgggccgacaatgattttcgtcaaagaagggaggaggctttcaggttttctgaaatgaccaggggcttcggaggaaggtttaacccgaggcatgtgagatcaattcacaattctacacaaaatgatgacagaggaagccaacagcaaaggccacaatgctcctcacaggcttctggtcaacagcaaagctccttccggccaccagctccaagaggcagaggcgccaggggcttcggaggaagatttggcgatcaaccgagaagaatcttttgcttattctgcggtgagaacaaaggccatactaccaggatgtgccatgttactatacagaagcaaaaggaaatagctgaagcagcagcacaacaagcccagccgaagcaggtcatgcatacagcttcgtatcattcgccctacatcccagaatatgt

SEQ ID NO: 70749 - DNA, 419 bp, Zea mays
  unsure (1)..(419): unsure at all n locations
acacatagaatactaagcttgatgtgctntggctcccttgttggaagcaaattgtttctttaatgccagggtgtcttccattatagagcatgcttcgagcaattttaatatttttgttctctaactcatgctcggcaattttagcatttaatttagctatgtgatcattttgttcttttatcatagcaatgtgatcattcatagcatcaacattaacatctctacatctagtacaaatattgacatgttcaacagtagatgtagatggtttgcaaacattcaattcttctatcttagcatttaaactagcattctcatctctaagacaggagattgaatcattgcaaatgctaagctctttagataaattttcacatttttctacttaagagcattagcatttttagcttcacaaattc

SEQ ID NO: 70750 - DNA, 211 bp, Zea mays
  unsure (1)..(211): unsure at all n locations
gcgaggcgcatctttgcatggagagggactctgattgctcctcgnccgactccgacaatgaaggactcgccgccaccgacttcaacaaatcaaccttctttcccaacgagcgtcacacatgccttatggcaagggagaagaaggtatgtactcgcaactctacctatgcttcttcaagtgaggacgaatctagtaatgtatatgaagaata

SEQ ID NO: 70751 - DNA, 425 bp, Zea mays
  unsure (1)..(425): unsure at all n locations
tatctatgctatacttngtgcgtgcaggaagttgttccattatttttatgcccacaagatcgtggtggtgacctccttcccgttaagggcaattctccacaactctaacgccacaggaaacatcgtcaagtgggccgcggagcttgctgagttccaactggacttccagccttgccatgctgttaagagctaggtcctggctgacttcatcatggatggaccccctccccgagcgctcctgggggtccggatcccgattcggaccccacacctgcggagcctagggctccggtcttcaccgagccccactggacgctcttcttctacggatctgcccgcctgcaaggtggcggttgtacacccggttctagaaggcaaaccgaatgcgaaccatgtacgtgccaggatcagttattcacgtacac

SEQ ID NO: 70752 - DNA, 364 bp, Zea mays
  unsure (1)..(364): unsure at all n locations
tcggcacgagcaggagnntggggtttcatatatttcanatcatcatccanaacgctgaccatcctcttcctcggagttgttgttgcagtatttgatagctttggaaaccctgtcacaactggaggactcgacagatttggctattcttctgttgttttctttgtttctggctcttctaccggatcaacactagcttcggctaacatggcagggacaacttcggcattctcaataaacttcacctcctctatcgtgggcactacaactgtcttttctaaggattatagcttcggcctacgggtcaagaacttggctctctntggcttcggtccactagaagaggtcgaagtggcaatntttcttt

SEQ ID NO: 70753 - DNA, 392 bp, Zea mays
ttactcagcttgaaccgaggacccgcgtcaccggattagtttaaccgtgctcgccggagttctttccccgccggcgcacgtggaccgggtaagcctctgcaccatttcccaattcgttgcgcgcatggcctctacatcaccccgtggagctcctcgtgcaccttaattgaactataccgtcgtgatttggccggaccaggaaccgccgacgacccccgccgcctgtgctcgtggccagggtagcttcggccacctccgacgccgacccgcacaccgttgtgaccgttgtgacctcccggacgttaccaaccaccccgccggagctctactgccgccggtaagccttgtcgccgtaatctatgccgcgggtactgtttaagtcaactagggag

SEQ ID NO: 70754 - DNA, 474 bp, Zea mays
  unsure (1)..(474): unsure at all n locations
tcacttcacttagccttcaaagtaccttcaagctatcttgtgtctttaagctgaaggtatatttctaaacatatgtaatacaaagtaggatggaataaataatgctaaggctcaagagatgagttttatacttcattattgtctattatcattatgtttaatattgttttattcatatctctttttaaaagaccttcgttcttaagcgaacactttgaagaagtgataacttaaggacaaaggtccatacttcttaacttgtgtggccttgtttttggtgccatgtagcaattgaaaaacaagtgctcaacattcccgttgaaggaaaatatcatgatgctaccggtacattagctaggctagagtttagagtgctcatagaaattagtagattatctcttagctgagatgtttgtgtgtgtaaatacatataanaatcactattgtttgaaatttgaaaaagacgggaaaact

SEQ ID NO: 70755 - DNA, 410 bp, Zea mays
gacacttaaaactcagctatggagttgcgatacacactcaattacgcagaaccttactttgtggtttggccacgaacaggctgttcttcacggtgcggcgaaccgatttaggggaaaatggcgctgcggtgttcacgactggaattgaaggcagagctttgggctatacggctatatggggttcgagttttgctgcgcacaaccaatttgggaggagggggcagaggcaccacgagattatgcttcgattcaacctatggtgtgcgcgatgctcatacctcgccgcgaagcatggctatctatatatgcgccgggccagaggtcacctcactgtcgagaagagcatcactaaggcatgtcgaccacgtctgtaatacgcacatggagagagaactacggtatgcgcgcca

SEQ ID NO: 70756 - DNA, 438 bp, Zea mays
  unsure (1)..(438): unsure at all n locations
tcagtcttagtgttagtctcgctcttagttagtcttagttatacatggtggttngctatatcctgtgcatttatgtctgtcatgatgaactatgtttggtttggatctttgtaatgattgttaccacagtgtgggtatcccctgcattttggtttacctattatgttaataagagttagttatatagttgggaaaccccttttattccactttcctttctatctgagaagctgtgtggtctgagttggagatcagtgaagatgctcatctgttcagtgctgttgaggaattctattctctttccttatgctgcaagatttgccagatcagttctgatgtgtggttgcattctgcagatgtcagataacatgcgcataggaggaaggcgtgctcagcaagagcgagccgctcaacaggaggaggtgccccagcagcagc

SEQ ID NO: 70757 - DNA, 462 bp, Zea mays
  unsure (1)..(462): unsure at all n locations
ntccatgttgtgctngaacattccaatccgagcccgcatctgaccttggtgaccgtcacaagttggtgttcttctgcagtccgaatccagcatgttcaaatccttttccctttcggtcttctccctgattcctaagcaaaacaagagtgcacgggtctccatggtctaaatatgatggacatgaactcaagagtgtaatcacctgatggttgagttgacgagcacgagcgcgagtaatgggaccagaaattggtacttgtattggtatagatgcatcagtaatgtggatgtcttcatcatacttgctagaaagctaagtcatgtttgtgtaatcatggtttgtatatacctttgcctgtcccttcttncccttggcttcatatatctattgacattgttttgngattgcctagaactaagaangggagggatagcatttntgtggttgttgatagattctct

SEQ ID NO: 70758 - DNA, 465 bp, Zea mays
ctaagctttattctagtgataccaaaagatataattgaagcaaactgcctttactaccaatcgaaaaatcattactgttatagttccatgatatttaaagataagcatctagtatcacctaaatattatggagcatgagcaatctataaggatgtaattactcacaacttaagataccaaatacttgtcttatggagatacccaagtcctgattgcttcatttcctgctcatcttcccttttccaccttgagactatacaagatcactcaacaaacaattagtctcaaaagacacaagttatgtgtgctccccctaaagttatgcatcaagtatttgaatgacttgcactttgcacattctagcttcctcagaactagaggggatcacaacatatcttggtcaaggcatactctatcaatttcatcacaaagagataccaatcgaatagttaatttaatacaaca

SEQ ID NO: 70759 - DNA, 431 bp, Zea mays
  unsure (1)..(431): unsure at all n locations
tctnagggagagcacattttgcgactaacaaatgttcattttgtgcaagacaagaattgtagcgtatgtcaagcatggaagcaagttggtgttcatcatccacacaagaacatcatgacgactgacaggccgcttgagctactccacatggacctattcggcctgatagcttatgtcacacccggttttagaaggcaaaccgaatgcgaaccatgtacgtgccaggatcagttattcacgtacacatcagttacataatatggacattatcacacagtgctcaaaatagtattaataagggaaatagtcgattacatcatacgtctgagacgtccatatggntcttacaataaatcatagtgcggaatagaaacgtagataacgcggtcttcacaggcaaccgactgtgggggtgtcgctaacccacacct

SEQ ID NO: 70760 - DNA, 383 bp, Zea mays
  unsure (1)..(383): unsure at all n locations
accttaaaactcagcttattctagctgatgatatgcgagaggatctaattgcttccagtcgagcaaccggtgcaaaggtctctccaaaatctatgacttcaacttgagagaatccctttgcaacaagtcttgccttgttcctaacaatcacaccttgatcatcttgtttgtttctgaacacccagtttgttccaatgattcttgcatattgtgggggcttctccagggtccaaacttggttacgggtgaaagttgttagatcttcatgcatggtgttcacccagttcggatcctgtagcacctcatctatacatgtaggctcaacacaagaaacaaaggagtgatgttcaataaaaaaagcatgtttatgtgatncgagtata

SEQ ID NO: 70761 - DNA, 441 bp, Zea mays
  unsure (1)..(441): unsure at all n locations
tcagatattnnttggtgaaaatcaccaattctcttctgtttgtccatccatgaacccattgacttgattatggttgcaaggcacttcactgactcaatacgaaatgtttggtcttgggctatagttaatgttgttgtagatcctggaggaacacctaaagcagtctttagaagtccattgacaaccctgcaaacatctcctgaaattagagatgccttaataaatggtgaaaagacaatgataaatgacgtttaaagagcagagctcagcgcaatacatcaatcctcacaacgtaactcaactcanagtgccatgcataactagaaatcgggaactattgctttgttcgtttaatgacaaaacagaaggcattcatcaactaccaagttataagttacatacctttcaaaatatttggtgcatctacatcacaatcatagt

SEQ ID NO: 70762 - DNA, 443 bp, Zea mays
  unsure (1)..(443): unsure at all n locations
actcaagcttcacatgtctcgtatgaatcaaagtcaaacgaagtttatttttcttttaatgaagctncgtcatgcgattcttacttatatgacccaaacgacagcgcctcatgtatgtaggacttatatcattatgccgaggcctcttagcactaatattacagataggtgcatcatcaagatttaaaatgaataacccattcataatggatgcaaaagccacaaacatgccattcttatagatcacacaaccattgttttcactcgcaaatgaataaccatccttcatcaaacatgaaggagacataatgtttcgactcatactaggaactagataacaattatgtaactccaaaataaatcctgatgggaggtggagttgcatatgtccgacagtcaacgcaacaattcttgcattattgactacccggaaaataacttct

SEQ ID NO: 70763 - DNA, 427 bp, Zea mays
  unsure (1)..(427): unsure at all n locations
tcggtttanaagatgcattttcaccgtttctgaagataatttgtctcaaggcaagatggttgctgctgagacaaagccgactgaagaggaaaagctatttgaagagaagaagactgcagatccttatattgctggatttgtcgagtcgatggcaaaaacaaatacagagaagattactaaagagatactagaaggcttatctgaagatactggtgacagtgatagctatgatgtagaaagtggggacgaagattctgaggatcggccctggaggccaagtcattcaatcttcggaaaatcgaccatcaaacagagtcatcttgagaatatgagaggaaggtactttcatgatatgtctattgtgagggttggcggagacaacaacgtccttgcccctgaggagaacanagttgtgattttttgaagc

SEQ ID NO: 70764 - DNA, 372 bp, Zea mays
  unsure (1)..(372): unsure at all n locations
tgtgaacagtacanattcagaagggagaaagcatcttctgtatatcagccgaagcctatgctcttatgtgaagacatagcagagcagaaggtgctgttaggctctcaattatccgaagagcaggagaaaaccttgataaggtttttgttcaataacaaagatgtttttgcatggtcagccaatgatctctgtggagttaatagagatgttattgagcattcgctcaatgtcgatccatccttcagacccagaaagcaaaggcttcggaaaatgtcagatgataaggccgaaggtgcttgcaacgaagtcaaaagactcctcagtgcaggagttatcagagaagtgaagtacccaaaatggctagctaacact

SEQ ID NO: 70765 - DNA, 403 bp, Zea mays
  unsure (1)..(403): unsure at all n locations
tggccagcatcatcttgtagtgcagatattcgagagattcttctgcatctgaggtcaaattttttacatgattgaaccaagcatcagatggcagcttcccattgaaggatgagatgatagttcgaacatgaacaagctgctgaaagagacgactgattgatggcgaatatactccaacttgtgggtcaccaacaggttcagctttcagagattgctcggcatcaccaacatgtccagcaggtgctccttctccattgcctgatttactgcaacaataagtgaatattaggaaagtaacctggttgctaatcaggacactaattntctcaaagcaacagcaagaaacagaggaaacaacaggggggtccatatcagctgcagaaagcctgcccagttgtagtct

SEQ ID NO: 70766 - DNA, 462 bp, Zea mays
  unsure (1)..(462): unsure at all n locations
tagttaatcaagcagaatnntggaaacagttaccaattgtgaagaccagcagtataaattggtgagaaatatatggcaggaaaacagttcctgaaaagtgtatctttctgtctcatgctattttttcttgtatattttggggggccaaaacatgtattcatgacgacattttttatatggcaggagctagatgtgatgatgagaaatcacttcgtatgtctcanatgagcttggcgaagaaatttggctaatctagatcttttgttgcctccactctgatggaatatggtggtgctcctcagtctacaactccagaatctattctttcagntttatatttattgtntgtattgctcagntttggttacacaagtttgtgttcctgcaggttttggatcctgaaggagaaagcgggtcctaagggaggaagcagagcaattggagctcgaactggagatgcgt

SEQ ID NO: 70767 - DNA, 265 bp, Zea mays
gactctttccttagaatagtcccacaatgtgattccattcttgtccatcaaacattctcatcaagtgaggtgaacatccgtaggttgccagacattgaaacgccctgaatttgggggaagaaatatttcttctattttgttccaaactaagccttacccttatatattatgttccctcgctaacctagaacttttaaagatagccggaatccggtggaatcccgcgaaacaaaaacctaaatacttatgttcttgatgcaacagc

SEQ ID NO: 70768 - DNA, 450 bp, Zea mays
ctttgcagctgcaaagtggatctagagtgcagctgagcatgtaccttacagtacgcgggatcaaagtgcatcgatattacagcgtcctgatgggaagagcaatgcctctgccaataccatatgggatgcaatgtgctccaatctgcggcctaaccgtatttcaaaacttgagacgatcaatgagatgtctaagccgttccatcttgatgaccagttgggatcctcatcactaatagcggccgaagaaaaagtgtctttttgctccacgtgtcaaacaaaaagacaccatctgagtgaatgcaatatcgagctgctttgagaactgtgagatgtaaagacccacttaacttccaaaagtccggtgattcgaacttgcaaaacttttgcagtatcttgtgggtatgctgtagatggttcggagtatactatatacctcagcctactcctgtc

SEQ ID NO: 70769 - DNA, 467 bp, Zea mays
  unsure (1)..(467): unsure at all n locations
tgtgaaggttcttcatccncacatgtgctaagcggcgatgtcactttcagcccatgctagtcttagcaattaagcatgcatctagaccggcctcttcttttgcaaaatcaactaagttaagcttgccgtctaatacacccttaaaagctagtgaaccatcacttcttctaaagacagacacatctacatttgtaaatagacagttatatcccatattgcataattgactaaccgatagcaaattatatccaagagactctactaaaaacacattagagatagagtgctcattagaaattgcaattttacctaacccttttaccttgccttgattcccatcaccgaatataattgaatcttgggaatccttattcttgacgtaggaggtgaacatcttcttctcccccgtcatatggtttgtgcatccgctgtcgataatccagcttgaacccncggatgcataaacc

SEQ ID NO: 70770 - DNA, 466 bp, Zea mays
  unsure (1)..(466): unsure at all n locations
tgaagccatggtaagtagcataggcaagtaaaatgtgaattgactcttgcctagctatgggtgcataggtttcaccgaagtccaaaccttcgacttgtgaatatcccttggtcacaagtcgggctntgttccttgtcaccacaccatgctcatcttgcttgttgcggaagacccacttggttcctacaacattttggttaggacgtgtaactaaatgtcatacctcattccttgtgaaattgttgagctcctcttgcatcgccaccacccaatccgaatcttgaagtgcttcctctaccttatgtggctcaatagaggagacaaaagagtaatgttcacaaaaatgagcaacacgagatcgagtagttacccccttttgaatatcgccgaggatggtgttcacgggttgatctcgttgaattgcttggtggactcttgggtgtggcggtcttggaacttggtcatc

SEQ ID NO: 70771 - DNA, 421 bp, Zea mays
  unsure (1)..(421): unsure at all n locations
acacataaaactaagcttgggggaagtattcccaagtcagatcgacctatctcgtttttctgcttctttagacgacacacattctttgaattcttctcttaacgttcagcttgactccgaaagggcagctaacaaggtaagcttactcagttggatctgtcgtgcttttacagcttaatgggtgcttgagagttggtccttgtttgtaggaggaaaaacgagcacttgcagcttctcgcgataatctggataggttgtatcgtgatgccagcaactccctagccatcttggagaggagccaccgctttaccatgacagatctggatcatcatcgtcacgaactgcaagtatcctatgatgagatcctgcagcttatgcagttggtgtccagcaaggactncatcatcaaagatctgcgtgc

SEQ ID NO: 70772 - DNA, 463 bp, Zea mays
  unsure (1)..(463): unsure at all n locations
ntgtacggatacgatcctantttgactgaagctgatctggagccaaacattgttattaagagctgctgtggtagaaggaagaaaaagaacaagagttatatggatagtcaaagccgtattatgaagagaacagaatcttcagctcccatcttcaatatggaagacatcgaagagggtattgaaggtgtgttcttgctgttatgcattttttatcttacttttatccttagagatctgagaacatcgctgcttctattgcattntcaaacgtaattgtcttagtttgatttctggacgtaaataggaaaacgattctttgcttctcaagttggctggctcctgcttatcttacatgtggaatcccattaggttatgaggatgaaaggtcagtgcttatgtcccagagggaaatggagaaacgctntggtcagtctcctattttcattgcatccacctttatgac

SEQ ID NO: 70773 - DNA, 426 bp, Zea mays
  unsure (1)..(426): unsure at all n locations
tcgttcctcagcttaataacctctgttcgtaggttgttgattgcaatattatagctctcgtcttcagcattcttttgagctctcaaagcgttgctaagtattaaaccctatatgaaaagaattagtataacaataaaagaataatttaaaaattatagatttccaaatatacaattttcatagcgcagagatcgtcctttgtcatagcgcagaggccagcttcaagcttcgggaaccccatactcctagccatctcccggcagacagataattctttattgtctgggaggcagtataagaagtcatcttcgtctgtgccattgaatactaaggccccctttggatacttcaattctcgggcatagtgattagcttcaaaaaaattttcttgagataatctttnntctgaagcatgtcgtacaatat

SEQ ID NO: 70774 - DNA, 462 bp, Zea mays
  unsure (1)..(462): unsure at all n locations
nggccaatcatgtatcttccaaagctaatctatatatatgggagacatttcagagatcatggagggaggaaaacatcccatggccaccgacagtaacctcttgagcagtaaagatggacttggtacggtgtaatgcataattcaattcgcaaagatatacaagcaccacaaaaatttacaaaactaaagcaacactgaataaaacaccagtggatagtagcggagaaagtgtttgacctgaagttaaaatataataacttgtgcagatatacctttgcactgccatacttgaggcaactaattcctagttttaatccttcccttgtctgcatgatccgaacaataagtggctctttcgaccttttcttcttagcttttgctttctttggtagttctggagcgtttgtaggttcatctccatctatgattaatgccccttgagtaagaaggggataagttgac

SEQ ID NO: 70775 - DNA, 426 bp, Zea mays
  unsure (1)..(426): unsure at all n locations
tctanagggagaacacattntaggattaacaaatgttcattttgagaaagacaggatttgtagcgcatgccaggcagggaagcaagttggagtccatcatccacacaagaacatcatgacgaccgacaggccgcttgagctactccacatggatctattcggcccgattgcttacataagcatcggcgggagtaagtattgtcttggaatagtggatgattattctcgcttcacttgggcattctttttacaggaaaaatctcaaacccaagagaccttaaagggattcttgagacgggctcaaaatgagttcggcttaaggatcaagaaaataagaagcgacaacgggacggagttcaagaactctcanattgaaggcttncttgaggagganggcatcaagcatgagttctnctcaccctacac

SEQ ID NO: 70776 - DNA, 382 bp, Zea mays
gcactacaacatacacacagcgtgtatacatagttcagcggccgatgtggtactaagtttaactcgcaaatactaagcacaggcccatctgcttgttatggcccacaccaacgcccagtatcgtagcaaccgctctctcccgggtcagggcctcagatgactccctctccgggcctaccacaattcccacccccgctcgacgatgtcaccgtccgtttacacaaactcctacagctctccctgctaccgcatgacgaaaccgcccatacaacaaccgcgttgccgctacaacctcactctgcatagcgtgaactacgactccatcaagccgacctaagacgatgaggaagagcgcgagatccaacctgtgcggcacggacat

SEQ ID NO: 70777 - DNA, 446 bp, Zea mays
  unsure (1)..(446): unsure at all n locations
ntaccaaatggacgtgaaaagtgccttcctcaatggaccaatcaaggaagaggtctatgttgagcaacctcccggctttgaagatagtgagtaccctaactatgtatataaactctctaaggcgctttatgggctcaagcaagccccaagagcatggtatgaatgcctaagagattttcttatcactaatggcttcaaagtcggaaaggtcgatcctactttatttactaaaactcttgacaatgatttgtttgtatgccaaatttatgttgatgatattatatttgggtctactaacgaatctacttgtgaagaatntagtaggatcatgacacagaaattcgagatgtcgatgatgggggagttgaagtacttcttaggatttcaagtgaagcaactccaagaaggcaccttcattagccanacanagtatattcaagacattc

SEQ ID NO: 70778 - DNA, 400 bp, Zea mays
  unsure (1)..(400): unsure at all n locations
ntattctagtgtacccaggaccacgaagaatacctccaggcatatgtccgaaggtttctgcgtctgagggcacaagcgccaacagtgcccaatgaaattgacattgaggccatgattaaggggcttcggccgggaccttcagcgcaatactttgccaggaagccaccacaaactttggagaagctgctccagaagatggacgagtacatccgggccgacaatgacttccgccaaagaagagaggaggcatttaggttctctgaaatgatcaggggcttcggaggaagatttcatacgaggcatgtcaggtcaattcataactccactcaaagtaatgatagagggagccaacagcaaaggcctcaatactcttcgcagtcttcggggcaacagcaaagct

SEQ ID NO: 70779 - DNA, 472 bp, Zea mays
tataaaactaagcttgtaaggttcttcattcccacatgtgctaaacggcgatgccacagtcagcccatgctagtcttagcaatgaagcatgcatctagaccggcctcctcttttgcaaagtcaactaaataaagtttgccgtctagtacacccttaaaagttaatgaaccatcacttcttctaaagacagacacatctacatttgtgaataaacagttatatcccatattacaaagttgactcacagacaagttatatccaagcgactcaactaagaacacattagaaatagagtgctcggatgaaatagcaatttttcctaaccctttcaccttgccttggttcccatcaccgaatatgattgaatcttgtggatccttgttcttgacgtaggaagagaacatcctcttctcccccgtcatgtgggttgtgcacccgctgtcgataatccagcttgagcccccggatgcat

SEQ ID NO: 70780 - DNA, 471 bp, Zea mays
  unsure (1)..(471): unsure at all n locations
tcggagccgaagcaactccagctntgaacgaagccatcatctcataaagtggaagtgagttcatcggaggtgggcgccaatgatggggacttgttctcaaatgcttcaaattaagaacaaggcaacacaaagatgttaagtataaacgcccttcgtccgctgaagcattatctccctaaggatataatgagcttcggacgaaggtcataagtaaagtatcacgaagatttcaccttcgtgattatatttgtaagacaacaatcaatgagaaatgaaatataaagtataaaatattttcatatgtttctattatatgaatatacaagtatcaaaacataatatttaagcacatttataccttcgccttggcggaaagcaataattcaagcgtaacgtgtccgtgattacatgatcgcgtgaacagtgccgggatactgtacacctatttataggcacaggatacaacctgcg

SEQ ID NO: 70781 - DNA, 459 bp, Zea mays
  unsure (1)..(459): unsure at all n locations
tcagctccatctatgttatggattgcttttgagtctgtccagtttccttcggcccttctggcagcttcctgacttccatgaatagcaatgggtccttggtccgaaggtatcttcatgcaaagatatgctagatgaagaattgcttcaaaggcattgagagtaccacgaccaatgattgcattgtaagggtattccatgtcaacaatatcgaatacaagttgttcagtccttgtgttgttgataaatccgaaggttacttgcattgtgattntgccgagtgctacaatctgccttcctccaaagtcacaaaggggatgtgtggcatcatggatcttgtcttcgggttcttgcatctgtctgaaggccttagcaaatatgatatcagctgcactgcctatatcaaccaaaacattatggaccagaaaccctttgatcacacaagagataaccatagcatca

SEQ ID NO: 70782 - DNA, 477 bp, Zea mays
  unsure (1)..(477): unsure at all n locations
tataagtntctggatgagaagtggtcaccgaagttctgttgatgaagcaccagaagaccaatcaaggaaggaatccatgtggaagttcgcaagagaaaggtttgtgtgttggcatcgatgctccctcaataagctagctgccaagtgaaagccacaagcctgaagatgatgtttgagtagccagaatcagcgtttgcaatcggcaaccagatgctcctcaagagccagattttgttgaagttccatctcctcgaagagtttgcaaagtgaaggtatgtagctgaagtaaagctatacccataacccttctaagccgaatctcgaggacgagattccttttaagtggggtagatttgtagcatcccaaaaattcaaatcctgaaattttctcaaactcgctctanattcanaatgaattcaaatttcatttcaaaatgtttgtttgcgagttgatatccacanataaaatatagtggg

SEQ ID NO: 70783 - DNA, 470 bp, Zea mays
  unsure (1)..(470): unsure at all n locations
ngagacagacattagccgctaccaacgacagcatatcgtttgtagtttattctattctaatttcaaggttaaaaactttntcaactttntattgtttttaacaatgaaggtgttttctaacgaaggttgtttctgcacagagtatgctattgagtaaagctttgaggatgcaacaggatcttgaagataagaagcatgaagttataattgaaagtttagaaagcaaaataaaagatcaagcagttgctcttgaaaagaaagatttcgaacttcagacaatggaagtcttattggcagaagctgaagcaaaaattgcaaaattggataaggagcttctctcanaatcagaaaacttcgaacaagaaaagtagaaatttgatacgaagtttgaagctgaggtcgaaaaaagttcaagtntgcaaaaatcattgaaagagcttcaagataaatggttagagttcagcaacccg

SEQ ID NO: 70784 - DNA, 458 bp, Zea mays
  unsure (1)..(458): unsure at all n locations
tagccagaagcatcgganacagattcatgacccagatctgtgtaagtggcgggcggaaaatggcaggcgacgaagctcgaagccatcttaagccggtaagaaacttatgttngttacttttaccttctcatatgaaatttgtatctttcttactgtgttgtttgatatatacaggatgacgaagctgaagattgacaatgctgaagtttggcaaaactgaagacaaagccttagctgaagcttaaaattgcttatactgtgctcacctgcaaaaattcttggagaaacttttgtaatatagatatagaataacttgtgtaaatntgtacataccttgtaatatattctgtctcctttaaccgcatccaatctgctntgctgtggacgaaacttctcttttgagccgaaggcgaaaaacaccttcccttcttttctacacaacgaagcataagaaattt

SEQ ID NO: 70785 - DNA, 431 bp, Zea mays
tgtcaatgagagacaacaatatctttgttaattttctaatagacaaaggtagcactaaatagttaataggaaagaaatccatatgacagggcaaaagagtttgtaaaattgcaacctcaaccgaaaccacaccgcttttttgaatatttgtcctcaagctcgtagcatcaccaaaaagattcaggagcctcaatgccaaattaatatcattagcactagccctaaggaataatataacatcatcaacatataaggaaatcctatgttgaatacatctagaagatattggctgaagcaaccccaactcatcagccttgcaaaacatcagatttagagcatccataactagaatgaacatcatatgggaaagagggtcctcttgcctcaaacctctttggtgcataataaaactaccaggaacaccatttaaa

SEQ ID NO: 70786 - DNA, 458 bp, Zea mays
tcgcatctctgaactaactcggctgcatcgttcttcgccgtctgccaatagaatcctgacctgaagaccttcccgactagtgttttggatgctgcatgtatgccacattgccctgcatggacttcctccacaaattgtttcccagtggacgggagaacgcatttcatgaggatgcctgacgcgccccttctgtacaatttctccccaatgagtgtatagtgagcctactgcttgacaatgcgctctggcgagttcttgtcgtctggttcttctgcattctatatatacttgataatcggtcttctccagtcgtcagaatctgactcgagttgatttatgatgttgcactcttctgtttgatccattgagatactcggccgcagaatttcttgcacgaagactgctggtgggacctgagttccaccggatccgagcttggacagtacatcggacgccgt

SEQ ID NO: 70787 - DNA, 448 bp, Zea mays
  unsure (1)..(448): unsure at all n locations
tgaagccatggtaagtagcataggctaataatatgctaattgactcaagcctagctacgggtgcataggtttcaccgaaatccaaaccttcgacttgtgaataccccttggccacgagtcgagctttgttccttgtcaccacaccatgctcatcttgcttgttgcggaagacccacttggttcctacaacattttgattaggacgtggaactaaatgccatacctcattccttgtgaaattgttgagctcctcttgcatcgccatcacccaatccgaatcttgaagtgcttcctctaccctgtgtggctcaatataggacacaaacgagtaatgttcacaaaaatgtgcaacccgagattgagtagtaccccttatgaatgtcgcgatgatggtgccacngggtgatctcgtgtattgcttgtggactcttggtgtgccgcctggttg

SEQ ID NO: 70788 - DNA, 377 bp, Zea mays
  unsure (1)..(377): unsure at all n locations
tgtgaagattcttcatcccaacatgggctagtcggcggtgctcagagccaacccatgttagtcttagcaattaagcaagtgtcgagttcagctttatcaaaatctaccaagtatagctgaccctctaacactcccttaaatgctattgaatcatcacttcttctaaagacagtgacacctacatcagtaaatagacagttgtagcccatttgacataattgggatacggaaagcaaattgtaatctagagaatctacaagaaaaacatttgaaatagaatggtcaggagatatagcaattntacccaatcctttgaccaaaccttgatttccatccncgaaggtgatagcttgttggggatcttttgttttctcata

SEQ ID NO: 70789 - DNA, 446 bp, Zea mays
cggtatttaaaacaactaggttcattgattcaattatatttcaccataaatacatatgcatatataacagattaatttttacaatattgggtatcatgtatgcagcttttaatttaaaaaaatgaagcacgtggaccgtcctccaaatgaccccaagcatataacaattcagtcaagccacgagtgtgtcagtgttgacattacctctgcagaacagactaatccatgttcacaaattggaaatcctccaaatgttgatagtcaaaatttgataaatgaaacagttgagattgattctgatgaagatgacttcatgccagctctgaagaagcgtaatgtttctgatagccacacaagagtgttaagataagttgtgacaaagacgattaacatgaggagctacctcgacaggtaatgttatgcatatcaacagacaatatcatatt

SEQ ID NO: 70790 - DNA, 460 bp, Zea mays
  unsure (1)..(460): unsure at all n locations
tctntatggcctcacaaggtggttcttcatttcttgcaatgtcaatagaaacatgcccttgcgagccattagactcatcaaatgtcacgtctatcgctatttcaacaagaccagtggttttgttgaaaacacgatatccatgcacatttgatgcataaccaaacaagaagccctcgtctactctaggagcaaactttgagctcttgactttcttgttaagaataaagcatttacaaccaaatactctaaaataatcaactttaggtttgttacctgtgagaagctcgtaggcaatcttcttgtagatcttgtgaagataaaggcggttgattgcatgacaggcggtgttgaccgcctctgcccaaaaattgtcacgggtcttgtactcatccaacatggttctagcggcttcaattagtgttcggttcttcctttccacaacaccatnnttgtgtggagt

SEQ ID NO: 70791 - DNA, 446 bp, Zea mays
  unsure (1)..(446): unsure at all n locations
ggcatntgngtccctaaggaaattgtgactaaccttgtatgacccatcatgagttgggtacctaagacccaagcctaaatttgccttgcaggtttatgcatccgggggctcaagctggattatcgacagcggatccacaaaccatatgacgggggagaagaagatgttcacctcctacgtcaagaataaggattcccaagattcaatcatattcggtgatgggaaccaaggcaaggtgaaaggtttatgcaagattgcaatatccaatgagcactctatctctaatgtgtttttagttgagtctcttggatataatttactatctgttagtcaattatgtaatatgggatataattgtctatttacaaatgtagatgtgtctgtctttagaagaagtgatggttcactagctnttaagggtgtactagacggcaaactttatttag

SEQ ID NO: 70792 - DNA, 469 bp, Zea mays
  unsure (1)..(469): unsure at all n locations
ntgtactntatagagcataagcatgagcatggattntgtgtcatggatttctactagtatttattgtcggattagatgaacgtatggtgcaatcttttagtctccagttcgtttcaacttgcagtagcaattcattcaaacttttgctgctctttgtccgtggaccttggtagctactgccactaaagagtagctttacgagtgagtggctctagatccagatatcagcagcggggtcatgagaaaatcagccaccgaggaacaagtaaatatggctggatcggcgtaggccgggcgacccatacggacaagagccggcggcgaaattcctgccacctcccgactcccgaataaaagtaagccgtctcccaagtcccaactcccaaccgcgcatttggcagcgcctgccttctcgaggaatgtgccaaatacttgcggctggattcagtgtagattgattgccatctgg

SEQ ID NO: 70793 - DNA, 466 bp, Zea mays
  unsure (1)..(466): unsure at all n locations
tcgtctcaactggtactgtgggttcggcctcggttccagcctcaattgttgtagttntacctttcatctgcctagtatcagcttcagcctgcgcctcagcactttcggcaaccttctttatggaagaagggcattcagagtccgttgtttccaaaatgtctaatacatttaccatccttttccttctaggggttatcgcagaacttttttctgccttcagtactattgcttctgctgaagggcttagaatctcgggcatctttgctgcttcttcagttttttatttttcagccttatcttcgttaacccttgtttcaataagcttcggcgaaggcgccttcggcattacagccggctctntaatctcctgcgtgggaggagcaggttcttttgcttcagcaactgcagaagtttccccgccaaactcangcactntggccggttcaatgtagcgcggtcggtgggt

SEQ ID NO: 70794 - DNA, 437 bp, Zea mays
ttggctgccttatgcggatagcacatattatttttatttctaaatttaactcggtcacaaagtctaagtgccatgtgtgtgttgaatcaaaacaaccccgcaagcctcacaaggctgctgaggcaaggagtttggcacctctagaacttgttcattctgatctgcgcgagatgaatggaattttgaccaaaggtggtaaaagatactttctcacttttatagatgactccactagattctgttatgtgtatctcttaaaaacaaaagatgaagcgttcaattattttaaggcctataaagctgaagttgagaaccaactcgagaggaaataaaacgttaaggcccgaccaagtgagaatattctctaatgtgtccatgagtctgcgtgaacatgtatattatgagagacacgcattctaccacatcaatggattgtg

SEQ ID NO: 70795 - DNA, 463 bp, Zea mays
tgtgaaggtacttcatccacacatgtgctaagctgtgatttcatagccagcccatgctagtcttagctattaagcatgcatctagaccggcctcttcttttgcataatcaactaaataaagattgccgtctaatacacccttaaaagctagtgaaccatcactttttctaaagacagacacatctacatttgtaaatagacagttataccctatgttgcataattgactaacagatagcaaattataaccaagagactctactaaaaacacattatagatagagtgctcattagaaattgcaattttacctaacccttttaccttgccttgattcccatcaccgaatatgattgaatcttgggaatccttattcttgacgtatgaggtgaacatcttcttctaccccgtcatatgggttgtgcatccgctgtcgataatccaaccttgacccccggatgcata

SEQ ID NO: 70796 - DNA, 448 bp, Zea mays
  unsure (1)..(448): unsure at all n locations
taatcatagntntatataatatagattgctccccctaaatctgtgccttgagaggaatacctattttggccttaaatgccaaatgcacataattaggttaatgagaacatatctatatcatagagaatgtgaagtgcaatgtgtcataatataagtgtgatgcgcatgacagactatgcacttaagaaagcatgttatagatatttgatgcatttacccttgatgtttcaaagagacttaaggaacctccacctttgaaacaaaggtagcctatcctcgttacaaggttaagctttaagctctttgacaaaaaattacttcacccagttttaacaaaaaagcatcatatacaggaatngaaattttgagaggttaaactacgaatgaagcagggatatgcatagacatgctttctcttccttttataaaagatacgcaaagaatgtat

SEQ ID NO: 70797 - DNA, 435 bp, Zea mays
  unsure (1)..(435): unsure at all n locations
ttacgaagagggaccttcggctatcttatacaaacagctttattcggagatagcttctccctataagaccttcggcgacgaagcatggacccaacatataccatgctttcacagttagaattttgaatggctagttgagttggttgctaattgtgaaagatcattatgttgatgatgctgattttaaagatatctttataaattgtaaggatggcaaaccctgtggaaaattttacgtacaagatggattttgttttgtgctaacaagctgtgttttccagcaagctcggtccgtcttttgttgttgcaagaagctcatggaggctgcctcatggggcactttggcgtttacaagacacatgaggtgctggctacacacttcttttggtcctgaatgcgccgtgatgttgagcgtcttgtngcacgttgtaccac

SEQ ID NO: 70798 - DNA, 413 bp, Zea mays
tgctacaagccgtcttctttttctcatagcaggttctattctggtacactaccccacttataaagagagaggagggaactcttgaatcttggggatttgaactcctttgggttacctcataacaggggtgttacgggaccttcttctgctgttgctgcttgagcaagctgcggagaaatgactgacacagggtagattttgggagaaccttcttctcatcttgctcttcactatcttcctttctcttctcactattcactgcctctttctttctctttgctcttcccactcgaggattctatcgaagagtattaccatcatacagaggaggaaaccgaagatgatgaaccatatactacagtccttcacccaagaataccatgcattgtatcttagggcgacggattggaaat

SEQ ID NO: 70799 - DNA, 462 bp, Zea mays
  unsure (1)..(462): unsure at all n locations
gggacgagctacatccgaccaccatcattgttgtagtctgcgaaaataacctcggagaagagcacaagcagcagaaatgtaaggtactgagctaaaagaatcctaggatttgaaaacaaccaatagtgtctgaaactgagcatatgttaaccagagcatatactacggatacagcacatgttaaagctgaaactgaggaactaaggttaaagcgttgccttattccaattaaccaaaatccttgtcctaacctaatgtccgcatcagcagttcttaagcacaacttaacacacganaagagatctagggattggggttcttattgtggccttagagcacaacaagaagcccctaaattggatgggtgtgggctggacgaatgccctgnngccttcaattgcgtgcggacaacaccactgccaacttctcagtggagtcttcattcgcccgccgcttctcctt

SEQ ID NO: 70800 - DNA, 295 bp, Zea mays
  unsure (1)..(295): unsure at all n locations
tgagcctganaagtgtgacttcatggtctacctgtgcgtgttcttacggatcaaggctgggttccgcatgtcatgcaatgcggctcatggcttaataagcacaaccgccgtgcgtggtgcgctctaccagtcaccgggttctatcgaccccctcatttcttccagacccactggcacacagggcgggcagtcatgcatgctggatgctatcgcgccatgtggacacgcttctccaacttctgactcgacagtttgcgaactcaagaccactcatcgagcaaccggcgcgcctatt

SEQ ID NO: 70801 - DNA, 372 bp, Zea mays
  unsure (1)..(372): unsure at all n locations
actcacgcttatatggacgaccacggcgaactccgctttatttgtcttttactggagaaaggcacttcgtcatgccagagttagtgtaagacacctaanataacgctcatagaataattcataacatggagaaagctcacgctcctctgaagaagtatgtggacaaactacgactacacctgtacttttctctgggacattatgtctacctgacagtttcaccaatgataggtgcatcacgttcggggttaaagggaagcttgcaccctggtacatctgtccattccctatacttgaacaatgtggaccagtggtataccaacttcaactacctgaactcctgactgctcacataatgagttcacgtgctta

SEQ ID NO: 70802 - DNA, 499 bp, Zea mays
  unsure (1)..(499): unsure at all n locations
tgtgaatttaaaacatattntcgtaccgatattatactatgtggcgcgttatcgacaacaattatacaacaacaaaacaagcaatgtaattaatattgacaattcgaatttattaatttaaaaattaataaatacaattttttacgcgtcatttgtgcagcgtgaaatgggaagaaaacaaagaataatgggaacaaaatggaaaaagggaatctgttaacactgtagctttatgggacggaatttataggacgctgttggagactgagaatatatagaggacagaatcttttagagtgttctgtataggacagagaatattcctttatgggacgaaatttatgggacgctgctggagacagtctgagaggaagagtgagtcatatgtttcaggatccaatccaaaaaactggcaagtatgtacatgacgaagaaaagacatggatataacatgtgcgtcctaaattggcggcaataatagtaattcaccctataatca

SEQ ID NO: 70803 - DNA, 432 bp, Zea mays
  unsure (1)..(432): unsure at all n locations
tgtgactagcatatccttcagcttatgccacaatataattgttccctgtcgaagagaagaataccaagtctgagccacattcctgactgccatgacgaaggactntgccatgacagcagttttgccaccatatgatgatatggttgcttcgtagctcatgaggaattgcttcgggtcagagtgcccttcatacatggggagctgtggcggcttgtatgaaggtggccatggagtagcctgcaactctactgccaggggagaagcatcatcaaaagcaaaattaccatggtacagatgtaatacccaaagttgtaaattatatgaaaggagattaaacccttatgaatccttgtctctatacattagatcatgtgaatatccacattcaaggtgattaagtatctaatgacatctcaataatatatgcatcat

SEQ ID NO: 70804 - DNA, 488 bp, Zea mays
  unsure (1)..(488): unsure at all n locations
tatanatagcggagcgggaaccagccctagccataggcagactatgttcacacgcaaccccttctagtcgaacaaggcagtaatgaagtcttcatccactgaaaaacatataaaaagttgggtgaatacttacatattctgcaagcccatcctagcacgtaaaaagagagggacctatacagtacgtgcttgatatggtggagttgtaagtcactctttatntttctttagtgaaagttgcctaaaggggggtgaataggcaagtagaaactttntcaagaaaaactagaaacaaactgggtaaaaccggttcaaccggtgtcaaaaacggttcaactggtttgcacgagctcaacttaagaatgagatataaaactgaattgatctcganattcacccaatttactttgttaatgagaagttctagatgatccacatgtttgaaagttgtagatctgaaaaggcacttctcaaatcacacaccaaaa

SEQ ID NO: 70805 - DNA, 475 bp, Zea mays
tcggctccatctatgttatggatcgcctttgaatccgtccaagttccttcaaccctcctggtagcttcttgactcccgtgaacaacaatgggtccttgttccgaaggtatcttcatgcataagtacgctgggtggagaatggcttcgaaggcattaagcgttcctcgaccaatgattgcattgtatgggtattccatgtcaacgatgtcaaagacaacttgttcagaccttgtgttgtggacgtaaccgaaggtaactaacattgtcattttgccaagtgccacaatctgtcttcctctaaagccacaaagagggtgtgtagcatcatgaatcttgtcttctggttcttgcatctgtctgaaagcctttgcaaatatgatgtcgactgcactgcctgtgtcaaccagaacattgtgaaccagatatctcttgatgacacaagatataaccatggcatcattgtgaggatagtctt

SEQ ID NO: 70806 - DNA, 383 bp, Zea mays
  unsure (1)..(383): unsure at all n locations
atgaatgattctgtctatataatgccagaggccttcagcggtatctgttcttttattggaacgagagacttattacaagagcatattgccttcanggtatggccgctcgcggagaaatgggatatgccacaagaaaccataaaagaggccgacgaaggtggacttatcatgttgaagtacacttttaaatttggagataaattcgttgagccagatgatgactggttaaaaagcattgaaaatttaagtgatgagctgcttggggcttattctaaggccgaagacactgcaatgtcagcagccttcggaggccgaanaaagaagaggctgaatcgggtatttgatgcaatccggtttgtctaccctgactattgctatcccat

SEQ ID NO: 70807 - DNA, 438 bp, Zea mays
aactaagcttgtaagggagaacacgtgaaggtctaactaatgttactttctcaaaatatagaccttgtgcagctcgtgaagcaggtaaacaagtgggaagctctcatcatgcccaaaatgtgatgacaacatcaagacccctggagttacttcatatggacctcttcggacccgtcacctatctaagtatatgaggaagtaagtatggccttggtatagttgatgatttttcccgcttcacttgggtattctttttgcaggataaatctgaaacccaagggaccgtcaagcgcttactaatgagagctcagaatgagtatgagctcaaggtgaagaagataatgagcgacaaccggtacgaattcaagaaccttcaagtggaggagtatcttgatgaggaacgaatcaagcatgagttctctgctccctacacaccac

SEQ ID NO: 70808 - DNA, 374 bp, Zea mays
  unsure (1)..(374): unsure at all n locations
tgaagccatggtaagtagcataggctaataatatgctaattgactcacgggtgcataggtttcaccaaaatccaaaccttcgacttgtgaataccccttggccatgagtcgagctttgttccttgtcaccacaccatgctcgtcttgcttgttgcgaaagacccacttggttcctacaacattttggttaggacgtggaactaaatgccatacctcgtttctcgtgaagttgttgagctcctcttgcatcgccatcacccaatccgaatcttgaagtgcttcctctaccctgtgtggctcaatagaggaaacaaaagagtaatgctcacaaaaatgtgcaacacgagatcgagtggntacccccttatgaatgt

SEQ ID NO: 70809 - DNA, 420 bp, Zea mays
  unsure (1)..(420): unsure at all n locations
tactaagcttcaccaacagctggtaaagggcttgaggccgatactgatctccatcgcangctctgtactggtcaatgggaaatgtcacaagtctcacgtcaaatgaatgaccaactgccataaaacaaagatcaaccaccaaccactttgaaaataggccttgcttactctctttaacagatactcccttcgtttatttataattgtcggtggatagttcaaatttgcactatccagcgacaactaaaacgaaacggatggagtatacagtaaaatattctcttgacgttctttntgaacatctcctttttggttctgagatcttagctctgtaatggaaggaaaaaaaacctgataccatgatgcatgcagttaaaaaaaatgcaaacaaggcttattatgctgatggcgtgggccttc

SEQ ID NO: 70810 - DNA, 385 bp, Zea mays
  unsure (1)..(385): unsure at all n locations
tgtgagcagtacangtacagaaaaccttgataatgtttcttttcttcaacaaagacgttnttgcacggtcagctaatgatctttgcggagtcaacatggatgttattgaacactcgctcaatgttgatccattcttcagacccacaaagcagaggcttcataagatgtctgatgacaagaccgaacgtgctcggaatgaagtgaaaagactcctcagcgccggagttatcagagaagtaaaatacccagaatggctggctaacactgttatggttaaaaaaggccaatggcaaatggaggatgtgtattgatgttactgatctcaaccaggcctgtccgaaggatgagttttcatcgccacagatgaatccctacttatgcagca

SEQ ID NO: 70811 - DNA, 269 bp, Zea mays
agatgacacaagatgagagatctctctccccaactgaattatggctcatgaacagactttagaaacagaccttgctgttgttctccttcaagcgcactatggcaagattaagatctaaaatatcatggctcaaaagagggcgatgctaacacaaaattcctttatttgcatgcccgacaccgtataagaaagaaattttgtacccaattagtggatgggtatcatatccttaccaatcatagtgagaaagctgcagttgtggatgatta

SEQ ID NO: 70812 - DNA, 244 bp, Zea mays
tcactctggccatttaattatgaatgtgtggagagataatactttcttcttccgaaagtttttctgacgaaacaggcttcaaactggagcttcgtttgaatcccacagacaagcttcggcgatgggtaaaaattttggcagcagaacaatgcaaatagcaatgaatgctgtggtaacttcacacctactcatctgtttatataatactgcaggaaagaacgccaaacgccaagatttttacacc

SEQ ID NO: 70813 - DNA, 386 bp, Zea mays
  unsure (1)..(386): unsure at all n locations
cacgggggttgccctcgggcggctctggtgggtcgcggggaggtcgccggagctatgggcgagctcatgggagttaggcccggtacagaggaggcaacgaggaagatggctacgaattggggtgggctttatagccgcgacgcgggcgtggtcacggtgcggacgcgggcgcgtggtggttcgcgtgcgggcgtgctctgagcgcgccccgagtgtcagcccacgtcgaacacgtgggggtttacttctgccagggttcaacgacgcgattgagcgccttatcgtgcagatcttggcaaacccncgtgtacggtctcttctttgcaccaaattctacctttttgatgtgagttcccagcaaagatactgtcggggtagagagatat

SEQ ID NO: 70814 - DNA, 409 bp, Zea mays
  unsure (1)..(409): unsure at all n locations
gctatgaagaatcttcatcccaacatgggctagtcggcgatgccaaagtctatccatgttagtcttagcaattaagcaagtgtcgagttcagctctatcaaaatctaccaagtatagctgaccctctaacactcccttaaatgctattgaatcatcacttcttctaaagacagtgacacctacattagtgaatagacagttgtagcccatttgacataattgagaaacgganagcaaattgtaatctaaagaatcaacaagaaaaacattggaaatagaatggtcatgagatatagcaattntaccaagtcctttgaccaaacctttgattccatccccgaatgtgatagctcgttggggatcttggttnttcacatatgaggagaacatccctttctccccggtcatg

SEQ ID NO: 70815 - DNA, 360 bp, Zea mays
cctattcacccccctctaggtgctctcaaagacagggcctcgggcgagccggaaatgtgttcgttgctggaggggggcctcgggcgagacggagatcctctggggtcggctgcccttgtccgaggctaggctcgggcgaggcgtgatcgagtcccttgaatggaccgatccctgacttgaccgcacccatcatgcctttgcagctttgtgctgatgggggttaccagctgagaattaggagccttgagggtacccctaattatggtccccgacagtagcccccgagcctcgaagggagtgttaacactcgcttggaggcttatgtcgcacttttttgcaaggggaccagcctttctctgt

SEQ ID NO: 70816 - DNA, 446 bp, Zea mays
  unsure (1)..(446): unsure at all n locations
tcccatcgtttntgtgctcatcagaagcatgccagctcattgtttggcatcctcacggttagcgaacaaacacctcaatcgatcgacaatggggaggtaccacatcaccaaagcaggaatctttttgagcgcataatagtctacttcttctttttctttgctcgtggattttgaagacttctttttggctttctttcgcttcttccctttagacacagatgcaacacactcttcctctcgatagtctttattcgtcttgtacctacttgcaccacactttgggcagctctccaagtctttataatcattacctcgataaaggatacagtgatttctacacgcgtggatcttctccacgcccatagtgagtggactgattagtttctttgcatagtacgtgttagcaggcactttgttctacttttgaagcatgtctgcgacaatac

SEQ ID NO: 70817 - DNA, 451 bp, Zea mays
ggaccttagaaactcagcttctaagggagaacacattgtatgactaacaaatgctcattttgataatgacaggtattgtatcgcttgccaagcatgaaagcaagttggtgcccaccatccacacaagaacatcatgacgaccgacaggccactggagctcctacacatggacctattctgctcgatcgcttacataagcatcggcgggagtaagtactgtctagataattgggatgattattctcccttcacttgggtgttctttttgcaagaaaaatctcacacccaagagaccttaaagggattcttgagaccggctcaaaatgagttcggcttgatgatcaagacaattagaagcgacaatgggacggagttcaagaactctcagaatgaatgcttccttgacgacgatggcatcacgcatgagttctcttctctctacaccctcaac

SEQ ID NO: 70818 - DNA, 402 bp, Zea mays
  unsure (1)..(402): unsure at all n locations
tagactatntgcttatagttggtcaggtatttattactagtttagagccaagttntagcaataacctcaagttgttacccaaatggcactccctccaagaggaaataccataaaccatcattttaaatatcatcattaagcatcatcataaaggtatacagagtaactttaatcaaaggagctcccaaggctgctcataaccgtgagcacagctgatataccagtttctaaccctttgtagaggccgcacactttccccatgagtcatgatcccttttttcctcgggtcaatcaaaccctcaaacactaccaaggtgagtcgggaaggtttcactatgtagcctttacaaagattccctagaggtcatagccgctcgtaggtttcttcagttcgataacaca

SEQ ID NO: 70819 - DNA, 371 bp, Zea mays
caatggaaacattttcacaactgtcaaaataatgctcctcgacgaaaaacgggcatgtgggccgatctgttactccaggcggtctgggcgctaaacacgactgagtgcagggcgactgggttcacccctttccgccttctatatggatcggaggccatgaccccacaagagataaaacatgggtccccgcgaacagtttcgtcagctgtccccgacatggacgaacccacttcgaaggatctcatcgatggagaccgagtcttcgctctacatgctctgaataaatacctagcccagacaagagcatggcgcgaccactcagtcattcacagggaattcagcgaaggggacctcgtactcgtccgaacagc

SEQ ID NO: 70820 - DNA, 404 bp, Zea mays
ggtgcttcattagagcctaaccgctcgaagtgattgtcttagatcacgccacgaaggagatggagaccggcgacaagcccactacaagccacgggaaggcttcatcggaagagtcccgcaataaagggaaggggaaggagaagaaatcctcttcccacacatcgcatcggagtggcggcaagaaaaagaagatgatgaaggtggtctactacgagaccgatacttcatcaccttccacctccggctccgacgcgccatccattacttctaagcgccatgagcgcaagaagtttagtaagatccccttacgctatcctcgcattactaaacatacgcctctacttttcgttccattaggcaaaccaccaacgtttgatggtgaagaatatgctacgtggagtgat

SEQ ID NO: 70821 - DNA, 413 bp, Zea mays
  unsure (1)..(413): unsure at all n locations
tgttcatgctctcgctacgctgtgtagagaccatctacctctaataatcatgtttgaaaaaagcaggtatccaatccttacgaatttcatacattctggtaagactgatgttatcatgcaggtggaaatcatcaatcatcattgcctaggcagtctcaaactcaattacagtcaaaggatgatgtattatagattggaaccttgatttgaaatcctcttcctcaaatctagcgtacaactcgtttaaatacggcatatacctgttctgaacatgccacaaacacaaacgatggattgtgtttggaaataccctgcctagtgcaactggcattgttgggtcttgatctgnaatcataaatttacacaacattatgcaacacattatacactatgtttgcatttcatcaatgata

SEQ ID NO: 70822 - DNA, 416 bp, Zea mays
  unsure (1)..(416): unsure at all n locations
tcggcttaacgtaaagacgacgatggagaatgatatctacttattagggaaaagatagcttatccctcgacaacttactttntagctaatagtaaatgttagggacatgagtgtaattntacccaggctgcgtcctgtgcctataaatagatgaacattaacactgtactgttcacgctgacttgtaatcacttgcacgtcatttttggattnttaccttctgtcaagccgaaggtacaaatgtaatttaacatcattaatgtttgtttatgattgtataatgaaaaaatagataatctaatgattaaatatgattattcatgttctttctatgtttcacatgtttctacttttattcttacatattgagatgatgaaggtatgccattcattaccttcgtctgaagatcattata

SEQ ID NO: 70823 - DNA, 277 bp, Zea mays
ttgtgtggaattggagaggagttgatcactttattgtgtctataattgaatgcctagctcttgtaagtagttgagaagtggaaaacttggatgatttgaatgtggggtggttgggggtatatatagccccaaccaccaaactatccgtttggtggaggctgtctgtcgtatggtgcaccggacagttcggtgcgacagccacgtcaccaagccgttaaggattcgaccgttggagctctgtcactgggcccgcctggatgaccggtggcgtactcta

SEQ ID NO: 70824 - DNA, 249 bp, Zea mays
gtgtactatgacccattatgccccatttactttataattcactgtcccgcataccatgatcaaactaaagattgactagaattctatttaccttatccttgattaacctttgggttactatgggtagatacatgctattgctttactttaattaaagaacatgaatgtaacacttaatatacgatgttgtcattaatattacgaagtcgggctgatgataccttaaggggctcgagcggtatcttgagt

SEQ ID NO: 70825 - DNA, 318 bp, Zea mays
  unsure (1)..(318): unsure at all n locations
aatagctcttgggaaccatcgatttgaagtcattacactaagggacaaagctctcgaaaaagaatagatattgctttccttagtgaacaggctgagatctggcgaagccaaacttactgcacaaaccgaagctcacaaagtcgaagttgaagatntaaagaagaagaatgcagaaaccgagtgaaaaattgaagttgcaatggcgaagcacgagataagcgaaattgaaaaatcaagggcacaaaagaatgccaaagagctccgcgacttcaaagagagatgctacgaaatatccttggaatgctccaagaatctaaa

SEQ ID NO: 70826 - DNA, 435 bp, Zea mays
  unsure (1)..(435): unsure at all n locations
cttaagcttgcatacacatcaaggcttcaaccatgtatggggctagtctactatatnttggctaatgacccttccaccagtactaaagacagactcataagccacggttgtcacaagaatatacatgatatctctatcaatctttctcaaagtgggatacttcacccctgccacatttcaccaaccaatgatgtctaagtttgtagttctagccaacatttcctctttcaaatacagatccaattctgtgctaacaaaaacgggtggggcagcaagttcaacatataaatattgatcaaaaatgtcaaaaacagctgcatccccttcattttgggatagtagactgctgcaaggcccagcaacaccattctgttgtgccaaaacccttcatggaaccttggtatttcttcactaaatcaaccaacaaatcctaac

SEQ ID NO: 70827 - DNA, 379 bp, Zea mays
  unsure (1)..(379): unsure at all n locations
tggcctgggcgcgacaaccatgtccaaccgagccagcggtcttngatatctgaatgggtgagggggtggggggacgccagcgtgcactctctgctcccgccccgcgggggaagcggagacgggcatcgaacgcggaaggccactacgtgttgggatttgggaggggtcaagtcatgagtggccgtcccgctcgtgaacttctgcgcccaacgcaaaactgccggctgcagcctgcagtaccccgccggaactgggacgggtttggtttggtgatggcggtctgctcttggatcgagaccgcccgattggatgaatgaacgcgtcgtcgattaaataatcaccatctgaactggatggggtgtcccgctgtcactgtgtc

SEQ ID NO: 70828 - DNA, 325 bp, Zea mays
tcggcgacagttaaaaactttggctgcaaaacagctgttaatttcaatcaatgctggggatacttcacacctactcgtctgcttatataatgctgcacgtgacaaggcgactcgccagaagttttacaccatgctgacacccgctctcactcggtgtaccgtggaccgtacagaccgtacactgactctgccaagtggggccgatgtacacagggataatgaatcctatctcgacaacgagctcacggtacgtggtactgagaccttccgcgctccaaactctactaaactatattcaccgatcaagtctcggtacaacaactat

SEQ ID NO: 70829 - DNA, 343 bp, Zea mays
attaccaacaactacttacttgcgatttaaaaataacattcctaccgccggctgctgatgtgcactcctagtatctcacaacaaatgtttattatgaggaagtgtcacctgaaagcgccgtggtgtttagagtcaccgaaaggctaagccaactggtgtccttacaaagtcaatcatatggttggaaattaaactaatggtgaagcaccacaaggccacagtaatattcatatccgtaggccacaggcaataatcatatcactttaattctcaccactcacttgaaatgctgaacgaaacatgatctgagagcaccttcacatcaataagcatttcacacaaa

SEQ ID NO: 70830 - DNA, 351 bp, Zea mays
  unsure (1)..(351): unsure at all n locations
cttgccagatcagttctgatgtgtggggtgcgtgtctgcagattgttatataacaggcgtanaggaggaaggcgtgctcatcatgagcgagccgctccgcatgatgaggtgccccatcagcagcacctgccgtccccgcccccgatgtcgatcgagcagatgtttctgatgcagactcacgcagttcaagccatcggtcagactctggccgccattcagcagcagcagcagcagcaacagcagcaagcaccaccccagcctcagatgcctcagatgcctatagacaagcgtgctgaattcatgagaggtcatccaccaacgttcgctcactcttctgaccccatggatgct

SEQ ID NO: 70831 - DNA, 229 bp, Zea mays
gctggccacacacggacgagctctggcaaggatggcgggcggcggagaactcctcagagttggagattctgctcggagccagatgcaaggtgaacggcggtctactacgcaccaacaaggcctataggcgccctatggcatggttgggaacacgcgccctggacaggcgcagcgcgcgtgcatagtgaaccaatgcgcgtgcgaacgcttgaacacacgatcgaacatg

SEQ ID NO: 70832 - DNA, 435 bp, Zea mays
  unsure (1)..(435): unsure at all n locations
tacatattctgggatgtaaggcgaatgatacgaagcagtgtgcatgacctgcttcggctgagcctgttgtgctgcagcttcggctatttccttttgcttctggatggtaacatggcacatcctggtggtatggcccttgttctcaccacagaataagcaaaaaattcttcttggttgatctccaaatcttacgccgaagccccttgcgcctctgtctcttggagctggtggtcggaaggagccttgctgttgccccgaagcctgtgaagagcactgtggcctttgctgctggctccccctatcatcattttgagtagaaatgtaaattgacctaacgtgcctcggatagaaccttccttcgaagcccctggtcatttcagaaaacctganagacctctcccttctttgacgaaatattatcggcccgatatactc

SEQ ID NO: 70833 - DNA, 341 bp, Zea mays
  unsure (1)..(341): unsure at all n locations
ctatgagatctatcgcgcgggcttactgttgccgtaaaactgacatgcaccatggccttgttgctgggattatctggggagcaagccactgcacaacagttgctattgagattgcgctcttcctgcgcaaaaagatgaaaggaaaagtcaacatattttttttgtgtttaaaatcgaagacatgagtataaaccgtcatatttagttgtcaacgttctactttaaaaatgaaattgtaatccttattgggataaagatgatttctcttctcaaagcacaatcttngttgcctcttcttcatactcatggagacacaagtgtgtaaaatgataatgcacttt

SEQ ID NO: 70834 - DNA, 311 bp, Zea mays
tctggatagggccataaaacgctatagctcccttgcgatatgttatgagcttggcataaagtctggcttacaagagatactcatcggatgatatttccccgaagcatgtataataatggaatcaagatcatcatgtatggcttcggtgacggaagagtttgctagttgtgtcatgtcttgacgtgctgtcatgccggtatctgaagtttgctgatcagctgtatcttcttgcgcgacatcctacgtatcaatgggcgctgaacgcccagcttcagcttcggcttggactttggcggcttcaccccttttct

SEQ ID NO: 70835 - DNA, 377 bp, Zea mays
  unsure (1)..(377): unsure at all n locations
tcagcgacaggggctggtactctacagccgctggatcccaatcatgatgtcctttctcttagagaggcccgaagccagaagaggaaggctgttagtccaacacctccggaggatgacctggatcaggagatccaaaacctggagatccttcagcaacaggtgcaacgcaagaaggagaagatggctcgtctagctgatcttcagagacagatagacgaagcttccgaagaggtccgtcatcttgttcaagatgatcaaagccgaaggcctncacgcagagagcttcatcatgaaggcttccacaatgaggatgactggtatgaagattacatcatggaaactttgctttngatgatgcttctcctctctcaacagaa

SEQ ID NO: 70836 - DNA, 316 bp, Zea mays
gatccaatatctataactcagagctgaatccatgtttgtttgttttgactaggaaacgtgaaacactcccatttatgtctgccctacctctcaactttgtcaactgccttgttgttgtgtggctttgcatcacacatcttcttcttgatgtggtggactctaatcatgtataaaggcgcttaaatatgacatgagaatgccttctatgggtcttataacaacatctgagaggagatgcttactcaatgccttattccaagtcactttaccatcttgggaactacaaatacaaccactaacggacacattgatccat

SEQ ID NO: 70837 - DNA, 361 bp, Zea mays
  unsure (1)..(361): unsure at all n locations
taagaaattcagaatttattgtagagaatgagtttttatattttaacaatactagaaacttgtgaaattcatatttagttcattntagcttcaaattgatttattccagttgcaataattctgttttaatattatctatcacctagtaactctgtttggtcataaaacctagatcaaaattatccacttgattgattttgtactaggtatttaataacttcagaaattcataacttaataaccgtagctccgaatttagcgattctcgaacccatgatctcatagaagcgcgtagaatattcttacgcaatttatttgtatgtttgatgtaacattaattttgcatataccatgtttgtct

SEQ ID NO: 70838 - DNA, 62 bp, Zea mays
tatttcataaccccccagggcccttgaactgatgcactgaaactaactgactcgtgttgcag

SEQ ID NO: 70839 - DNA, 305 bp, Zea mays
tggaaaaatcttcacagctgtcaaaaagatgtttctcgatgaaaaaagggcaaatggaccgaattgttacccgaggcggtctgggcactaaacaccactgagtgcaaggcgaccgggttcactcctttccgccttctatacggatcggaggccatgaccccacaagaaataaaacatgggtacccacgaacagttccgtcagtcgtccccgacgtggacgagccaacttcaaaggatctcattgacggagaccgagtcttcgccctacaggccctaaacaaataccaagcctagacaaaagcatg

SEQ ID NO: 70840 - DNA, 410 bp, Zea mays
  unsure (1)..(410): unsure at all n locations
tcttggcccaactcccacccncaccaccactacaaccgatctattcccgaagccagcagccagaagggcgccaacacacccaacaacaacaggagttcagggaggaatatccgaagctcgcacagtcaatagtattgtgccagaatcaaagcacatttattgagcaatatcctacccctgaaatacttttatgttctatttcattttttttcattaaggaacaatcaatgtaaatctagttttaattccttgtaatagtttcgcttctatcagaatgaaatatatcttcttcacaggcttacgaagttcaaaaactgccgaagctcanaagtcgttcctaagggaacgcagagctaaaaatcaccaaaactacaaaaagtcattcctaagggagcgcagtgtaagttttc

SEQ ID NO: 70841 - DNA, 431 bp, Zea mays
  unsure (1)..(431): unsure at all n locations
ctaagcttntagaaaacacatatgcgcgaaccatccgggcccttgctgcggttcgttcgcgacacagggtgagcctcggacaagaacactgcaaaaacacaagttaacactacagaccatccgaaggagaagcgagcaccgtctgagaccaagcgcggaccgtctggtcgttgtaaaactagataaacccgaaggtggcaagttcggtaaaattcatttttagcgtcctcgcggaccgtccggggtgcacgaccgaatcgttcgcgactgctttatctgacatctgatgatgcattaaatgcactatagccgttgatataaccgttactgctgatcgttacgatttcagtcgttgatgtgcaggggcggaccatacggactatgggcgtggaccgttcacgggcagcagaaaaagagcgacgtctagaaag

SEQ ID NO: 70842 - DNA, 370 bp, Zea mays
  unsure (1)..(370): unsure at all n locations
ntcgatgaatggtagtggtccaaaggaacctgcaattaattgttttcagccactggcaacaccgattaagccagatttggtccgtcagcaatttgttcaacctgagaagagacgtctcaatcccaactcgaatccatcagttccttctgtggcatcgtctcctttgcctgttgcagtgccacaagtgaagccagacatgcggcatgtggcagggaccaatgaggtgaaaagtttgatgcccaatggaagcttgcgagagtctgtgattgtaatgcagcgtcctcaatctgcaggtaccaaacagagcctaccatccactagccatagtatgtttgtgtcagaaccatctgccagggattggtacttaaat

SEQ ID NO: 70843 - DNA, 366 bp, Zea mays
  unsure (1)..(366): unsure at all n locations
aactcagcttctaaagggagcacattaaggaatagcgaagtcattttgttatttttacgaancgcaacgcatggcaagcatgatagctagttggagtccatcatccacacaataacattatgaccactgacgggccgcttgagctaatccacctagacctattccgccggatcgcttatattaggatcatcgggagatagtactgtctggctattcgggaagaatatactcgtttcacatgngtattctttttgacggaaaatctcaaacccaacagaccttaaagagatcctaagacgagctctaaatgagtcctgattgagaataaataatacagaaacgacaatgggatagagttcaagaaat

SEQ ID NO: 70844 - DNA, 318 bp, Zea mays
  unsure (1)..(318): unsure at all n locations
tctaaacggagaacaccagatatgtctgaccaatgttactttctaaacacataaccatgtgcagctggacaagcacggaaacaggtgggaagctctcatcatgccaaanatgcgatgacaacatcaagacccctggagttacttcatatggacctcttcggactagacgcctatctaagcataggtggaagtaagtatggtcttgttatagttgatgatctttcccgcctcacttgggtattctatatgcacgataaatctgaaatccaacggaccctcaagcgcttcctaatgagagctcaaaacgagattgagctc

SEQ ID NO: 70845 - DNA, 413 bp, Zea mays
  unsure (1)..(413): unsure at all n locations
actcagcttcagctttngaggacgctgcgccatgcatccgcaatgtctttagctagcttagcctgacccttggcaaattcatggaatgcgagtccaatatcagctgtcttttgctcctggaaacgagcaagctcttcattcattagtctaactatgtgttcaaacttcttagtagcctcctcactgtctgctttcaactgtgaggagcaagacatcaatgaacaaaaacttatgtaaacctcgtcgacaagattacattaagaattctcaatgagaagttacagcanacttgcctctcgaaactcagattctgcttcggcatacttttcagggttcatgaacttcaatttttcactgcagtgagaacaacattagaanagtgcagtatgttacaaccatggtactaacaaatc

SEQ ID NO: 70846 - DNA, 379 bp, Zea mays
tcggagccgaagcaactccagctttgaacgaagccatcagttcagcaagtggatgtgagttcaccggaggtgggcgccaatgttggggacttgttcttaactgttatgaattaagaacaaggcaacacagaatttgttaaatgttaaagtcccttcgtccttcgaagcattatctcccttgggatataatgaattccagacgaaggttatgaaggacataccttcataagcacaacaaataatgaagaaggatttacataaaatatgaaaaataatataagcatctgattattattattaactcatttctattctattattatagaaatgataacaaattacaaatgtaccttctgcttgaaggaaagcaaaagtacca

SEQ ID NO: 70847 - DNA, 411 bp, Zea mays
  unsure (1)..(411): unsure at all n locations
tagaaatactgtgaaatacttcanaaaatctccatctcgtttgcacaagttcatggcagtttgtaatgaatatgatatcacaattggaaaagggttatgccttgattgcaaaacaagatggaattctacctacaaaatgttggattcatgcattgcatataggcatgcattcaattaatatgctgataaggacactaagtatgcatggcaaccttcaccatatgagtggatcatgtatgaaaaattgcagccaatattgaaggcatttgcagaaattaccactgcgttttcaggatccacctaccccactgctaatatgttctatccctatatcgtgaatgttaagctttcactagtagcagcacaaaaatcacaagacannacaattgagtgtatggctgatgcaatgat

SEQ ID NO: 70848 - DNA, 364 bp, Zea mays
  unsure (1)..(364): unsure at all n locations
ttcagccgggccatacgacgggcgccgttcccgacccggtttctagccctgactaccatcaccaagtactcggtggagacaaggccggaactgtggctcgcggactaccggctggcctgccagctgggtggaacggacgatgacaacctcatcatccgcaacctccccttgttcctttccgacgccgcccgggcctggctggagcatctgcctcctacgcagatctccaactgggacgacctggtcaaagctttcaccggaaacttccagggcacatacgcgcgccctgtgaactcctgtgatctccgaagctgccgccagcagccaggcgaatccctgcnggactacatccgacgattttcga

SEQ ID NO: 70849 - DNA, 301 bp, Zea mays
tcaaaacgcaaacggtgcggtgactttctcggattacgttaatctaacctataaaaaactttgtctttgaatcatgtcttgcatgctggacccttctcattaaaggcgtcgtgccatttgataagggacacgaagatagttggttatgacaaaaaaacaatggaagggatggcagggacagtgttcccaacatgacaccttgtttcatcgatgtaagcgctgggcttgtttttccagagaaaaatttctctggtttggtggcccgttcagtccctgggccggaacaactgaaaaattcttt

SEQ ID NO: 70850 - DNA, 369 bp, Zea mays
  unsure (1)..(369): unsure at all n locations
ttcacttagtgtcgctttccaccctcagactgatgcatggtctttcttatcgagcaatccaaaccttggaagatatgttgcgtgcttgtgttctgtcatggaaaggtagatgggaggatcatcttgtattggcagagtttgcttataacaacagctaccagactagcatcaagatggcacaatttgaggctttatatggcaggcggtgtatatctcctctgtgctgggagactttgggaaagagaaccctggttggtcctgattggngtcaacagacttctgagaaggttcacgaaattcgtcagaatattntggccgcttagagccgtcagaagagttacgctgatgtgaggaggcgggatctggaat

SEQ ID NO: 70851 - DNA, 329 bp, Zea mays
aagcctccaagaattgaagacattttaaccactgctccggtcttggctcaaccggacatcactaagccttatgatgtatattgtgatgcatctggcagtgggctcggctgtgtactgatgcaataggggcgaataattgcatatgcttcaaggcagtgcgccccatgacgagaatacccaactcatgactggagctgctgctgtggttatgcactgcaaaatggcgtcattatctgctgggaaaatctgtacatatatcagatcataaagtttgagtacatttccccatcagaataaatatgaacacaacatggttgactattaaacta

SEQ ID NO: 70852 - DNA, 411 bp, Zea mays
tagacacatcattggcattcttttctcgttgcttcgcctgttttctgtatagttcacaaaaaattataattattactcattaatttgacatggattttaaattttatatcctaaattcataaagaaaatgttgcttacaaattagcaatgtcctttgctgtaattggtacatttttaggaccaccatgcatatcagacacgaagtccatgaaacagtgtcgcgggaatctgttttgctacattgaacttagaaactccatgtactcaggatcatgagtcttgttgcattgtagatgcttcttttcagtatccttcttaatgaaatcatgattatgttctaagtgtaccagatcgactcgtacggctacaatattttcttttgagtcatcatagaaatttttaagttcatat

SEQ ID NO: 70853 - DNA, 390 bp, Zea mays
tctgagcacctggcgtccaatcagcgatgaaatctgtctatgtctgggactgcaatgaggatctatgcatatagtcaatagataatttgttaagctccgcagcccatattccaatccttccagtagcttctctgttcctcattatgtccatcagaggctgtgacaaaggaacaattatgtgatatgctcgagaataataccgaagcttcctggaagccattaacacagcatacaacaccttctacaattctgtataattattatttgacacacttaaaacttcagagacaacatagactggagcctgccttttgatttggccatctagcttctactgtaccaaagacgcactaactgcgtagtgcgaggttgtcacatataagagcaata

SEQ ID NO: 70854 - DNA, 373 bp, Zea mays
actcagctgtgaagccatcacagcttataggaggaagtttcttttatttcggcatcaagatgcaccgaagccttcgctcacctgaaggtgttattaaccactgctctggtattagctcaaacagacattgaaaagccatttaatgtgtattgtgacgcatcacgcagtggtttaggttgctgtcttgatgcacgaaagacgaatggtatcatacaccttcacgcagttactccggcatcaggagcattatccaactcatgaccttgaattagctgttgtggttcatgccctgaaaatatggcgtattatctgctgtggaagatccgacgtatatatatagattataacagcctcgaatacatcattaaccagt

SEQ ID NO: 70855 - DNA, 394 bp, Zea mays
  unsure (1)..(394): unsure at all n locations
ngctgccttgtgagatctcacaatttccctgcagatacttgtgtctacttcttgccatcaagaaacttaccacggaccaagtacaaacgattattgataaaattgccaaccaactatcggggtggaaatctgatttgatgactaaggctggatggaaggtccatgtgcagtttgtcctcacagggatggtcatatatctcgcaatggctgtggatttacctccttgggctctcaaagctattgacaagatccgccgaggctttctttggcgatggcgcaaagaagcgagggggggacactgtcttgttgcttgttgaaaagtatgtcggccgcttgagcttggtgggctatggatttccaatctcattgatcttgctcgggcacttcgtatgcg

SEQ ID NO: 70856 - DNA, 231 bp, Zea mays
tcacacctacccgtctgtttatatagtgccgcacgtgggaaggtaaatcatcaagtcttcctcaccggacaaacaacacgccgcacacactgaactgtgggccacagagccccacaaggagaatattcaggacgcctgtaacttctgcgtgggggtgccgcctctcactcggattattataattgtttctcggctatgagctaaggaaaggcgttttctgatcttttgcat

SEQ ID NO: 70857 - DNA, 308 bp, Zea mays
aagtctctttggaatccttaagggttattgcttaaaatgttttcaacatgctttcataagtgcataatctgtcataagcctcactcttatattatgacacattgcacttaacagtttctatgatatagatatgttctcattaacctaattatgtgcgcttggcatttaaaggccaaaatctgtatcctctcaaggcacatatttagggggagcaatctatattatatagaactgtttaagcttaattgatatatccttttaaccatatctcttttctttggtacatttgcatatttcctatctctctt

SEQ ID NO: 70858 - DNA, 500 bp, Zea mays
  unsure (1)..(500): unsure at all n locations
acacttgaaactcagctttacaatttctttaggtcattgtgagaggtcttgagcttctcataagacacttgaaggttnttatacaattccttcaaggtcttaaatttttctttttctttgtgcatgtagtcatcggcctcacctaacattctaacaagatcatcatatgaatagccatcatcatcaacatcatcgatatcatcatcatattttatatcatttaaattggtgatgagttttaccttagcatctccctttgccataagacagtgaggggatgagaaaagtgagggagcttcctttatggcaattccggcattaagcttggatgaggtgtcatcaccatcatcatccgagctatcatccgagtcccattcaactaagtaggctntgccatctttcttcttgttaaatatttctttttcttcttttcactttcatccttgcccttcttcttcttgcttggcaattcatggcaatgtgaccggggtccccacact

SEQ ID NO: 70859 - DNA, 314 bp, Zea mays
atgacactaagttctatttgtcttctcagtgcaatgaagcctttgagcaattgaagacactattgaccactgctccggtattagctcaaccagacatcactaaaccttttgatgtatattgtgatgcatctggcaatgggctccgctgtgtactgatgcaagagggcctaatgaatgcctatgcttcaaggcagatgccccggcatgatgagcactaatcaactcatgatctggagctagctgctgtgggtcatgccctataaaattggcgtcactatctgctgggaaatatctcgcatatatatacagatcat

SEQ ID NO: 70860 - DNA, 208 bp, Zea mays
agtagatcaggggcacctacatggatgtctgatgtttgtgagacaaggacaacatgaggtgggccatactacatgggaggttgcgtcacaatagtgcttcatcataatgcccgtatgactcatgaacgccgtgtccaccttctcccggcttaccaaaacagtgctcgatgggcaagtactgttaacattattcacatatgtggacaac

SEQ ID NO: 70861 - DNA, 462 bp, Zea mays
actgagacgttgagcttggaaaaactggtttgagatttcacctttaccggcttaaacttcatgcacgactgggagatgtaaatgagtgagagatctataaaaaaaactacttttttgcaacctcatctctctatttcaaccatgaagttatttatttctttacaatactatactcatcacctatgaagctatttaattctttacgatactttgctcatcactgatgttacttgttttgtaggtacacaatatttgctaacgtcatcgactcgagccgtgagggttcagcgtggaggttcgtcgaggtctgctgcttgtagctcccgtcgctccactcaagatccagcagaagtggagcaactgcgagaagaacttagattacttgaagcaacaagctgcaaacatgaatattatgcacaccacacactcatacaagtatgttcaaaagataatagctttcac

SEQ ID NO: 70862 - DNA, 388 bp, Zea mays
actcagcttttccttatagcgctgtgggagttggtgtggtttggtaaaattgggacagaacattcaagggatctattaagctagtatcagaccatccggcgctagccttcaacttaagaagttctagaactgtacgcagtgtagtaaactctttgtcacaaccctttgattcatcatataaaggttcttttgaggctctttcccgtgcctccattatagatagcaccttttgcgatgccagagaactcaacattggtggattcatatggcgcaacatctgttcgcaatcaaattcttcaaaatcttgattagcatccacataattcactttaccatcaactttatttaaaattccgacaactgtctcatcattaccaggcactttaca

SEQ ID NO: 70863 - DNA, 447 bp, Zea mays
  unsure (1)..(447): unsure at all n locations
actcagcttacaggtgaactacaactctggtatgttcaactcaaactgattcaacacttagcaaggtcaaaaagtgcaattacagcagctctgtccagaattggacagattctgacttgcaacttcaaaaattcacaactacagattcagacatccaaacaaagtgattntagactttctggagagctaattaaatgttctacaaattatttataaacatcattggctagtttaatatgtatcgagagtaaaatacacaatgaaggctgtgctgtccagaactggacagattcagtcttcagactttatacatccataacttaagtttcagaccactaaaaagagtgatccaagactttttggaaagctcagcacaagtactaaataacttttataatcactaagaagtggatcaatggttaactaaatcaaacaacacagttttcg

SEQ ID NO: 70864 - DNA, 403 bp, Zea mays
  unsure (1)..(403): unsure at all n locations
taaagccatggtaagtagcataggcattttatatgcgaattgactcaagcctagctacgggtgcataggtttcaccgaaatccaaaccttcgacttgtgagtatattttggccacaagtcgggctttgttccttgtcaccacaccatgctcatcttgtttgttgcggaagacccacttggttcctacaacattttggttaggacgtggaactaaacgccatacctcattcctcgtgaagttgttgagctcctcttgcatcgccagcacccaatccaaatcttgaagtgcttcctctaccccgtgtggctcaatagaggaaacaaaggagtaatgttcacaaaaatgagcaacacgagatcgagtagttacccncttatgaatatcgccgaggatggagttcac

SEQ ID NO: 70865 - DNA, 247 bp, Zea mays
aactgaccgttacaatccagccgttgatgtgcacgggtggaccgtccaaaataacatacaatattctacacaggagctcttttgaaaatatcacatgtgcgtgggccgtccacgcccttacagcggatcgtgcgtgagacctcgatgtacttaggacagaaaccatataaaatgcatatttctactacggatcgtgcgagggaaagataagtatctgtcgacctcaggtgtggaccgttcgaccgat

SEQ ID NO: 70866 - DNA, 450 bp, Zea mays
  unsure (1)..(450): unsure at all n locations
atacattcgtagnggtcagatggtgcacaatcacacccattggagtcaacttcagcaagtacaccaccagtgggatcaacttcagtaaagacctctgctaatacttcttcacaaacaggaacagaaggtcccacatcctggtgcaagcatgacaatcggcaaagcacgctttttttcttcttcttctcttcagcaagtgcaattgggcggctgacctatccaagacgctttgggcgagtacgcttaagctttcgggtatacactattctatcaaactctggtataactgcaacaaccattgttttagcatgggccgactcagaagatttctatgcaacatatcgagcacaacatttatctctgcatcatctgggctcattggcatcctataatgaaacttgctttcatcattgggaatatcacaaagagaagcaaccaatactttaatac

SEQ ID NO: 70867 - DNA, 388 bp, Zea mays
  unsure (1)..(388): unsure at all n locations
tggacgtgaaangtgccttcctcaatggaccaatcaatgtataggtctatgttgagcaacctcccggctttgaagacagtgagtatcctaatcatgtctataagctctctaaggcgctttatgggctcaagcaagccccaagagcatggtatgaatgccttagagatttccttattgctaatggcttcaaagtcggtaaagccgatcctactctattcaccaaaacacttgtaaatgatttgttcgtatgccaaaattatgttgatgatattatatttgggtctactaacgaatctacatgtgaagagtttagtatgattatgacacagaaattctagatgtctatgatgggggagttgaagtatnttctatgatttcaagtaaaaca

SEQ ID NO: 70868 - DNA, 348 bp, Zea mays
tcacatataataacaaaggagcccctggcgttggtggacttaatgttgttagatctatcaaatattgcttcagctcttcgaaggctttctgctggattggtccccattgaaagacttctgctgacttcagcacttcgaagaatggtaagtttctctctgctgatctagatatgaatctgttgagagatgacagccttcctgtcaatctttgagcccccttttttatacttggtgtgtccattcaaagtatagcttcgattatgcttggattagcctcaatttcctatgttgagactatgcaaccaagaaatttccccttctttactccgaagacacattgttctggat

SEQ ID NO: 70869 - DNA, 421 bp, Zea mays
cttgctctgcgactccgactccattgctgcttgcattgaaattctttgctctcctggaatggctctgtccttgcagataaaagaaggtacaggcgctcccaactggccctactgcggtagaggagatccatggccgtgcatgagcacctccttagctaggcactcgaggacctcgctggcacgcccctgcaacttcggattgatctgctgcaaaaatttcctctgccaagaagaactgctaacatgaattgaattggcaccagtaagaacagaactaccaacaacctctgcataagattttctactattgacaagcgaaagaacgacaattatagatatgaaagccaacttgcttatcgcataacgagaaccacaacacacaatctgagagctccacagcattgaaaccatgtgctgcacc

SEQ ID NO: 70870 - DNA, 54 bp, Zea mays
tttatataactaactacaaagggaaacttgatctgcctgcgacaccaaaaaact

SEQ ID NO: 70871 - DNA, 332 bp, Zea mays
gaacacatcttgcgactaacaaatgttcatttttataaatacagggaccgtaacgcatgcctagcaggaaagcgagttggtacccaccatccacacaataacatcatgatgaccgataggccgcttaagctactccacatggatttattcggcccgatcgcttacataagcatctacgggagtaagtattgtcttgtaatttgtaacacccctggtgatactgtcactaaaacttgagcatgacatcataagcattggcataacatgtgattggcagacctacaatgcattctctatgcagaagttcaaacaagttgtattgatgtggcatt

SEQ ID NO: 70872 - DNA, 305 bp, Zea mays
ccatgtggatgataccagttgaaaggattactccccctaaatgagtgtattctttacaaagggagttctccccccttttatagaagaagaagtactccccctgacagagaccctctacttatgaataaacatgtgaaaaaatataggtgcgagacatgatttgaaaagactaacttcccttatgcataggtaacagaatatgagttaactacttatgcatttttagcaacattgaagcatatgatatgaaatatagtctaatcaaatgttggagaagacaatgtaatgatactgagtgtagtctc

SEQ ID NO: 70873 - DNA, 427 bp, Zea mays
cgtgggtcatagacgagcaaatcttcctttgagtctataattgtaggaacaaaagatgatacatatcaaaagctcacagaagagaatgagaggctaaagatgagcttgacacaacttatagggaagtgcattgctcaaccttctcaagataaccgtgatcacatggtgaagaagcttgagacgggaacaaccatggcatgcactatatccctcaaagaaaatgtcaacgacttgaggattgccaagaggagggaacaaaagaagaaaatcaataccactttcaaaggcctcaaccatgcctccatacaaggtaacatccaaggaagtaatcaagtcacactttatactaagagaagtaagaagtgtactgaatgctttgaaatggacactcgatatggccgtcccctatataaaaatgacttgatac

SEQ ID NO: 70874 - DNA, 307 bp, Zea mays
tatcctctaataatgacccaaagatgaactgacgcgtataacactaacttcatattcatctctagcaagaactcgtgtcgacggaaaaggacaacctctggggaatcaagcaaaggcctaaaccaagaaaatccaaggagggaacaataattctaagtgcacacgcttcaactgagaaatcctctgtgtcatttgcgggcccataggaacaatgaagcacccgagaataaactcaaaagacattaccttgctttggaaaggatctaaatatatggaagaatgccagcccatacttatatatcgcgac

SEQ ID NO: 70875 - DNA, 411 bp, Zea mays
  unsure (1)..(411): unsure at all n locations
ggaccataaaactaagctgacacaccatttgacatcttaaataaatctccgagatcatgtgtatntaattcattcctcaacatgcagaagcgggtcttgtcaagtggcttaatgaaaatatccgctaattgatctttccacctcactccttctaaaatgatatctccttttgcaacatgatctcttaggaagcgatgaccgatatcaatgtgcttggtgcgagagtgttgacaggaatattagcaattttaacagcactctcattgtcccacaacacaggtaccttttctagaactacgccatagactacaagagattgtttcatatataacaattgtgtgcaacaagcacccgcggcgatgtatgtcgcttctgcggttgacaaagcacactattttgctttttggaagt

SEQ ID NO: 70876 - DNA, 456 bp, Zea mays
agcttatgaagattcttcatcccaacatgtgctattctttgatgccagagccagcccacgttagtcttagcaattaagcaagtgtcgagttcagctctatcaaaatctaccaagtatagctgaccctctaacactcccttaaatgctaatgaatcatcacttcttctaaagacagtgacacctacatcagtaaaaagacagacgtagtccattttgcataattgagatacagagagcaaattgtaatctaatgaatctacaagacacacattggaaatggaatggtcaagtgatataactattatacccaaacctttgaccaaaccttgatatccatccccgaatgtgatagctcgttggcgataccttgctttctcatacgaggagaacatcatcttctcccctgtcatatgggttgtgcacccgctatcgatgattcaacttgagcccccggat

SEQ ID NO: 70877 - DNA, 431 bp, Zea mays
taatgatgaattggctagtcttaatgctcaacttaagactagcatgaatgagttcgataagctaaaattgcaagggatgcctacacgattggtagacacccctcaattaaggatggacttggcttcaagagggaagtcaagaacttaacaagccataaggctcccattcccgctaaggagaaagggaaggcccctatggctactagtgctaaaaagaaccatgcctttttgtataatgatagaagacaaactagaaatgcttataggagttataatgcttacgatgatttttctcatgctatgtttgcttctagttcttcatatgtgcatgataaaaatagtggtagaaagaatgttgttcataatatgcctagaagagatgttgttaatattcctacgaaagttaatgaaccttctacaatatatcatgc

SEQ ID NO: 70878 - DNA, 442 bp, Zea mays
  unsure (1)..(442): unsure at all n locations
tgcaagcatgctaccttctaaacggagagcacattgtacgactatttttgttcattttgagaaagacaagatcgtgtagtgcatgtcttgcaggaaagcatgctggagccatcatccacacagaacataataacaagtgaagaaccgctcgagctactccacatggatataattggcccgaacactcacataagcatcgacgggagtaagcacttgcaagggtatcgtggatgactattctccgttcactcggatattctcttagcataaaaatctccaactctagaaactttaaagagatgttttagacgggctccaaangagttctgattgagaatatacaagataagaagcgactatgggaccgacctcaataagttacaaatctaaagaaatcttgaggaggaagcatcaacgctgagtttctttctcacattcctca

SEQ ID NO: 70879 - DNA, 489 bp, Zea mays
  unsure (1)..(489): unsure at all n locations
cgcacatagtctgaggtagaatgcttctttgctagcttgctcattgaagggtttattgcgcctccatccctagaactctcttcttgaagtgttccttcacttattcattgctgacgtgacgtatctcctcttctatcatatcataaggtaacttaatttatgcagactcagttaaaaagtcactgtgtgtgctcttgatctttgtctacctgtgcattatgcgcatttgctttttactcattggtggcacaggtgaacgactcctttttctatggtgttcaagtggagaaggaggtggagggctccttcaagatggtggagaaggaggtgcanggctccttcgagttggcagaggcggtgaaaggctccttngactatgtggagaaggangtagagggctctttccaacaacaccttcaattcttggctggatattctatattttaatggatattntctgtcatagaacaaatctatacaggacttgtg

SEQ ID NO: 70880 - DNA, 277 bp, Zea mays
taagtaatatatggagatacgaatgatattttaagctgagaacttgtctcacggtatttatcagaaaggaagcactgtgcccagttttatatatttctaccttggatcacctctcccatacgtgagatgcacaaacaatatttatgattctctaccacacgggctatgtatatatagatatgtatatgaatatatatagagccatatatttatctgtacatgtatactaatatggacttctatacataatagagcgtgttttacctacctgaataca

SEQ ID NO: 70881 - DNA, 330 bp, Zea mays
acatgtgctaagcggcgatgccacagccagcccatgctagtcttaacaattaagcatgcatttagaccgacctcctcttttgcaaaatcaactaaatagagtttgtcgtctaatacacccttaaaagctaatgaaccatcacttcttcttaagacaggcacatctacattagtgaatagacaattatatcccatattacataattgacttacggataacaaattatatccaagcgactcaactaagaatacattagaaatagagtgctcatttgagattgcaatcttgcctaagcctttaaccttgccttgattcccgtcaccaaatatg

SEQ ID NO: 70882 - DNA, 270 bp, Zea mays
gcagccaccggaaggcacacccattgtctacggcagcccaccacccagctagctacaataagcacgcatcaaaccacctcactttccaaataactaaaagagaggcggcagtcaccctaaaagcaatgaacatcattctctaagaagaccatcacatgaggaaacacagtactcccaatacaagggactcacgcaacaggataccagcgactaccagacacatagaatagaggcccgagaaagcagttccaacccatacctgcggggccc

SEQ ID NO: 70883 - DNA, 331 bp, Zea mays
gccactgtcggtaccctgaaacaggggtaccccttactatcaacatgaagccgcggtacccacacgggtatctctatgtcgcatggagaacagaacccaaccccaccacgtggacagcttcggggccgccacatgggcaaagaagacaatatacttcaaggtatcaacagtgggttccgacccccatgggaaagtgtctgacccctgtgtatacagaccggacctcagggtaaggtccaggaccttcacgggtgcaaaccggacccctatgatgggtttcgacccctctgtgtgggtatgggccctccagcaaggtcctggattccggaca

SEQ ID NO: 70884 - DNA, 312 bp, Zea mays
acagaagccttgagtccaaaggagcatgaccatataactgatgtcgcccagctacccgacgagattgttgaggaattcacgagacttaacctgtggatagacgctcacgtttaaggagtcataaatgattaggaaccaatcttggagcgagacaactgcaatggataaattggcgatgctaagacacaagagattaacgatctgattaccgaagatcgagctccggaatccacggaagatgagcaaggcacaatatgcgtcaaggacaagatatgtgcacccgagactgaaagccttcgtgagactatatcg

SEQ ID NO: 70885 - DNA, 366 bp, Zea mays
ctcagctgctccgattcactccattgggggaatcatctgagataccgagccgcgcgcgcgattcgcatccggtgagcgagttgggagcctgggcctacccatcggcgacagcagccaacgtggcgcacctgcgtagcgcgactggctccaacgcctactgtgatgcgcgattgacggaaccagcacaagacccggcgctgggctctcactcgtcaggggcgaagtcgccacgcgcggaggatctgccagcgcgcgagcgagacatgcgggggaatgaagaaggccctgacggacgggacccaatgacggtgtatcagtggagaagcgaatggggaaaagtgggctgtgcggaataaaagaggagat

SEQ ID NO: 70886 - DNA, 360 bp, Zea mays
  unsure (1)..(360): unsure at all n locations
tagtgcaatgggtggcaacaagggaagagttgaatggtgtattgctgaanaatttaaatataaagagatatcagccttcacgagtgtatactttgcagaagaacacaatgtaaatgcacctacctttatgtataatgttgatcaagctggtccatgcagtaaactcaaaattttgtcattcgagggaaagacagttggagcatcaactgaatatcacattgaacgtgaagaaaagttggatgcattactctacatgtatgaaaacatggaagagatgactccatacttcaagtaagcatagattttcaaaattgaagagcaacatgtgctcattactcctcgtaactcttttatttactt

SEQ ID NO: 70887 - DNA, 409 bp, Zea mays
tgtgaagattcttcatcccaacatgggctagtcggcggtgtcagagccaacccatgttagtcttagcaattaagcaagtgtcgagttcagctctatcaaaatctaccaagtatagctgaccctctaacactcccttaaatgctattgaatcatcacttcttctaaagacagtgacacctacatcagtgaatagacagctgtagcccattttacataactgagaaacggaaagcaaattgtaatctaaagaatcaacaagaaaaacattggaaatagaatggtcaggagatatagcaattttaccaagtcctttgaccaaaccttgatttccatccccgaatgtgatagctcgttggggatctttgtttttctcataagaggagaacatacttttctccccgtcatgtgg

SEQ ID NO: 70888 - DNA, 396 bp, Zea mays
  unsure (1)..(396): unsure at all n locations
ctcagctctatgcaaaattctnccccttgtcataaatctnccaacttgatacaaagaatataaagggttgaaattatgatttatcaagatttgaacacactatcataaaaagggtccttatattgcacaaaggtaatggagaagtgtcataagtgatgtacctttgcgttttaccttttaaaagggtgtccacacttgtgttgtatttagaggtcattttgcaatctcttgttggcataattgtgacataagtccaagatatcaaatgaatattgtcatactaattgaaagataaatcttgatacctggagtctagatgtcacctagcattttcttatcataacaagaggcagcatgaaaattgcacaagtatgaattatacaactagtgatcatg

SEQ ID NO: 70889 - DNA, 434 bp, Zea mays
  unsure (1)..(434): unsure at all n locations
gcagcatgcnagcntctaaagggagagcacatctcaggatgatcttatgtttattttgagaaagacaggatttgtagcgcatgccaagcacggaagcaagttggtgttcatcatccacacaagaacatcatgacgactgacaggccactggagctcctacacatggacctattcaacccgatagcttacataagcatcggcgggagtaagtactatctagatattggtgatgagtattctcacttcacttgggtgttctttctgtatgaaagatctcatacccaagaaacccttaagggattcttgagacaggctcaaaatgagttcggcttaatgatcaagaaacatataagcgacaaccggacggagtcatatactcacaaatcgaacgttccttgatgggagggcatgagcatgagtctcttctcctacac

SEQ ID NO: 70890 - DNA, 377 bp, Zea mays
  unsure (1)..(377): unsure at all n locations
attcaacagcgtactctgtgcacaagtcaccttcgttagaaaacaccttcgttgnttaaaacaattaanaatcgaagaaaagtcttttaccttgaaattagaatataataagctaccgacaagatgttgctgtcggtagcggcttatgtcggtttcaagcttcgggaaaccaatactctgtgatagagtaccgataaccttcgctctggtttgatctcggacgcagcctaacttgtcatcatcaacaccaccgaagagtagtgcccctggttgatatccacaggatatggcatattcttttaactattctttctcagccttcgtcaactcttgttcaactaagttttgaaagttgaaaatttgcgtcttcgaagcat

SEQ ID NO: 70891 - DNA, 423 bp, Zea mays
  unsure (1)..(423): unsure at all n locations
ctttgcattgggctccagccctggctcctcacgccccttatttgatttccattcttatgacagcttcgggcgtaatatgatgtacgtagacttgataaatctttcaaacctcaaccacaaatttgcttaatggaagccgaagcctatccttgaaaaatcttcggaagatcacaacttcattctcttcgtgagtaagcacggtcctctcttcatcatcaggccttacaatagacatgtgctgaaaatattcttccctcatattatcaagatgactctgtttaatagttgattnttcaaaaactgtatggcttggtcgccagggtcgatctttggagtcctctccaccactatccacatcataacctgtcgttatcgctagtatcttcagacaaaccttcccaaatctacctggaatcttctctg

SEQ ID NO: 70892 - DNA, 427 bp, Zea mays
  unsure (1)..(427): unsure at all n locations
tggacgtgaagagtgccttcctcaatggacctatctatgaagatgtctatgttgagcaacctcccagctttgaagatagtgagtaccctaaccatgtttataaactctctaaggcgctttatgggctcaagcaagccccaagagcatggtatgaatgccttatggattgtctcatcactaatgaattcaaagtcagaaaggccgatcctactctattcactaaaactattgaaaaagacttgtttgtatgccaaatttatgttgatgatatcatatttgggtctactaacgagtctacatgtaaagaatntagtacgatcatgacacaaaagttcgagatgtctatgatgggggagttgaagtacttcttgggatttcaagtgaagcaactccaagagggcaccttcattagccaaacgaagtacac

SEQ ID NO: 70893 - DNA, 149 bp, Zea mays
acactcgtcactatagtaaaacccttatttgctgaatattacaactgagaaaccctccaaaacaactaaaccagggagacatacccgctcaattgatctcttggacactggcaatcacaactgtcttctaccaaaaacaaggtaaccgg

SEQ ID NO: 70894 - DNA, 351 bp, Zea mays
tgctccgcgttccaccggatgtgtctttcttggataccctttataacataaaggatataaatgtcttgatcttactacaaatagaattatcatctctcgtcacgttacttttgacgagtcctcttttccttttgctgaaatttctaacccaccttcatcccactttgattttctttcggacttggattgcacttctttgcctgttggtactatgtattctataggtcctattgctctggtcccatccggtgctgctggccccgtcccatcacggcaagaggtggcacgtcgcactaccgcccaagagcgcctggacacttctgctgctggccgcatggtgtacctggacac

SEQ ID NO: 70895 - DNA, 454 bp, Zea mays
  unsure (1)..(454): unsure at all n locations
actaagctgtcaaacattaactctacccttgaaaagcgagaataatacatcttaaaggttgctccaaacattgcaagtacaaagaaaatgtgcgtgttgcacattgatatcatgattttccatgttcttttgcaaatatagggctaacagacggctcctcttaacagtataacgcacatttgtacataagttatcatagtattatatatttctgttgcaacgcataggcacttacctatttaccgtttaatacaccgattattactgttacctcggattgaaaatgtcagctttactgagccacgagtccatgctagatacatggaggccattttatttgggaatccgatttatttattttgttattacacgaatagtcccttgtgttaggggtggtaatagacaatgataattcctaaaaaggctcnaaatatttaagttccgatactaattc

SEQ ID NO: 70896 - DNA, 318 bp, Zea mays
gctttcacatgatcgcaacctgatttctcaagatagccgcaataccccttgccctcgagaaggcgcagacgtccccatgtccatttatgatcaactctaaggcttcagcctcgccgctaatacactcaattggcccctcgggatcaccctgtacgaagttgtcttcatttgaatatgcgccaacattggcgaagctagttcttatgtttgttccacacattctatggattcttcataacatttttctctcgaagatcgaagttctacaactggtgtctcccaataatattttcaagaatcactggcgtctccgtcagc

SEQ ID NO: 70897 - DNA, 305 bp, Zea mays
acgcgcagcagctacacagcgcggagcattgtgctcacctcacaagacaacgacagacgctcctaagaaccttgttgaaacaccagcgcgatcagccagcttttcatttggcacaacacacacgacaagagctctaaagctcgcacactgaccaacgtcttcgggggcctatgacgacacagcgaacaagcagtgactcatcaaaactacaagaaacccccacgctttacaccaaccctgacagacatacctgacggtcaagcctgatgaacacgacattttgttactgggaacactgaaagaca

SEQ ID NO: 70898 - DNA, 476 bp, Zea mays
  unsure (1)..(476): unsure at all n locations
tattattactgttagatgccaacaaanaaaacccttagtacagaacccactcctagttgagagttgtagtacaaagtggcccatttacacaacttttgttatttttgtctaaagcatagccttttattttgaacctcaaattcctagaataggctatagtgaccaatggcaacccactgtaatttttacagaatttttggaagaagttaattcactgttgtagttcaaaccttcaatagaattcataaatagagaataaagaagaggaaaatgaatgacggaaattagtgtcatcctaaaaccctttgtaaatnttccactgaaacatatataagggaaatgccaatccactatgcttatccttaacaaaacctaaacttagaatgataatcataaaccactaaaagccacgtataaccaagaaaccctaagttaccaactaacctaagttttctttctttagcataatggtatta

SEQ ID NO: 70899 - DNA, 432 bp, Zea mays
tatctgcattgcatgagcttggaatgtcattaccattcatgtccttcaatctgtatgagacacggtttgatgaatagaccactaagagttttcccactgtatctgggttggccactctccaaaataccaaatgtcctgtgttgatgttcttcagtcttaccttccgatcatgccattgcttgaagtctggtttgatgttttagctaaagcttgatacttattgattccatttaacaaaagtttgaacggggtaaatcctgttgaccttgagacaacagtgttgtgggtccataccacttttattaacttgtctggccactttcctttccgctgagtgaagaatgacttcattatccctggtattattattccattgggccgctctaccagtccatctgattctagatgtcttactgatgcacaatgtatttt

SEQ ID NO: 70900 - DNA, 282 bp, Zea mays
cgttgataattgacagacccctcttgtcaaagaatgttgctattctatcacaaggaaggtgttttttcggaccttcggcgtaaaacctctcgccatggcgcaatctaaatttattagttttaacacactaatattgcgaggggctactgtcgggggccttctgcttccgaaggtgctcaaaaacacgatttaacacaatctcttgagtataatgtgtgaacaggtatcttctgacacaagacctggtcacagtagaccaaaataatacgaaggttgatacat

SEQ ID NO: 70901 - DNA, 400 bp, Zea mays
  unsure (1)..(400): unsure at all n locations
gagatctagtatgatgaagtcattcctcaacatgcaaaagcgggttgtatcaagtggcttagtgaaaatatccgctaattgatcttccgacctcactccttctaaaatgatatctcctttcgcaacatgatctctaaggaagtgatgacggatatcaatgtgcttggtgcgagagtgctgtacaggattattagcaattttaacagcactctcattgtcacacaacaaaggtaccttttctagaactacaccatagtctagaagagtttgtttcatatataaaanttgtgtgcaacaagcacccgcgacaatgtattccgcttcgacggttgacaaggcaacactattttgctttttggatgtccatgatactagtgatctcccaagcagatggcacccc

SEQ ID NO: 70902 - DNA, 394 bp, Zea mays
tagataaaatataatatctggaaactgcagcacaatacaaccatcacagaagcacatctgggggcaaatcctttctttataactcgatatgcatgggtgcagaccaatatgccgggcttatgagggcggacctcaccggactggcgttcacgtatgcacaacctagttacaaaaagaagaaaccttaacccctccaacttgctcctacggatagaacttacggagatgctctatgtccacgggttgggaaaggcatttcttcgttgtggaaggcggcacacccgggtcgcatacttccgcaccttgaagggccttccaactgacggagagttgggagccctctcggtcagactcgcttagactaagcctcgacctgactcccactagcccgacc

SEQ ID NO: 70903 - DNA, 421 bp, Zea mays
  unsure (1)..(421): unsure at all n locations
tgaggagatggcgctcgtcatcaagagcttccgccaattctattgcaaggagggggaaagactacaagtcccgctccaagaaggtttgctacaagtgtggtaagcccggtcactttattgcttaatgtccattatcaagtgatagtgacaggggcgacgacaagaaggggagaagaaaggagaagaagagatactacaagaagaagggcggcgatgcccatgtttgtcgggagtgggattccgacgagagctcaagcgactcctccgacgacgaggacgccgccaacatcgtcgtcaccaagggacttctcttccccaacgtctgccacaagtgtctcatggcaaaggacggctaaagggaagaaggtaaatncaactcctccactaaatatgagtcttctactgatgataatgctagtga

SEQ ID NO: 70904 - DNA, 241 bp, Zea mays
aaaacgagcgactgcaccttggccacgtgtttcttagagaaaagactagaccaggctggacgcggaatgtcctttacaagacactggggcaatttgaaaagacgagaggattacaaggacactgcagagccctcggtggacaaggatccagtaaatctttctgtgtgcgccggagaaatttttaaacagcttgtaaaggacgtctatgcctttacattaaaagcccactgaataccttaga

SEQ ID NO: 70905 - DNA, 443 bp, Zea mays
  unsure (1)..(443): unsure at all n locations
acatgtgctaagcggcgatgtcattgccagcccatgcaagtcttagccattaagcatgcatctagaccggcctcttcttttgcaaaatcaactaaataaagtttgccgtctaatacacccttaaaagctagtgaaccatcacttcttctaaagacagacacatctatatttgtaaacagacagttatatcccatattgcacaattgactaacagatagtaaattatatcctagtgactctactaaaaacacattagagatagagtgctcattagaaattgcaattntacctaaccctgttaccttgccttgattcccatcaccgaatatgaatgaatcttgcgaatccttattcttgacgtaggaggtgaacatcttcttctcccccgtcatatgggttgtgcatncgctatcaataatcacagcttgacccncggatgcata

SEQ ID NO: 70906 - DNA, 424 bp, Zea mays
tatgaagattcttcatcccaacatgggctagtcggcggtgtcatagccaacccatgttagtcttagcaattaagcatgtgacgagttcagctctatcaaaatctactaagtatagctgaccctctaacacacccttaaatgctattgaatcatcacttcttctaaagacagtgacacctgtatcagtaaaaagacagttgtagcccatttgacataatcgggaaacagaaagcaaattgtaatctagagaatctacaagaaaaacattggaaatagaatggtcaggagatatatcagttttacccaaacctttgaccaaaccttgatttgcattctcgaatgtgatcgctctttggggatacctggttttctcatatgaggagaacatacgtttttctcctgtcatgtcgcttgtgcacccgct

SEQ ID NO: 70907 - DNA, 403 bp, Zea mays
  unsure (1)..(403): unsure at all n locations
tcattctgagaaagacatggtatgtagcgcatcgtcagcanggaagctacgtggtgtcatcatccacacaagaacatcatgacgactgacatgccgctcgagctacttcacatggacctatatagcccgatagcttacataaacatcggcgggagcaaggattgtctagttaacagtgtatgattattctcgcttcacatgcgtggtctgtttgcacgaaaaatctcaaacccaatagacctcttagggattcttgagacaagctcataatgagtccaacctaaggataaaaacaatataatcgacaatgggacggagttctagaactctcaaatataacgctctctngaagacgagggcaataagcactgagtctcttcctcctacatgccacaacaaaatg

SEQ ID NO: 70908 - DNA, 187 bp, Zea mays
  unsure (1)..(187): unsure at all n locations
accttaaatctcaacttctaagagagagttcttctataaactctgaactttctttgaatgcgtgattntttttatttcttgcgtttttctataaaaataagctgattcatgttaaactataaagggtgtncnnncctccngcctctttaccctcttcccctggtctctttttcccttccctttctta

SEQ ID NO: 70909 - DNA, 424 bp, Zea mays
agcttggccactgagccagcgattgtttgtatctaccacgtggacagaccaacgtcgcacatgcggatgcagaggaggaggccctgctcctggcacatgcaagcatcgagccatctccagcggcaccggccgcagcggcactcctccaccttgatgagtcgaaagcacgcgccttccttggtgacggctccaacaaggacatgatcgaaggatggtgcctcgacaccggcgccactcataacatgaccggccgacgggagttcttcaccgagcttgactctagcgatcgatgctccaccaagtatggggacgcctccggcgtaaaatcaatggcgccggctcaacagcttccccgcgcgatggtgagcacaagctttcaccagagctactacataccgcccgaggactcatatcaactggacag

SEQ ID NO: 70910 - DNA, 435 bp, Zea mays
  unsure (1)..(435): unsure at all n locations
tggtccggtgaacanatcccttgcagtgatcttgtccatattcgcgaagatatgctcccaatcggcgcttgaacaggggcagaggcaacgggaacacgtgttcgaccgcggctgacacccctggttcacgcccgttcgcgcaccgcgccttcccagtgcacgcccgtgcgcactcgccggtccacgaccgaccgtgcaccgcgccgtgcctataaagcctccccaggcgcgccccacttcgccccgcactcaccctcaccggccagccaccgttccttagctccggcgagcttatttccgcccgccattgccgccagagcttcngccgccgaggccagctcactccagccaccctccagcccaaccagtgcttcggctagctccgccagtagcccgtgaagcttgcaagccctcggacccgaccagacttcaccg

SEQ ID NO: 70911 - DNA, 469 bp, Zea mays
  unsure (1)..(469): unsure at all n locations
tgcttgctgccggcggatgcatgccgtcgctggactatatacttatatttaagggtttcttacattggtccccttagtttcaccacagtatttgttgctacccttagtttttgtccttactcagttttacccgattctcgttctcgttgctcacaaatacgcctggacgccgtctccatccactttcacgtgtcttacaggtcgggcccactgcaaaaattctccactccactcacagcaactcggccgacgcctaggaaccgcacccgcgccctcaaccggtcgctggccaggaaccacgcccggacgnctgccacccaccatgcccgccacgccattggtaggagctgccacgcccgccgcgggagggagcaagcgcctggccagaagctggcggcgaatcttcccgttggaagctcagagctgggtggcgaatctcgagttcgaggtcctcgtcgcggatctggag

SEQ ID NO: 70912 - DNA, 218 bp, Zea mays
  unsure (1)..(218): unsure at all n locations
tttgccagaagatcctgcgcacaccacctgagctcaagctatctgctgcgaggctgaagtccgacagcanaagctgcactggggcactgccttcaaacacgctaacaacctttgacatcattggactgagaggaggcgccgcatctaggcataacagggcaacatacagcacgaggagcgctcccttctgcgagcaatcggaaacaacaacgggatca

SEQ ID NO: 70913 - DNA, 415 bp, Zea mays
  unsure (1)..(415): unsure at all n locations
tgtgaaggtgcttcatccncacatgtgctaagcggtgatgccacagccaacccatgctagtcttagcaattaagcatgcatctagaccggcctcttcttttgcaaaatcaactaagtagagcttgccgtctaatacacccttaaaagctagtgaaccatcacttcttctaaagacagacacatctacatttggtaatagacagttatatcccatatgacataattgactaacagatagcaaattgtatccaagactctccactaaaaacacgttagagatagaatgctcattggagattgcaattttacctagcccttntaccttgccttgattcccatcaccgaatataattgaatcttgggaatccttattcttgacgtaggaggtgaacatcttcttctcccncgtcatatg

SEQ ID NO: 70914 - DNA, 294 bp, Zea mays
gcatactttgcgagaaatgagcacaacaactaaccgatgagctgctatctataaatatgcaagcattaagatgccctcttgaaagcgcacttatatggctaagctcggtctaggctatatgaacaccatatgccctgcattcatatataccatcctcgaagcacccgcatacgtcaaagatagatttggtgtcaggaaagcttgcgtcgatgtatataggaccgactactatcttggccgagttggcagctgggcttaacacatgttattgtcggaatctatgagcagagaaca

SEQ ID NO: 70915 - DNA, 373 bp, Zea mays
tctagagggagaacacattctatgactaacaaatgttcattttgagaaagacaggggttgtagcgcatgccacgcacgaaagcaagttggtgcccatcattcacacaagaacatcatgacgaccgacaggccgcttgagctactccacatggatctattcggcccgatcgcttacataagcatctgcgggagtaagtattgtcttgtaatagtggatgattattctcgcttcacttgggtgttctttctgcaggagaaatctcaaacccaagaaaccttataaggattcttgagacgagctcaaaacgagttcggcttaaggatcaagaaaattagaagcgacaacgggacggagttcaagaactctcaaatc

SEQ ID NO: 70916 - DNA, 314 bp, Zea mays
cctagagatcggccagcaaagcgaccccgctcacccattcatgagcaacgtcaggtcatgccgattggaccacctcaccaatcggaaaaaatgaaaggtcctattgtacaattgagacctaacatgccgacatggatacctccacccccttatccatctatgccatattcatacacatacttacctccaccatatgtcccaaattaaatgtgggtcatgccaccatattcgtttaggatgcaacagtacctcgcctggggggcaccccaaacattcgtgttgacaggttggcgccgtcagtacaagaccgattg

SEQ ID NO: 70917 - DNA, 471 bp, Zea mays
  unsure (1)..(471): unsure at all n locations
aacttagagnnacctgctgcagcaagctncgcgccatcaaagatatggatttcttctgtaactgnccaagatccttcggccttctggcagctttctgactatcatgaataacaatatgcccttgattcgaacgtatcttcatgcaaagatatgctggatgaataattgtttcaaaagcattgagagtaccacgaccaatgattgcgttgaagggtactccatgtcaacaatatcaaacacaacttgttcagtccttgtattgttgataaatcctaagggtactagcatcgcgatcttgccaagtgctacaatctgccttactccgaaccacataggggatgtgtggcgtcatggatcttatcttccggctcttgcatctgctgaatgccttaacaatataacatctgtgcactgcctgtgtaaccaaatattgtgaccaaaatcctttataaccaagaataccaagtatat

SEQ ID NO: 70918 - DNA, 406 bp, Zea mays
ttcacttagtggtgcttttcaccctcagactgattgtcattcttagcgaacaatccaaaccttggaagatatgttgcgcgcttgagttctgtcatggaagggtagctgggagtatcatcttgcactagcagagtttgcttataacaatagctaacaggctagcatcaagatggcaccatttgaggctttgtatggcaagcggtgtatctcccctctgtgctgggagactttgggagagagatccctggttggtcctgattgggttcagcagacttctgaaaaggttcgggaaatacgtcagaatattatggcagctcacagccgtcagaagagttatgctgatgtgaggaggcatgatctggaatttgctgtgggtgaccaagtccttctcacggtatcacctact

SEQ ID NO: 70919 - DNA, 207 bp, Zea mays
  unsure (1)..(207): unsure at all n locations
aaacaccatactaccagcgtttgatgaagcnaatgacgaataccgctcgggaagaaccaaacaatactggtatacgcctacgatccatcttcaacaacagatattactgctctcatacgaagcaaattatcacgaggtcgagaggatacaacaagactctacaacaactctatatttctatcacaaaataacctcactagtagtcta

SEQ ID NO: 70920 - DNA, 367 bp, Zea mays
  unsure (1)..(367): unsure at all n locations
actcagctttgaagatttttatgccacatgggctattctgcggttccagagccaacccttgttagtcttagcaattaagcaagtgtcgagttcagctctatcaaaatctactaagtatagctgaccctctaacactcccttaaatgctactgaatcatcacttcttctaaagacaatgacacctacatcagtaaaaagacagctgtagcccatgtgacataattgagaaacggaaagcaaattgttatctaaagaatctacaagaaaaacattggaaatggaatggtcaggtgatatagcaattntactcaatcctttgaccaaaccttaggtttcatcgccgaatgtgatagctcgttggggatcc

SEQ ID NO: 70921 - DNA, 436 bp, Zea mays
tcttggctgtcgaactgcttgccgctgtcgactgttagctcggacggcactccgaagcggcaaacaacgttctgccaaaagaatttttgggcagtctttgatgtgattgtggaaacagacctcgcttcaatccatttggtgaagaattcgacggctacgaaggcgaacttaatgttcccctgatcggtgggcaggggcccgacaatgtccatgccccagcgctggataggccatgtatgggcgatcagctttgtatattgtgaggggttgcctgaccgaagagagaacttctggcaggcttcgcaagacctcgtgactctatttgcggcgcagatcattgctggccagtagaaccctttgtggatcaccttggatgccagggtcctttgccctgcgtgcgagctgtacgtgccactgtggacttcgcgtaagatct

SEQ ID NO: 70922 - DNA, 485 bp, Zea mays
  unsure (1)..(485): unsure at all n locations
ttacataaacttacatttatttagaaagtaagatcaagttacttattacagaccacggctataaacgagtgctgagtagtattattacacataccaagggaggtaaaaactcctcccgataactatcaaacaaaaagtcctatatggaggaccacgtcctcccgcatcttcattcttctacttcttcatttgataccaccttggagcaaaagcaacaaaactntgtcgcttcctcacctaaaaacaacgaagggataaaccctgagtatggaattactcagcaagtcttacctgactaaggaaaagactctcaagggtatgctggataaataggagtcaaggagaggctttatcaaaaatcaaattatacttttgcagaaatagcttactaaagtgagtccttactttcaatatcttaacgccagattatatatcaatagactctcgttgcatctagcctacttcatcatctcatcaatgcaaca

SEQ ID NO: 70923 - DNA, 475 bp, Zea mays
ggaccttaaaactaagcttgaaataatgccgaagctttctggaggccatcaaaacagcatacagtaccttctccaattctgtataattattctttgataaactaagaacctcggatacaaaatatattggggcctgcctcttaacttggcattcaagcttctcctggacaagtgttgcacttaccgctgagtgcgaagctaccacatataataacaaaggagcccctagcgtaggtagagttaattttgttagatctatcaaatattgcttcagctcttcgaaggctttctactggattggtccccattgaaagacttcggctgacttcagcacttcgaagaatgggaagtttctctctgctgatctggatatgaatctgttgagagataccaccctctctgtcatcattgagccccttcttgacgtggggtccattcaagaatagtaaatttgctgggtagctcaatcctttgt

SEQ ID NO: 70924 - DNA, 394 bp, Zea mays
  unsure (1)..(394): unsure at all n locations
cttacaatgatgattggttgtcttggtattcaaaatgatatccatattggatatgacgagtctgtgatagattcgaaaatttcagatcattaatgaccatcagttatgaattgtcatttccaactagttatgggtggagttaggaagatttgcacactcttgacttgtgattaactgcatgtacaagttcccctatggcttttagtacgtgggaatccatgaaagatttcccatgcgtacattgggtatgttcccaatctcaccaccgcagcgtacatatatgggcacacagaaagctagggatctatgtgagaattcattctccgtcgatcattaagttttagaatctcttcatgagaatctatntacgacccgtacacttgcttgaatcatg

SEQ ID NO: 70925 - DNA, 389 bp, Zea mays
cgtgcgctgacgcgcgagaacttgtatactcagcgtatatgggaagcttcttgtataacggatgatgagcatattgcgccgctctgcacgggcgcactgtttgtttatatactgtactggcgcgccgtctgctgggtgaccctgatgccccctgccagcacattggatagtgcgcattaaatgctgagacgacacatctctcgtgagcttggtggtaagcggcgcggtctctccgcaataaatgcaaaggccgcgcggcgttatgggcctcacttcaggcccagcccgttgccttacgtcacaggctactatccatgcggcagcaacgagtctctgtcctgagcgggaagcacaaggcagggcctggacgcgtgtcaacaccggaccct

SEQ ID NO: 70926 - DNA, 475 bp, Zea mays
  unsure (1)..(475): unsure at all n locations
ncttcgctttataagtgcttggtggtagattgttgtgtttctgtagtaactgagacaganaattcaaaagatctgtgaagctagtatcagaccatccggcgctagccttcaacttcagaagttctagaactgtacgcagtgtagtaaactctttgtcacaaccctttgattcatcatataaaggttcttttgaggcactttccagtccctccattttagatagccctttctgcgatcccacagaacttaacatttctggttccatatggcgcaacatctcttcacaatcaaattcttcaaaatcttgattagcatccacattatccactttaccatcaactgtaagatctaaaattccgacaactctctcgtcattaccaggcacttcacacggatccaactcaccatgttctgaccatatcgtgtaattggntttaaaccctctcttagcagatgtgttggattactctatatc

SEQ ID NO: 70927 - DNA, 476 bp, Zea mays
  unsure (1)..(476): unsure at all n locations
tggttgctgtgtgatcttatatatgtccatgtatggttttattgttgttgntctattctatgttatcatcctgaatgatgaattaagtcatactatatctaattagaacaagactttcatgtcccaggatggaggtaaatgatgaactatgtctgatcaatatcgcaaccacaaattccatacttagagagacgaaatatatcgtagtgagtgtgctagctagacatggtgcaaaactaaccaaaagacattgtgcaggcattaagactatacttagatatactaagatcttggtatatttttctaaaaaatcaggaccaagctttggtgggctacacagatgttggatatcttgtacatcctcataatgctagacctcatactagttntgtatttatttgtggtggtactgttgtatcccagagatcgtgcaaacagccatttgtagcaacgactactaaccactcggagataat

SEQ ID NO: 70928 - DNA, 313 bp, Zea mays
  unsure (1)..(313): unsure at all n locations
gagcaacctcccggctttgaagatagtgagtaccctaaccatgtctataaactctctaaggcgctttatgggctcaagcaagccccaagagcatggtatgaatgccttagagatttccttattgctaatggcttcaaagtcggaaaggccaatcctacgctctttaccaaaacacttgagaatgatttgtttgtatgccaaatttatgttgatgatattatattngggtctactaacgaatctacatgtgaagagtttagtaggatcatgacacaaaagttcgagatgtctatgatgggagagttgaaatact

SEQ ID NO: 70929 - DNA, 132 bp, Zea mays
gccaagcaacaaaagctcacctaaacgaacagaaaaaaaaaaaaaccgccaaacagaaaaacacaaaaggacaacgcaaaacgtcaacaaaaacagcctaaaaaaaattgcccgcgagacacaaacaacagc

SEQ ID NO: 70930 - DNA, 332 bp, Zea mays
  unsure (1)..(332): unsure at all n locations
ctataaaactcagctattcgtttgccggagaagaaaccactccacagctcgtttgatgtttaagtagtgggttacaaaagtnttttcagagcacgattgcggtttcccttgaacgagatgattggggaagttttggataattatgaaatcttttttcatcagctgacccctaacgccatcgttaggctcagcatttttatctgggcccttctaagccaaggaatggacccaaatgttgaagctttctgccgagtgcatgagctacattaccaaatgaaggccagagaagatggtctacatgaaattttggctgttataacttcncgtatcgc

SEQ ID NO: 70931 - DNA, 324 bp, Zea mays
tatgaagattcttcattccaacatgggctagtcggcggtgtcttagccacccaaggtagtcttagcaaccaagcaagtgtcgagttcagctctatcaaaatctaccaagtatagctgaccctctaacactcccttgaatgctattgaatcatcacttcttctaaagacagtaacacctacatcagtaaatagacagttgtagcccatttgacataattgggatacagaaagcaaattgtaatctaaagaatctacaagaaaaacattggaaatagtatggtcaggtgatatagcaattttacccaatctttgaccaaaccttga

SEQ ID NO: 70932 - DNA, 298 bp, Zea mays
  unsure (1)..(298): unsure at all n locations
ctatgggctcacacgatatctaaacatagtgcttctaatttatctcctcttgagcttgnctatgggcaggaagcagtgttgcctgtggaaataagtttgaatgctgtcaggttcgccagacaaaatgatctaaccatcactgattattacaatttgatgatggataatgttggcgtttcaagaccggngggtccctgggccgacgagtgagtgtcgccgcgtgccccagcccagatgggtcgagcccaatggcgagcgtgaatggggggagagcgaagctgccggagaccggcgtgag

SEQ ID NO: 70933 - DNA, 468 bp, Zea mays
  unsure (1)..(468): unsure at all n locations
agcttgacagaaccaggcaatttattactttatacatctncatactatctcccctgtgttctagagcatgttcaacatcagcatttgaagccacaaccttcaggttcctttgcttcaacaagggcatcaccaagccactggatggtacctgtgccatttatcccaagacctccaccacacgagtatgcactagctagccaatttcagttcacagcacaagagacgcttcagcatgacagaatggaaccatccaaagctcgaacagtgaacaacgtggatccagaatccacacacatctattaaggccttagagcctaaaccaaagagattaactagaattgacaggctaaaagctattgtgatttattgcttcttctagactatctccttttagcctaccatcattgtctaacacaatcacgaaatatgcccttataacatgtatatgtaactctgacgtacaccatc

SEQ ID NO: 70934 - DNA, 398 bp, Zea mays
  unsure (1)..(398): unsure at all n locations
tattgctcaagacgaagcccataaagctgaagtctaagatttataagaaaaacttgcagagatgaatgaaaatttcgaagttgcaaaggcttaacaagaaataagtgaaatggaaagatccagagtgcaaaagaatgttgaagagcttcacgatgccaaggaaagatgctacaaaacatctataggatgcacgaagaaactgagagatagctttgctaaggtgggagcatactcttcggaacaaaagtttattcatggtgatcccggaggagttatccaatggatcggtgaagaagcttgaagctttgatgaaatctcagtgatcatggggatttctgcgctttcgctggtgctcgaggagttgcgggcattntggagaagactatatgtgaacatgt

SEQ ID NO: 70935 - DNA, 263 bp, Zea mays
  unsure (1)..(263): unsure at all n locations
actcagctntccgaagggccatacacaaatggagcctctggccttggtttctattgttttgatcgcaacaaagaatcaaagaagaaagcaatccaagcgcaagagctctaaataacacaagcgaatctctctcactaatcactattgcgtcgtgtggaatatggagaggatttgatcacttgcgtgtgtctataaatgaatgctcgagcttttgtacgtggttgaagttcgaaaacttggatgtcttgaatgtggggtggttg

SEQ ID NO: 70936 - DNA, 487 bp, Zea mays
  unsure (1)..(487): unsure at all n locations
tcaagccagattagtagaanacatacagatgaccaacagtgcatattaaatatacaaacacaaccagcactaaaatgagatgagtgtatgtacctgtgcaacttgaaggtattatgcccatatcggtgagtggtatccttttccaagtcttttggaaggttgatgatttcaatggcatcaaatggacatttctgcaacagagattacagaagtgagaagcgcattacatcacataggcacatcgtcatagtgggtgtttggttcagcttatcagcagcttctgcggcatggttattaaagcggtaaaacgataaaacgttacgaaccaccttttcaccatttaaacgttgaaacgaacgttgaaacgttttttcagacttggcatanaacaacacgatagaatatgttcatactcactaagttgatatttgagttcacaaaatanatagcataataggaaacagatcaagttcaacacacaaatcta

SEQ ID NO: 70937 - DNA, 483 bp, Zea mays
  unsure (1)..(483): unsure at all n locations
ctgcagcatgcagctctgancaaaaccatggtatgcgtctttatatatatcattgcacgctctaaatcactacgctttgaactcagcttctattgtctctctaacaacaaatactagatacgttagggtagactagagacctatagttgaaaccctatagaagctacaactcaaagttcaggcatgtgtatagctattttcctttcgcttctattcaaggcctaacctttgggtaccaagattgaataaaacttaatagtatctataccattgccacgatgatgttcaatcagaattaataagaattaaacattatgccaagtcaaacaatttgcaaagtatgtacctgtccaattcaatgaccttagaacacaagaatgctcgaaaagcgcgagcacattctaatacagataagaagatgcctggtgcatanacactaccaatactggtgcagaatcatgctcaactgtgccacctggcact

SEQ ID NO: 70938 - DNA, 408 bp, Zea mays
ttcgtgccttaaaactcagcttctaagggagaacacgtgataagtctaactaatgttctattcgaaaaagatagaccttgtgcagcttgtcaagcaggttaacaagtgggaggagcgcatcacagcaagaacgtgatgaccacttcaagacccctggagctgctacatatggacctcttcggacctgtcgcctatctgagcataggagggagtaagtatgggctacttattggtgatgatttttcccgcttcacttgggtgttctttttgcaggataagtctgaaacccaagggacccttaagcgcttcctcacgagagctcaaaatgagtttgagctcaaggtgaagaagataacgagcgacaacgggtctgaattcaagaaccttcaagtggaggaatctcttgag

SEQ ID NO: 70939 - DNA, 384 bp, Zea mays
  unsure (1)..(384): unsure at all n locations
ggaccttaaaactaagcttgaagatttcttaccacctgttggggtggctaacatatataattcacactaaacttgggatcttgccacagggacatgggcgatctatgtgtattggacctccccatctcagaggatgaggtccggtctgcagctttctgcctaccttcagatagagctccgggtccggatggttntaccgggagaatctataagtcatgctggcatatcattaaggacgatctgcttgcggctatcaatgccctccatcaaggtaattctcgggggttgtggctgttgaactcagcttatcttaccctcatccccaagaagactgatgccacaacagcggctgatttcagacccataagtctcattcatagtttt

SEQ ID NO: 70940 - DNA, 414 bp, Zea mays
  unsure (1)..(414): unsure at all n locations
tacccatgatgaggcatgtgaccagttaaagggtgctcgatcatttatcctacatcgagaaggtgcttaatcgactcagacagagacactacaccgagactctcttctcgtgcaagtcacccgcccggtctcagctttatcatttcaaacccaaagtttggtacctggcagaggtacatcgtttccgatggtgaacccatcatggccatgatggatccaccatcaagttttatttttgaaaacatcccacccactttgaagcatcatcttttgtcaaaacaaaacattntgtttttatagagcaaagctaagaataagaaaaacctttnttctaaaacaggggattaaggagaagtaatcacatccaaagaaggaaatgaagcaactagtttagcacacaactcctatcactta

SEQ ID NO: 70941 - DNA, 436 bp, Zea mays
tcagctcctctatgtatggattgcttgagttttccatttttcttcggcccttatggcagcttcctgacttccatgaatagcgatgggtccttgatccgaaggtatcttcatgcaaagataagcaggatgaagaattgcttctaaagcattgagggtgccacgaccaataattgcattgtaagggtattccatgtcaacaatgtcaaatataacttgctcagttctagtgttgttgatgaacccgaaggtcactgacatggtgatcttgcccagcgctacaatctgtcttcctccgaagccacagagaggatgtgtagcatcatgaattttatcttctggctcttgcatttgcctgaaggccttatcaaatatgatatcagctgcactggctgtataaccaagacgttgtggaccagaaaccctttgataacgcaag

SEQ ID NO: 70942 - DNA, 420 bp, Zea mays
taaagccatggggagtagcatacgctaataatatgtgatttgacttatgcctagctaccggtgcataggtttcaccaaaatccaaaccttcgacttgggagtatgccttggccacaagtccagctttgttccttgtcaccacaccatgctcgtcttgcttgttgcggaagacccatttggttcctacaacattttgattaggacgtggaactaaatgccatacctcatttctggtgaagttgttgagctcctcttgcatcgccaccacccaatccgaatcttggagtgcttcctctatcctgtgtggctcaatagaggaaacaaacgagtaatgttcacaaaaatgtgccacccgagatcttgtagttacccccttatgaatgtcaacgaggatggtgtcgaccgggtgatctccttgga

SEQ ID NO: 70943 - DNA, 289 bp, Zea mays
  unsure (1)..(289): unsure at all n locations
tcaagcanggaagcaagccggcgttcatcatccacacaagaacaccatgacgactcacaggccacatgagctaccccacatggatctattaagcccgattgcttacataagcaccggcgagagcaagaactgtctacttattgtggatgatcaatctcgccacactagcgtgctcatcatgcaggataaatctcacacccaagacgcctcagagggattcttgagacaggctcaaaatgagttcggcttacggatcaaaaagattagaagcgacaacggaacggagttc

SEQ ID NO: 70944 - DNA, 362 bp, Zea mays
  unsure (1)..(362): unsure at all n locations
tacacggattaaacatcgccatatcactgggtgtctttagactgatggngtatggagattctctggtagtcatcagtccgataaacaaggaatgggatcgttcaagtgattcaatgggaaaatactgcgccgtcgtccggaagctagaagataaattcgagggtctggagtttcatcatatagaaagagatcggaacacggcggccgatgtactgtccaagctcggatccggtcggactcacgtcccgcccggaatctttgtgcaaggaattctccagccgagcatctctacggatcanatagaagagtgcaacatcatagatcaacctgagtcagactctgatgactggaggcaaccgatt

SEQ ID NO: 70945 - DNA, 244 bp, Zea mays
aacgacatggaagtgtatcagaacgctccaaatggggtgatgaatgccggtttttcctcatcttcttttgtcacagctgaaccggtgatacccggaggggcaatccaagaaggacaacatacaacacccggctgtcgaatcgatcaactggttcactctacgaaggccaaacgtattcttcggacactgtttggttagatctgtgtattcgacgctcatgtgcgcaaccactttattctttttg

SEQ ID NO: 70946 - DNA, 253 bp, Zea mays
ctagtgagctttcccctacattggaccacactatgggggtgtggcactctccttccatacaatgcttcaaatggtgacattttgatactggcccgccggctgttgttgtatgagaaatctgtgttcatgcaactggactcctcattcctattgaacgctaacacacaagctcttatttaatctgttaggaacttgttgactctttccatttgaacatctgactgggggtgataagcggtgctgaaatataact

SEQ ID NO: 70947 - DNA, 359 bp, Zea mays
gttaagcctctcactctttatcaatccacagccggcattgaacccatattgtctatttgatacacgtttcattgatccacactcatatcacggtcaccttaaaacggtgtcttatacttaaataaatcagattctttaaatatcgtctaatagtaatggttcctgatgcaagttggtatatcatcattctccgcagtctaaactatgttgggaaacacaatcttatagcatattacaacatctgaccgggactgatcattttcagtcaacgcagatcaacacacatcttggtgccctctacaactgatagcatcagcgtcctattggtaaacctcaacaagcagagttcataacaacct

SEQ ID NO: 70948 - DNA, 412 bp, Zea mays
  unsure (1)..(412): unsure at all n locations
tggcggagctagccgaagctctggcacttcttgggatggctggagtgggctatccacggtggccgaagctctggcggcgatggcgggcggaaaagagctcgccggagctaatgaggggtggctggccggtgatggtgagcgcggggtgaagtgaggcgcgcccgaagaggatttatangcgcgggtgggcacgaccgatggcaagggcgcgcggtggacttgaccgaaccctggactagcgcgcgcgcgggttgggcgagcgccggcgagccgaccaaggtcgaacacgtgtgcccgtgcgttctgcccaagttctggcgcgtgtggtcgcccatccaagcctgctctcgccttggtaagtgcaccaaacctcttcttctcctacaagctaccgatcttgtgtggggatcat

SEQ ID NO: 70949 - DNA, 431 bp, Zea mays
  unsure (1)..(431): unsure at all n locations
agctntatgcttcctgaagaatggatatgtatacacgcaagcaattctaacatgccctagtagttgacacaatattcaaaggaacttggatatcacacggcaggaagnctgatacgttgcagttgcgaccgcaagtaacgctcgattattggagacctgcacgacgaatcactcaaatagttagcgcagcgctatatagagattagggggcgggcaagctatcagacccctatcaactcggtgttattttgcgggaagataaatctttcagaaaaattatcgccaaggtagtgcgagataaaacttacccaacagagtgggcactatgaacaacattaagatgactttagtccatccaagcctaccggaattacttatcattttcagctgaaacgtctattaagcgctggacagcaaagtctacatcaaat

SEQ ID NO: 70950 - DNA, 262 bp, Zea mays
gaccttgtgcagcttggtcagcaggtgaacaagtatgaggagcgcattacaactagaatgtgatgaccacattaagacccctggagctgctacatatggacctcttcagacccgtcgcctatctaagcatatggggaagtaagtatggtctagttattgttgatgacttttcccgcttcacttgggtgttctttttgcacgataagtctgaaacccaagggacccttcagcgctctctaatgagagctcaaaatgagtttga

SEQ ID NO: 70951 - DNA, 459 bp, Zea mays
  unsure (1)..(459): unsure at all n locations
ntcatattcggtggttggttcatattattcattcaagtagttcttgtgtatggcaaatctttagctgttttctttactacttcgaatttgttcaatagattactaaattcaagttgagtgggttcaaacttgttcagttgggattaaaatcgactgaaccggtttgcacccgtgcaactttgatttaacctatttcgaagtttttagtgaaaattttcaggtgtagcctattcaccccccctctaggctactttcaattggtccattgaggaaggcacttttcacgtccatttgataaagcttaaagccatggtaagtagcataggccaataatatgcgaattgactcaagcctagctacgggtgcatatgtttcaccgaaatccaaaccttcgacttgngagtatcccttggccacaagtcgtgctttgttccttgtcaccacaccatgctcatcttg

SEQ ID NO: 70952 - DNA, 240 bp, Zea mays
  unsure (1)..(240): unsure at all n locations
agcttnatactcngntgcatcgagggaggccgggatctgcaactggagggcgcactcgaagcgtacgccaccaagagcggtgaagagaatacctgctccagacccctgcagctctagcgagccatcaaaatacattcgccatactattgcagactccgggatatctgggactcgctgaaccagccacacagatacgaaagcaaccagcgctcgagtttcgatagcagtgcgaggtcggaa

SEQ ID NO: 70953 - DNA, 418 bp, Zea mays
  unsure (1)..(418): unsure at all n locations
tcgtgaaatattctccgaagctataaaaaagttntatgttgcctctctaatgaagctacacttcttctcaatttatcttgtgccttagcacgattttctctttttcaaaacattctccgaagatcaatactgtatccccttcttgttccacatgcgatatgttgtatgatgcttatgttatgcaaaatgatgtgatgatgttatgttatgcaaaatgatatttgtgccaaaagtacacacatccctgcaataaagcacacaattttttttatcagcgcttacttttcgctgtaagcctcccttaggagcttcttcgccttttactttcagcggaatcagcgtttatttttcgctgtaagcctcccttatgagcttcttcgccttttactttcggcgaaatcagcgtttatttttcgct

SEQ ID NO: 70954 - DNA, 242 bp, Zea mays
  unsure (1)..(242): unsure at all n locations
tctttgccgagtgtctggtggactggcactcggcaaaaaacccttcantgggcccctatgccagtatctttgccgagtgccttggcaacagcactcggcaaagatgtctttgccggttcccaggtttccttctttgccgagtgccacggtcagcactcgacaaagatggctttaccggttcccaggttgccttctttgccgagtgccatggtcatggcactctgcaaaactaccctttgccg

SEQ ID NO: 70955 - DNA, 469 bp, Zea mays
ctatattgtggatcgctttgagtctgtctagttttcttcggctttcctagcggcttcctgactcccatgaatagcaatgggcccttgttctgaaggtatcttcatgcatagatatgctggatgaagtattgcttcgaaagcattaagtgtcccacgaccaatgattgcattgtaggggtattccatatcaacaatgtcaagcacaacctgttcagtccttgtattatggacgaagccgaaggtcactggcatcgtgattatgctgagtgctgcaatctgcctttctccgaagccacaaagagggtgtgtagcatcatgaatcttgtcctttggctcttgcatctgtctgaaggccttagcaaatatgatatccgctgcactacctgtatcaaccagaacattgtgtgacagaaatcccttgatgacacacgatatgaccatagcatcattgtgagggtatccttgagct

SEQ ID NO: 70956 - DNA, 463 bp, Zea mays
cggacctataaaactcagcttgtgcgattgagagctgaaagtaacaaaatttctttttttctatcatcttcggagcttgctgatgaacttatggtcaggataacttgagtatattagttttcttgccatatcacttaatgattgttttgacatatttggaatatgcacacatatgacaacctcgtttttttttctctaaataaaaggaagatcacgatctcatcatgacttaatatttatcatcaaaagttcaaaactgatgctaatggttacagttgctaaacaatgcagatgctctttaaggggtttccagaagaatgcaatgccttgaaatccctcacagaaggtgccatgaagtcagcatcatcttcgaaatggtcaacagaatgggaaaccaatgcactacctttggtggaccaggcaaatgatcaaacattgctggctagaattgtggtacactcat

SEQ ID NO: 70957 - DNA, 398 bp, Zea mays
  unsure (1)..(398): unsure at all n locations
ntcatctttcttcttcacaaataaagctggacattcttttgtgaattacttgggcggatgaaaccgttgttcaacaattcttgcagctgtttcttcaattctgctaattcaccgggtggcatacggtaaggcctcttggaaataagtgtagttcccggttgcaactcgatggcgaattcaataccctaatctggtggcattcctggcaactcatcatgaaaaacatctgcatactcgtagaccactataattctcttcaagggtaactctatcatagagaaagcacatgatcgagtatgctctcggctaggtagatacaatgtaaggtcttcgaaggtaggagaacggatttccagagctgtggaagctacatccaacaccaactggtgttgagtcat

SEQ ID NO: 70958 - DNA, 480 bp, Zea mays
  unsure (1)..(480): unsure at all n locations
tctcctggacaagcaccgcaattactgcagagtgtgaatctgccacatacatcagcagaggagcccctggcgctggtggagttaaggttgttaaatctatcagatactgcttcagctcttcgaaggctttttgctgagctgatccccattgaaaaattttggttgacttcagcacttcaaagaatggtaaatttctctctgctgatctggatataaatcgatttaaagatggcagtcttcctgttagccgttaagcccctttctttgtgcttggcggttccatccgaaggatagcttcgattttatttggattagcttcaatcccttttgttgaaaccaaacaaccaaggaatttccccttctttactccgaagacacanttttctggaattagcttcagaccagcttgcctaanattagcgaatgtctcctgcaaatcaacaatgtgattttcttgcttcgtgctttntactatgatat

SEQ ID NO: 70959 - DNA, 244 bp, Zea mays
tctaaaacgactgcagcatgcaagcacgcccaacggaagaggcatatcattgctattgataagacaccgtgcatcatgtgtcaaactcaatcactatctcttctatgcaccacgagaagaagcttgtaactgcaccccacgtgccacgaagctatcttgaacgacgaagatgctccagcttgcacagagaaaaacaaattctggacataataaaaatccaagagctgcataggagatggtacaa

SEQ ID NO: 70960 - DNA, 381 bp, Zea mays
  unsure (1)..(381): unsure at all n locations
tatcaagnctactgtcatatggattcggaattattgtcatatctgttctgaggccgccgtaatcattgtgttcttaccgagacatattctgccttttctgcccatggtgctgcgtcaccctattttggcccaatgggtcgtgtatcaagttaagtccattatggacgcatcctatggttgcagcacgaccccaatacccttgtggtcgtcctcccatgtttataaaccccctatccgccaccaagaacggcgggttttgtttagatcaagtttagctctcgctacttgcttgcaagcgcgcgtgctaattcagccgcccgtcttcttgtcatcggaaccccaccatattgtagtttgatctttaaacctacatttagatct

SEQ ID NO: 70961 - DNA, 342 bp, Zea mays
tcgactaaatcggggacacggccgcatggactggtgttattctcgttagcggcaaggccgaccgagccgatggattaccacgcctcttggataccgagaccttactcgtcccttccgcgaaaagcaactgtcgctcacacaaacattcctattaccgacagagtccagatgctcgaaacaagatgaaataggacgcatcttctcaagcgcggcgagggcgtgttcttctggcctctgcggccgcagaaaacacacgctacaagacgatctgattctgcaggctcgggtcttcacgccgaggggagccggtacaccctcggcatcgacgacgtctacatcaaa

SEQ ID NO: 70962 - DNA, 378 bp, Zea mays
  unsure (1)..(378): unsure at all n locations
tcgggataatgacatgtcttaagacgaaggagtgcaccttcttatagatgaaatgaccaatcgacccatgatatcttgtattatgattgtaagcatttgtaaagggcatgaatgtaatttctcacaggctgcgtcctgtgcctataaatagttgaacagtacccccgtactgttcacgccatcttttaatcgcttgcacgcgacacttggattcttgccttctgtaaagccgaaggtataaatgtaattaaatattatattttaatattcaagtttatatgatgaaatatatggatatttttatgtgcttgattatactatctttcatgtttcatacttcatatattntatctttcattatcttataactctgataat

SEQ ID NO: 70963 - DNA, 393 bp, Zea mays
agcttgtccaagcaccatcatgctctatactatatataccacaacaacataatcttattctaagcactaaacacatgaaactcataaattctctatattaaatgatgagatgcaatgcatatgtgatacgaaagccaaaacaaaagctatgctacaaaagaaaacaaataaaaagtgttgtacaagaacaaaatatttctctaaaaagggaagcaaacactcaactcccaacgcaaacaagcaaaagtggctatctttgggtgtctacatggcataggtctatgtcaccatttctaaagagatcccttaagtcatggctgcatacatcgatatatctagttccagagaggagtatatgaatttttactacactaatcacattgatgctatcac

SEQ ID NO: 70964 - DNA, 468 bp, Zea mays
  unsure (1)..(468): unsure at all n locations
tatttccgaccttttacaaccgacgaacgaatgtcttctgaaataatgcataaaccatcgaaaataatctatgttcgacgagataagccttattttcgacggcataacccattggaaatttctctatttactattgtgcattctagtcacatcctgatgtggatgtttctgctacgcatcacatccaacaacgtattgctatcaaattttgcatttatacacatgtgtgtcttgttgctttgttgcctgtcaatagttatatgaagccaacaacttgcctgcagcactctgcttgctgatccgcatgcaagtgtctgcgtcacgcangtaggatgtgtccgcatgcactgattgatgccaaatctagcaccatcacaaccggaaaccaatccatttcagatagcctaatntatttctgaggctaacctataacccgtctcacattgagtctctgtcgggaagtaatct

SEQ ID NO: 70965 - DNA, 458 bp, Zea mays
agcttgagaagagtgcaacatcgtgaatgctcttatttttcagctaactattgcatctgcacatcgtacaccacagcggatgtatgattatgcgaagtctgcttatgacaggggtttctaggtcataattgcaggtgcacgcggagcagctcatttaccacgcaagtataaaaatacacaaatattatgtttccaagtaaatttcaagtcatgttgcgtgcgtattaagcgcacttatattctatcgacattgaagtaatttagtttttagaagcatcttactttttaagatttaacactctacttcattttcatgatgtagcctcattgtttctatcccaccaccactaagattacgttatgtagtgtgatgctgaacatagcaccgcctctggatgaataaagctacctttaactgctgccagattctttatttattaacgttatggaacacaacc

SEQ ID NO: 70966 - DNA, 317 bp, Zea mays
tagccactggtggacacctgctgctgcttgcgtcttgagtatgtcttccaaatgctgataaaggtttatccaaaacaaaattgttgttcatgcccgttgttattgcacatgggcataagctacaaaggacctataaagtcacttatagcaatgactgcattaactttaaaagatgtgatgattgtattggcgccaattcggtgtcaaacactagaatgaaccacatggcggtgctatctacgggagcgtggacggtccgtaatgtagggtcgaacagcccacgaccttgctgtaggagttgctccatctctgcgtgc

SEQ ID NO: 70967 - DNA, 351 bp, Zea mays
acccaaggtagtcttagcaactaagcaagtgtcgagctcacctctatcaaaatctactaagtatagctgaccctctaacacacccttaaatgctattgaatcatcacttcttctaaagatagtaacacctatatcagtaaagagacagctgtagcccatatgacataattgggaaacagaaagcaaggtgtaatctaatgaatcaacaagaaaaacattggaaatggaatgggcatgtgaaatagcaatattacccaaacctttgaccaacccttgaattccatccgcacatgagatagctcgctggggagccttgctattctcatatgaggagaacatacctttctcccc

SEQ ID NO: 70968 - DNA, 482 bp, Zea mays
  unsure (1)..(482): unsure at all n locations
tctcctatacaagcgccgcacttactgcagagtgcgaagctgtcacatacaatagcaaaggagcccctggcgtgggtggagttaacgttgttagatctatcatgtattgcttcagctcttcgaaggctttctgctgagctgatccccattgaaagacttcggctgatttcaacacttcgaagaatggtaaatttctcttttatgaatcgattcaaagatgccaatcttcctgtcagctgttgagcccccttctttgtgcttggcggctccatccgaagaatagcttcgattntgttcggattagcttcgatccccttcgttgaaactaaacaaccaaggaattttcctttctttactccaaagacacacttttctggatttaatttaaggccagcttgcctaantatagcaaatgtttcctgtagatcagcaatgtgattatcctgcttcgtgctctgtactatgatatcatcaacatatgt

SEQ ID NO: 70969 - DNA, 385 bp, Zea mays
tactcagctcttgagaaacaccctatgaattgctcattggtagaaagccctatgttgtgggccctcagcgtcctaagggcctctaaaacaagatttaacaatatttctggagtaaagtacattgacaggtatcttctgactctgatcataaacacgggtcgaagaagcacccagaacaccaaggttggcgcatagcccaagctgtgtgtacaagaacttccgaaataccgcggagaatgaaacctgcttatatatgaaatactatattggacctccaagaattatatagagttattgataaatgtgaggggcattaatgtgaatttacatgggctgcgttcccgtcccattaaatgatgaacagtgatcccgtcctgtcacactg

SEQ ID NO: 70970 - DNA, 329 bp, Zea mays
tgtgcacatgactgactcacatatagtcctctggatgaggactttcttgggcaaacatctctacacttagagcgttctgaggagacgctgggtagttcttttgtgctgactgggaaagcccttttgagtaatttggaagtagtgctgactggtagcttcctaaccagcattcttttgtgcagcagagcacctgatcctgctgacccgcactttggcttgttgtatgaaccattccctgtatgaaccatgtgtgttcctacttcatcatgaactattctcaacgcttctcatgcttctataatctgagcacatggccatatgccaatgac

SEQ ID NO: 70971 - DNA, 306 bp, Zea mays
  unsure (1)..(306): unsure at all n locations
ggcacttatatcacgttggcacacagctcaaccatcaattccctctgcagaagccaggtctgaaagtctaattgagaaaaaacatcccgaatattgaggcccataattttgggctctctactcatacaacacttcaaaaggggatcgactcacagaagaatggaagggtgtgttgtaccaatactttgcaactgaagcctagcagaccacttggatggacnaccgagatcaaactgtcaatgtctgtttccaaacctgataaacgtgatccgtatgccgtccgtttggggtggacgatgtgctcta

SEQ ID NO: 70972 - DNA, 412 bp, Zea mays
  unsure (1)..(412): unsure at all n locations
tatcaaacaagcttcccatgaagtggttatagagttccatcgcactctatgtgaaggagttatgaccttntcaatgaagactcttggaccgttgacgaactaaaagttcaattttgatcaacttacactttcagattgattttgattgtgacatatctcttctttatcatcatcatcattattcttaaatatatttaaaaatattaatattaaataataatcagttttggttttatcattatataaatataggaaggagctcacttatattcgaaggtgttatgtgttgttgtaggttgcctacacattatgtgcctcgcctacacattatgtgcctctctgacagcataagtaaattcatttgtgttnttatttgcagaanatattatgtacaaaccttttcttgatgaaa

SEQ ID NO: 70973 - DNA, 378 bp, Zea mays
agcttgagacaggaacaaccgcggcatgctttatattcctcgacgagaatgtcaaggacttgacgaatgtcaagaggaaggaacacaagaagaaaaatcattacctctgccaaaagtctcaaccatgcctccatgcaaggttacatccaacgtaatgatcaagccacacttcacactaagaaaagtaagaagcgttgtgaacgctttgaaaaggagcactcgattaagacatgtccctatattaaagaaaatgacttggtcactaacaaggcatgataaaaatgttctagatgctctgagacgggacatatagttaaaatatgaacctatgtaaaacacaaaggcatacttctagaaaagaacatatttactaaccat

SEQ ID NO: 70974 - DNA, 341 bp, Zea mays
  unsure (1)..(341): unsure at all n locations
ctcgacaccaccacctcagcatgcatttgtttaccatacacaccancgctactacgcgaatccgatcactgtcatctctactctctcaaccatagtatccacacgcttgtataagacaccaccgatcttctgtgcttcatacctggactacaccagactctatacggcttggcttgacggaccggtgcatgcactcagcttacttatcactgtcgacttccagaacacaaccactctcccctagaacattttcctcctcattagacagcggcctagttgcagtcgccataacctacctcacaacaggggggacatgtcagtagaatttggtgctccaccct

SEQ ID NO: 70975 - DNA, 377 bp, Zea mays
  unsure (1)..(377): unsure at all n locations
ntaattagagttggagtcttcatctaggctatatttattcttgaccggagctagatgctgattgattatgcaatattcatgacctctcctatcagacgaaggttgccagaaaagagcaatatcataacaattttggctgctactcctttgtatatcgaactgacgcaaggcaccctgtcccaacctttctaaaaatggccagtgtcatggatgaagcattggttctatgttaagaatgacctgcgtgagagagaggatatcaaagacatggaaaaaggcctactattgtgaatacagaanaagctcaaagcctacctggtggccttcaacgatgtgtgtaattacatcaatactaaggacttggntcangagcacat

SEQ ID NO: 70976 - DNA, 415 bp, Zea mays
cagctgcagcctgcgaatatctggaacaaaaaatttctccctcacgtggggcttttgtgaaaccggaacgaacgccatgacaaaatgaaaggatagatacaaggcgtctgagctcgatcattacccaaacgtgtgccgggttagcttctgagtgggcagaacagctgcacaaactgctaaacacctgcagcgccaacacttcctcgtggatcgatgtctaagggtgaccacccacatatacacctaaatctcgagtcttcttctctcagagcaaagactagcgagtcctcgccgcgcgcaaaaggacaccaaacagtgggaacagcacaagtgaacacaaagccacgctgattgacaatcacatatcatgaagatgttcagcatggattatccatactctatgctcgcgatcatg

SEQ ID NO: 70977 - DNA, 458 bp, Zea mays
gctcgtcatcaagagctttctttttattctcaaacaaaggagggggaaagactacaagtcccgctccaagaaagtgtgctacaaatgtggtaagcccggtcattttattgctaaatgtcctatatcaagtgacagtgaccgaggcgacgaccagaaggggagataaaaggagaaaaagaagttctacctgaagaagggcggcgatgcccctgtttgtcgggagtgggattccgacgaaagctcaagcgattccttcgacgacgaggacgccgccaacatcgccgtcaccaagggacttctcttccccaacgtcggccacaagtgcctcatggcaaaggacggcaaacagaagaagggtaaatctaactccttcactaaatatgagtcttctagtgataataatgatagtgatgaggaggataatttgcgtgttctctttgccaatcttacatggagca

SEQ ID NO: 70978 - DNA, 496 bp, Zea mays
  unsure (1)..(496): unsure at all n locations
actcagcttctccaaagttgaggggcttcctagcgaaatactgcgtagttggtcctggtcaaagtcccttgatcatggcttcaataaaaatatcatttgcatcgttggtgcctgagctctgagacgcagaaaccttcaaacatacgcttgcaagtactcctcatggtcctgtgtgcattggaataaagcttgagcagtcactggcttcgtctggaaaccctggaagctggtgactagcatatccttcaacttctgccacgacgtgattgttctcgtccgaagataagaataccatgtttgcgccacacttctaacagccatgatgaaggactttgctatgacagcggtgttgccaccatatgatgatatggttgctttgtaactcttgaggaactgctttgcgtcagaatgcttgtcatacatggngagctgtggtggtttgtacggatgcggccatggngtagcctgcaattctgctactatgggagaagcataa

SEQ ID NO: 70979 - DNA, 301 bp, Zea mays
  unsure (1)..(301): unsure at all n locations
acctgcggccgctcagtgtatagcaatgggctgtgtcggagccgtatggattctaactgtggcgggggaacaactggtggcgatcctcatcgtcggtggaagctctggagcgtctgggcgcgccgtgtgnatgcgccggtggagagccccgtcgaggggctctgcgacgcttgctagctataccgggggaggaagacaactccagagtcgtaaatcgactgctggacggtggagatcagatgagcgtcgtaaccatcgtatctgttacatacggttcagattagaacgacgccgaaccctt

SEQ ID NO: 70980 - DNA, 325 bp, Zea mays
tctatgctgttggtttttataaaccagacctgaagacctttccaaccagagttcttgatgctgcgtgtatcccgcattgctcggagtggatctcatctcagaaatgcttcccaggatctgaaataatgcacttcatgaggactaccgttgtgccccttttgtacagtgcttcccccatgagagtgtaatgagctgactgacttgccatgcgttctgctgcacgttttgtcatataggctcctcttcattcttaatatacctgatgataggctctctctagtcattacaaactggctctggctggtatagaacattgcactctttt

SEQ ID NO: 70981 - DNA, 424 bp, Zea mays
aggaccttaaaactcagctatgaagattcttcatcccaacatgggccactcggtggtgccagagccaacccatgttagtcttagcaattaagcaagtgtcgaattcagctctatcaaaatctaccaagtatagctgaccctctaatactcccttaaatgctactgaatcatcacttcttctaaagacagtgacacctacatcagtaaaaagacagttgtagcccatttgacataattgagatacagaaagcaaattgtaatctaatgaatctacaagaaaaacattggaaatagaatggtcaggagatatagcaattttacccaatcctttgaccaaaccttgatttccatccccgaatgtgataagctcgtggggatcttggtttttctcgtaggaggagaacatcttcttctaccctgtcat

SEQ ID NO: 70982 - DNA, 414 bp, Zea mays
tgactcttgaaactatctgttactcttatacgaggcttaggcgcagagacgacgtacggtttctacgagattagtttgcatttaccgttcctgcggtgtacacggcgcaccaactgtcgacgtcgaatggagcaacacggtgcggcgataattttgctgcacacaagccttatagaaagcgaccatattcataactctactcgcaattgcaattatagatgaacaaaagtttcgcagtcaggtggccccaatggcctaacatgacgcccgtttttctctctgggtaacccaaatatgactcgaacaatgtacgtttgcctggaccgcttgacccgagaattagccatgataggcctatatctacactacatgtgtaagactggacttccggttaccgaaattaagtagggtttc

SEQ ID NO: 70983 - DNA, 432 bp, Zea mays
  unsure (1)..(432): unsure at all n locations
tctaaagggagaacacattntgggactaacacatgtttcattttagaaagacaaggtttataccacatgtcaagtagggaagcacgttattgttcatcatccacacaagaacatcatgacgaccgacaggccacttgagctactccacatagacctatttggcccgatagcttacataagcatcggcaggagtacgtactatctagttattgtggatgattattctcgcttnanttgggcattctttttgcaggataaatcttaaacccaagagaccttaatgggattcttgagacgggctctaaatgagtttggcttaataattgataagattagaagcgacaacgggacagagttcaagaactctcatattgaacgcgttctttgatgatgagggcatcaagcatgagttctcttctctctacatgccac

SEQ ID NO: 70984 - DNA, 244 bp, Zea mays
  unsure (1)..(244): unsure at all n locations
ttattatcaaataatatgtcaaccactgcgcggtgtgtactgtgctggaactcttacatgcgccatgaattgttatgcatttncttaaacaacccttcctgtacctcatacgtatgaaccccttattaatttcctttcaagttatctcagcttttgtgtatgttcatataaaagccacctttgaaaaagctaccagtctttacgtcaagttataaatacttgcttcatatacttatgaattttg

SEQ ID NO: 70985 - DNA, 380 bp, Zea mays
gaagctgaagaccttgctgcgggtataactctatataagatcttgaattatccctgtgcaaactattgtgagataagaatcagatacttattctgtggaattatgccataccttgtcatatatctgtaccttttcgcccctgtatgaaccgcgttgatgtagactaaacttgtatttttagagccgatggcgaaaaacaccttcccttcttttctcacacaacgaagcatgaaactgcttgttttctttttgccagaaccttattcttataggcgaaacatgtgtcttgtgctagattatatgaggaagaagatcctatgtctgtctcaatgaatgtatgtgaatgcaatgtttaattgatgagatggtcagataatgtc

SEQ ID NO: 70986 - DNA, 444 bp, Zea mays
  unsure (1)..(444): unsure at all n locations
tattgtctttctctggggactccattntccttctatgatactactacatataatagacttgaaaacaggtattagtctcaaagacttagattatagagcaacctccccctgaaagtatgcatacaagttttgaatacttgtaggagacatgcactttgattttgatatcaagaggggaaaattatctataatccgggctttggcacatataagttcaatgataccaattgaagtatggaggatatcaaatgtagtatatatcatataccaaaaccaattggaatatcatttaattagaatgtttaatgagctatgtgtcgtgcttaactaatccttntaaaccatgtaggtttgctcaagaatatgaattgaaaacaagcattcctaccatatgaataccctagtatgcatggcantatagtcaaaagtgaaaccacatgtaaa

SEQ ID NO: 70987 - DNA, 407 bp, Zea mays
agcttcgcacctctgaactaactcggctgctgttattcttcgctgttggccaatagaatcctgacctgatgaccttcccgactagtgtcttggatgctgcgtgtattccacattgtctcatcatggacctcatccagaagatgcttcccggtagatgagagaatgcacttcatgaagacgcctgatgcaccccttctgtataatgactctccaacgagtgtgtacagagccgactgtctggcgatacgctcggctgcatattcgacatttggctcctcttcattctatatatacctgatgataggccttctacagtcatcagagactgactctgcgcgatcacaatattacactcttctgcttgatctattgaaaagctcggctagagtattcttcgacaaagactc

SEQ ID NO: 70988 - DNA, 277 bp, Zea mays
  unsure (1)..(277): unsure at all n locations
ctgcatggaataccccgtgcttcatgggttatggattagaagcagtgctgtccgccacctcgcatagtcgaagcagaaactaccacgcttgaaaatatctatgttgcttaggaagaatgattgaacacagtaattcagtcggcttggtaccaccagaccttgaggcgctatcatgataaagacgtgcgacaccggtcctttgcagtgggagacttggttcttcgccaaattctaatggnggaaggacgtcacaagctgtcaccactattggaagggg

SEQ ID NO: 70989 - DNA, 256 bp, Zea mays
tattccattatatcccttttcttcgaaccacaatacacgggatattataacactttaggggtctctttatattgattttagggaaagtaatttaagggtaagaaaataaaagtgtatttttcttcaaaaccttccaagaatattttctaaataagaaaagagcattattaagggggtataaattctacccccttaaaaataacattcgccccccgactagtcagacaagggaataaaaaagcgctgtgtctaatcc

SEQ ID NO: 70990 - DNA, 395 bp, Zea mays
  unsure (1)..(395): unsure at all n locations
tctcttggacatgtgccgcacttaccgctgagtgcgaagctgccacatataacaacagaggagcccctggcgttggtggagttaacgtcgttaggtctatcaaatattgcttcagctctttgaaggctctctgctgaactagtccccattgaaaaacttcgggtgactttagcacttcgaagaatggtaaatttctctctgctgatctagatatgaatcttttgagagatgctagtcttcctgtcaatcgttgagcccccttctttgtgcttggtggttccattcaaaggatagcttcaattntatttggattagtctcaatcgcttttgttgaaactaggcaaccaaggaatntccccttctttactccgaagacacactnttctggatttagc

SEQ ID NO: 70991 - DNA, 367 bp, Zea mays
  unsure (1)..(367): unsure at all n locations
ggatactcanagtcacctgcggcatgcaagcttatgctgtagtaaaaggtattcttcttcacatctccgcaaaacaaatagatagctattccttgacgatattagttggccatatatatgcccaccatgggtgttcactatgtcgacttgcaaaatagttggtgaataataagacaaattccaaatcaaaatccgaatataaatcatgaccccatctgaataactgaacaaaaaagctaaatcacaagatccctactgattagacctactgaatgaaggcgcccgccaaaatcagtaaggtcgacgacgtcgaaacaagcggcttagctatgaatagaagcgaaagcgaaactgggatgatcttaaa

SEQ ID NO: 70992 - DNA, 436 bp, Zea mays
ctaagcttgccgcatacaaatttgactgtggaaggtgaaaccaacacagcagccgctcctgctccgaaggttccccaagatccatcacaaaacactgaccaggcttcgttgtctttattcatttcctcctcttgagcccctggcgtccaatcagcaataaagtctgccagcgcctgtgactgaatcgaagatctatgaacatattcaatacaaaattcattgagctctgccgcccatttttcaatccttccagtagcttctcgattcctcatgatatccttcagaggttgtgatgaaggaacaattatgttgtaagctaggaagtagtgccgaagcttcctggaggccatcaagacagcatacaataccttctccagctctgtataacttttctttgacaaactaataacctcggatacaaaatatattggagcct

SEQ ID NO: 70993 - DNA, 341 bp, Zea mays
agcttgtgaagattgtgcatcccattatgggctagtcggcggtgccagagccaacccatgttagtcttagcaattaagcaagtgtcgagttcagctctatcaaaatctaccaagtatagctgaccctctaacactcccttaaatgctattgaatcatcacttcttctaaagacagtgacaccaatatcagtaaaaagacagttgtagcccatttgacataattgagatacagaaagcaaattgtaatctaaagaatcaacaagaaaaacattggaaatagaatggtcaggagatatagcaattctacccaatcctttgaccaaaccttgatttccatcccc

SEQ ID NO: 70994 - DNA, 470 bp, Zea mays
  unsure (1)..(470): unsure at all n locations
tgttatcacacggctatgtttagcttaatctgcgtgctgttaatggagtgccagtgtggcatgcttgtttatgcatgtcttattttgtgctaggtatttaccccccgcaagttaaagtctacgagttgaaggaattgtcgatgaagttcgagcggcacatgatctcagaaattgtagatttccaggtatacttctatggaagctcatttactggcacatgtgttttaaggaattgttgatgaagttcaaggtgcactctttttttctgcacctgatcactactccggacttctatacataatagagtggtggtttagctttcctcatatacagtagaagtaactgtgggatggtggagaacacacattggtcgtttatctagtgccaggggagctaatgttttattattgctaaaatcaatgctgtgtacatntncttgagcaatatgggtcttgttaccagttgatgca

SEQ ID NO: 70995 - DNA, 342 bp, Zea mays
  unsure (1)..(342): unsure at all n locations
agctnatgaagattcttcatcccattagtgttattcggaggtgccagagccaacccatgttagtcttagcaattaagcatgtgtcgagttcagctttattaaaatccactaagtatagctgaccctctaacacacccttaaatgctattgaatcatcacttcttctaaagacagtgacacctgtgtcagtaaaaagacagttgtagcccatttgacataattgtgaaacagaaagcaaattgtaatctaatgaatcaacaagaaaaacattggaaatagaatggtcaggagatataccaattttacccaatcctttgaccaaaccttgatttccatccccga

SEQ ID NO: 70996 - DNA, 451 bp, Zea mays
  unsure (1)..(451): unsure at all n locations
ttaactgatntagagtcccttgttggatgatccccaggtttatcttttccatttcttgacacaaagtgttctcggaggtcttcgccataagacagtggcaggaagtcttacgactcagcgcatctgccaccacattggctttgcctgggtgataatggatctccagttcatagtctttaatgagctcaagccatcgtctntgtctcatatttaactctgactgggtgaagatgtacttcagacttttatgatctgtatatatgtgacagatattacccagcagatagtgacgccaaatctttatggcatgaaccacagcagctagctccagatcatgagttggatagtgctcctcatgccggcgcaactgccttgaagcatacgcaatcactcggccctcttgcatcagtacacagccgagcccactgccagatgcatcacaatatacatc

SEQ ID NO: 70997 - DNA, 333 bp, Zea mays
agctagaacggaggacccgcgattctgatatatgagaaccgcgcctctctggcaggtcgttccccagcctgctgcccgagacgctattcatctctgatccattgtccgattcgaggcgtaaatgtcctctacgtccccccagcagacccatcgcgaatccgtatcggacttcgtcctattggactggctggcatacccgacaccttaaaggacgactccttgactgtctacgagtgaactagcgataacacgccatcttccccgagagagccgaacgaccatgtgaacgccaaggctgtccatactaagcctaccactgaccaaacttctctc

SEQ ID NO: 70998 - DNA, 268 bp, Zea mays
tctcacaatgttctctgaagacattgagagaggtcgtggactcctcaatagacactaggaggtttttatacgctcgcttcgaagtattaaaagcttctttttctttgtgcatggaaccctcagcctcacctatcattctacacaagagcatcatatgagtagccctcatcatcgacatcatcgctatcatcatcatcttgtatatcatatatatcggcgatgaatattaccttatcctctctctttgccatgagacaatggagggatg

SEQ ID NO: 70999 - DNA, 338 bp, Zea mays
agcttgatgtgtcgactcagcttgttttttcgggactttgctctgcttaatagtgacttttctcttcctcttcttcgaatcttgaaccatgttgggatagtcaggatagaagaagcgaatagcataaaaaacacggttcaatcaattccctttttgagtagcaaaagcccattgtaaagcttcgacaccaagtattttatctaaccacccgtcactaggcttcccaaattcatcttcaaatttatacttgtaacgaagtctaatcaacccaggcttcgccgtcgaagcgttttttcacacattttcggcatctcccactcaaccgctagtggccatgt

SEQ ID NO: 71000 - DNA, 468 bp, Zea mays
  unsure (1)..(468): unsure at all n locations
tgagtcagtcctcttacacaggataattgatgctcaaagaaataatgagggtatgaaacacattcgtgagaagataagggctggaaaagccaaatgttntaaagaagatgatcaaggcattgtatggtttaatgaccgcatagtggtgccaaagaatgaagaggtccgccagcaaatccttgatgaagtgcatcttagtcgttattctattcatcctggaagcactaagatgtaccaagacttgaaacaacattattggtggacgaaaatgaagatcgagattgcgcgctatgtggctaggtgtgacacctgcagacgtgttaaagccatacatttgaaagctgccggtccattacagtctctaccaataccgacatggaaatgggaagacataagtatggactttattgtgggattgcccagaaccgcanaagggtatgactctatttggttatcattgatcgacta

SEQ ID NO: 71001 - DNA, 372 bp, Zea mays
  unsure (1)..(372): unsure at all n locations
acccccgggatccactaagnccactgcagcatgcaactttgccagctaaggagcttatttccctcgcccgagcccagccacgggcgggaacagtactcccagacgaatccacacctcgcccgaagacctacttaagcaacgggagcaccctcgacttgcccgaggcccaacacgggcaagcgtagcagggaagcaaccctggccagaacgcctccccaaccgacaggaacgcaggagcattcaatgcgaggaacgcctgacaccttatactgacacgtggacctcactccacagggccgaagagaccagcaaaacattactctaccacagaccgacctgacatgaaagcagcaccgggagccccggaaccac

SEQ ID NO: 71002 - DNA, 480 bp, Zea mays
  unsure (1)..(480): unsure at all n locations
tctgccatgacgtgattgtccctggctggagagaagagtaccatgtctaggccacacttcggactgccatgacgaaggacttcgccatgactgtggtattgcccccgtacgaagatatagttgcttcgtagctcatcaaaaactgcttaggatctgagtgcccatcatacatggggagctgaggtggcttgtatgatggngaccatggggtagcctgtagttctgctaatagaggagaggcatcatcataagcaaaatttccatgatggaaatcgtcataccaatcatcatcattgtaggaattgtcttgacgaagctctctttgtggaggtctttggtcctggtcatcttgagtaagatgacgtatttcttcagcagcttcgtcgatcttcttctgtagattggaaagacgaagcatcttctctctcttcctttcgacctgctgatggatagcttcgagatcccttatnctctagtcta

SEQ ID NO: 71003 - DNA, 450 bp, Zea mays
tcgaagggtgccatcttgatgctttcttgatagttattattatatgaaaattccgctaacggtaaacattcatcccatttttgtgagaagtccaatacacatgcccgcagcatatcttcaagtatttggttcactctctcagtctgcccactggtttgaggatggtaggccgaattatggagcaacttagtacccaaggatttgtgaagtgcttcccacaacttggctacaaattgaggtccacgatccgacgctatggtttttggaacaccatgcagactaagaatacgagcaatatacaattggacatggacagtaaccgagtgatctgtcttgactggcagaaaatgagcaattttcgtaagccgatcaattataacctagatagaatcatacccttttgtagtcctgggtaatcccataatgaagtccatactaatatcttcccat

SEQ ID NO: 71004 - DNA, 414 bp, Zea mays
  unsure (1)..(414): unsure at all n locations
taaccttgtaacgaggataagttgcctctgttccatatgtgtatggtacttaagcctctttgaaatccttaagggaaaatgcttaagacacttataacatgctntcataagtgcataaactgtcatgagcatcacacttatactatgacacaatgcacttcacattctgtatggtatagatatgttctcattaacctcattatgtgcaattggcatttcaaggccaaaatatgtattcctatcaaggcacatatttagggggagcaatatatattatatagaactatgatcatgcttaattgacatatnctttgatcatacctctttcattttggacanatgcatatatcttattattctcgtaccatgactacgactaatatgtttccaagtatatttctatactaagtcgta

SEQ ID NO: 71005 - DNA, 329 bp, Zea mays
catgctaacttggccactgggccagggaatgttttcactcaccacgtggcactgccaacgccccacatgtggaagcggaggatagaagccaccgctctcttggcacacagctaaacaatctcacgccatcgttcaagctcgaaccgagccgaagccggaaactactcacaccctcgaacgagccgacaagcacagcgcatatccttggccgatgcgctccaatcaaggacattgaccgaacggatggtgctctcgtacacacgacgcccactcatataacaatgaaccagctcgcacggaagtcctttcaaccacaccttgacttctag

SEQ ID NO: 71006 - DNA, 464 bp, Zea mays
  unsure (1)..(464): unsure at all n locations
ggaaccgagggcccgcgtcaccggtgaggccaaatcgcgctcaccggagttcaagaactcgccggcgcgcgtggaccgggtaaaccccttcaccttttcccgatttgtcgcgcgcatggtctctgtgtcatcccgtgaagctcctcgtgccccttaattgaactctcccgccgtggtttggccggagcaggcgtcgccgtcgatccccgccgcctgtgttcgtggccaggggagctccgaccacctctgacgtcgacccgcacatcgacgtgaccgtcgcgacctcctgaacatcaccgaccacctcgccggaccgccctcgccgccggtaagccgcgccaccctttcttttcccgcggctactgtntcagttgagggagggactgcgggtgagagggagagaaatccatggggttaagtgaaaagccagtgactcaagtgaatagtggcgtaagggtagatct

SEQ ID NO: 71007 - DNA, 371 bp, Zea mays
atcctctataaaccacccgcagcatagcagcctgcggtttattcaatgtaaatttttttaccatctcttaacatagattttctatggataaactccacataagaaatggcattagtagcacaagcactaagtttctatctagcaaccattttatatgtgggaagcaagcgagttgctaaaatagaaaaacctcataatatggactaaattttccttgaacacctcatgcacaatatattttgaatgacatggataatatgcatggctattcaatgaagcctagagggatgacttaatccatattatggtgcgtgtctaatatagaagaatcaaatccaaattaactagatacagaataccgcacataaatt

SEQ ID NO: 71008 - DNA, 476 bp, Zea mays
  unsure (1)..(476): unsure at all n locations
tgtattgtggagaattaatctgagcgtgatctaatctcgatcgttttttatcgatgaacggcaaccgactcgcccgccctatctgctgctttcgggcacggcggcgcagatgcggccgagcggcgttctcgccggtgtcgcgttgaccgcggcccgacgagcaatctaccccaaggaaacatgcgaaatgaaattcacccgcttgcgatttgaaaggagggcgccataaattctgggaggggctaattaccgcaggttgtagagggagtgctcccagcgtcgcgagcagcaaggccgcggcgacgatcttccgccggcgaggaattcctgngcccaaggtcgcttgttctgcccggcaaggtcgccgcaatcttccttgcatgccagtggaagcttccagcactacacccagagcacggtgaacggcgaatcaatgtttcccctcccgcggcgggactcacttctctcccctcatc

SEQ ID NO: 71009 - DNA, 476 bp, Zea mays
  unsure (1)..(476): unsure at all n locations
cctatgaaactaagcttatactcggctgcgttgttagaggctgngaatagcaattgtagagcgtacttgaggtgttcgcctcctggtgcagtgaagagaattcctgctcctgctccctgcagcttcagcgagccatcaaaatacattcgccatacttctgcggtttctggattatccggcacttgctgttctgtccattctgatacgaagtcgaccagtgcttgagttttgatggcagtgcgaggtcggaactcgatatcgtgggaccccaactcgcaagcccacttggctattcggccaatggcttccttgttgtgaagaatgtcccctattggaaaaccagtaactactatgactttgtggtcgtcaaagtagtgacgcaacttgcgggcagttagaagtactgcatataatagcttctgaacttgaggatactntttcttcgatgggcctagaacctcactgatgaaatagac

SEQ ID NO: 71010 - DNA, 307 bp, Zea mays
ctagtacttaccctcattactcctttgttaacctcctgcactattaagaaacaagacgattagcaagatgcttacatgtgaagatttcaaccaagaactgaacatcccaagctctcttgatgaaaattggaggagccgaagcacaggaacataccgccatcaactgggaatgggcccgcccaagattccagttggcaaggcgcaacttctgaatactaacccggctcagctctatgaactcgctggacaaacacccaaacacaatccactggagtcagaccaaaacgggacactccccaagaaccat

SEQ ID NO: 71011 - DNA, 481 bp, Zea mays
  unsure (1)..(481): unsure at all n locations
ggtgaaggttcttcatcctcacatgtgctaagcagcgatgccacagccagcccatgctagtcttagcgattaagcatgcatctagaccggtctcctcttttgcaaaatcaactaaatagagtttgtcgtctaatacacccttaaaagctaatgaaccatcacttcttctaaagacagacacatctacattagtgaataaacagttatatcccatattacaaagttgactcacagacaacaagttatatccaagcgactcaactaagaacacattagaaatagagtgctcggatgaaatagcaatttttcctaaccctttcaccttgccttggttcccatcaccgaatatgattgaatcttggggatccttgttcttgacgtaggaagagaacatcctctnttcccccgtcatgtggtttgtgcatccgctgtcaataatccagctagagcccncggatngcataaacctgcaggcaaattt

SEQ ID NO: 71012 - DNA, 340 bp, Zea mays
agcttgaaatgtgttttcctccattattttttgatatgcaagtacacctaatcatacatctcgtggatcagataaaaatattagggccactatatttacatcatatgtttcagatggagcgatacctgtgagtattaaaaggttatgtgcgaaatcgcgctcacccagagggttcaatcatggagggatacactacacaagaagtgattgagagctgtatagattacattagtgacggaacaatgataggtgtgcctgtacctaaacatgagggtaaactatgtgggagagggagaatgggcatgaaaacttttcgtgttgaggattacaagctactaca

SEQ ID NO: 71013 - DNA, 449 bp, Zea mays
gctgaccttgtaacgaggataagctgcctttattccaaaggtggatggtccttaagtctctatgaaatccttaagggttaatgcttaaaaatgccatgaaaatattcataacatgctttcgtaagtgcataaactgtcatgagcatcacacttatactatgacacaatgcacttcacattctgtatggtatagatatgttctcattaacctcattatgtgcaattggcatttcaaggccaaaatacgtattcctatcaaggcacatattcagggggagcaatctatattatatagaactatgatcatgcttaattgacatatcttttgatcatatatctttcattgtggacaaatgcatatatcttattattcacgtaccatgactacgactaatatgtttccaagtatatatctatactaagtcgtagattgaaagagaaatggagtc

SEQ ID NO: 71014 - DNA, 329 bp, Zea mays
agcttctaaagggagagcacatttttttactaaccaatgctcattttgagaaagacaggacttgtagcgcatgtcaagcatggaagcaagttggtgttcatcatccacacaagaacatcatgacgaccgacaggccgcttgaactactccatatggatctattccgcccgatcgcttacataagcatcggcgggagaaaaatcacaaacccaagagaccttaaagggattcttgagacgggctcaaaatgagttcagcttaaggatcaaaatgaatagaagcgacaatgggatggaagctaagaactctcaacttgaaggcttccctga

SEQ ID NO: 71015 - DNA, 480 bp, Zea mays
  unsure (1)..(480): unsure at all n locations
ggacgtgtcgagggtggataccagcgtacctgtaagagttgtttcaaccctcaggaggcagccccgaccgggacctaagcctgtacacagcttcagctaggaagtgttagtagcacactcgtagggttcgccgtctgacattagccatcctttgatgcatgcttaggaccagcagtatttagtccgtgaggccagtttgcgtgttcggaccccctggatcacgactctagatactanggctctcgccgtagagtagtggggcatgtaggcttacggtacgggaccaggctaagcggctgctcggccccggaccacccctgtagacaagtgtccattctctatagtcggaccccaggttgtcggacccacagaactacaattccaaatactaaggtactcatcacgaagtggtggactgtggaggcttacggtacggggccaggctaagcggctacactgatccggaccacnccatggaac

SEQ ID NO: 71016 - DNA, 327 bp, Zea mays
agcttggcaagaccaaataactctttttttataggaagaacaataaaggggagtgaacaaaatattattaaactgggagcaaaaggtacaaataaaatgaccaggaaatgttagaagcgtggaattgctgatggtcacaacagtaggacatgtttgtcaatggaggaaaatagactaaggttggcaagccttgctggacgtaagagaggacgaacctctggatctatgaacaagggtggcagtaaagctcctgattggaatgagacaacaacatcaaaaaagcacgcaattgatttcgatagtagtgagccacacagtgattagtct

SEQ ID NO: 71017 - DNA, 453 bp, Zea mays
  unsure (1)..(453): unsure at all n locations
tgtagtgcagaaattatcactcagtaacaaacacatggtactagtgcccatgtctcgttggatcctacaacactggtgattattttttcttaaaaacagtgagtatgctgtacttcaagtggcaaacatcctatcacactcttatcatnttgtaacaagcagttgataagttgatacaatatgttgtagttgaagtgaaatgtatgttgtggtctatgtctttatgaaattatcgctagtgccatccttcttcatgctattgtgcgttagttacatgctttctcacagcacttcttcaaattatagatacatgtacatttcctggttggtgtaggttctcttgccaatcatgcaatgggaagccagcgctcttgggcgtccagtattagctattggtctcgttgcatctttggctctctatccaggtattctagatacttctggaccttctat

SEQ ID NO: 71018 - DNA, 469 bp, Zea mays
  unsure (1)..(469): unsure at all n locations
tgtgaaggttcttcatccgcacatgtgctaagcggcgatgccacagccagcccatgctagtcttagctattaagcatgcatctagaccggtctcttctnttgcataatcgactaaataaagtttgccgtctaatacacccttaaaagctagtgaactatcacttcttctaaagacagacacatctacattcgtaaatagacagttataccccatgttgcataattgactaacagatagcaaattatatccaagagactctactaaaaacacatttgaaatagagtgctcattagaaattgcaatgttacctaacccttttaccttgccttgattcccatcaccgaatataattgaatcttgggaatccttattcttgacgtaggaggtgaacatcttcttctcccccgtcatatgggttgtgcatccgctgtcgataatccagcttgaacccncggatgcataaacctg

SEQ ID NO: 71019 - DNA, 295 bp, Zea mays
cgcagcagcaactctaatgggagaacacgcgattttgctaactcatgctcaactcgaaaaagatagaccttgtgcaccttgaccagcacggaaacacgtgggaggccctcatccacacaaactgtgaagactacatcaagaccctcggacaggctgcctatggccctttatggacccgacgcctatccgagcatacgaggaacgaagcatggtcaacctatagacgacgactttctcccgctacacttgggcgaactttttgcacgaaaagttcaaaacccaagggaccctcaaa

SEQ ID NO: 71020 - DNA, 486 bp, Zea mays
  unsure (1)..(486): unsure at all n locations
tgtagtgaaggaaccatcagagaaccgcaacaggaggcaactcttgccaacacctgaacatagataaggagtaaaagagatcacacaattgacgcactaaaaaaactttactgatggacatgtcactagattatgcatcaactattcattcaaaaactaaccttgtcacatagtccctccattccaaattataagacgtttggntattctagatacgttgcttttactatgtatctagagatagtgtatctaagtgcataacacaagttatattgaaaagctaaaatgtcttataatttggaatgggtggagtagctatcaagacctaaactttacatgttatcgcaattcacaatacagctactagacaaagactcangaataaatacaatgccaaggttatgccaacaatcaacagacttcaatcanatactagaaatgctcacaaccaatgcatatagaaatggatagcaatggaatctatca

SEQ ID NO: 71021 - DNA, 343 bp, Zea mays
aacttgtcagtgcttgtcaaaacatcttcttttaccagcacagcaactgcagaccattccatagacttggcccttctcgtgctggggactgaatatgattggacctttcaagaaggctcatggaggatacactcatgtactggtagctattcacaaattcactttatggatagaattccaacccattgcctctttgacctcagctaaggccgtggaattcatacaagacatattattcagattctggataccaaacatcatcataactgacctaggatcctacttcacaagctcagagttcttcgacttactgcgagccatatagcattcagatcaagtatgc

SEQ ID NO: 71022 - DNA, 480 bp, Zea mays
actaagctaaacattatgagggatcgtcctacttataacatcgcacgcaaggacatatatgcaatataaacaagtagaacaataagaatggcattcacacaacagttgtgattcggtatggcttgctgtcacatggtgatccccatctccaataatctgtccatcacgatgatatccatctccatgatataggtatgccatcctccaggtgatgagtccttcaagacctatctaacgtatgctggtaaacaaattacatatacgctttggatcatcacatgttgacacgcaggtcattacattaaatttggacaatacatgtggctccagccgtattgccctcgtcacgacacgcaggtcatgaataatttattaacatgcatcatatacacaatagccataccgatcacaagatgtcctgcaaaaacaggttagacaaacacatttctatacgttcgccacttcatcagatagccacgg

SEQ ID NO: 71023 - DNA, 349 bp, Zea mays
caccagcatgcatgccagcttgactggaaacggaaaatgttttgataccaacacgcaaaaccctaagcgtgtaagaaacaggggccctatgaaaacaaatactgactcctacaaccctagaactctggagcaccatgaaggaaaggtgcattcaagaaacaaccagagaaaccctttgtattactgcaattcacaagacacacaaaagccagcataagcatacatgatcgcacataaagaacgaagaaaaaggactggttgaaaaaaaaggagatggaaccaccaccacttgaagacccacctgccgcgaactgccctccaataaatatttggggaatacagcccgaat

SEQ ID NO: 71024 - DNA, 415 bp, Zea mays
  unsure (1)..(415): unsure at all n locations
tacccatgatgaggcatatgaccagttaaagggtcctcaatcatccagcctacatcgagaaggtccttaatcgactcatactgagacactacaccgagactcccttctcgtgcaagtcaaccgcccggtctcagctttattaatttcaacccacagtctggtacctggcagaggtacatctttttcgatgttgaacccatataggcctttgacagatccaccatcaagttttatatttgaaaacattcccacccactgaagcatcacctttgttttaaaacaaaacatttntgtatgctaaagcaaagctaagcatcataaaattctgttcacaacggatatcgaggaagggaaatcaattttcaaggaaagaaatgcatcaacggtgtagcacacaactcctatcacctaatgc

SEQ ID NO: 71025 - DNA, 338 bp, Zea mays
agcttccgaaaaagatgatgcttcttgttggtatgattacactattaatcctattaagccttgggccacgacatcccatcctaggggccaggatatcacaatccaccccccttagaagaccgacgtcctcgtcggtcaaccccaatccaggaaccttccctcttggccacgtctgtatgtctagcgtcgacatatgtcatgccatgtgaccactccaggcccacatgcgccatgcgccatatacccgaaccccctaacccacacacgcccgtgaaaccgcgagggtcggctctgataccactttttacaccccgtccaatccctggaccggcggtact

SEQ ID NO: 71026 - DNA, 472 bp, Zea mays
  unsure (1)..(472): unsure at all n locations
tatgaagattcttcatcccaacatgggctagtcggcgatgccagagccaacccatgttagtcttagcaattaagcaagtgtcgagattagctctattaaaatcaactaagtatagctgaccctctaacactctcttaaatgctactgaatcatcacttcttctaaagacagtaacacctacatccgtaaaaagataattgtagcccattttgcataattgagaaacataaagcaaattataatctaatgaatctacaagaaaaacattggaaatagaatggtcaggtgatatagcaattttacccaatcctttgaccaaaccttgatntccatccccgaatgtgatagctcgttggggatcttggtttttctcataggaggagaacatctttctctccacagtcatgtggtttgtgcacccgctgtcgatgatccaacttgaacctcacgatgcataaacctacaagacaaa

SEQ ID NO: 71027 - DNA, 301 bp, Zea mays
agcttctatagggagaacacactttatttattaacaacaggccatcttcgagaaagacaggatatcgcatcgcatgccaagcacggaaacaagttggagctcatcatccacacaagaacatcatgacgaccgacaggccactggagctcctacacatggatctatatggcccgattgcttacataagcatcaggccgagtaagcactgtctaattattgcggatgattatcctcgcttcactcgggtattctttttacaggaaaaatctcaaacccaagagaccctaaagggattcttgag

SEQ ID NO: 71028 - DNA, 172 bp, Zea mays
acaagctgtttttgctgactgtcaagactgctatagatactttctctactttgaaagcccaatgcgacaaagctattgacaaagccattcgcgtgaggcgaatcttgatgacgagacccagagtgattgtccttgactacatattagcatatgtcaacgctgctcctgattc

SEQ ID NO: 71029 - DNA, 336 bp, Zea mays
agcttgagagtgacttgccgaagctttataagccgaaggttgttggttgcctacgtactctggtacatagggagagtagcatgaagcagtatgtaaaacctgcttcggctaattctgccgcgcttcagcttcggcaatctccttttgcttctgtattgtgacttggcatgtccttgtggtgtggcccttatcttctccacagaataagcaatatagccttctgggttgatcctcgtaccttcctctgaagcccttgctgcctctgccccttggggctggtggcctgaaagagttttgttgttgccctgaagattgggagccacgttgtggcctttg

SEQ ID NO: 71030 - DNA, 497 bp, Zea mays
  unsure (1)..(497): unsure at all n locations
tcggcttttgaaatagtntntagtgtctccgaagatgtctgatgattttatgactgctgctgagatgaagctgagcctggacgaagagaaaaacttggggtttcttatagcgatgtcaaagaccaatacagaaaaaatcaccaaggagattctggaaggtttgtctgaagatactggtgacagtgacagctatgatgtggacagtggtggtgaggactccgaagatcgtccctggcgaccaagccattcagtttatggtaaatcaactatcaaagagaatcatcttgtcaacatgagaggaaggtatctccgggatttatccattgtgagggccgacgaaggggaaaaaacgtgcccacaccctgaagaanatgaagtcgtagtgtaccgaagctttttgaaagctggactgcgatttcctttgagcagcttcgtcgtggaggtgctgaaaatcttcgaagtctatcttcaccaacttactcccgaagcaatcataa

SEQ ID NO: 71031 - DNA, 336 bp, Zea mays
agcttctaaagggggagcacattttttactaacaaatgttcatttagagaaagacatgatttgtatcgcatgtcatgcagggaagcaagttgaagttcatcattcacacaagaacatcatgacgactgataggccgcttgagctactccacatggatctattcagcccgattgcttacataagcatcggcgagagtaagtattgtcttgtaattgtggatgactattatcgcttcacttgggttttctttttgcaggaaaatctcaaacccaagagactttaaagagattcttgaaacgggctcaaaaagagttcgaattgagaatcatgaacatt

SEQ ID NO: 71032 - DNA, 339 bp, Zea mays
agcttgcttaaagtaaaaaaaggcttttctatttccaaagcctaccacatgagagggttctggagaagggataaaccaaggcaagtcttccctccgcaaatgcgaagaggctgcttagatttcatgaaatggtctgcccttctacatcaccaggtctgcccttctacaagcttgctgaaagaattatagtttaaccaaataaactcaccttttgcagatttcatgaaatggtactccatagaatagactcttttcccatgcttcaattcacgcttgatcatatataagctttcaaaggaagaacaccctctgcacctttttggttcaagaatatatgct

SEQ ID NO: 71033 - DNA, 464 bp, Zea mays
  unsure (1)..(464): unsure at all n locations
gatatagcttctgaatacaaagttttatattcataatattgatctttgttcaagcaaataagtgtattcgtgttacttggtcatnttttcttggttatattgcatacaatttaatcaactttatttactcattgaatgcattgttgcatacacaatgaattactgtatcgtggtcgttccatcatgaggaattagagagtgtacagagatccgaagcttggagtttggaagaagctcagtcaaatggacgggtacacatggccttatggcctagatttcttttgatcttatgaagaaatggtctaccttgatggctttccagttgcgtacagtctgtgctctctttctgatttgcatacacttctattcttgctctctgtagacagagcttatatgtccattgaaagtcgcctagagggggggtgaatagggcgaaactgaaatttacatagttaatcacaact

SEQ ID NO: 71034 - DNA, 354 bp, Zea mays
cctgcggctgcagcttcatagaatgactgcgaatgtttttctttctcagataggcagaaatgtgctaacttatgttgatgatatcacttgtcaaaagcacgaaacaagataatcacattgctgatctgcaggagaccttcgctaattttacacaggctggtttaaagttgaatccagaataatgtgtctttcgagtgaagaaagggaaatttcttggctgtctagtttcaacaaaagggattgaagctcatccaaataaaatcgaagctattcttcgaatggaaccacccagtacaaagaatggggctcaaagattgactggaatactggcttcttcaacagatttatatctag

SEQ ID NO: 71035 - DNA, 473 bp, Zea mays
  unsure (1)..(473): unsure at all n locations
tagaagctagtgcgccgnctatagccttcatcgccgcgagttcagaatcatcggcatagaaatatagaatagaatggctgacaggtacaccgccgagtttcagcagcgagcgctctgaattactgaagatgtgcatgcagggttacggatggcctatacaagccattcatcaaaccgatccgcgcagaacagcgcctagcctcgatctagcaacggcatctaacattcgagctctgactccctgttgttaccaatctagtactacgggaactacccattagtcaaactattcagtcatctaccaacccagcgccgccgtcgccgtcgtcgtcgtcgaccgaatcgcagaagattccctcgtagggagagaataaaaaaagcagcagacggtgcgagattccggcgccgcggcacgcaccttgatcccggagctcctggcgccggcgtccgaaccgaagaccggcgccgagaca

SEQ ID NO: 71036 - DNA, 269 bp, Zea mays
  unsure (1)..(269): unsure at all n locations
cccctcagcttcgctatgtatnttactagctatcgcacccgctcccacacccgattgtccaccgacatgcctgaatgttgcacttcccacacagcggatctccaccgccgtaaaagtgaactcaccgttgacgacccaactcagggcagtggccgaccttgtctttctcgnttgagcattctcatgcctctgtgaagctccccgacccccttaataggactagaccggcgcccatcgtccggaacacgatcatagtgccgttgtgctta

SEQ ID NO: 71037 - DNA, 253 bp, Zea mays
ccgggaacccagaaacaacccgcaagcaaacaagccttcgagaggccccgacagtcttatatttccccgggggccggaaaacccgaccaagaaatcctcctctccaccgccatcaacattaaggcgccctacagataaaacagacaccgggcataaggcggggccccagcgcgaccgtaacggaaaaagtactcccaaagcctgacgaaaaacataatcaccagcctagggggaagcgatcggggcaacaaca

SEQ ID NO: 71038 - DNA, 493 bp, Zea mays
  unsure (1)..(493): unsure at all n locations
ctcagctgactgacagagcaaatggagctgattgtccccaaattttgtggtaacacgagttaatctttgcagcaaacttgtagagtattatacccactacaaacttgctatggcaaccataggtagatttccactggatcatgctcagaatttagcttgaagtcgatgttagttcactgctagtctgaaaattcagaccataacagcctgacagtccaactttaggctcatttatctcagaattctacataacaactatgctcactctcttaagcaaagntgttctcctataattgggctacaattttgatgtggtgacctacggcaaattctcaataatggaagatccaatgctccaaagttgagccctcaacactgaatttcagacttatcctctatagtgcttaagaggtgaattttgcaatttggtccanaacttagggtttggcttgcaaattcacatatatgtgacccaaatgacttaagatattta

SEQ ID NO: 71039 - DNA, 476 bp, Zea mays
ccttaaacagaggatcaagaagttggtgtgcttttgttaaagcttctgcgaaacacttgaagcggtagtacatgtgtgaatgagtttgtaaagtgttcgcaaatatgtgcaaaacataataacatgtgtaggttttgtgaatgattctgttgtggcgcttgttgatgagttatgtgctgtggatctatcattgtgcaatactaattaattttgtatatctatgtgattatgtgtataaaaattggggatttgtaatgcttttgtatatataacagttgttgaatgctaattaatgggataatatcattattaacgactataactaggggcaacttttctgttggtgctaaatgtatatgtataacgactcacgattgtgtgctaaatctatagtacaacaacccacggttggtcgctaaatatacaatattagcaacggacggtcggtcgcttaaaagatgtcggtcgcttaagcc

SEQ ID NO: 71040 - DNA, 343 bp, Zea mays
ccgggacctcaagaaccacccgcagcatgcaagctactaaagggagaacacgtgttatttctaaccaacgtacatttccaaaaagatagaccttgtgcagcttgccaagcatggaaacaggcgggaggagcccatcacagcacgaatgtgatgaccacctcaagacccctggagctgctgcatatggaactctccggacccgtcgcctatctaaccatacggggaagtaaagtatggactacatattgatgacgacttctcccgcctcacctgcgagttcccttcgcacgacaaaatctgaaacccaatggacccctcagcgcttcctcaggaaggctcaaaa

SEQ ID NO: 71041 - DNA, 463 bp, Zea mays
acacattctacgattaacaaatgttcattctgataaagacaggacttgtagtgcgtgtcatgcggcgaagcaagctggagtccctcatccacacaataacatcatgacgaccgactggccgcttgagctactccacatggatctattcggtcccattgcttacataagcatcggcgggagtaaggattggcttgctattgtggatgagtattctcgcttcacttgggtattgctcttacaggaaacatctcacacctctgagaccttaaagggattcttgagacgagctcaaaatgagttcggcttaatgatcaagaaaataagaagcgacaacgggacggagtgcaagaactctcaatatgaatgcttccttgacgaggacgtgatcaagcatgaagatctctcacctacacgccacacaaaatggtgttgtagagaggaatactcgaactctattggacat

SEQ ID NO: 71042 - DNA, 359 bp, Zea mays
ctcagagtcacctgcggcatgcaagcttattgaggggctgaaggcttttattttatagatgcttggagtttgcaagccaatgcaccgctcgattgagaagtattttcaattcagttggagctgcattcgaagaaactagcctctctgccgaagatatacccggggcactggaatgtattgaaaaggaggttggtgtccttgacgaagtcataaccggccatggagacttctgtgcgctatatgcttctcatggtacagctgccgccttcataaaagccggatgtaatcacacgagagcttgaaataggccgaatgtcaatctttcatcatcggatctgaatgacatttcaactgaagcc

SEQ ID NO: 71043 - DNA, 488 bp, Zea mays
  unsure (1)..(488): unsure at all n locations
ggcaagcctgaccacttatttataacatgataacggcacctcactgacgtcaggataagatttcttttcctgaatgcatagttcatttggatacattgaccatagtgtgtggccaccgttccacaggtctgcagaactgaagcagaacagatccttaacaactctcggaaaatagtactacctcccttctcgaaaatatttatcgctcactaatttactttaaaaagtgaactgaactaaaacgtgataaataaaaaagaatggaggtagcagttagcatgcatggctgccaataccgggcatgagaaggagaaaagatctgcaggaagacaagccaaaaaaaaggcggagagctgagtgtgttggtaggaactgtggaacaacgtgggagcacttatcaactttngcaaagtgggatcctgtggcatttctccatccaccacctttatttcacaaacgaggtatatgcactggtagcgtgcttaccc

SEQ ID NO: 71044 - DNA, 450 bp, Zea mays
  unsure (1)..(450): unsure at all n locations
tataagccgctccatgtctcctttactagccaatattgttcttatagtttgcaagacaatacaacaatacagcagtgcaggcgttttgggctgctttnttggtgcggcccatactccaattangtttgggcggcccatggtcgcgcgcacagcagtcgtttcttcctccgtccgcacgatggagcgctcaaccgtccgttccggccgcccctcggtcagctccacgacggcacgacctcagctctccaacctgggcctcggctactccatcgccatcgcgctcggcttcctcatcctgtttgcctccttcctgctggctttctacttctgcttcggccgcggcggngactactgngccggngaagcagtcaccacggcgtncagctctggccacctctccatcaccgtcccgcgcgtgctcttcgtcgcggaggggtccgagtcccccaa

SEQ ID NO: 71045 - DNA, 277 bp, Zea mays
caaccaaagggaacccatttggaccacaaagcacaccaacaaagacacaacagcacgcagcccacacgaaaacagccggacacacaccacacagaacaaaggacagagacaggccctggaactccacacaggaccaacaccccgaccccaaaaaagcaacgcggagcaagacagacaaacacgggaagaaacaccgcaacacgcggccccaagaagaaaacccaaccccaagaccaaaggaccccgaaaagccacaagaaccgccaagaacagaaaa

SEQ ID NO: 71046 - DNA, 429 bp, Zea mays
  unsure (1)..(429): unsure at all n locations
ngcgctgaaatctgtaccatcagcaaatatgtcactgtgctctcggtaatggtgacataagctgtctccacatcaatttaaccacctcatctcctacttcaaactttataaacaatgtaaagaggtattntgcataaccatacacacgatctgctggaataaccatctcaaggcttgttcggttagctctcaatccatgtggattgagtgggattggatgagtttaaatcccaactaagtcaaacttcttattaaaatttcccaatcccatccaatccatggataacgggattaaccgaacaagccctcactcggaacaggaatatccctccaattcctacataaatccaacagggtctatgaaaatcgtttttatctctagaaaaacccaacattgacaggttctgcctgtgggaaacaattacatgt

SEQ ID NO: 71047 - DNA, 341 bp, Zea mays
agcttaatacccccaagaaattgtctttttttgttaagggtaaggctcccgtggttcaggatagagagggctacatcttatatcctgcaaactatcttgaacataagattaggaaaattcatgctagaaaacctcatactggttctcatcatgcttttatgtataaaaaagaagctcttaggtctaagcataccactcatatcaaaatgcctaagaagaaaaatccttatgcattaaatgagcataataattcatttaaaacttttgatacttcctatgtgctcactcaccaaataggcaaaggtgtcgcccaatatgttggagggcaaacacaagagtcc

SEQ ID NO: 71048 - DNA, 448 bp, Zea mays
  unsure (1)..(448): unsure at all n locations
ngagggcatgtntgcttcgcgtctaagattagttaggttntaaagttagatatataatttatagtcataattttaaaatttaaaaacaagacgacatacgttagtagactaagagtttctccttcaactttcattcaaaggttggttaaaagaagaaaataaaagatgtgatggtaaaataatgaaggtagcatgtaaattaagaagaataaatatatcactcgtctgtgtatgcacacttgcatttatttcattcctttgtaatgtaacattcgattacaattatacattcgaccttacgcaattgatatcttgaaggttatttcggaggctaagttggacaatttccgaagtcttgaaggcttcgttagtaccaaaatccaagagcagcttgaaggctgcaggggaagggcatanaggtccgagctatctcgacatgtgtcggtct

SEQ ID NO: 71049 - DNA, 337 bp, Zea mays
  unsure (1)..(337): unsure at all n locations
agcttatgcaggggagggagctacnatatgttaggttagcttgacaaacaatttgtttgaatagtagtcatgtaaaaactgccgttattaatgtcttcttttttctttagaatccaaacccgttacacgacttcgtcaatgaatttttcgcttctagaggtagtggtcacaactcccacgatcccgatttgtgatggtttgagttttgtgccgaatcgcgagtttgttttatgttgtattggactatttgtgaactgtgatgttgtgaactgtgatgtgatgaaccatatgtgaactgtgaacttgatttcggtgaattgtgagtatactgctgatg

SEQ ID NO: 71050 - DNA, 347 bp, Zea mays
gacactgtggacactcaagcttgccaggcttaaaccgaggacccgcgccaccggagaagcgcaatcgtgctcaccggagttcagaaccccgccggcgcacgtggaccgggtaatactgtgctacattcttcgattccttgtgcacatagcctctacgtcaccccgtggagctcatcgagccattagattggacatgatcgccgaggtttagccggaacacccgccgccgacgagatcacccgcttgcgcgcgtggaccgggcgattacggccacctccgtcgtcgagccgtacactattgtaaccgccaggacgctccggagccaaccccgcccctcgccggacctc

SEQ ID NO: 71051 - DNA, 342 bp, Zea mays
agcttctgtatggcccactctttcattgttggaaacactttgaaagccaaaaattcttgctactaggtccctagtgctgatgtgctccgcaataactttaaattcagccagagcaatctgggttggaccctctggtgtcatgttgcacgggggtctagtctctccgaagatcaactctaacggactctgaaccagcttttccttatcttcgtcaactttgacgtaaaaccattcagacttccaaccagctggccacttgctacggtaactgatcactggaaactttgtagtcttgtggtaggcaaaattgtagcatccaaaagtttcatgtagcccatctcc

SEQ ID NO: 71052 - DNA, 489 bp, Zea mays
  unsure (1)..(489): unsure at all n locations
tcggacatacgtccaactggttgagcttcgtttgtcaagaactgaaatagctagagtacggtccactgctagggtgacacatgaaggggaagagactgggacttctgagatagcccccatctcagaagtgatgaggcgttccaggttgattgtacaagaagaaaacgaaacagtcccaacagaagatgttgttgatgccgaagttgaaccaaccactgccgaagctggcagtgaaaacgagaatggtgacaacattttaagtccaagcaaacccagccatattgggtttgggaaatccataattacagctgaagatctggttttaatgaaaaaattaggatattttggagataatgatgataagctagttcggtttgctggggaaggtgtgattctagagccgaaagatgacgaagttgtagtctttataagcttcttcagggcaggacttcggtcncccctatacaaaatgcttggtgaggttctaaa

SEQ ID NO: 71053 - DNA, 324 bp, Zea mays
agcttagtgggttttttattattatttcttcttgaagttcatgctcaatcttggttcacataagataatggttcttgggttagcacttgagagaaaccctatgtgacactggggtgtcacaatgcctatttcttcccacttccatttgggtactggaaggggttgtagtagacctgcaggcttctgatgctctgtcttagttcgctggcaagtgtcgcaccgagccacatactgtgctatctcccttttcattcctctccaccagtatctggttttgaggtctaggtacatcttggtggtccctgtgtggatagagtaggctga

SEQ ID NO: 71054 - DNA, 491 bp, Zea mays
  unsure (1)..(491): unsure at all n locations
ggaacgaagtaacgattaagaataagtactcgttacctcggattgaagatctgtttgatcagatgagaggagctaaagtattctcaaatatagatctaagatcaggctatcatcagttgaagattcggactgaagatatacctaaaacggccttcactacaagatatggactatatgagttttagtcatgtcttttggactgactaatgcactagcttactttatgaacttgatgaatgaagtattcatggaataccttgaccagtttgtggtggtattcatcgacgacatactagtatattctcagagtgaagaagcacatgaagatcatctgagattagttctacagaaacttcacaacaatcagttatatgcgaaaattttgaagtgtgattnttggctgaaggaagtcgctttcctaggtcatattatcacanatggaggaatcaaggtagaccccggtaaaataagtgaaatactaaattggaaac

SEQ ID NO: 71055 - DNA, 341 bp, Zea mays
agcttccaaccttcgaactgtatgtatatttctttcaagcttcagatctcgtgcctggctacttttgtccacgtggccagcaataacttgagaatcagtctttaggatggcccttcttattcccattgcccttagatttcgaagcctcaatagaagtgcttcgtactcagcaatattatttgtataactgaaatccagtttgactgcataacatgttttaacttttgaaggtgccactaggaccacagctgctcctgcaccgaaggcttcccaagaaccatctcaaaacactggccaagctccggcatctttgcttgtaccctctttcggagcccttgcgt

SEQ ID NO: 71056 - DNA, 477 bp, Zea mays
  unsure (1)..(477): unsure at all n locations
tactaagcttctcgctgttatcgaacaccttctttctgagtgcatcaagtatcatcccgttggctctttccacctgcccattagctgtngggtgtgccactaatgcgtacttgatctgaatgctcctctgctcgcagaagtcaaagaaatccgagctggtgaagttagaccctatgacagtgatgatgctattaagtattccaaacctgaatattatctcctgaatgaactccactgcctttgttgaggtcaaggaagtgattggcttgtattccatccacattgtaaattagtctatggaaaccagtatgtgagtatatcctccgtgagatttcttgaatggcccgatgatgtctagcccccatcatgcaaacgaccaagttacaggaatagtctgcaactgctgcgctggtagatgttgttgctatgacaagaactggcatgcctcgcacttctagactagctcagcggcatcat

SEQ ID NO: 71057 - DNA, 298 bp, Zea mays
cggccaccttccagggacccattgagaattctgaattcccaatatctgaaaaacagacccttgccctaaaatacaggggatgttccacacttgagacccctactacgaatcctaatggcccccctgaccaaaatgcgtgtagctaacccctctgctgtgcgccagaacatggcattgggacacgagccctatacacgaccaaaccttggatttgcctctggtttgggcagggagacaggccagatttcctggctccatatctctgcaaccagtacgccaaatcctattgacccccaca

SEQ ID NO: 71058 - DNA, 479 bp, Zea mays
  unsure (1)..(479): unsure at all n locations
tcttcaccatgtgatcacggntatcttgagaaggttgagctgtgcacttcctttttagttgtgtcaagctcatctttagcctctcattttcttctttgagctcttgacatgtatcatctttcattcctagaaatactagctcacaggaggatttgcttgttgacgaacaacaagcattagcatatggtaatgtagtttcaatttgaatacatgtgcatgagtgaggttgttgggattttaagttttctatctcaacctcatgagcaatgtttaacatgatatgatcatccataagattttcatgagaacatagaagcatatcatatttttcttgaaaagctagaatttcaacttttagcttttctacttagtccttaagcaaggcattcctatgtactaattgagtgatacaaaataaagaattatctcgctcaattgtaatagattcacacctttggaccaacataacatgagagcac

SEQ ID NO: 71059 - DNA, 307 bp, Zea mays
ttttcacatgacaccatagaagggactcttactttaggcaatatatcacatccataaaaatcacgctgaaaaagtcaaatgcatgaacggaaggttagactaaataacatctctgccaggacactttggtacttcggagagtggccaacccctgatatagtgggaaaacttcagcttacatgggaaggtcctttcttggcggcatctttgtctagacctatatcatacaggttgaaatacatcgatggtcacgacatttcaagatcgtggaatgcacatgagcttcagacatattatttctaaactc

SEQ ID NO: 71060 - DNA, 426 bp, Zea mays
tctccaaagttgaggaggcttcctggcgaagtactgagctgactgacctggccgaagccccttgatcatggcctcgatgacaatttcattgggcaccgttggtgcctgtgccctcagacgcaagaaccttcggacatatgcctgaaggtattcttcgtggtcctgattgcactggaacagagcctgagcagtgaccggcttagtctgaaatccttgaaaactggttaacaacaaatccttcaacttctgccatgaagtgatcgttcctggtcgaagggaggaataccaggtttgagcaacacttctaacagccataacaaaagatttggccatgactgaagcattgccaccatacgaagacactgttgcttcgtagctcatcaaaaactgcttcgggtctgagtggccatcgaatacagggagctg

SEQ ID NO: 71061 - DNA, 337 bp, Zea mays
agctagtgagagaggttgatcccttatgggctagcccgcgaagccagagccgacccattttagagctagcgcctcaccacacattgagattcagccctattagaatcaactccgcatagcctgccctcgaatacacccctaaatgcagcgtaatcatcacttgcttccaagacaataaccccttattccgcagaaagacagctgtgacccattctgctaatcgagagaccgaaagcccgttacaatccaacgaatctacccgaaaaacattggaaatacaatggtcacgtgagaattcaattttaccaagtcctttgacccaaccttacattccatc

SEQ ID NO: 71062 - DNA, 490 bp, Zea mays
  unsure (1)..(490): unsure at all n locations
tctcttttaaaagagcanaagaatcatcttgtgactgccctcaattaaatgaaacacccttcttggtcaactcatgtaatggggcagcgatggtgctgaaatccttcacgaaacgacgataaaattctgcaagtccaagaaaactccacacttgtgtcaccgtcgatggcattggccaactctgaatagcatgcaccttggcctcatcaacatcaataccctatggagtgacaacatagccaagaaacgatactcgttcggtgcaaaaggtccatttctcaaggttagcaaataagcgtgcggcgcgcaaagcatcaaaaacaacacatagatggtcaagatgttcagataaaaagtgttgtagatcaagatatcatcaaaataaaccaccacaaattttccaataaatgggcgtgttggggcgaaggcgaagacactacccttcgctccaggccttcgtcaccttgacgcaccaacagaagcatgatga

SEQ ID NO: 71063 - DNA, 343 bp, Zea mays
agctatgatatgggtgggacaagtcttatttttattccataggacgcaagaagcaagtacaataataaatttaaaactcacctcaaaaacagattggttttccttgaagactagctttgatgcatctgaatgaaaaatcatctcttcttcaggagtgccaacttccacttgaatctacagagtaagcatgtaacttgtatggaaagcttaaaatattgaaatttacaaaaaaacaatgttcaaagaattttaacatgttttaacaccatactagagaatgacgatatcacatttactacttattataacaagagaagggtctatgctataaaaaacatgttga

SEQ ID NO: 71064 - DNA, 477 bp, Zea mays
gacccacaacaacttaattcatgtaggatgacgaagttcttaccgacgcttaaagagtatgacgccgaagctgaggcctcatgaagatcactatgagtagactgtagacaaactcaagaaactcttgaaataactcttgtaaatatgactaaactgttcttaatgaattctgttcataccttgtaatatgctcttacccttccattaatgtatgagagacgctctgatgtggacgaaattatctttttgagccgaaggcgaaaaaacaccttcccttcttttcgtacacagcgaagcataaaaaacaacttttccttttttccgaagctcttctttgtgtacacgacgaagtacaaaagacagttttttcctttttgccgaagcaaccacttatgctatgatgatggttatcctacatatgcctgaatgaatgttatgaatgcaaatttatgatgtatgtgatgtgcaatgaatgtc

SEQ ID NO: 71065 - DNA, 336 bp, Zea mays
agctttaccaatatggacatgaatttttttttctcaatggaccaatcaaggaagaggtctatgttgagcaacctcccggctttgaagatagtgagtaccctaaccatgtttataaactctctaaagcgctttatgggctcaagcaagccccaagagcatggtatgaatgccttagagatttccttatcactaatggcttcaaagtccgaaaggccgatcctacactctttaccaaaacacttgagaatgagttgtttgtatgccaaatttatgttgatgatattatatttgggtctactaacgaatctacatgtgaagagtttagtacgatcatga

SEQ ID NO: 71066 - DNA, 426 bp, Zea mays
  unsure (1)..(426): unsure at all n locations
ntgaaccgtttagtattagttggtgatggtggatatggatgtcgattaaatgtgattgtcggccatcgtgccgttgatatatgtgtggatgtcagccattgtgttgtcagttttatttgcaggttttggaaacctcccatgcaggggaggtgttgccgaaattttttattgacaggcttgtttttttttgcagaggtcttcctagccgttgtgggtctgcctgcaccgcgtcgagtcaccactgcaccaacccgccacagccccgctagcctgactccaccgtcaccctaggtataacctcaattttcgcatcatggtcgtagatcacgtaacccagttagtcatctcccatttgaaagagatacgatgtagatatgcagatctttgcatatctacaaatgtatctggttcgaattgccatatttt

SEQ ID NO: 71067 - DNA, 315 bp, Zea mays
agcttgacattgtcaccctgttttatattctttgccatccttaatgctagggtggctcccactataaagcatactacgagcaaatttaaatttttcattttctaagacatactcattaattttagcactaagttgagctatgtgatcattctgttggttaattaaagctaggtgatcatgaatagcatcaacattatatatctctacatctagtgcaaatagtaacatgctcaacgttagatgtagagggtttgcaagtatttaattcaacaatcttaccatgtaaaataacattcccatctctaagattggaaa

SEQ ID NO: 71068 - DNA, 474 bp, Zea mays
  unsure (1)..(474): unsure at all n locations
tcgtagaataatctccgaagctatacctcgaaaatcaatattggttctccctgtaacttggcatgatctgccccttttcaaagcattttccgaagattgataacatgcccccttctcgtgccacatgcagcatgatgtatgatgattatgctatgcaaaatgatgtgatgatgttatgttatgcaaaatgatattttgtgccgaagatacacacattcctgcaatggggcacaatctnttgtatcaatactgactctttcattataagcctcccttaggagcttcttcgccttttacttcatcggaatcagcgtgtatttttcgctgtaagttctgcatccncttaagaacgtctttggaacttcttcgccttttacttangcggtataagctctgcattcccttacgaacgtctgtggagcgttcttcgcctttacttaggcggtatcagcgttgacttttcgctgtatgctc

SEQ ID NO: 71069 - DNA, 337 bp, Zea mays
agcttctccaaaatcttgaggttttctgtgaacctcgatcagacacaatcttcttcggtactccatgcaaacacacaatccgagccatatataactctgctagctgagaacctttataagtagtctttacaggaataaagtgagccactttagtcaatctatccacaatcacccatatagcatcatatcctttctgggtgcgaggcaatccagtaataaaatccataccaatctctccccacttccactcgggtatcttcagtggatgcaatagtccagctggcctatggtgttcagccttaactctttgacatatatcgcacatagccacatgtgc

SEQ ID NO: 71070 - DNA, 472 bp, Zea mays
  unsure (1)..(472): unsure at all n locations
tcggcatctntatttatctcttcttcttgagcccctggtgttcaatcggcgatgaagtctgctaacgcctaggactgaattgaagatctatgcacataatcaatggtgaattcattaagctctgcagcccattttccaattcttccagtagcctctctgttcctcatgatgtcctttagaggttttgatgaaggaacaattatatggtatgcttgaaaataatgtcgaagctttctggaggccattaacacagcatataataccttctccaattctgtgtaattnttctttgatggacttaaaacttcagagacgaagtatactggagcttgctttttagcctgaccatctagcttctcctgtaccagtgctacactcactgcagaatacgaagctgccacatataagagcaatggagcccgtggcgcgggtggagttaatgtntgtaagtcaatcaaatattgtttaactc

SEQ ID NO: 71071 - DNA, 339 bp, Zea mays
  unsure (1)..(339): unsure at all n locations
agcttcacatgtgtcgtatgagtcatttttttacgaagctaaaagcccatcagaatgaagcttcttcatgcgattctcacttatatgacccaaacgacattgccacatgtaggtaggacttaaatcattaggccgaggccttttagcactaatattacagataggtgcatcatcaagatttaaaatgaataacccattcataatggatgcaaaagccacaaacatgccattcttagagatcacacaaccattgttttcactcgcaaatgaataaccattcttcatcaaacatgaaggagacataatgtttcgactcatactangaactagataacaatt

SEQ ID NO: 71072 - DNA, 470 bp, Zea mays
  unsure (1)..(470): unsure at all n locations
tggtgtgatcttgctagtctatcaaagacaatggttcagcttgataggcatattgtgtttccattattaagactgagttgtctaacaagatgtcagatgattggttaaatgacttgatggtgtgctacattaaaagagaaatttttaaaagactcgacctttagaaaaccaagaagtcatttcaaaataagaaaactagacaaatgcaattgcctaaatctcctagaactagactcaactagaggtatatttttatttcacttgttcaatttttaccttcaattgtcattggtaactcattttttctttnttccagattttgttcgttatatnggcattggttgtaaatagattataatcaagatgtgactattaaataaggtatttntcgatatctattacttantttgtagctacaaattactnntaagtgtgttgtaatttttaattcgtcgtgtgtagcaacacct

SEQ ID NO: 71073 - DNA, 345 bp, Zea mays
cgcagctgcagcttgaatgcaactgacactctattattcattgactagcaagctacaactccgattaaatggtttgtccgactacaactctgattaagcaagattaatctattatcttcctacttatttttggctaaaataatagtatagcctgtcaattcgaaatgcaacaaccatacagggaccaaaaatacagctttatgaagtaatttcataattgacaggctatgaagaaatttcagttatataaataaataactatctatgctcctcttctttctgtggaggctacagatctgcgcaagatagtggcttccctggaagaaaagatcaatgctgagataa

SEQ ID NO: 71074 - DNA, 354 bp, Zea mays
  unsure (1)..(354): unsure at all n locations
gcccctcgccatagctcgcatgcctataataattcttttgctaagtttttaattgtgtgtgatggtgaattaggaagaagtttgattaattacactattaattntttgaaaaatgatggtgtgtgtcatatctgacgaatatccgaaatctgatgggtacgagtgtggatataaattgctaccgcgggtatgatcgtgggtggatattggttgcaaccgcagatgtggttgcgagcagatatttgaaatattcgatctgaatctaatctgttaccatccctacacgcatgtctcataatattcagtttctcatagtagctagattatccaagaattcaattttaaaaacttttt

SEQ ID NO: 71075 - DNA, 336 bp, Zea mays
  unsure (1)..(336): unsure at all n locations
agcttatgaagaggcttcattccaacttgttctagncggcggagccagagccaacccatgtttgtcttagcaattaagcaagtgtcgagttcagctctatcaaaatctaccaggtatagctgaccctccaacactcccttaaatgctattgaatcatcacttcttctaaagacagtgacacctatatcagtaaaaagacagttgtagcccatttgacataattgggaaacagaaagcaagttgtaatctaatgaatcaacaagaaaaacattggaaatggaatggtcaggtgaaatagcaattttacccaaacctttgaccaacccttgatttcca

SEQ ID NO: 71076 - DNA, 486 bp, Zea mays
  unsure (1)..(486): unsure at all n locations
tggcactngagaaaagcataacatgttgagattattcagttaaatagcattatcaaatagcagcagcatttaggtaaattgccactgatagcttaatagttagtaggggctatacagatggatcatgtttgctatatgagtgatactcatgcagcttcagctctgcacgcaatcataatctgcaacccatcaatacaataacaccacccacttaacatgtactaacgcaagctattatctaaataaatgtactttaaacaagaaagcaagaacgagaatagtagcagatatgaagtgcactattgcatttggagttctaaatttattacatttccactaaagcacctctcgacaacacgacaaaagtttagtaacatcacaggaggcatcacttcccgcttccatcgaattcatgtgtattagcatgcanaaacataatggcacaccgtcagtcctctcaacaacggcagctaacgacgagcattt

SEQ ID NO: 71077 - DNA, 480 bp, Zea mays
tctattgtaatcatgataactaaattacataactatccttgcacatggtttggggccccacttgatgatgaatgaggaatgggtcgctagggacttggtctaagagaaaagtccacgttctccggggtggtccaaagctgggtagccgcttagcctagtcctgtaccataagcctacaccttccaccaacctagaatagttgatttagtaccttctaggctaagttcctaggggtacaggcttcgttcagatttaggggtcagccccaaagataggtttgacaggactcgggtgcatgattcagagaattgaatacaacaaaagtaagggccctaatggactgctcccaggcgttgaccctggaccacgcctaggatcgacctctagttcaatggtagcctcgaacaaccaaagctaccatagccctagggagaagacgtcggttacctcaattggatgcacttacatgagaaacaatct

SEQ ID NO: 71078 - DNA, 253 bp, Zea mays
agtgcctataatcttaaccctggcgcggccgcgaataaataccacaatttcctcatcaacacccctgaagagcatcgatccaggtcggaagccgcacgataaggcagaaatctctaattctgagaagaccccttcggaaagctactggctgcccaggtgccgaaaggccaaaaccactatttctgaagagttctcaccaattctcttcccccttatcacaggccctgcgaccacacctttcctaacaaccaca

SEQ ID NO: 71079 - DNA, 493 bp, Zea mays
  unsure (1)..(493): unsure at all n locations
aaactaagctttgtacccaactagatgttcctatgatcaaatttccttataatagataagaatatcgtcgatgaataccacgatgaatctgtctaaatactccataaacaccttattcatcaaattcataaaatatgctggtgcattggttaatccaaacgacatcacggtgaactcatataatccatatcgggtcgagaaagctgtcttgggaatatccgatggtctaatcttcatttgatggtatcccgattggagatcaatcttcgagaataccctagcagctctcatctaatcaaataagtcctcaatacggngtaacagatacttgttcttcatagtaacatcattaagagatctataatccacacacatcctttgtgatccatccttcttatgtacaaacagaaccggtgctccccaaggtgaggaactcggacgaatatacccagcctcttgcaactcccgtaactatttcttaagtcccttaact

SEQ ID NO: 71080 - DNA, 299 bp, Zea mays
cggcggggccagagccgagccatgttagtcttagcaactaaccaaggggcaagttcagctctatcaaaatctaccaggtgtagctgacccttcacactcccttatatgctattgaatcatcacttcttctaaagacagggacacctacatcagtgaaaagacaggtgtagcccatttgacataattgagaaacagaaagcaagttgtaatctaaagaatctacaagaaaaacattggaaatgggatggtcaggagatatagcaattttaccacgacctttgaccgaaccttgatttcat

SEQ ID NO: 71081 - DNA, 363 bp, Zea mays
  unsure (1)..(363): unsure at all n locations
taatctcgcttcggcacacaagtctttcggccgctttctcttgcgcataggcgccacgggcttccggggaaggtttgtagatcaatcaacaataattanntgctattctgtggtgaagacaagggccataccaccaggatgtgccacgttaccatccagaaacagaaggagatagcagaagcagcagcgcaacaaagtcagccgaagcaggtcatgcatactgcttcgtatcatttgccttatattccagaatatgtaggcaaccaccctgcagcttctgttgcttcggcaagccaacctcattcatcttgagcagagcctccaccggcccaccggcacaaataggacatcatccagaaggga

SEQ ID NO: 71082 - DNA, 361 bp, Zea mays
ccttagagcccaccgcggcatgcaagcttgtttatactcggcacaataataatttttgacagcacagcaactgcagaccataccattgacttggcctttcgcatgctagggactggatatgattgggcctttcaagaaagctcacggaggatacactcatgtattggttgcaatcgacaaattcacttaatggatagagttcaagcccattgcttctttaacctctgctaaggccatggaattcatactagacataatattcagattcaggataccaaacagcatcataactgacctaggatccaacttcacaagttcagaggtattcgacttctgcgagccgacaagcattctgatcaag

SEQ ID NO: 71083 - DNA, 339 bp, Zea mays
  unsure (1)..(339): unsure at all n locations
cgcntaaaaggcaacataccatctatcttttccacnncgaaccacgccacatggggncagcatcaccaaaacctgctacgaaccctgtgcatctgcataatactctcatgtgtcaaccatcataaatctatgtaaaagatgataactgatgcacaccaaccttctttcacaagcatcattactctcatatttcactctgaacctcgaaccatcctaaaatggttgactgaagctcttgataaacctcgaaaatggtataatgaattcagattggcttaatctgtaagatttttggaaagcaataattgccattatggccatcattgtcggtggataaac

SEQ ID NO: 71084 - DNA, 452 bp, Zea mays
  unsure (1)..(452): unsure at all n locations
gtaacacatgttcatcttgatatcgacaagaattgtggcgcaggtgaagccgtgaagctagttggaacccaacatccgcgcaataccattctgactacagatctgtcgcttgagctactccacatggatcttatttgcccgattgcttacatagtgcatcggcgggaagtaatattgtcctgcaatagcggatgataattctcgcttcacttgtgttatgcgttttacaggataaatttcatagccaagagactctaaccggattttcgagacgggctcatattgagtacggcttaacgatcaatacatctagaagcgacatcgggacggagttcaataacttctaaattgaacgctntctngaggaggagggcatcaaacatgagatctcttctccctacacccctcaacagtatggtgtagaggagaggaagaactgaactctattgaca

SEQ ID NO: 71085 - DNA, 307 bp, Zea mays
acctttgggtggataggccatgtgtgcattcaacagaaccacacctagatcatagctcatcctgacggctctgaatacagaagctgagaattgcactgcgttgagttaacactatcataccccaaaataactctatatcctggcctttcaaaacactcatgttcgccggaaagattcggccggccctagatactggctctctctatgccccttctttagtaaatatacgttccccaggtgaacgaattgtaaatccctcctttgatttatggtgagcaatatgatgttcgtccacaaactttttgct

SEQ ID NO: 71086 - DNA, 467 bp, Zea mays
tggcactcacttgaaattcagtttagcttaccacccgctgactgatggtcagactgagagaaccaaccagattcttgaagatatgttgagagcttgtgctttgcaagacaagttaggttgggacaagaggctaccatatgcagaattctcctacaacaacagctatcaagccagtctgaagatgtcaccatttgaagcgatgtatgggaggaactgtagaactccattacattgtgaccaacccggcgaaaggcaggtattcggtctagagagtttgctcgaagccgtagagaatatcatgatggtccagacaaatctgaatgtatcgcagtccatacatcgaagctatgctgacaccagaataatggaactcagttttgaagtgggagactacgtctacttgaaagtgtcacccattcgaggaaccaaaagggttggattcaaaggcaagctatcacctcgctata

SEQ ID NO: 71087 - DNA, 265 bp, Zea mays
cgcagcagcaacccgagaggaaaaaaaattttatgaacccccaccgcaaacggaacacgagaaaagaaagccgcaagacgggaaacctccccgcgaggaaaggaaacaaccaaccagaaacgagacacgggaccaacacggacgccgacgccgaggcaaagacaacccgaggcggcccaacacaagggagggacgccacaccggcacgaaccggaacaacaaaaccgacccaaccgacaccaaacaaaacgcaggcacgaaaacc

SEQ ID NO: 71088 - DNA, 434 bp, Zea mays
cataatgcccaagatgcttcatgcatttaaagacttaatttataaactatctacgccgtgtcatactgtcattcaaaatgattatttagagttagaatcaggttaacaccagcgaaataatgaagttttcttctacaatggccaatgtgctaagaaaccacactgcattggcacaagtgactattgaagaccatcctcacttattggctgggaagcatgcatcattgcacccatgcaaacatgcaactgtgatgaaaaagatcatcgacgttccaatgtcggcgtgagtggaaccagaagttgacaagtaatattcctttatgcaccacccttatttttttgtccccaccacgttctaacttctggctcccctttagaacacgtaccttttcatattcttgaaatatatagcgacagtcataccgactatcgag

SEQ ID NO: 71089 - DNA, 334 bp, Zea mays
  unsure (1)..(334): unsure at all n locations
ccgggatccaagccaccgagcagcagcgaccaggggagcccttttttttcatgacggaaanccgcaaaatggaacaaatacgagcatgcgcatactgaaggcacacagcagcaactccccgccacatagagaatgaacatgagcataaagaagaacatggcaacaaaatactcacagggcaagccaagaaaaatagacgggcaggtaccgaaacgctcagcactaggtcaaaaccaaacgcggaaacagtgagcccggaatccattaaaaaagcgcaccccgagcaaagccacagaaacggctaccataaaccggaaaggccgaaaaaaacccc

SEQ ID NO: 71090 - DNA, 471 bp, Zea mays
  unsure (1)..(471): unsure at all n locations
ngccaattcttatcaaagcaacaacatntaccagcacagcaactgcagaccatacccgtaacgtggccatttgcatgctggggactggacatgattggacccttcaagaaagtttaggaaggctacactcacgtattggtcgccataggcaaattcaccaaatggatagaatacaaacccattgcttctctaacttcatccaaggtagtggaattcatacaagatataatattcaggtttgggataccgaatagcatcataaccgacctggaatccaatttcactagctctgaattctttaatttctgcgaacaacggagcatccaggtcaaatatgcctccgtagcacatccaagagccaatggtcaggtggaaagggctaatggaatgatactggaagcactcanganaanagtcttcgacaagaatgaaaagttngcagggaagtggatcagagaataccttatgtgg

SEQ ID NO: 71091 - DNA, 439 bp, Zea mays
taccagaataaataaacattctattcaaatataacctcatgtccccacatgaaaacgttaagtgaaatatagattatattgattttatagtccaaatgtattttgagaactatatgtggatatatgttgtgtccccataaaaattcatgaaatttttaggctatttggtgtattattaatttcttgttgtagaaaatcatcaacatacaattaaattcataaacatattgtagcgtcgaccgaatattgttaataacttaccatatataataaatagtttataacaagataatcttaagttcccacatggagataatcttaagtcctcacatgaatatgataaagtctattattttgatataaatctagatatctttcaatgattctgggctaaagatatgtttaaacaaatatgtgatgtgctacacagttatagctc

SEQ ID NO: 71092 - DNA, 310 bp, Zea mays
agctttgaatggtcgttttctcaatctgttccatcctagtatgtggcaagatgcttaagaaaaccgatgtaatcgcatcgagttaggtactgtttggatggatggatgatgagggatggagagggatggggtgggatcattctaacttgacccatgtttggtttggaggtccatagttatggtctagaaattttttttaaaaatagtggatgaggtcttcccttcaaaaataatggacggggttaacccagggttgatcctgtcccatccctctatacaccgaaccaaacacatcagttgcttttggttt

SEQ ID NO: 71093 - DNA, 473 bp, Zea mays
  unsure (1)..(473): unsure at all n locations
tcacactctanacatgatgatcttgtaatgctctcattcatttcatacattntctaacctttattttcataaaccttcacatacattgaagtaaattattcttaatcatttgcaccaggttggaaaagatgtcatattatatgctatgttgagatctaatttgcctgtggctaaagggacaattgtttcaactaaaccaagcaccacagttggaggccagatccttggaaggcaatattgtgaagttattgtaacttgtgtgctaaaacgacatacagttttgcctcgcccttgtgccaatgtggaaactatggctgatgcttacatgatgttagttgcatggccgtacaagaaagtaatattctatatcttatcttgtttatatttagaattatatgagccatcaacttaatgatgattaaccttgattgcaccagctgaagttggtgcataaggctgcaacaccgtctagt

SEQ ID NO: 71094 - DNA, 356 bp, Zea mays
cggatcttaagccccgcagctgcagcttataaaggacggaagattctttcctcaatggaccaatcaaggaagaggtctatgttgagcaacctcccggctttgaagatagtgagtaccctaaccatgtctataaactctctaaggcgctttatgggctcaagcaagccccacgagcatggtatgaatgcctaagagatttccttatcactaatggattcaaagtcggaaaggccgatcctacactcttcactaaaactcttgaaaatgacttgtttgtatgccaaatttatgttgatgatattatatttgggtctactaacgagtctacatgtgaagaatttagtacgatcatgaca

SEQ ID NO: 71095 - DNA, 479 bp, Zea mays
  unsure (1)..(479): unsure at all n locations
tgaagccatgataagtagcataggccaataatatacgaattgactcttgcttagctacgggtgcataggtttcactgaaatccaaaccttcgacttgggagtatcctttggccacaagtcgggctttgttccttgtcaccacaccatgctcatcttgcttgttgcggaaaacccacttggttcctacaacattttgattaggacgtggaaccaaatgccatacctcgttcctagtgaagttgttgagctcctcttgcatcgccaccacccaatccgaatcttggagtgcttcctctaccctgtgtggctcaatagaggaaacaaaagagtaatgctcacaaaaatgtgcaacacgagatctatgtggtacccccttatggatgtcgcctaggatggtgtcgacggggtgatctcgttggattgcttggtggactcttgggtgtggcggccttggntcttcatcctccttgtcttgatca

SEQ ID NO: 71096 - DNA, 343 bp, Zea mays
  unsure (1)..(343): unsure at all n locations
agccncggcccaagagcagagaccttttctgccgccagcgccaaagggcagaggcgccaggggctcagggggaaggcccggagaccagccaagaaaaatacaccgcctaaaccgaggtgaagaaaagggccataccaccaggaagcgccaagctaccatccagaagcagaaagaaacagcggaagcagcagcgcaacagagacagcccaagcaggtcatgcatactgcttcatatcactcaccctatatcccagaaaaaggaggcaaccaccccgcagccactggagcgtcggcgagccaaccccaagcatactggcagcaaccaccaccggcaaacgccgaa

SEQ ID NO: 71097 - DNA, 496 bp, Zea mays
  unsure (1)..(496): unsure at all n locations
ctaagcttggtgccgatggaganacananatccttganatcttggctgttattctgttagtccgcgacaacggttagctcggacggtactcctaagcggcaaacaatgttttgccagagggaattttgggcagtctttgatgttattgtataaacagccctcgcttcgatccatttggtgaagtattcgacggctacgaatgcgaactcgaggttcccctgagcggtgggcaggggcccaacgatgtccatgccccagcgctggagaggccatgtatgggcaatcatctttgtatactgcgaggggctgcctgaccgatgagaaaacttctggcaagcttcgcaagaccttgtgacccgatttgcggcgcagatcattgcgggccagtaaaacccttggcggattaccttggcagctagggcccttggccctgcgtgcgaaccgcacgtgccactgaggacttcacgangatctgcatgccttccgtttctgtgac

SEQ ID NO: 71098 - DNA, 344 bp, Zea mays
  unsure (1)..(344): unsure at all n locations
agcttctgtctgatcagcatagaacgtttaattatgcagcgacatcgncctaatataaaatgttaaaacagtgactaaaatatggagcatcttctttgtccagacacaacgaacgccatggtgcaaaatgcaaactgaagttaccatgtcttcacttgcttcatccagaggcttttcagaatcaagtgtctccagcaaagccagctcagatttcctgtctttaatctgcacccagcaacagatgtctcaagaaaaatactgccagaagaaataatcgcgccagttaacaaaaagaaaacaatgagacgatttcctcataattacatgtccatttaaccaacttc

SEQ ID NO: 71099 - DNA, 490 bp, Zea mays
  unsure (1)..(490): unsure at all n locations
ggtcttcttanatggcccgacattgtatggtgcgtttggtatgctattatatgattatagatttagtaacaaagatcgatccattcaaaaaggtgttgtgtgaagctaaagcatgcaattgatagagcctgctgtttggcagttaacacggtctttgattcaaatccttctacacaaattcctactcctaactntgaggtccatccacccaccgtgcataagacatacaagctttccttttattangtgcagaacttgcggtggcactcaatatttagaaggcgacgctgtttactgataatatatcaaactgttgctgatgttattacgttaatacgtgttggatctccacgcacacaccctggcctgtgcatttggtcattgcggtaactcatcgctgaacttctgataatcacacaagcaagaaaagtacaaaattagagacccaacaagttggctgattctcttgccagaaggcactactgactat

SEQ ID NO: 71100 - DNA, 418 bp, Zea mays
ctagtcttagctatgaagcatgcctctagaccggcctcttctttagcaaaaacaacataatatagtgagctgctaatacacccttacaagctaccgaaccatcacttcctctaaagacagacacatttacatttgtaaatagacacgcatatcccatattgcatagttgactaaccgatagcaaattatatgcaagagactctactattaacacattagagatagagtgctcattagatattgcaatattacctaaccctattaccttgccttgattgccatcaccgtatatgattgaatcttgggaatccttattcttgacgagcgaggtgaacatcttcttcttccccgccatatggtgtgtgcaaccgctgacgataatacaccttgaacccccggatcataaacctgaacgcaa

SEQ ID NO: 71101 - DNA, 336 bp, Zea mays
accttgatagacaggcataaatttgtatataatgcctaagctcaagaggcgtgcctaaaggaatggataccctacaacattacccgtagctgcaataaagtcgttcctaagggaacgcagcgtaagtcttctgctcaaaagataggttcctaaaggaatgcccgagccacacaataatgaatccgtacgctgtaaataagtcgttcccaagggagcgcatcgccagttttgtactcaaaagtcgatcctaagggaatgcacagccaaataccacccaaataggaagtgaataagctcacaagatcttcctaaggggatgccgagcctaaatgccac

SEQ ID NO: 71102 - DNA, 455 bp, Zea mays
aaactagctttaccgtacaactgtacacccgaatgtatgggattatgtcgggtgcgtctcatatgtgcgctcaagaagaacatcacatataatgccaaagagtatagagataaatgtcacaaataccatagatgtcattattacatagcggaagtcttacaaaaataaatgataataataaaacgaactaaacatccatccttggcaccataaagctgactcggagacgccacctagatcaactcgtactcctcattgtacgactcctcttggaccacatgttcttctcctgtggggggggggggggtatatatcgcaagggtgatctcacaaatgatcatatttaacaagttgtgggaataatgtgcatatactaccaatgtggatgttatgtgaagtgatcgtgatcaacatataaagttaagctgacattgttttataagttgtcaatttta

SEQ ID NO: 71103 - DNA, 337 bp, Zea mays
  unsure (1)..(337): unsure at all n locations
agcttgtcttcggctcagcatatcatctttatttctacagagcngcggaacgagccaatggcaaaactttcacatctatccacaaagatgctcctccacgaaaaaaagggcatgtgggccgatttgctacctgaggcggtctgggcactaaacacgactgagtgcaaggcgaccggcttcacccctttccgccttctatatgggtcggaggccatgaccccacaagatataaaacatggctccccgcgaacagtttcgtcagccgtccccgacgtggacgagcccacttcgaaggatctcatcgatggagaccgagtcttcgctctacatgccctga

SEQ ID NO: 71104 - DNA, 431 bp, Zea mays
  unsure (1)..(431): unsure at all n locations
tctatagggagaacacgtgataggtctaaccaatgttcatttcttanaagatagaccttgtgcagcttgtcaagcaggtaaacaagtgggaggagtacatcacagcaagaatgtgatgaccacgtcaagacctctggagctgctgcatatggacctcttcggacccgtcgcctatctgagcataggaggaagtaagtatggtctagttattgttgatgactnttcccgcttcacttgggtgttctttntgcaggataagtctgaaacccaagggaccctcaagcgcttcctaaggagagctcanaatgagtttgagctcaaggtgaagaagataaggagcgacaacgggtccgaattcaagaatcttcaagtggaggagttcgttgaggaggaggggatcaagcacgagttctccgctccctacacacctc

SEQ ID NO: 71105 - DNA, 343 bp, Zea mays
  unsure (1)..(343): unsure at all n locations
agcttctaaagggagaacatatcnttggattaacacangctcatttcgagaaagacagggtttgcaacgcatgtcaagcacgaaagcaagttggtgcccatcatccaaacaagaacataacgatgactgactcgccgctcgagctactccacatggatttatttcgtccgatcgcttacataagcatcagcgggagtaagtacctgtctactaattgtggatgattattctcgcttcatttgggtattctctcttatggaaaaatcacagaccccagagaacctaaagggatttttaagacgggctcaaaacgaagttgggtcaaggatcaagaatataagaa

SEQ ID NO: 71106 - DNA, 480 bp, Zea mays
  unsure (1)..(480): unsure at all n locations
tctgtgccananatcatagaaagctaagggatggttattttgttgtatatttccaaagnttaatgccaaaaaggcactttccactaccttgttatttgaaaaatgtcaaacagcagatttcatatttttcctatgttcttcataacaaaagattaactatcccacaggttggggtgttttcaccttggggtgattttcgtagggtttttataagtttttcttgttttcttaaaataaaaggtatcctatttattttatactaaaccagggtataatcaatttttctagtaaactacactgaataagtatactaataaaaatatggnggctccctggttctttatttaaatcacctttcctattttctttaaccttaatcataatgtaaaataaatggcaaactctaccttaatggngtgtacaaagaggtttatcatnnttaaacaggttagtaggtggtcatgtacttcttccaatttc

SEQ ID NO: 71107 - DNA, 485 bp, Zea mays
  unsure (1)..(485): unsure at all n locations
tgtacaccccacctcacatatgttaccttgccatatattatattctntgatttattggggagaccatttcttggtcagaaattcgtaggtgttagccttcggtattattgaaaatggtcgttcatgctattttcgataaaatttgggttgtgtggccattgatcatcgaccagaggctcgtacacctgaccccacatgtgtttccttgccatagatcacaatcttggatttctggtggagatcattttttggtaaaaaaatctgtacgtgttagccttcggtattattgaaaatggtcgttcatgctattttcgacaaanataggggttgtgtagccattgatcatcgatcagaggctcgtacacctcaccccacatatgtgtctttaccatagatcacattcttggatttctggtggagagcttttcttggtgaanaattcgtaggtgttagccttcggtattattgaaaatggtcattcttat

SEQ ID NO: 71108 - DNA, 340 bp, Zea mays
agctttgttgtcataatatcttgggtagtattcatggatactcgttgtcccgggaattcgatcattcaaacatgactagggacatattcccattgctctatttggatcgtagtggttcctagcccatagtttgttgacattgtcttcttcgtggtcacaaagacattcatatcagtactcactaatagaattgatcatgagcacaaataggcctttcattaagattctcttatataaacccttagttaagcaaccagagtttggctaggcctacttggtgaatctgggctcaacctattgagtttatggcgagaacattttctagggatgcttgagatct

SEQ ID NO: 71109 - DNA, 462 bp, Zea mays
  unsure (1)..(462): unsure at all n locations
tgtgaaggttcttcatccccacatgtgctaagcggcgatgccacagccagcccatgctagtcttagctattaagcatgcatctagaccggcctcttcttttgcaaaatcaactaaatagagtttgccgtctaatacacccttaaaagctagtgaaccatcacttcttctaaagacagacacatctacatttgtaaacagacagttataccccatgttgcataattgactaaccgatagcaaattatatccaagagactctactaaaaacacattagagatagagtgctcattagaaattgcaattttacctaacccttttaccttgccttgattcccatcaccgaatacaattgaatcttgggaatctttattcttgacgtaggaggtgaacatcttcttcttccncgtcatatggtttgtgcatccgctatcaataatccagcttgaacccncggatgcat

SEQ ID NO: 71110 - DNA, 320 bp, Zea mays
agcttctagagggagaacacgtattatgtttaactaacgggcaattcgaaaaagatataccttgtgcagcttgtctagcagggaaacaagtaggaggctctcatcacaccaaaaatgtgatgacgacatcaagacccttggagatgctgcatatggacctttttggacccgtcgcctatctgagcatatgaagaagtaagtatggtttaattattgttgatgactttttccgcttcacttgggggttctttttgcaggaaaagttcgaaacccaagggaccctcaaacgcttcctcatgagagctcaaaatgaggttgag

SEQ ID NO: 71111 - DNA, 447 bp, Zea mays
  unsure (1)..(447): unsure at all n locations
ntatcaaatggacgtgaaaagtgccttcctcaatggtatcttcaaggaagaggtctatgttgagcaacctcccggctttgaagacagtaagtatcccaatcatgtctataagctctctaaggcgctttatgggctcaagcaagccccaagagcatggtatgaatgccttagagattttcttattgcaaatggattcaaagtcggtaaagccgatcctacactctntactaaaactcttgaaaatgacttgtttgtatgccaaatttatgttgatgatattatatttgggtctactaacgagtctacatgtgaagagtttagtaggatcatgacacagaagttcgagatgtctatgatgggggagttgaagtattttctaggattccaagtgaagcaactccaagagggcaccttcatcagccaaacaaagtacactcaagacattct

SEQ ID NO: 71112 - DNA, 339 bp, Zea mays
  unsure (1)..(339): unsure at all n locations
agctttacttagttaattnttgttatctttactcttttggctcttctattgagcctttcatggtagaggaggccttgctagatccggattgggtattggccatgcaggaggaactcaacaacttcaagcgcaatgaagtttggacactggtgcctcgtcccaagcaaaatattgtgggaaccaagtgggtgttccgcaacaaataggacgagcacggggtggtgacaaggaacaaggctcgacttgtggcaaaaggttatgcccaagtcgcaggtttggactttgaggaaacgtttgctcctgtggctaggctagaatcaattcgtatcttgctagcat

SEQ ID NO: 71113 - DNA, 447 bp, Zea mays
  unsure (1)..(447): unsure at all n locations
ntaccaaatggacgtgaagagtgccttcctcaatggaccaatcaaggaagaggtctatgttgagcaacctcccggctttgaagacagtgagtaccctaaccatgtttataggctctctaaggcgctttatgggctcaagcaagccccaagagcatggtatgaatgcctaagagatttccttattgcaaatggcttcaaagttggcaaggccgatcctaccttattcactaaaactctngagaatgatttgtttgtatgcgaaatttatgttgatgatattatatttgggtctactaacgaatctacatgtaaagaatttagtaggatcatgacacagaaattcgagatgtctatgattgnggagttgaagtattttctatgattccaagtcaagcaactccaagagggcaccttcattagccaaacaaagtatactcaagacattct

SEQ ID NO: 71114 - DNA, 339 bp, Zea mays
agcttgacaacgaggagaagactcttttgatgaagagctttccacaaaacctcaagctaatgaaggggaagaactacaaaccccgctccaagagggtttgctataggtgtggtaagtctggtcattttatagctaaatgtccatatacaagtgatagtgacagggacgacgacaagaatgggaagaaaaagatggagaagaaaagatacttcaacaagaagaagggtggtgaggcacacatatgacgggaatgagactctgacgagagctccaccgactcctcctccgatgaggatgccgccgacattgtcgtcaacaaaggtcttttcttccccaacg

SEQ ID NO: 71115 - DNA, 493 bp, Zea mays
  unsure (1)..(493): unsure at all n locations
ngatacagagccgaaggtgttgagcaagaaagcttcgacgtatcagcatagagtggaaccgacttaaagatgaaaaggctattcagacctcaatagattactatagagttattgtcagatgtaaagggtatgaatgtaattttgtaagggctgtgtcccgtgtctataaataggtgaacagtatccccgtactgttcacgctgactgggcattcgctttttgcgtcacgcttgtacaatcattttccttccgattgaaggtacacttgttgttcaataatgtttttgtttatactcaataataatgaatgattgttcatgtctccctttatattcttcatatntcatccttcgtcattatntgattaatttgtgaaggtatgtctttcataaccttcgttcgcaagtcattatgtcctaagggaaataatgcttcggaggacgaagggcattaacgattaacattntttatgttgccttngtcttaaactctt

SEQ ID NO: 71116 - DNA, 323 bp, Zea mays
  unsure (1)..(323): unsure at all n locations
accacgaaannaacctgggggatcatgatttatagaacacgcctcttctatattcccatatgcctttaaccttccaaagacaccaaaagcataagctttcgtaactcaggcaatgttattttgtgcacgctgaaatcaaagtcttgcctgcgtagcaacgttctaactttagagggtgcgaccaacacagcagctgcttctgccccgaaggttccccaagaaccatcgcagaatactgtccaaacttcggcatctttactcgcttcttcttcctgagcccctggcgtccagtcagcaatgaagtctgctaacacttgagactg

SEQ ID NO: 71117 - DNA, 475 bp, Zea mays
cgccagcatgatgtgcttcaccactccgccgcctgccatcttccgttcttgtttctcggctctggtcctctcctctccagaatggtaggtgcggcgggtatggtcacaagactttgctactttgctgcgcgacctgagaaaatgattaccagctgttggcgtggatctgaatgacaatcacttactgtttggatcggtgtgaacgagagattggtcaggattaatcctggactgacctcgttccttgttctttgagagatgacatcatccaccattttctaagaatatttcttgaccctgactctagatttctaaatcaaacgcgggtcaagttaaaatgatttcatcccatctctcttcagccttctcgtcctccatccaacacacttagctatcttcaacaacgttcctacatccatctcctcaaaaatattattatccttacagcacactctataattctgcctctatatct

SEQ ID NO: 71118 - DNA, 363 bp, Zea mays
gattcttaagacacctgcggcatgcaagcttataaagattcttcatccctttgttttttagtccgcgatgacagagccaacccatgttagtcttagcaattaagcaagtgtcgagtttagctctattaaaatcaactaagtatagctgaccctctaacgctcccttaaatgctactgaatcatcacttcttctaaagacagtaacacctatatccgtaaaaagataattgtagcccattttgcataattgagaaactaaaagcaaggtgtaatttaaagattctacaagaaaaacattggaaatagaatggtcaggtgatatagcaattttaccaagtcctttgaccaaaccttgatttccat

SEQ ID NO: 71119 - DNA, 440 bp, Zea mays
  unsure (1)..(440): unsure at all n locations
ggtgcanagtccactcgaactaactntcggagaaagcccgacccctctgcaacatgacaccagagggtcaaactcaacgggcaatggatgaattcagaatcattgcagagcatattggtaccagggatctggttcaagaatttttagcattcaaagtcttccctactctgaaaaaatgggaaatgccaaagttaaagggggagaagaaggaaggggatcttgtccggcttccttaccacttcanattcaagaaatattttaagaagccctgccaagagtggctggatacagttgaggtgatgtgtaatgaaattcttggaaattattcgaaaaaagaagatcaactgatgacagcagccttcgacacccgtccgaagcgaaggctgaaccgagtgcttgatgcactgggtttcgaatatcctgattatgcgcagctgaac

SEQ ID NO: 71120 - DNA, 78 bp, Zea mays
agcaacgccacgccaaaggtgacaacttacgcaggatggcataatgaccgtaattaaacaaaccgactgaaagtataa

SEQ ID NO: 71121 - DNA, 414 bp, Zea mays
  unsure (1)..(414): unsure at all n locations
ctaagctaagtacgaaaagcgacccttaccatcggttgccaaagaggagcatatttctatgtcatcacacgagtttcttatggcaaaataagagatgtaagtagtcatacttccatctgttagaggttggtgaacactatctctaccgcaaactttctaggaataaatgaggcatgcactaagattctaaacaaaanttagttcaactaacaaagttccacaagtcttgtgttacaaatacatggacattccagaataaagtgggaaaatggggtcaaatctctaatagtcgaacttcttatggctgaccactcagtcccactatggtgacctcaccttgttaccttcaacctccatgcatagaaacacatgtaagatcatgtcaagcatctgatccaagttggtttcataact

SEQ ID NO: 71122 - DNA, 311 bp, Zea mays
  unsure (1)..(311): unsure at all n locations
agcttgatgaagaggaggacgcttttactttattcccnggngcagacgccgagcctacggctatagatcttgccatgacaatcgcccaaaggatgttcctcaaaatgaaggaaaatgaggcgaataacacgattgatgaacaataacatgatcgttggacaccaactgatgaatccacctctatacaagggtcgtctttcaaacccacttctcctatgtgcctttgcgctaatgggagtgacatcgcaagcgaaagtgaggatgaggaggaacatgaaattgtttctgaagatgaacgatgatcttgaaaa

SEQ ID NO: 71123 - DNA, 490 bp, Zea mays
  unsure (1)..(490): unsure at all n locations
tntacagggagaacacattctatgagtaacaaatgttcattttgagaaagacagggtttgtagcgcatgccaagcaggaaagcaagtnggagttcatcatccacacaagaacataatgacaaccgacaggccactggagctcctacacatggatctattcggcccgatcgcttacataagcatcggcgggagtaagtactgtctacttattgtggatgattattctcgcttcacttgggtattctttttgcaggagaaatctcaaacccaagagaccttaaagggattgttgagacgagctcataatgagttcggcttaaggatcaagataataagaagcgacaacgggacggagtctaagaactctcaaattgaatgcttccttgaggaggagggcatcaagcatgagttctcttctccctacacgccacaacanaatggtgtagtggagaggaagaatcgaactctattggacatggcaagaaccatg

SEQ ID NO: 71124 - DNA, 335 bp, Zea mays
  unsure (1)..(335): unsure at all n locations
agcttctgtcctaccttgcgctaagtctttctttcctaaaantcggcgtccctcacgtctttgaggtaataggaagtgttatatcgtgggtagcatggcttacccacggagttgcttggatttctttctattgattatgggttcgccttgggagggtgcattgtcccttcccatgcattctgttcaccgaaagaggaaaagagagctatctcatgctccttgttgacaacggagattacgacgagcctctttttctgtggggcgggacctcgggtcccttgctcattaccgaggatccgactgggggcacaatctatcttttctctattccttcc

SEQ ID NO: 71125 - DNA, 479 bp, Zea mays
  unsure (1)..(479): unsure at all n locations
actcagctaaccctaatagagattaaaggggtaagacttaacccttgttgagacaacctaatagctctatgggaatagtcataaaatattcccaaaaataaagtcgaatcacatttatacccctgaggtaccaaaaatccccatttgaaccctgtaaaaccctagaactaaaaccttgtggcctatgtgcaaaaactgtgcacatttggaccaaagtgtgaaaattaccatgataaagcatataaagtcacatggttcacatttggaaagatttacaagccaaaccctaagttttggactcatttgcaaaaaggcccctagttgtgatttcatgctaagtctgaatttcagattgatgagctcaactntggagccttgcaactcttaaaatataaggttattgctcctgggcaccacatcaaacttatagacctattaatggataacaagtttgcttaagagtgcaagccatgttcttg

SEQ ID NO: 71126 - DNA, 345 bp, Zea mays
catgcaagcttgcatacagagcacccagaatatttttgaaagacctcccccatatgcgatgactaatgtgttctcaactctacttcccaccaagttctaaggatatctgaaagggaataggagtcttcctcgaagacaaaggctatcactccgcaactcatacttagccaccactccgagcaactctctcttctatgggggagaaatgagcatctacgaaaaggacttcatccttgggggagagagtaaaagcttaaacgcaaaaggacttctgctttggtacaattctaactcacttatatatgaccaaaggggaatattgcacttccacggctttaatgattc

SEQ ID NO: 71127 - DNA, 487 bp, Zea mays
  unsure (1)..(487): unsure at all n locations
tagagtgagcaaatccggatcccaacaagaaggcttgtgttctgttgaaataattgtacttcgacatctctttaaaaaatagcacctatcttaaagcagttctgaattagttaaccattttgttaattattttcatctgaataccttctggactctgaacaatcaggagcggacttgctccagtccagcacaaggcaaagcgaacacagagctctcatagctccggttctagtaagaatcactccggtaaagtcgagcagtaaaaatctaaactgctacatggtcggattggagtgaatctagtgattctagtctatgctttgtactataaagtaagagaaaaaaaaatgtttcccaccactctcaacttgctcttttactctctaacctctgaatcacttcagactatttgtcaaacagttttcgtcanatagattcacttctgctagataatcactcataatcactctattagaaaatcgactct

SEQ ID NO: 71128 - DNA, 333 bp, Zea mays
gcatgcaagcttggtggagagcaatatcttgatttattctggtaagaagaggaggcgggctaaacgttataaggaggtttcttggcagtccacagcttcagtgggtgccgcttcgaccttggagccctcgccaggagtatggacccagtctagagtgaagacctgtgtgcttgagttctccactgctatggctcgggaggaggcggctcttccccgggctttgttcgactctattgttggcagcaggccggagatcagtggagctgaagtgcgggatgaaatggctcgggcttttggaattgaccgttactcaatatcgaatcatcagtcatt

SEQ ID NO: 71129 - DNA, 484 bp, Zea mays
tataacaagataatagaggcaagagctcgtccatatgtattaatagaaggggagctgtacaagcatggggtctgttctccgttactcaaatgtttatccagagccgaaggtatagaattgatgaaggaaatacatacaggcctgtgtggatctcacattggatctaagcctttgctgggaaaagtattccgtcaaggattttattggccaaaggcagattcggatgcagcggagttagtccaatagtgcgaaggctgtcagaaatgtgcaagagatcaaaaacaaccttcgtctctaacccagttaatacaacccacttggccattgcaaagatggggccttgatttgttaggtccgctaccaccagcacaagggaacttaagatatgttgtagtggcagcggaataattttctaaatggattgatgcaaagcctttagccacaataacttcggttactattcaaaaagttctctggcaaaaca

SEQ ID NO: 71130 - DNA, 341 bp, Zea mays
agcttatcgaatttcacagactctctctgctgaaaagcttactagtaggggatgcttatgctcagcttttacttcaccagttaagtacttttcctgaatctagatttttctaatctagatcattcacttgtcctacactagattcattctagcagctttagtttcacttgttatctacgatgcaggacagtgatccagtcttcatatccgagaagtaacggcgatccgaatcgattaatacccagctggggatctccaaccacacgacatatgtagcacttaacccttgcatatgtcaactcgccaccgggcttctcaagaccagaacgggttcacgcgac

SEQ ID NO: 71131 - DNA, 484 bp, Zea mays
  unsure (1)..(484): unsure at all n locations
cgtcgtctaatacacctttaaaagctgatgaaccatcacttcttctaaagacaaatacatcaatatttgtaaataaaaaattatatccatatgacataattgacttatagacagtgaattgtaaccaagcgattctaataagaacacattagaaattgatgctcggtggtgatggctatttttccaaaacctttgaccttgccatgattcccatctccaaagatgaccgtgtattgtgaatctttgtgcttgacgtatgaggtgaacattttcttctcccccgtcatgtggattgtgcatccgctatcaataatccagcttgtgcccccggatgcataaacctacaagatgatttaagcttgggttttaggtacccaactcttgttgggtcctatgaggttagtcacatgagactntggaacccagatgcaacttttgtctctcttgcacttaggccccaaatntctagcaacaactctatcat

SEQ ID NO: 71132 - DNA, 315 bp, Zea mays
  unsure (1)..(315): unsure at all n locations
agcttagtgagggagggccgttnatgatttttagatacngaaaccgctatactactataagatcaaataatctgtatgagcagaagagacgatttccatgccctgagctgacatcacaaagtgatgatatcgacgggtcatgacgcggtatccggttattggattggaaaaaagcctgttaaacatgtgaaagccagcagggttcttgatgaggatgttggccctcaataatcgatttgcttgggataaagaggtgtattaaatacactagaactaacagttagttgcttaaattagtccaagacatacaaatag

SEQ ID NO: 71133 - DNA, 481 bp, Zea mays
  unsure (1)..(481): unsure at all n locations
gacctataaaactcaagcttccaagagctctgctataaagctgtgggactcttatatttntcttacaaaaaatattttattgaacacttctagaataccggaccacaggcactggtcttattaattgtgttctgtgcgaaattaaattaaatgttgttgttgtattgtagtgtcttcgttcaccttcttttatcttttctggttaattgcgcaaagataaaggataccattattatttcctataaccagtgtgaatcatacgtactaattntacagagcatgtgcacagtttcttatattttttatcgtgtgatcttaatcctgccatagtaattgttttgctaattagttaatttaaagattatggctgctttaccactacaggccaacatcttttacaattaanacttgctcatgccactatgttaatactatgctagtatactgccatgtgaggtaaagtaatgtatctaacttatgc

SEQ ID NO: 71134 - DNA, 337 bp, Zea mays
catgcaagcttgcggaggcctcggacttttatcttttttcaccggaggcccgagaacgacgccttcggacttcggtcttccgccgccgcgcgtggaccgagctatacagtgagtcttcgcccaattcctttcgctcatgttttctctggcatcccgtgaacctccctgacctatttgaatgaactatcttgccgtgactaggccggactcctcgccaccgacgagcatcctcgtctgcgcgcgtggaccgaccgacttcggtcatctacgacggcgttcccgcacaccgctgtgatcactgagaactacccttaaacctcgaacacattaccggaac

SEQ ID NO: 71135 - DNA, 482 bp, Zea mays
cgaagtcatggtaagtagcataggctaataatatgcgaattgactcaagcctagctacgggtgcataggtttcaccaaaatccaaaccttcgacttgtgaataccccttggccacgagtcgagctttgttccttgtcaccacaccatgctcgtcctgtttgttgcggaagacccacttggttcctacaacattttggttaggacgtggaactaaatgccatacctcgtttctcgtgaagttgttgagctcctcttgcatcgccatcacccaatccaaatcttggagtgcttcctctaccctgtgtggctcaatagaggaaacaaaagagtaatgctcacaaaaatgtgcaacacgagatcgagtggttacccccttatgaatgtcgccgaggatggtgtcgacggggtgatctcgttggattgcttggtggactcttgggtgtggcggcctttggtttcatcctccttgtcttcatcatttg

SEQ ID NO: 71136 - DNA, 343 bp, Zea mays
agcttctacaactgccttataatcgtttatgactgattctaacattacattaggcaaacaatgcagtttctgaaatctgtacagaatttagatagattcagtcactgaatttgcaaaaatcataacttctaaacaatcagacttatgcctgtcaaattttaacaccagcaagataataaagttatctaccacttttctatagcatatatctacagaaaatacaatttagttcatcaaacatacagcacgacaaaaacagcgcgtgcagcccaaaacaacaattattaaaattcagcttctatttacttcaaaaattgccgcgttctagagacttgacttattc

SEQ ID NO: 71137 - DNA, 491 bp, Zea mays
  unsure (1)..(491): unsure at all n locations
nntgtgtctntctccggggactntattttccttacaatgagactactacatgaaatagacttaaaaaggtattagtctcacagtcttagattatagagtaatctccccctgaaagtgtgcatacaagttttgaatacttgtaggagacatgcactttgatttgatatcaagaggggcaaattatctataatccgagctttggcacatataagttaaatgataccaattgaagcataccaaatgaagtgttataccacttaaagtatttcacaatatcaattgatgtatcattntntaggaatattaaataagctatgtgtcgagcttaatcatttaaaccatgtaggtttgctcaagagtacgaatngaaagtgagcaatcttaccatatgatttacctagtacgcatgcatttaaacaaaagtaaataccaattgaaatactangtatgacaggtaaaactagatacataagaatagatccgcatatcta

SEQ ID NO: 71138 - DNA, 337 bp, Zea mays
agcttgaagtgcgaaaaggcctcggtttgttttattatttacgaaggcttatttctaacctatttgggaagattgatgccttcactcctatcattcggcttaaaaatgacaccgaattcacctgggggcagaacaacacgaagcgtttgatctcattataaagtatttatcttcgtctcatgtgttaaaagtgccacatgtaatagtaccgttcagattatacattgcagctgaagataaagatattggagctattctgatgcaagagaccgaatgaaaggagcatgtggtaacctacctaagtcggaagctggtggatgctgaaatgaggtacact

SEQ ID NO: 71139 - DNA, 481 bp, Zea mays
  unsure (1)..(481): unsure at all n locations
gacctatgaaactaagcttaacggccgaagatacanatctagagagcacattntctgatattgataaaatgcttctggatatggccgcggaagaagctggtacatccgctgaagagaacctgaccacagtgcctggaaaagaaaaagagaaaaccaaagatacttcggaggaaaaggacttcgatttccaaaacataattggtcaggagttatctgaagctgagaaggaagagttgaaagattatgctatatcctgtggttataaaccaggagcgctgctcttcggcgacattgacgatgaaagcttangttgcctccgagaccgaactggagcgaaggttatcagtactctctcaaagagtattggtttcccaaagcttgaggccgatatcagccgctaccgacgacatcatatcgtcggtagtttgttctattctaatttcaaggtaaaaaattttcttcgacttttcattngtttaac

SEQ ID NO: 71140 - DNA, 347 bp, Zea mays
  unsure (1)..(347): unsure at all n locations
gcatgcaagcttcggtatgatagcaacaaaangtaatcttcttaaagatgaaaaggctattcagacctcgatagattacaatagaactattatcaaatgtaaagggcatgaatgtaattttgcataagctgtgtcctgtgcctataaataggtgaacagttcccccgtactgttcacgctgatttggcatccacttttgcgtcacgcttgtactttcatctccttcaagctgaaggtacatttgtaattcaacgttatttctgtttatacatgataataatatataattgtttatgttggtcattatattctttacaatacattcttcggcattatataatatattt

SEQ ID NO: 71141 - DNA, 464 bp, Zea mays
  unsure (1)..(464): unsure at all n locations
tttatgctattcttatcaaaaattaatgcgaggtgtgcttctcttattatggngggcagcggctgtatgcaggtgatccaagtaatacaactacataaaaaagaattacaatgttcaatagcaatgtaagtagacataaccaacatcgtaaaacatgttacataactaccaaaagttagcaaccaaaaatgaaataaatgtgcatacggaanaaccctatacttacaaggacaacaatggagcatccatatatagtcgtggagacattngtggtgatccggttgtgccacttcttggcagcttcacatagatcattaaaaatcaactagcaccagtcgatctcatggaaacggtgcatttcttctgtgagaagcacctcatgatatgtgatgccccagctagcagttggaaacaacaaacggttgaatagaatgaggaagaaacatctgattgaaaggtcatca

SEQ ID NO: 71142 - DNA, 491 bp, Zea mays
  unsure (1)..(491): unsure at all n locations
tcggtgatggntaanaattntggcagcaaaacagtgcaaatagcagttaatgctgtggtaacttcacacctactcgtctgtttatatagtgctgcaggtaagaatgcgaagcggcagggtttttacaccaggcgggcagtaacttgtactcgctgcgcagtggaccgcanagaccaaacagtgactctgcaaggtgggaccgacacgatctcgggaaatggatcgtttctcggcaacgagctcagggaaggtgttttttggaccttcggcttcccgaagcttgagaggattttntttcacggttcaagctcgttacgaaaaacgatctagcgccgcgaaaggggctactgttgggtccatgcttcgttgcgccgaaggtcttgcgtgaagaagcagcttcngctganatcgtccccaggaaatggccgaaggttcctttntatagagcttcngcgttgcaaaccgacataaagatagaatgaaccttttat

SEQ ID NO: 71143 - DNA, 334 bp, Zea mays
agcttctggtagagactatgattccttgttccggagatcaagaacattccgggagtatgtgagtttccagatgtatttccggaagatttgccgggactaccccctgaaagagaggtagaatttgtgattgagctaaagcccggtacggctccgatttctcgaagatcgtaccgtatgccccctaatgaattggcagaattgaagattcaattacaatacctgctgaataagggatttattcggccaagctcgtccccgtggggttgtcccgccatctttgtgaagaagaaggatcaaaccttgcgcatgtgcgtggactatcggcccctgaatg

SEQ ID NO: 71144 - DNA, 468 bp, Zea mays
  unsure (1)..(468): unsure at all n locations
tagggctgatcccttagctaatctcggctgtgaacagcctagatgtgcgtgtaaagaacatggtggttatatatacagcctcgatctcgaaacagctaagctcgtgtcattaagaaatattagtctccatgacaccctgcagataggcatgcttgtttcttatgagaaagttctagtgaaccttattgattagtttgcttgagaaggatgcttctcaagcagtggttatggtatatagaatccgggaaaggcatagacccttcacggtctgtttgttttgaaatggattaaaagagattgggtgagatttaattctcatcaatccctcttaatccaccactaaccgaacaaatcttcaatggttattaactcatcagcatttagttnttgggatcgcgttagagcagcttataacagctaataataagtcatcatctcatgcatcatcaccatatgtatactactcct

SEQ ID NO: 71145 - DNA, 336 bp, Zea mays
agcttaatgcccctaagaaatttctaactttgttaagggaaagctcccatggttcaagacaacgagggttacattttataccctgccggttatcccgaacacaaaattaggagaattcattctaggaagtctcactctggctctcatcgtgcttttatgtataagagtaaggcatttagttctaggcaatccacacatgttaaattgcctaaaaggaaatctcctattgcatcaaatgagcctaacatttcatttaagacttttgatgctttatatgtgttaactaacaaattatgcaaagtagttgccaaatatgttggggccaaacacaaaggc

SEQ ID NO: 71146 - DNA, 482 bp, Zea mays
  unsure (1)..(482): unsure at all n locations
tgagacatcagatccgtgcacacacatcatccaagcgtctgcagatgtgaccatgaattattgggacgcaatgtgttattagctccactggaacttggacaggttttcctgagagaacgaacggctgaaacactcctgacatctgcagaactggacaacacttcaacgaaagaatgatgaaggcaactgctcccttcagtattaattaagcacactgctagcacttacttctgccaggataaggagacactttctaagattgcgaagctttagctgtagaaactgcccccatgctgcagatcatcaggtgggatcccccaaaaaacaaaatacttctggtgatcaaaaattaaaaaccattgccacaaatatgatcagagtgcacttctgganatcatggctgtggttcagacacacagacggcaccgagaagcatggtaaaactcaacaattattagagtntatgtatgattcctctcatg

SEQ ID NO: 71147 - DNA, 289 bp, Zea mays
tcagcggaagccaccgaagagagggagggccacgcaacgcaacgcaacgcacagacggaggaaggaggcggacaccggcgacaccgaccgagcgcgtccgcacggccggaagaaccgagcggcgacggagaagccagcacaagccaactcaggggagaccggccgaaggacacgtcgcactcaggaaccacctcggagagcgccgaaacaacaccccggtcgacgggactcaagcccccctaaaaaacacgaataccccggccgaaggacacatgccgcgcgctgaggg

SEQ ID NO: 71148 - DNA, 453 bp, Zea mays
  unsure (1)..(453): unsure at all n locations
tagaaggtgctctacaactntggtattgtcatcaccgcacgattaaacacttagcaaggtcaaaaggtgttaacacaacagcgctgtccagatttggacagattcagacttgtgactttaaaaattcataactgaagattcagatatccaaacaaagtgatcttagactttctggagagctaattaaatgttctacaaattatttataaacatcgctggctggtttaacatgtatcaagggtgaaatacactatgaagggctgtgctgtccaaactggacagattcagtcttcagactttaaacatccataacttaatcttcagaccaccaaaaatagtgatccaagactttntggaaagcttggcaattgcactatataacttntataatcaccaagaagtgattctgtgcttaactgaatcanacaacacaggtntcaaaatctggtctga

SEQ ID NO: 71149 - DNA, 342 bp, Zea mays
agcttctgcatatctggataagtgtttacttcctgaacccctagcgtctagtcagcgtttaagtctgctaacgcctgggactggatcgaggatctatgcacagaatcaatgctgatttcgttaagttccgcatcccatttttcaatccttccagtagcttcaatgttcctcataatatctttcaaaggctgagatgaagggacaattatatggaatgcctgaaaatagcgccgaagctttctggaggccattaagacagcatacaacaccttctccaattctgaataaattttttttgataagcttaaaacttcggagacaaagtatactgaggcttgcttt

SEQ ID NO: 71150 - DNA, 488 bp, Zea mays
  unsure (1)..(488): unsure at all n locations
ggccaagccctcggacccgaccggacttcaccggatgcccgagatcgacctcaccggacttcggtcttccgccgccgcgcctggactaagctatccagtgagtctccgaccaattccttgcacccatatcttctctggcaccccatgaagctctctgacccatccaattgctctatctcgccgtgaccaggccggactcctcgccgccgacgagcatccccgcctgcgcgcgtggaccgaccgactccggccatctccgatggcgacccgcactcccctacgtcctcgaccacttcaccggagcaacctcgccgccggtaagcccctccgccctttcttccgccgcagttactgtttaaaatagaagaaggacctcgggttaggatttgtagaacccgaggggttntctgcaatgtcagtgactcatgtgaatagtagcctaaggactgatccgcgaagaanacttaataacccgccagggaccccag

SEQ ID NO: 71151 - DNA, 342 bp, Zea mays
agcttcatcaatgcttcccgcgaacgtctatttgagaacgagatccgccgccgggaggagtacgatagggatcatgggatcccagctcggagtcaggccaccagaaccgagttaacgacggcctcgactggcgatactacccggggacggtcgaggaaccacaacaactacttccctccccgggacagacatcatcctcgatgataggaagacacgtgtggagtgtctgcccttactccacgccttagggccattcaatggcccactaacttcaaggtattcaatgtcgacaaatatgaacctaagctggatccatggggctggctggccgtctacaccacc

SEQ ID NO: 71152 - DNA, 477 bp, Zea mays
  unsure (1)..(477): unsure at all n locations
tctagaggtggaacacattntatgactaaccaatgttcattttgagaaagacagaatntgtagtgcatgtcaagcagggaagcaggttggagttcatcatccacacaagaacatcatgatgaccgagaggccacttgagttactccacatggatctattcgacccgattgcttacataagcatcggagggagtaagtattgtcttgtaattgtggatgactattctcgcttcacttgggtattcttnttgcaggagaagtcacaaactcaagacaccttaaagaaattcttgagatgggctcaaaatgagttcgtactaagaatcaaaaagattagaagcgacaatggaatggagttcaataattctcaaattgaaggatttcttgaggaggagggcatcaagaatgagttctcttctctcttacacacctcaacaaatggtgttgtggagagaaagaatataactcttatggatat

SEQ ID NO: 71153 - DNA, 341 bp, Zea mays
agctttatcaaatggacgtgattatttgtcttcctcaatggaccaatcaaggaagaggtctatgttgagcaacctcccggctttgaagacagtgagtatcctaaccatgtctataagctctctaaggcgctttatgggctcaaacaagccccaagagcatggtatgaatgccttagagatttccttattgcaaatagcttcaaagtcggtaaagccgatcctactctattcactaaaactcttgaaaatgatttgtttgtatgccaaatttatgttgatgatatcatatttgggtctactaacgaatctacttgtgaggaatttagtacgatcatgacaca

SEQ ID NO: 71154 - DNA, 447 bp, Zea mays
  unsure (1)..(447): unsure at all n locations
tagagagtctaagacatcaagcaagcgttgctaggcatgagctaaataattgagcaagcaaagcaggtggcagatagcgtatcaaatgtgctcggngtgagttcatatttatacgcccagggcgttccaaattggagggccccgtctgtcatcgactgttgctattctagcaaagggaaggtgtttttttggaccttcggcttaaggccttcgtccatatcgcaatttgaattcgttattctaacaaattaatattgcgaggggctactgttgggggccttcgtctttcaaaggtcctcaaaaacatgatttaacaatgtttctggagtataatacataaacaggtaccttcgtactcggatcagaaccacagtgtgagaagcacacaggatacgaaggttgacgcagcgccgaagctacgtgcaagggagcttcggcatgacagca

SEQ ID NO: 71155 - DNA, 338 bp, Zea mays
agcttacctcgaccaccatcactttgtttatgtcacaaaggtacaacatgaggtattatcactcttattttgagtagttgtactttaattccctctaaagcttgtgttgcatactcttaaattgtaagggggtgtaatgttagtgtgatgcatttctctgcttcataccctgttgtcccttgacatcatcctctatttttgtttgaaatgtggttttggtgtttgatgtcaaagggaagaagttctacattaaagcttacctcaacctaagagaaaagctcatcttattagggaaggtgtgttgtgtgctaaaacgctagaaatcaatcatgtgatga

SEQ ID NO: 71156 - DNA, 503 bp, Zea mays
  unsure (1)..(503): unsure at all n locations
gacctataaaactcagcttacttgttgaatattttttcttatctcatgctctcaacaacggcgcgcatatggtgtccacccncttcatcccacttataggcaggcactaatttatcattattaggtcccctaatctaatctaacctaatgatgaagcaggtgcaggagcgaggagaaagaagatccctggagacccggtgagagggtagagcggctcgtcactcttcccaaactgtccctgcctccatttcttttccttttgtttgtcgcctctcccttcgctcgccctgtctgcgctttcgctttcctttcgcctcccaccaccaaaaagaggagcacaggagaggtttgtgtgacagcgtgagcgagcgagtgatgattaacacctcagccggcagacagccgccaaagcagtagcgtatgatagagagttagtagagcccagatcgagggagggaggagtagcaccgagcacgagcatctncactccacgcgcgccccat

SEQ ID NO: 71157 - DNA, 342 bp, Zea mays
  unsure (1)..(342): unsure at all n locations
agcttgtttgtgtcgcaggcccttcgttagtttaggttgnacatacccgcgggagtggaacctgagatccgtttgtaatggcaccttgagtgccgatgtctgttcattgtggctaccgaggcctgaacatccaggtatttgagtgcaataccgtgtttcttcctcgttttgagcaccaggactcgcctgtcggctagctgaaccgcttaaccaagtgtgagttgccttgtgcagaacgtgacgagagaggtatccctatcccggaggcgtatgagtccctcggctcggtcggccttgccacccaaggcttctattgctcggttaaagaaaccctcggccgct

SEQ ID NO: 71158 - DNA, 485 bp, Zea mays
tcgactccatctatattatggattgctcttgaatctgtccagtttccttcggcctttctggcagcttcctgacttccatgaatagcaataggcccttggtctgaaggtatcttcatgcaatgatatgctggatgaagaattgcttcgaaagcattgagtgtcccacgaccaatgattgcattgtaagggtattccatgtcgacaatatcaaacataacttgctcactccttgtattgttgacaaattcgaaggtcactggcatcgtgatcttgccgagcgctacaattcgccttcctctgaagccacaaaggggatgtgtagcatcatggatattatcttcgggctcttgcatctgtctaaaggccttagcaaatataatatccgttgtactgcctgtatcaaccagaacattgtggaccagagatcctttgataacacaagagataaccatagtatcattgtgagggtaatccttgagttgaag

SEQ ID NO: 71159 - DNA, 479 bp, Zea mays
  unsure (1)..(479): unsure at all n locations
gcttctnaggggagaacacatttgggactaaccaatgttctatttgagaaagacaaggtttgtagcacatgtcaagcanggaagcaagttggtgtccatcatccacacaagaacatcatgacgaccgacaggccacttgagctactccacatggatttattcggcccgatagcttacataagcatcggcgggagtaagtattgtcatgtaattatggatgactattctcgcttcacttgggtgtcctttttgcaggataaatctcaaacccaagagaccttatagggattcttgagacggactcaaaatgagttcgacttaaggatcaaaaaaattagaagtgataatggaacggagttcaagaactctcanattgaaggcttccttgaggaggtgggcatcaagcatgagttctcttctccctacacaccacaacanaatggtgtagtggagatgaagaatagaactctacttgacat

SEQ ID NO: 71160 - DNA, 496 bp, Zea mays
  unsure (1)..(496): unsure at all n locations
tatanactcaagcttaagcatcttcgaactctgtcaatggcgcgcaatgttaactctctttctattcatgcaaggagactaattgtctcatttccattctgactatagtcacgacttgagttccattgtggcaaagcctatcctgctactttctaaaaaagaaaaaatgtcgccacaatggggtcgtggtgttcaccgactgcatgggcgaggcatatgcatacaactgcgatggatgtatgtcgtcctctacacggtgctgcgtacaggctagagagtgtgacaaacccaatttgctagacatctttaacatgttcataatattattatgtatcattagcgcataacatgagcatcattatattatatttgaatgagcatttatttttttgggttatgtttaaatggtacttaggatgtaacccaaaatctttaaatgtttctatgttatatcttgttacattaaaataattgcatgagaaaacaagatgtacaa

SEQ ID NO: 71161 - DNA, 450 bp, Zea mays
  unsure (1)..(450): unsure at all n locations
tagcctcatgtgtgtcacaagataaaaactcatttgtaataagaagattatcataatcaattttaattnttgtgtaatcttcctttattttacaagcctatcttttagccccctatatgcttcacttattttttcaaatttttctttagcatctttaagggaggtcttgagctcattttggtggatgaaatagtttttttcttccttcatttcttcactagctttaacaactatgtcatacttagcaattaaaaattcattttcatcttttagcttgtcacatatagctttggactttcaaatgatttgagtatactttttaagcaagtctgctaaatcatcttaagtaggagaagcatattcttcatcactgtcagtatcacaaatcttcaacaatgacattttcattntgtaccttttgttcatctttagccatgaggtatangtgtg

SEQ ID NO: 71162 - DNA, 410 bp, Zea mays
  unsure (1)..(410): unsure at all n locations
ccttanagtgcgaccctctgctgaagaagtcagtactttggttgcttcgcttggggatattcctgatgacgaacggcaggttcattttgaggtgcccctgaaccctagtgatgcggatataaatgccatgcttgatctgctagctgaggattcctccgacgctgctcctactggtacgttggtagtggtgccccttccagaggttggtacaactttggatgtccagaaaccagtcagtactcgcccgaggcgccctagccgaaccagtcagcctgagccttctgttgatgagcaaaagaagaagagaagacgccttcggcgagtatccaggtttgatgaggacgtcggtaccttagttcctgctgctgaagaaagtgcctgcactggccttactgacgctgaccccaatg

SEQ ID NO: 71163 - DNA, 479 bp, Zea mays
  unsure (1)..(479): unsure at all n locations
taggaatgagctaaacatcctagattctcagaacttaagtgaaacattgcacacatagctcatttatataactntgatcatgtctctttcatttggtacaaatgcatatttcttattcttcttgtgtcaaagctaagactaatgtgttttcaagtgtatttctatccttagtattagattgaaagggaaatagagtatttggcgaaggcaaggcttccactcaactatatcggtatcatttatcctttgccctactcataaaactttcattcatatccttttactaaaggagagaaaagattaggcctctcaagtttcttcgtttttagcgcttaatgccaaagggggagaaattaataggtccaaagcaaaaggaccgcaccaccaccctgtttccgcaccatcaccctatttttcanaaactatntcacaaagggggagaaaatatttcaattacaaaatanaaccctcttgacagc

SEQ ID NO: 71164 - DNA, 291 bp, Zea mays
  unsure (1)..(291): unsure at all n locations
tgctcctncatccggactacatctataaaaccaaacttcttttcccttccncgatcagcaacacaagggatccgatctcgcacgattaatcgggtggctgagcacttcatcgaagaaatcccctccaccgtgtgggtcaaggcaattgcccgtcgtgacctgcaatctcgccggtgtggggtgctcgattntggcgtcaggggcattcgtaggcatccatcgaagccagcgggcggcgaacagaatgaagaaggtggcacctatgaccggcgattgcccgccgtaatctga

SEQ ID NO: 71165 - DNA, 325 bp, Zea mays
  unsure (1)..(325): unsure at all n locations
tcctcccttctttggtggaagtcgttgtcagcccggatgttctcatccatctcctgaagcagcttctccagagattgtgggggcttcctggtgaagtattgagccgtaggccctggccgaagacccttgatcatggcctcaatgacaatttcattangcactgtgggcacttgtgcccttagtcgcaagaaccttccgacatacgcctgaaggtattcctcatggtcttgcgtgcattggaacaaggcctgagctgtgactggcttcgtttgaaagcctttgaaactggtaaccagcatgtccttgagcttctaccacgacatga

SEQ ID NO: 71166 - DNA, 438 bp, Zea mays
  unsure (1)..(438): unsure at all n locations
cagtccattctcttcatgcgaaagcgggtcttatcaagaggcttagtgaaaatatccgctaattgatcttccgacctcactccttctaaaatgatatctcctttagcaacatgatctctaaggaagtgatgacggatatcaatgtgcttggtgcgagagtgttgtacagggttattagcaattttaacaacactctcattatcacacaacaaaggtaccttttctagaactacgccatagtctagaagagtttgtttcatatataaaatttgtgtgcaacaagcacctgcggcaatgtattccgcttcggcagttgacaagacaacactatttcgctttttggatgtgcatgaaactagtgatctaccaagcagatggcatcccccacatgtacttttcctatcaatntngcaaccggcataatccgaatcggaatag

SEQ ID NO: 71167 - DNA, 472 bp, Zea mays
ggatgcagttcgaaggctggaagcttccttcgtatgtattttcgtcaagaatattccaagaggtcaaaatgagcatgcagatttgctagccagaccagtggctcaggggctcccactaccctctgaagtattttttgaaacaataaaagcaccttcagttgagctcatggagagagcagtgcttactatttccccagtacacagtgaagactggagaactgaaataatatctttcctccaaggcaattgtctttcaagtgatgaagcttataacaagagaatggaggcaagaacaagaccatatgtgttaatagaaggggaattttataaacatggggtttgttcaccactccttaagtgtttatcaagaactgaaggtgtagaattaatgaaagagatacatgcaggcttgtgtggatctcatattggatctagggcccttgtgggaaaagtttttcgacaagggatttat

SEQ ID NO: 71168 - DNA, 495 bp, Zea mays
taagcttctacaagagcgagagagcaaggcgaagctcgtcaaaggctatatagtattctctcaatgaagatgcaacactgtgacgagttgactaaagaacatgaggagctaaagtgctctcatgttgatttggtccaaaggtatgaaactgtttcaattgagcatgataacgctttacattgtattgctcaattagtaaataggaataccttgcttaaggaccaagtataaaagctaaaagttgaaaatctagcttttcaagaaaaatatgatatgctcctatgctctcatgaaaatcttagagatgatcatatcatattaaacattgctcatgaggttgtgatagaaaacttaaaatcccaacaacctcactcatgcacatgtattcaaattgatactatattaccatgtgctaatgcttgttgtccgtcaacaagcatatcttattttgagctataacttgtaggaacaaaagatgatacttatcataagctc

SEQ ID NO: 71169 - DNA, 485 bp, Zea mays
  unsure (1)..(485): unsure at all n locations
cactaagctncggcttgctttattttatccactagagtaagcagagatttatatttttccagagcttcgttcctcacctagataacctctgctcgtacgttgatgaaagcaatattataacttccgtcttcagcattatttcgcgctctcaaagcgtcgcttagtattaaaccctatatgaaaaaagaatcagtctatgaataaaagaataatgtagaacttgtagatttctaaatatacaaatctcgcaccttcagactattatatgcaaggatatccgcaggatcctccttcgtcatagcgcatagtccagcttcaagcttcagagaccccatactcttagccatctcccggcagacagataattctttgttgtcagggaggcagtataggaagtcatctttgtctgtcccattgaacactagtgcccccttcggatatcttaattctctggcatacagattagcttcataaatctcttcttc

SEQ ID NO: 71170 - DNA, 462 bp, Zea mays
  unsure (1)..(462): unsure at all n locations
ngagatgatggttcggntntatatgtacaatactatagaccatatatacagttaagagaatatgtatgaagaattgtgtagagacgggctagcgttgttccacaatgataacataattattactatacgtgatttttactggaagatgtatttatattggtggttcataattatgatcacagttttaaatttatttctaccaatgatctgaaccgtcaattttttaaaaaaatactagcagccataaaaagatcaattcttctatatgtgaatatttaaatgaaatggtaaacgttaaaaaaaatacggcgcgcgccttgcattgaacgctgggtcatgactgcaaattaaagacaaacgactgtgctccttgctccaataagctttgcaagtacgtcacggtaaaaccttgaacacccatcacaaaagaacactgtctatccaaaagttccaagttcgcat

SEQ ID NO: 71171 - DNA, 435 bp, Zea mays
  unsure (1)..(435): unsure at all n locations
ngacaccaccattntatgattaagtaaaatntctgttatctttaatatttagcttattcctcaacatacaaaagcgggttttgtctaaatgctttgtgaaaatatccactaattgatcttccgatctcactccatctaatcgtaacgccctgaatttgagggtagaatttttcttcttttatactcaccaaattcaggcgttactctcttttctcttcccgttttgctccttcttcccaatttcaaagcagtataacgactggtgtccgtattgcgtgtaaacaaaaacctaagtcgtcatgggtgttgcatcatgccgaagcatatttcttttgtttgatgtcgtgtttaatcacgcgttcgtctcattggcgtatttgtctcgtgattggattctgatctgtggttgtgcgcgtcgtgggtttttgtcccacg

SEQ ID NO: 71172 - DNA, 403 bp, Zea mays
ttccttagtttcttccagagtggctccatatggtggacggttaggaagcgcaccccctggaataagatcgattcgatgctcaatccctcgaattggaggtagtccagccggcgtttcttgtggaaacacatcattcaagtcctgcaaaagatcagccacaacactaggaagagatgatatgtcgttaggagagatcaaaacatctttgttcacaagtacaaagagcacttgatatgggttgtgcctcacttctctcagctcagattttgtggctagcataactagatgatctccctcttccttccttttatctcttgaatctggcttgtagcactcgctcaccgaattgtggatggcactcaagttattttgctcttctctcctctacttgctgcactaattt

SEQ ID NO: 71173 - DNA, 466 bp, Zea mays
aagattcttcatcccaacatgggctagtcggtgatgtcagagccaacccatattagtcttagcaattaagcaagtatcgagttcagctctattgaaatcaactaagtatagctgaccctctaacactcccttaaatgctactgaatcattacttcttctaaagacagtaacacctacattagtaaatagacagttgtagcccattttgcataattgagatacagaaagcaaattgtaatataaagaatctacaagaaaaacattggaaatagaatggtcaggtgatatagcaattttactaagtcctttgaccaaaccttgatttccatccccgaatgtgatagctctttggggatcatcgtttttcttgtaggaggagaacatccttttctccccagtcatgtggtttgtgcacccgctatcaattatccaacttgagccccagatgcataaacctacaaagcaa

SEQ ID NO: 71174 - DNA, 466 bp, Zea mays
  unsure (1)..(466): unsure at all n locations
tncaaccttcgaactgcatccagaatattttcaagcttcttatctcgtgccttgctacttttatccaagtggccagcaataacttgagaatctgtctttaggatggcccttcttattcccattgcccttagtttctgaagccccaatagaagtgcttcgtactcagcaatattatttgtgcaactgaaatccagtttgactgcataacatattttgacttttgaaggtgccactaggaccgcagctgctcctgcaccgaaggctccccaagaaccatcgcaaaacactgtccaagcttcggcatctttgcttgtcccctcttcgtgagccccttgcgtccaatcaacgatgaaatctgctagcgcttgagattgaattgaagatctatgcacgtagtcaatagtgaattcattaagctgcgcggcctatnttcctatccttccaatagcttctctattcctcatga

SEQ ID NO: 71175 - DNA, 447 bp, Zea mays
  unsure (1)..(447): unsure at all n locations
actctatnnnaaactcgagctaataggtgggaaaatttcactatcatatgggattattgctgtcgtcgaatggcccatgancaaagaaagaaaatcgaagaagatgttcacgacactcaagagtcgtaaaagcagctgataggctgcggagcttgagaaaccaatatgtattacttaatgcgtcttgactttgctgcttatttttgtgacttcgaactgatttacactctttacagcacccgaactattctcctccccagagccctttgagtcactggccgacctataggcaaaggaatcaacagaaattattagcatggctgagactattatggacgaagttgtcaccaaattattaaccgaagctgcagagacagtcctgagagaagaagactagctatctataaaacattggtaaatattaatgaatcacttgtagactaagct

SEQ ID NO: 71176 - DNA, 459 bp, Zea mays
  unsure (1)..(459): unsure at all n locations
tctgccacgatgtgatagtccttggccgaagagaagaataccatgtttgggctacattctggactgccatgacgaaggacttcgccatgactgcagtattgcctccatatgaagatataattgcttcgtagctcatcagaagctgctttggatctgagtgtccatcatacatgggaagctgaggtggcttgtatgatgggggccatggagtagcctgcagttntgctgccaagggagaagcatcatcaaaagtaaaggcatcatgattaaagtcatcataccatccatcctcgttgaataagccttattgatgaagctccctgtgttgnggccttcgatcttgttcatcttgagcaagatgacacacttcttcagtggcttcgtcgatcttcctttgagatcagctagtcacgccatcttctccttctttctttgactngctgatggatgatctccata

SEQ ID NO: 71177 - DNA, 427 bp, Zea mays
attatatcggattgtattgtactgtactgtactatattgtacgatactatacttaaagcatcagtttcaacggtcgtcatgcgtcaaatttttacaaataaccccttacatctatctcaaattagccctccatctctctatacaaaaagtggtgtaggaggtggggttcgaacccaaaccttgattgaataagggcgggtgacactgattgaagaaaggcgggtgatactgagtgaagtcgtctaaccagtagaacatcatggtcaattgtttttaatattgaatataaatagtacatatgtatatacgacatttgtaaaataaaaaacatataatcgtgtcgggccggatcagcactacggaccgaggctacgggccaaacacgacacgacgatcgtgtctggctggcctagacactattaaatgg

SEQ ID NO: 71178 - DNA, 449 bp, Zea mays
  unsure (1)..(449): unsure at all n locations
ctaagctgatacgagctcatgatgttgcgtcctctacccattctattcatgattaggacattttctccgctctgtggcatactcttctactctttgtgacatattntgtatttagtaatatcgtgtgcaacaaaatatgcaggaagtaatggactctatgatagatacagagttctggtatgaggagagtggtagcagagctgatggtccggtgaaaattaccggcccaaggaagagtaaaaagtggtggctcccatctcctcgtgtccctgagcaagggctatctcgatttcagcggaaaaggctggtttttcaggctaagcttgttcaccagatcctcaaagccgcaaaatccatcaacgaacaagtcctgttccacatgcctattccggcagctgttatggatgcccttccaaaggcaagtatcctctgttcttaaggcgtcacct

SEQ ID NO: 71179 - DNA, 484 bp, Zea mays
  unsure (1)..(484): unsure at all n locations
cataatctntattgttgcttatntagtatacttcaatgtttatatttggcctaagccttgattntatatttntcatagtcttttgcccctttcttcaattctacttaaagagctcaattaggtttggtattagggtttcaacattttgctcttttgaaaatcttacttgtttagaacatgattctttagatatacacttagtagatcttttattctcaagttaatttgatgctcatgctcaatttggttcacataaaatgatggtttttgggttagcacttgagagaaaccctatgtgacactggggtgtcacacctaaataaagtttaaatgatgagtacatacagaatgaacgagtccctggtcgtggatggtctggcttttgagactagacggttcggtttgtcgcaaaacggttcgactttaaggccgagcagtcatcacaacatataaccagtgttgcggacgatccaactctcgagac

SEQ ID NO: 71180 - DNA, 486 bp, Zea mays
  unsure (1)..(486): unsure at all n locations
agctnggaggcgtctatgggnagncggcttggagtagactacttcttttttttccgtcgccttgaatgcaacgggttgagctttggatggctcgccaagctcgctgattntccttgagccttctatcatgcactcaaaacttacaaaatgcccgataacttcttcgggggtcattttagtatatctaggattaccacgaatcaattgaacttgagtgggattaagaaaaatgagagatcttagaataacatttaccacttcgtggtcatgccacttcttgctcccgaggatgcacacttggtttaccaaagtcttgagccggttgtacatgtgttgtggctcctcccctttgttaagccggaaccgagcgagctccccctcgatcgcttcccgctcggagatcttggtgagctcatatccctcgtgcgcggttttgagcacatcgcanacctncttggcgttgtttaaaccttgcactctgttata

SEQ ID NO: 71181 - DNA, 427 bp, Zea mays
  unsure (1)..(427): unsure at all n locations
ntcctcttanaagttntgtagaagaagaaaacaaggaagagataatcataacaaatcgacagggaagggcgatatatggaataaaaatagtaaatgctattagtatttacattcatgtagacaatacttatagtatatatacagcttatggctatactttataattttcaatgaccagatgccaaaaacgcacataagatcttattctctgtttagttatttccgtttcaaatagtaaggaagtcattgatgatccgccaaatgttctctataaaaagactcagatacaagttcttcggaagtattctctgtcttttgtcttgagattgagaagtacagaaagcagccctttgttggtcgtcaggacaaagaacaatgcagcacgtaatcctttggctgcaatctctctgtactctcagcttctcta

SEQ ID NO: 71182 - DNA, 396 bp, Zea mays
ccttataacgcaaccctctggtgaacaagccatgactatggttgcttcgcttgtggatattcctgacgaccaacggctagcgcacttggaagcgcccctgaaccctagtgatgcggacataaatgccatgctcgatctgataactgaggatacctccgacactgctcctactgctacgagggtagtggtgccccttccagagggtggtacaactttgaatgtccagaaaccagacagaactcgcccgatgcgccctagtcgcaccaggcagtctgagccttctgttgatgagcataacaacaagagaagacgccttccgcgagtataccgtcttgatgaggacgtcggaaccttagttactgctgctgatgaagagcctgcaactgagcttactga

SEQ ID NO: 71183 - DNA, 486 bp, Zea mays
actcaagcttatctaatgcatatgttggtcttttgatcacatcttgttattcgtttgatcattcgaatttacactcagcggggcttaactgccgcatatctctatcaacacaatatcttcttgatatgcatctacggtgacaacgagaattcactgataccgtctatgcatcatttgtgatccacttcgctatatgctaacaaatgacttggagaaggatcactagctgtagaactctctattgtgcagaatatttccatacattggtttgaatgtatgtcttacgcaactaagactataggacaaagcacaatgaagaaagtgtctctacgtgatggtataaaagggcaaaactacctcctttcatttatacatgtacctaaatctctctttattgcatatcttgcataaaaggaagagaaagcatgtctatgcataaccctgcttcatacctaagttaacctttcacacatctattcttgcatc

SEQ ID NO: 71184 - DNA, 478 bp, Zea mays
  unsure (1)..(478): unsure at all n locations
tccacagccgcctcattggcggcgttgaggatggttgtttctgtccgccttcgctcaaagcctgccgcgccaggctcagcgccggaaagcgttcgaggtcaggggcttcgaaggtgaggctgcccaccgcggccaggtccagccgcggtgcgtcccaaggcaggcgatcgggccaggccagcgcgcaggcgatgggggtgcgcatgtccggcgcgccaagctgagccaaggtcgagccgtcctggtattccacgaggctgtggatcaccgactgcgggtgcaccagcacctccacctggtctggcgcggcgtcgaacagataggcggnctcgatcatctccaggcccttgttcatcatggtggcgctgtcgacggagatcttagcccccatgctccaattgggatgggccacggcctcagctgtgcgtggcggcgcatacctccagactccngtgcgaaacggaccgccgaggcggga

SEQ ID NO: 71185 - DNA, 479 bp, Zea mays
  unsure (1)..(479): unsure at all n locations
ngacaacatcaaattcttctttaccaacattaagatcacgtctcagttntgcagcagcatccacttcaccgtaccaatcagtaaactccctgcctcctccagcacatggcaaacccaaaatcatacgaaccgtatcttttgttatcttcagttccttgccagcccctgngcgaatggtcatgtcatgtggatccaatttatccatcaaccacctaatgagtgatctgctctctaaggcatcaattcgcaaatcaaatatactagaaaatcctaacctagcgacagcatcgcgctgccgatcgctcattatccaagatgatacaataacatcatagggaatgcagcgaatattcaatttctggaagcataaatgaatatgcattaatacacaaagtatatatattgntagaactaatgatactatatttacatacaanggatatttattacaggcttngtaataactagtctacaacact

SEQ ID NO: 71186 - DNA, 370 bp, Zea mays
  unsure (1)..(370): unsure at all n locations
tgaagtacctttctcanatgctnctcatgcgcttgctcattctgggaatatataagaatatcatcaatgaacactactacaaacttgtcgaggtagtccatgaatacactgttcatcaagtatatgaagtaagctggcacattcatcaaatcgaatgacataaacgtgaactcatacagtcaatacttggtgatgaatgttgtcttcggtatgtttgagggtcagattctgagctgatggtaacctgaccttagatctatctttgagaacacactggctcctctcaactgatcgaataaatcttcaattctaggcagggggtacttgttcttgatagtaacctcattcaaggctcgggtatcgatacaca

SEQ ID NO: 71187 - DNA, 327 bp, Zea mays
  unsure (1)..(327): unsure at all n locations
tctcctgaacaagcgctctacttactgcagagtgcgaagctgccacatacagcagcagaggagcccctagcgctggtggagttagagttgttaaatctatcaaatactgtttcagtttttcgaaggctttttgctgagctgatccccattgaaaaacttcggctgacttcagcacttcaaagaatggtaaatttctctctgccgatctggatataaatcgattcaaagatgccagtcttcctgttagcccgtgagcccctttctttgtgcttggcggctccatccgaaggatagcttcgatnttatttggattagcttcgatccctt

SEQ ID NO: 71188 - DNA, 461 bp, Zea mays
  unsure (1)..(461): unsure at all n locations
ctgtagcaagggtcaaacgccttaagttatatgtttctaaagaaatgagtggagcaatcaacatgagacaagaagaaggtaatgttttaactagtcatgttgtttgcactaacaatctctctgtgtcatccaaaagtaaaaagagaagaggaaaacagagatgcttcaagtgcaaagcattaggccacctcatcgcatcttgtccatacaacgacaagggtgaagggataaggagatgcttcggatgcaatgacaagaaccatacgatcacttcttgtcctctattgacgaatcaagaatgtgcatcctccaaggtggccctcaccaaggaaaatgacaaacagcaagcgtcatgtcaggttgagcgacgcttctgctacaagtgtggtgagcagggtcatctatccaaggtatgtgataaaggtgaggttcctaagcaattaaatntatctcaatcttat

SEQ ID NO: 71189 - DNA, 488 bp, Zea mays
  unsure (1)..(488): unsure at all n locations
ntatcanatggacgtgaagagtgccttccgcaatggacctatcatggaagaggtctatgatgagcaaccttctggctctgaagatagtgagtaccctaaccatgtctataagctctcaaaggctctttataggctcaagcaagccccaagagcatggtattaatgcctaagagactttattatcactaatggcttcaaagtcggaaaggtcgatcctactctcttcactaaaaccattgcaaaagacttgtttatatgccaaatttatgttgatgatattatatttgggtctactaacaagtccacttgtgaagagtttagtaggatcatgatacagaaattcgagatgtcaatgatgggggagttgaagtatttccttggatttcaaatcaagcaactccaagagggcatattcatcacacaaactaagtacattcaaggcatacttaagaagtttggaatgaagaatggcaaacccatcaagacac

SEQ ID NO: 71190 - DNA, 472 bp, Zea mays
  unsure (1)..(472): unsure at all n locations
caatatcttcagaatccttagataacccagtcagcattttattgttgatgttctctgaatttgtcttctccatagcttcataaaactcaaccaatgaagggtcaacaatctttttctcttcagccatttagtcaaagattgcacaaatgccgaagcttataatttaaccaaaacctgacagaacaagaaatttcataatgctaaaatagcgcaagctactgaaatggcgcaacaaatgcaatcaatacgagtccctatttatatgcccagagcctcacaacttggtaggccctacttgtcagtgactttcgctattctagcgaagggaaggagtttttttggaccttctgctaaacgccttcgttcacgacgcagtctgaatttgttacaaagaaacaaattaatgctgcgaggggctactatagngggccttactcttccgaatgtcctcacgaacatgtctaactatatg

SEQ ID NO: 71191 - DNA, 492 bp, Zea mays
ctaagctctcctgacaagtgctgccttaccgctgagagcgaagtttcctcttattataacaaaggagcccctggcgtacgtggagtcagtgctgttagatctatcacatactgtttcagctcttctaaggccttctgctggattggtccccattgaaagacttcggctgacttcagcacttcgaagaatggtaagtttctctctgctgatctggatatgaatctattgagagatgccaaccttcctgtcaatctttgagcccccttttttgtagttggtggctccatccgaagtatagcttcaatcttacttggattagcttcaattccctttgttgaaactaagcatcctagaaatttccccttctttactccgaagacgcatttttctggattcaactttaagccagcttgtctgaaactggcgaaggtctcctgcagatcagcaatatgattctcctgtatcgtgctctatacaatgatgtcatcaaca

SEQ ID NO: 71192 - DNA, 381 bp, Zea mays
  unsure (1)..(381): unsure at all n locations
gggacgcncgtgaccgtaacgttcgtcagtcgtcgtgatcttctgatcggcactctgactcctaaacgagatcccgccaacatcggccgactctgaggcgagaacgttacgttccatacctccatccatccaggctatatataaaaggcgagcccaatggtccttggtgccagcgttctcgaggatatttaggggtggatatggatgcactgtggtggtcatggcaactagcgaatatgacgagagccatggagacgttacagcagatccaagaaaccctagcggagatcaatgaacgaacaccccacgtgagcatctcaaggttcgtcgcctccgttntggtcgagtggctgcagaccgaatacgcgacgtcngagcgga

SEQ ID NO: 71193 - DNA, 442 bp, Zea mays
  unsure (1)..(442): unsure at all n locations
gaagttcttagnatatcaaagaagaactatacagaattagagaaggtgttatatgctgttttgatggcatccaggaagcttcggcattactttcaagcatacaatattgttgttccttcttcgcagacgctgaaggatattatgagaaatagagaagctactgggcgcattggaaaatgggctgcagagctcaatgaattttgcattgattatgtgcatagatcttcgatccagtcccaggcgttagcagacttcattgctgactggacgccaggggctctggatgaagaaacaaataatgatgccgaagtatggacagtgttttgcgatgggtcttggggaaccttccgggcaggagcagctgctgtgttggtctcgccatccaaagttaagactcgttatgcggcaagactcgatatcagttgtacaaacaatattactg

SEQ ID NO: 71194 - DNA, 308 bp, Zea mays
actactgcgccatgatccagatttacacgccccatatacatttttataacttacgtttcaacaattgaaatgatgaatactattttcttcacgaaacccattctggaatgaaggggtaactaacccagcatggcacttcatagaatagtttgatcgtatatacctggccatgcgaccgagttatatcatcttctaatccggaaatctcagactgataatatgggaagagaaactattatcttaagactacatggcggctgactacaatgattcttatcataccacatgtcagttcaccttaactacac

SEQ ID NO: 71195 - DNA, 481 bp, Zea mays
tcggatcttcactcttcaccaacattaccctggattcatctttgtattagaattgcccgataacaaacaggaagaaggtggaagaagataagcagacaagaatttttatacttcattaagcaacgcccgagtttcgtctccggcgacttcccaaccacccttcgtccagatttggtaacaaatctgttacccacacttctggcttcagctggtatgttgccaagatcggatggggagatgctaaatgtcagcttattaacgctctttaagtggttgcacctagttttggcaaagatagcggtggttcctcgggcagccactagcgcgcagaaatcgccatgaccaaccataaaaattgccatgaccaaccataacttcgtcaaatcgtcaacttgtttttcgatccattcaagcgccttgggaatattatcagcagaatgcttggcctcttctgaagtagctccaacagaagtaaagatat

SEQ ID NO: 71196 - DNA, 467 bp, Zea mays
  unsure (1)..(467): unsure at all n locations
ggcacgcgaagttgaaaaaagttcgaatgtgcatatattcttgaggaagctntaggacaaatgcttaaactttggcatccggtgcgtgcaacggctgaagcaggtttttaactcagttggtgctagttctgaaaaatttgaaccttcggctgaggacctgtcaagcaccttcgaacatattgagggtgaagttgaggcgcttgacgaagttatagccgggcatggtgacttctgtgccgtgctagcttctcgcggcacagcaatagctttcatgaagactagttgcacgcacgggaagatcgtaaacaggccaaactttagcctatcactagcagacttgactgacatccccagcctggcccgaagcattggaaatagattcataacacanatttggacgaagggtgggcgaaacttatctggcgacgaagctcgaagtcatctcaagccggtattaaacttacatg

SEQ ID NO: 71197 - DNA, 423 bp, Zea mays
  unsure (1)..(423): unsure at all n locations
ataanttcttactgcgttcaggcatgaccgtgtgatatgtgtccttttccctctactcaagaagtagaggtacatgtgagtgtccgatcgtgatatgacaaacaaatctgactttttctttcccaagctggcgcctctggaccgataggaagatcgatgacccgcatcgcatcctacaacttcaaagaagtatttgtatcacacccgagcaatggaccacggaaggagtctcattcatttaccgagtttggaagcgaggacgatccaggatcgactgctatctgaagaagtggagtggaatggatctgattacccattggcgtctgcattgacgcttctgactagccctactctgtgtcgttggtgcttccttattcatgtactcatgcctatctctatctgcatgatacttatattgcaatc

SEQ ID NO: 71198 - DNA, 455 bp, Zea mays
  unsure (1)..(455): unsure at all n locations
ttatgtataagagtgatacatctagctctaggcaaccattccgtgctaagttgcctaagaagaaaattcctaatgcatcaaatgaacatagtccttcatttaaaacttttgatgcatcttatgtgttgactaacaaatctggcaaagtagttgccaaatatgttgggggcaagcacaaggggtcaaagacttgtgtttgggtacccaaagttcttgtgtctaatgccaaaggacccaaaaccatttgggtacctaaagtcaagaactaaacttgttttgtaggtttatgcatccggnggctcaagttggatactcgacagcggatgcacaaaccacatgactggggataagaagatgttctcctcctacgagaaaaaccaagatctccaacgagctatcacattcggngatggaaatcaaggtttggtcaaaggtcttggtaaaattgctatatc

SEQ ID NO: 71199 - DNA, 374 bp, Zea mays
  unsure (1)..(374): unsure at all n locations
ttaccaaatggacgtgttgagtgtcttcctcaatggacctatcaaggaagaggtctatgttgagcaacctcccgactttgaagatagtaagtaccctaaccatgtttataaactctctaaagcgctctatgggctcaagcaagccccaagagcatggtatgaatgccttagagatttccttataaataatggcttcaaagtcggaaaagtcgatcctacactctttactaaaacacttaaaaatgatttgtttgtatgccaaatttatgttgatgatattatatttgggtctactaacgaatctacatgtgaagagtttagtaggatcatgtcacaaaaattcgagatgtctatgatggnnggagtgaagtatt

SEQ ID NO: 71200 - DNA, 401 bp, Zea mays
ttggagaaaggaccgctgagttcttaatagcgcacacgaccatattggagtactttacaattgcacataaagtaatcggattgtatactgtgttgtgcaatgattattttacctgccctctgctgtgaactaagtattcaatttatcacattgtaacctatgtctttcgggacatcaacctcggatgctataagtgaacttatcccccttcttactcaaggggcactcatcatatatggagaagaacctactaacgctacataactaccatagaaagcaaacgctaagaacaaaatgtcgatagagccacttattggtcggatcatgcatacaatggatggattacaactatgagatattctgctcaatgatggcacatccacatgtagattgtgactctc

SEQ ID NO: 71201 - DNA, 484 bp, Zea mays
tatacaggagaatagaagcaagagctcgaccatatgtcatattattaggggagttatacaagcgtggggtctgttccccattgctcaagtgtttatccagattcgaaggtatacaattaatgaaggaaatacatgcaggcctgtgtggatctcacattggatctatgcccttgcttgggaaagtttttcgccaaggattttattggccaaaggcagcttcggatgcagcggatttagttcaaaagtgcgaaggttgtcagaaatgtgcaagagataaaaaacaaccttcgtctttaactcaattaatacaacccacttggctgttgcaaaggtggggtcttgatttgctaggtctattaccaccaacacaggggaacttaagatatgtggtagtggcagtggaatatttttccaaatggattgaggcaaagcccttagctacaataacttcatttactattcaaaagttattctggcaaaacat

SEQ ID NO: 71202 - DNA, 88 bp, Zea mays
gccgaaaagacagggaggagaacaggattagaaccgacggaaaccgggagggcacaaaacaccgacccaaagagagggggagaaacga

SEQ ID NO: 71203 - DNA, 482 bp, Zea mays
tatcacagtgcctgtagccgtgcgacgtggccggttcgtctggtagccgtggaaactctagtgacctcggttatgccacgccatggctcgctactatgcggaagtaaccatggcacacttagaattacaatccttgagccgttgcactggtgaacgccacgatgaagccaccagtattctcccctctctccggatgccagcgcaccatctcaaattcacgggccacctccctcgggccctataaattgagcatgccatcggctccgctaggtagtcacgcacccaatacacgagcccgtgcctcggatcgtcccccaaaacgcccaaatttgagatttcccccaaatcggtcaagaacaccgcgtgtttgagctcaccgcggtcagcccttcacaggtccgatcacgccctcctcgctcttgttttagcatccctctgtgcttgtgatgcttctcgacccggccaattgagctagaacatgt

SEQ ID NO: 71204 - DNA, 480 bp, Zea mays
  unsure (1)..(480): unsure at all n locations
ntattagaacagcgcgcgcatccgccattgcgatgttcatcttatgcaagcgatctgcttcaactgtcctgcttgccgtgttgttgtcacgagcaagtttgctgaggtggctcaacttggaaacctgaacagatcagacaaaaaaccttgaggacagtggaaagaaataaagaactaccccctctgcaccaaattataagtcattctaactttttgggggactcacagcatatcatgtttgacaaaatttatataataaaataataacatttgtgatgacaaacaattattattagatttttaatcaattatatttttaaagtatacttattttgtgtcataaaattttataattccatctataatttaagtcaaacttgagatgttatgactctgcaagaaagttaaagtaacttatagtttaagagacagactacatagtgtgctgcaattgtcagctaattaactcgaatatatcgc

SEQ ID NO: 71205 - DNA, 480 bp, Zea mays
  unsure (1)..(480): unsure at all n locations
ntataagtggcgaaggaacaatccanataatccattcttgtcaacaacatataactggatattctttntgacatagttttccaacacagacaaggaaaatgaaatacttattacaaatatgactggatattgctgatagcagcagagatatagcaatacccgaactaacctctccaacattgctaaatgcatagcaaactgtcctgaaaatagcgagtcccattgcatcaggtaacctacatatgtaaaagttgcggctatctggaagtcagcgcattgcatcaggtaacctaggctgtaaaatgatttttgctagtttcatctagtgatgcttctaataagtagatttgcatgcttataattacaggcaaataaatggatgaatgaaacaaactgaaactattttttgttgattgaagcacgtgaatgcatgacacagcacacaaggcccaaatgatgccggtgttagaacatatgtgt

SEQ ID NO: 71206 - DNA, 483 bp, Zea mays
cttatgaagattcttcatcccaacgtgagctagtctgtgatgctagagccagcccatgttagtcttagcaattaagcaagtgtcgagttcagctcaattaaaatcaactaagtatagccaaccctctaacactcccttgaatgctactgaatcatcacttcttctaaagacagtaacacctatatccgtaaaaagacaattgtagcccattttgcacaattgagaaacagaaagcaagttgtaatctaaagaatctacaagaaaaacattgaaaatagaatggtcaggagatatagcaattttatcaagtcctttgaccaaacctcgatttccatccccgaatgtaatagctcgttgggggtcatggtttttcactttttctcataggaggagaacatccttttctcccctgtcatgtggtttgtgcacccgctatcgattatcaaacttgagcacccggatgcataaacctacaaaacaaat

SEQ ID NO: 71207 - DNA, 475 bp, Zea mays
  unsure (1)..(475): unsure at all n locations
ggacaggagcataagtaaacacggtgcaaccagttcctggttcttgtattnntcattttgcttgttcgacttgcagcatccaatatgattactgatctttttttttcacttcgagctagtttgggaaccacaaaaccggagaggattggagagactcaaataaaccttcttacccaaaattaaataagaagaggattttagcctctgcaaacctcttcagttntatggcttccaaactagtccttcaagttgctgtgcaagcttgatagttccacctaagcactttggagctgcggccctggcccccggagacgttcaaacttgtttaaagttgccacttgccattccatggatgtttcttttgcagaggcatcgaggtangctttgttggtttcagagttgcaattgcaactttgcatcttgctacacctttcttgtcagccgtgccaaangggcagtcaaggtcattgaatgt

SEQ ID NO: 71208 - DNA, 401 bp, Zea mays
ttttcctgactacgcatgaacagcaatgggcccttgttccgaaggtatcttcatgcatatatatgctggatgaagtattgattcgaaagcattgagcgttccacgaccaatgattgcattgtacgggtattccatatatacgatgtcaaacacatcctgtgcagttcttgtattgtggatgaagccgaagggcactagcatcgtgattttgccgagtgctgcaatctgccttcctccaaagccacaaagagggtgtgtagcatcatgaatcttgtcctctggcgcttgcatctgtctgaatgccttggcaaatatgatatcagctgcactgcctatatcaaccaatacattgtggactataaatcccttgatgacacaagatatgaccatatcatcactat

SEQ ID NO: 71209 - DNA, 377 bp, Zea mays
  unsure (1)..(377): unsure at all n locations
gacgctgcgggcacggcctcttcggcggcggtggtagcttcttccgcaaccatatcttgcagtattctgtcaatgatttcgattgtgctctccaggttcaaatctttagctgaggcagcttcggcagctgcgtcctccgaaggtgtaatttcaatatctgccccttccgcaaacgctggtgttttttgagctgaagctcttggcggagtcttgtcaattacctgtcacagtgataattctttggctctttgctttgattgatttcttcgatttctcgggctccttgtccttctgaanaaactattgtcagttgggcctcagtggacttatcttcgcaggtaaggagtcagtcattaccttcagaaaattctcaacgt

SEQ ID NO: 71210 - DNA, 482 bp, Zea mays
  unsure (1)..(482): unsure at all n locations
tcaattccatctatattgtggattggctttaagtctgtttagttttcttcggctnttctagcagcttcctgactaccatgaacagcaatgggcccttgttccgaaggtatcttcatgcatatatatgctggatgaagtattgcttcgaaagcattgagcgtcccacgaccaatgattgcattgtaggggtattccatatcaacgatgtcaaacacaacctgttcagtccttgtattgtggatgaagccgaaggtcactagcatcgtgattttgccgagtgctgcaatctgccttcctccaaagccacaaagagggtgtgtagcatcatgaatcttgtcctctggcgcttgcatctgtctgaaggccttggcaaatatgatatcagctgcactgcctatatcaaccaaaacattgtggactagaaatcccttgatgacacaagatatgaccatagcatcattatgagggtaatccttgagctg

SEQ ID NO: 71211 - DNA, 468 bp, Zea mays
ggtgaaggttcttcatccccacatgtgctaagcggcgatgtcactgtcagcccatgctagtcttagcaattaagcatgcatctagaccggcctcctcttttgcaaaatcaactaagtaaagtttgccgtctaatacacccttaaaagctagtgaaccatcacttcttctaaagacagacacatctacatttgtgaaaagacaattatatcccatattgcataattgactaacagataacaaattatatccaagatactcaactaaaaacacattagagatagagtgctcatttgatattgcaattttgcctaagcctttcaccttgccttgattcccataaccgaatatgattgaatcttgtggatccttgttcttgacgtaggatgtaaacatcttcttctgcctcgtcatgtggtttgtgcatccgctgtcgataatccagcttgaacccccggatgcataaacct

SEQ ID NO: 71212 - DNA, 438 bp, Zea mays
  unsure (1)..(438): unsure at all n locations
tcgtattattccgatctgctgcaatgccgactntagtctgtgggttcctgttcacacattgtactacagaaatactgttaaatcctgtttttgaggaccttcggacgccgaaggtccccaacagcgcatgagtgaggagaaagtgcgcacaaaagacccgtgttggtctgtggggacaatatattatcctagagagctgccaggagtaagtaccaccgttccgggagtggacggngtgttacacttgtggttcgggttgtgatgagtgattattaatggtagcgtcttgggttgagttgtgtggactaaacggggcgtgagtatgtgttatacaaccatgtccctcaacttgtggtatgcaggtgtggagcacagggacagtggtcgacgatgaaggtgaagatcatccaggttcgtgtcaaatggccaagagcgatg

SEQ ID NO: 71213 - DNA, 464 bp, Zea mays
  unsure (1)..(464): unsure at all n locations
nggttgatggatgctgtncatcagtttaaattggaaggaagaatttatgccttttaaaatctttntgttgaagtcggagtctatcatgttgtttttaactttctccgcgataaaatcttgaacttggaaataaggtgttaagtatgtggtttttcagatggccgggaggcagcgtcgtggccagaatgagcgcgttcctccaccgccgccaccacctcccactctgcaggagctcatggctcagcagaatgagattttgaggcagctagctcagcgtcagccaccacctcagcactatggtggtggagaccatcagcgtcaccccgcagcagccacctaccaagagttcctcagcacccagcctccattgttcacaagggcagaggatccgcttgatgcagacgtgtggttgcgagtggtggaatccaaattcccactactccatggagcttgctcagaagtca

SEQ ID NO: 71214 - DNA, 436 bp, Zea mays
  unsure (1)..(436): unsure at all n locations
tactagctgcgggagagtggtcttacatgatagagtgatgttctttttgtcgccatgatgagagtgctaagagactttntggaggaagacttacatgatatggctagagatacatctattagtgagaagcgtttcatatgaggagatctcaatgcgcatgtaggtacaacaagtgtaagtttcgatgcggttcataaaggttttggctatggtagtatgaatcaaaagggtgaggaagtcttgaattttgtgatagcttttgacccgttgatagccaacactttctttatgaagagagaatcccatttaatgacacatagtagtgttcaacactatagtcagattgattttgtcctcacaagaagagaggataaacgagcatgccttgattgcaaggcgatacctatggagtggtgtgtctctcaacttaagcttg

SEQ ID NO: 71215 - DNA, 478 bp, Zea mays
  unsure (1)..(478): unsure at all n locations
tctanagggagaacatgtgatagatttaactaacgtgcatttctaaaaggatagaccttgtgcagcatgtcaagcaggtaaacaggtgggaggagcacatcacagcatgaacgtgatgaccacatcaaggcccctggagctgctgcatatggacctcttcggacccgtcgcctatctgagtataggaggaagtaagtatggtctagttattgttgatgacttttcccgcttcacttgggtgttctttttgcaggataagtctgaaacccaagggaccctcaagcgcttcctcaggagagctcaaaatgagtttgagctcaaggtgaagaagataaggagcgacaacgggtccgaattcaagaaccttcaagtggaggagttccttgaagaggaagggatcaagcacgagttctccgctccctacacaccacagcanaatggtgtggtagaaaggaagaacaggacgctcatcgacatg

SEQ ID NO: 71216 - DNA, 453 bp, Zea mays
  unsure (1)..(453): unsure at all n locations
ggacaacatcattggacattntacataaaatttctgagatctagaatatttagttcattcctcaacatgcaaaagtgggtcttatcaagtggcttagtgaaaatatccgctaattgatcttccgacctcactccttctaaaatgatatctcctttagcaacatgatctctaaggaagtgatgacggatatctatgtgcttggtgcgagagtgttgtacagggttattagcaattttaacagcactctcattatcacacaacaaaggtaccttttctagaactacgccatagtctagaagagtttgtttcatatataaaatttgtgtgcaacaagcacctgcggcaatgtattccgcttcggcagttgacaaggcaacactattttgctttttggatatccatgatactagtgatctaccaagcagatggcatcccncagaagtacttttccta

SEQ ID NO: 71217 - DNA, 448 bp, Zea mays
  unsure (1)..(448): unsure at all n locations
tcgtaaatcccataaaaagataacagtgcttcatatgtattatatcattaaatgtgagcaaaagtattacaataaatttatactgagtttttcattacttatttcttatacaaaaagtaagaatggcataaaagataatagtgcttcagaggtaggatatgtctcagtaaatgtgcttcgattctggtacagggctgttgactgtacgagcttcngactcttccctgaagtaccgttgctgttgagggtgttggcgcccttctagctgctggctttgagtatgagtaggtggcaaaggtggtggcagtggaagctgacgccaggaagcttgtgaatggcttgccgaagcaacagaagctgcaggttggttgcccacatattctggtatgtaatgagagtagcacgaagcagtgtgaaaacctgctttggctgttcttgcgacttctgt

SEQ ID NO: 71218 - DNA, 472 bp, Zea mays
  unsure (1)..(472): unsure at all n locations
ggaacacgctgtcgaataggcctgcgcgcncgacttcgtcatgtcgacgccgtacatgtccgggttccacgaacagatgctgttcgtatcggcgatgtcctgcgcgcggtacggcgtgccgagcaccggcaggttcttcttcaccgccaggcgcgggatgccgcgcatcaggtggatgccgaacttcagtcccatcttgtggacatcggcggccaggggcgcgaaccccttgccgcccgcgctggagggaaagcgattgggcgcggggatcagccggccatagccgtccatcgccggcaccggctcggcattatattcgtagctcgacgcggcgggctcataccattggatgtcgacggtgaagatgtcgtagccgaagggcagcagctntgcgcgcatgatcgcggcggtttcgcgcgcctgcgcctcggtgatcgtggtcgcaaagctgttccagctgttccagcccatc

SEQ ID NO: 71219 - DNA, 369 bp, Zea mays
  unsure (1)..(369): unsure at all n locations
gacactatctatactcagcttctgagggagagcacattntaggactaaccaatgttcaatttgagaaagacaggatgtgtagcgcatgccaagcacgaaagcatattggtgcccatcatccacacaagaacatcatgacgaccgacaggccgcttgagctactccacatggatctattcggcctgattgcttacataagcatcggcgggagtaagtattggcttgtaatagtggatgattattctcgcttcacttgggtgttctttttgcaggagaaatatcatacccaagagaccttaaagggattcttgagacaggctcaaaatgaagtcgacttaaggatcaagaaaattagaagcgacaacggga

SEQ ID NO: 71220 - DNA, 192 bp, Zea mays
acctctgatgaacggacccgtcgcatctgggacctcaccatctgcggaggagccaccctcgtcaagacgctcactggccacaccaactacgtgttttgcggattcttcaggccacacgggaacgtcctcggctgcgggtccttctgcgagacggtgcacgcatgtgccttcgcgtgctgcttggcccttttg

SEQ ID NO: 71221 - DNA, 462 bp, Zea mays
  unsure (1)..(462): unsure at all n locations
ntaccaaatggacgtgaagagtgccttcctcaatggacctatcaaggaagaggtctatgttgagcaacctcccgactntgaagatagtaagtaccctaaccatgtttataaactctctaaggcgctttatgggctcaagcaagccccaagagcatggtatgaatgccttagagatttccttataaataatggcttcaaagtcggaaaagtcgatcctacactctntactaaaacacttaaaaatgatttgtttgtatgccaaatttatgttgatgatattatatttgggtctactaacgaatctacatgtgaagagtttagtaggatcatgtcacanaaattcgagatgtctatgatgggggagttgaagtatttcttatgatttcaagtgaagcaactccaagaagggcacctcctaagccaaacgaaatatactcaagatattctaangcaagttgggat

SEQ ID NO: 71222 - DNA, 490 bp, Zea mays
gcttctggtagagtctatgaagccattgtaccggagatcaagatcattccggtagtatgtgagtttccagatgtatttccagaagatttgcctggactgccccctgaaagagatgtagaatttgtgattgagctaaagcccggtacggctccgatttcccgaagatcgtaccgtatgccccctaatgaattggcagaattgaagattcaattacaagacctgctgaataagggatttatccggccaagctcgtccccgtggggttgtcccgccatctttgttaagaagaaggatcaaaccttgagaatgtgcgtggattatcgacccctaaatgaggtcaccatcaagaataagtaccctcttccaagaatcgacatcttatttgatcaactaactggggcgagggtattttctaaaattgatctcaggtcgggctatcatgagatccgtattcggcccgaggatataccgaagaccgcattcactacgc

SEQ ID NO: 71223 - DNA, 395 bp, Zea mays
  unsure (1)..(395): unsure at all n locations
ccggaacggcggacgctgctggagtgaaaccttccaccatgatcgctcattatcagtatccgcnnnaatacatcggatagctttcttgtcgaatttacttcggctcgctcttttgatagccaagagtgccgatctttcactccatcatgccttcggtaagggctggctcacaagatacagacagaggtgtgtccttgcttgtattatcagaaatcaccgatccaccaacccttgcatttcgttctagtgacaaggacctaccttcaagctgagcgactgagaaaaagctctgctatagctgccatttcttattcatattagaccactgggcaagattcctcttggtcacatttctgtcgcatgatgactcatcgnttctctgcatacagccccta

SEQ ID NO: 71224 - DNA, 498 bp, Zea mays
  unsure (1)..(498): unsure at all n locations
ctcagcttcanagggagaacacgtgataggtctaaccaatgttcatttcgataaagatagaccttgtgcagcttgtcaagcagggaaacaggtgggaagctctcatcacaccaaaaatgtgatgacaacatcaagacccctggagctgctacatatggacctcttcggacccgtcgcctatctgagcataggaggaagtaagtatggtctagttatcgttgatgacttttcccgcttcacttgggtgttctttttgcaggataagtctgaaacccaagggaccctcaagcgcttcctcaggagagctcaaaatgagtttgagctcaaggtgaagaagataaggagcgacaacgggtccgagttcaagaaccttcaagtggaggagttccttgaggaggaagggatcaagcacgagttctccgctccctacacaccacagcaaaatggtgtggtagagaggaagaacaggacgctaatcgatatggcaaggacgatgct

SEQ ID NO: 71225 - DNA, 485 bp, Zea mays
  unsure (1)..(485): unsure at all n locations
tatgaagaattttcatcccaacatgggctagtcggcggtgccagagccaacccatgttagtcttagcaattaagcatgtgtcgagttcagctctatcaaaatctactaagtatagctgaccctctaacacacccttaaatgctattgaatcatcacttcttctaaagacagtgacacctacatcagtaaagagacagttgtagcccattttgcataattgagatacagaaagcaaattgtaatctaatgaatctacaagaaaaacattggaaatagaattgtcaggtgatatagcaattttacccaatcctttgaccaaaccttgatttccatccccgaatgtggtagctcgttggggatcttggttnttctcgtaggaggagaacattttcttctccccagtcatgtggtttgtgcacccgctatcgatgatccaacttgagcccgcggatgcataaacctacaaaacaagcttagttcttgaa

SEQ ID NO: 71226 - DNA, 482 bp, Zea mays
  unsure (1)..(482): unsure at all n locations
tgaggctgactcgccgaagcaacagagactgcaagatgattgcccacatattctggaatgtanggcgaatgatacgaagctgtatgcatgacctgcttcgactgagcttgttgtgctgctgcttcagctatttccttttgcttctgaatagtaacatggcacatcctggtagtatggcctttgttctcaccgcagaataagcaaaagattcttctcggttgatcgccaaatcttcctccaaagcccctggcacctctgcctcttggagctggtggtctgaaggagctttgctgttgccccgaagcctgtgaggaacattgtggcctttgctgttggcttcctctatcatcattttgtgtagagttatgaattgatctcacgtgcctcgggtagaacctccctccgaagcccctggtcatttcagaaaacctgagagcctccttcccttctttggcgaaatcattatcggcccgaatgtactc

SEQ ID NO: 71227 - DNA, 469 bp, Zea mays
  unsure (1)..(469): unsure at all n locations
tgtgaaggttcttcatccncacatgtgctaagcggcgatgccacagccagcccatgcaagtcttagccattaagcatgcatctagaccggcctcttcttttgcaaaatcaactaaataaagtttgccgtctaatacacccttaaaagctagtgaaccatcacttcttctaaagacagacacatctatatttgtaaacagacagttatatcccatattgcacaattgactaacagatagtaaattatatcctagtgactctactaaaaacacattagagatagagtgctcattagaaattgcaattttacctaacccttttaccttgccttgattcccatcaccgaatatgattgaatcttgngaatccttattcttgacgtaggaggtgaacatcttcttctcccccgtcatatggtttgtgcatccgctatcaataatccagcttgaacccccgggatgcataaacct

SEQ ID NO: 71228 - DNA, 420 bp, Zea mays
tgtgacgctggccgtgcgcgcacacaagactagctgagactcatacacagtgacttgccagtttgccacttcattccgggtacccgcccgtattgtacccgtttcctacgcggaattttcggatacttatcggttattggtgattccgtatcctaccgatatccggtgatcactatctgggtaagacccgtatccgtcccgacaaaaaaattacttgtatccgtatccgaaaagttgtcctgttttcatacccgtatctagtacccgtcttaggtacccatccagttttcatccctatctcaggttgacacagcgccgccaccgtttcctctctgaagcgcaaccgccgactcctcgactcctcgtcacctcttcacttgctccagtggaggagccccacagatgttgttccccttcccc

SEQ ID NO: 71229 - DNA, 480 bp, Zea mays
  unsure (1)..(480): unsure at all n locations
ggcattgcatatnntaaatttctgtattgcatctatggtttgtctaacctagttaagataaccgccaacaaagcgagtgaaaaagcttaactcgggctcaaacgtgacaagtcttagttttaagcttttagtacttaaattctacttactatgcaattgttagttcttgagatatgcatgaggcactacacttagggggagtattcaaaactcagatctttcatgcaaatccctactggaaagcctaaatgcaaatctcaccatttgcttattttctctaaaaattatctagcctatggcaaaatattttaaattatgagaaaatatatgaggttgtcaatacctatcccaacaagtgtattttgtgtgattataagttgggatttggtttggttgaaaactagatagaaaatttgaaaatttcaaaattccctctggctgggctcaccggacagtccggtgtgcaccggacactgcact

SEQ ID NO: 71230 - DNA, 366 bp, Zea mays
  unsure (1)..(366): unsure at all n locations
tctaaagggagagcacattntatgactaaccaatgttcattttgagaaagacagagtttgtagcgcatgccaagcaagaaagcaagttggtgcccatcatccacacaagaacatcatgacgaccgacaggccgcttgagctactccacatggatctattcggcacgattgcttacataagcatcggcgggagtaagtattgtcttgtaatagtggatgataactctcgcttcacttgggtattctttntgcacgaaaaatctcaaacccaagagaccttaaagggattcttgagacgggctcaaagtgagtttggcttaaggatcaagaaaattagaagcgacaacgggacggagttcaagaattc

SEQ ID NO: 71231 - DNA, 366 bp, Zea mays
  unsure (1)..(366): unsure at all n locations
tctaaagggagaacacattntatgattaacgaatgttcattttgagaaagacagggtttgtagtgcatgccaagcacggaagcaagttggcactcatcatccgcataagaacataatgacgaccgacaggccactggagctcctacacatggatctattcggcccgattgcttacataagcatcggcgggagtaagtactgtctagttatagtggatgattattctcgcttcacttgggtgttctttttgcaggagaaatctcagacccaagagaccttatagggattcttgagacgggctcaaaacgagttcggcttaagaatcaagaaaataagaagcgacaacgggacggagttcaagaactc

SEQ ID NO: 71232 - DNA, 204 bp, Zea mays
  unsure (1)..(204): unsure at all n locations
actcaagctggatgctcctcctgcacctatgggtcccttntatagtcccaaggcagctaagagcccgtggaggccaacttggaaggccaaacttgccttctgtcgggtggtgcaccggacagtccggtgcaccaccggacagtcactgtagctgtccggtgcgcgatctccttccatatctggcacatccaaccgttggtcctc

SEQ ID NO: 71233 - DNA, 489 bp, Zea mays
ctttaccgtctccagcacatttagtacactagtcatccttttttttgggtcgctgctagaaccttttgtgccttcggcaccgccactcctgccgaagggcttagaacttctaatgttttcgtcccttcgattcttggttcctcaattttgtcagtcttcggcattgtagccggctcttcaatcctctgcgtaggggcaggtccttttgcttcaatagctgaagaagtctccccgccaaattcaggcactatggccagttcaatgtagcgcggtcggtgggtaaggaccttcaactttttcctcttcggcgcaggctcgcttggagcagccgaagcagcagcctttccagaagttgcaccctttcttttctgcccccgcaacggatagcgatagtcagggtacataaatccaatagcatcaaaaaccctatttagtcttttctttttttggctcctgaaggccgccgatagtgcattatcttcagacttg

SEQ ID NO: 71234 - DNA, 488 bp, Zea mays
  unsure (1)..(488): unsure at all n locations
ngaagccattgtaagtagcataggcaagtaaaatgcgaattgattctagcctagctacgggtgcatatgtttcaccgaaatccaaaccttcgacttgtgaatatcccttggccacaagtcaggctttgttccttgtcaccacaccatgctcatcttgtttgttgcggaagacccacttggttcctacaacattttggttaggacgtggaactaaatgtcatacctcattcctagtgaaattgttgagctcctcttgcatcgccaccacccaatccgaatcttgaagtgcttcctctaccctgtgtggctcaatagaggaaacaaaagagtaatgctcacaaaaatgtgcaacacgagatctagtggttacccncttatgaatgtcgccgaggatggtgtcgatggngtgatctcgttgaattgcttgatggactcttgggtgtggcggtcttggagcttgttcatcttcctcatcttgatcatgtgca

SEQ ID NO: 71235 - DNA, 262 bp, Zea mays
  unsure (1)..(262): unsure at all n locations
tactcagctagcttcggcttggcctagaggtcggcatttcatnttatgtatttgaactntattgggtgcaccggaggtgcacccaatgggtgtagcccccgacctttgagtagattntagaaaataatctactcgaaggtcttccccagaaattgtctccatttgtgctcctgcatcttggttgaggattggtcttttaatcttgtcccacgccttacaagtcggcactatgttggcttgaaatgattatccatggggtgca

SEQ ID NO: 71236 - DNA, 484 bp, Zea mays
  unsure (1)..(484): unsure at all n locations
ntagacaagaccttatgccaatgcttaggatgatcagatatcttattttttaccaggctaatcaatgtcctattgctagactcggcatgtccattgccctcagcataatatggatatgaattgattaatttaattctatataattcaacaaactcacatacctcctttaacataaaagaagtcccctagtatgtggtcaaagtctgagaaatactgaatctataaataatatgctcagttataaactcaattacctctatgtgcgtcatgatctttagagcaacggcttcagtccatttcgtgaagtagtctgtggcgccactgatgcccttttgatgatgaaggatgtatctctcttatgaagtctaatactcatccnctgaaaggccaaggtttgatgataggatgtaattcggctgcagggaccaactgtaagtcgccgaatttctgacacactaggcatcctttgtagcacttgaaactg

SEQ ID NO: 71237 - DNA, 248 bp, Zea mays
  unsure (1)..(248): unsure at all n locations
tctacagggagatcatgtgntatgactaactgatgtctgctttgagaaagacagaccttgtgcagcatgtcatgcaggaaaacacgtgggaagcactcattacaacaagaatgtgatgagcacatcaagaccactggagcttcttcacatggatctttttggacccattgcctaccttagcatncgggggaagtaaggatgggcttgttattgntgatgatttttctcgcttcacttgggtattgttt

SEQ ID NO: 71238 - DNA, 483 bp, Zea mays
gtatgggctcataggatatctaaacatagggctactaaagtgtctccttctgagcttgtctatgggcaggaagcagtgttgcctgtggaaataagtttgaatgctgtcaggttcgccagacaaaatgatctaactgctactgattattataattcaatgatggataatattgatgaggtgaccgacaagaggatgatagctttgggagcaatagaaaaggacaagatcatggtagccagcgcctacaacaagaaggtcaaagcaaaatcatttcaagtaggggacctggtgtggaagactattctgcctctaaggaataaagatcggaagttcgggaaatggtcgccaagctgggagggtccttataaagtaaaacaggtgatgtctggcaacgcctatttgctacaaacattacaaggcaaagatttgcctaaagctttgaatgggcgtttcctgaaacagtaccatcctattatgtggaaa

SEQ ID NO: 71239 - DNA, 456 bp, Zea mays
  unsure (1)..(456): unsure at all n locations
agctccctcactcttctcatccncccattggctcatggcaaagggagatgctaacgtaaaaatcatcaccgatttaaatgatataaaagatgatgatgatatcgatgatgttgatgatgatggctattcatatgatgatcttgttagaatgttaggtgaggccgatgactacatgcacaaagaaaaagaacaatttaagaccttgaaggaattgtataaaaacctccaagtgtcttttgaggagctcaagacctctcacaatgacctcaaagaaaattgtgagaagcttgcggatgctcaaaaattatctattgtgcatgaagttgaggtggtcactaaggatgttggagtcacttgtgacttacttgatagtcttacaagtgaaccactacctactaactctatctgtgatagatgcanaatttctctcaatgataacattgctcttgatgaatc

SEQ ID NO: 71240 - DNA, 385 bp, Zea mays
ccatgttggtacctagaacccagaaccctagtcttttgccctatgaacttcactactgactccagaaacccaagtttcctggagagccgtgaaggaaaattgtattcaagacctaggataatctacttttattatctttgcatttgcatatgcattacatgaacattcatgattatatatggctatacatagaaaacaaagaagagatagaagttgaagaagcaaggactacaccaccaccaccacttgaagaatcccaagacaggaactgcttgtactttgacatctgtggagcagagcctgactcacctataacacaaggcaagccccggtgcatttgccacctccttgctatttaaaatctttctcacttgcttgatgcatt

SEQ ID NO: 71241 - DNA, 459 bp, Zea mays
gcttcttctgctactatgtcataagacacatatatagcaatactatacaataatggccactaaaatgcttctgtagatttgaaccgacactaatgaagatttggtgctagggcagcgaccagggccccgccgctacgctacgtacgttttgacgtgctgcatgctcagccgggcaacgaagaagaacaaccaataaataatgcagcttgagttcaaagaggagctctctcaccatcgtcgacggcagagacagcccgcgccgcgacgaagagcaccaacggcaggacgaccagcgcggcgcgctgcacgctccgcctatcgatcaccatctctggttatcccggcccctcgcctcgtaattaacctcgtacttagccagcagctactattttctacacctcgggagcttggagagtacgagtatgtatctcctctcgcgagctggtgttctgctcacat

SEQ ID NO: 71242 - DNA, 331 bp, Zea mays
  unsure (1)..(331): unsure at all n locations
tctttcgaatgatattctgttattaatattccaagaggggttaatgaacatgttgacctgctagccaagtaagcggcacaggggctttctctaccttcggaagtattttttgagacaataagagcaccttccggttgactcctcgaaaaaccgtgctcacaatatctcctatccatagtgaagattggaggactgagaatattatctttttctanggtaactgtctcttcgatgaagagggttataacaaatgaatggaagcaagaacaaaccatatgtcataattgagggggaatatatanacatggagtntgttccccacttctgaagt

SEQ ID NO: 71243 - DNA, 414 bp, Zea mays
  unsure (1)..(414): unsure at all n locations
tacggacctataaaactcagcttcgccgctcttttcttctctggccctcagcacccttgttcagctgcgcataatcaggatattcgaagcccagtgcatcaagcactcggttcagccttcgcttcggacgggtgccgaaggctgctgtcatcagttgatcttcttttttcgaataatttccaagaatttcattacacatcacctcaactgtatccagccactcttggcagggcttcttaaaatatttcttgaatttgaagtggtaaggaagccggacaagatccccttccttcttctccccctttaactntggcatttcccattntttcagagtagggaagactctgaatgctaagaattcttgaaccagatccctggtaccaatatgctctgcaatgatcctgaattcatcca

SEQ ID NO: 71244 - DNA, 315 bp, Zea mays
  unsure (1)..(315): unsure at all n locations
tggtgccaatggagaagcacatatatttgaagtcttggctgttaaactcgttgccgntgtcgactggtagttcggacggtactccgaagcggcaaacaatgttttgccaaaagaatttctgtgcggtcttcgatgttattgtggaaacagccctcgcctcgatccatctggtaaagtattccacagcaacgaaggtgaacttgaggttcccctgagctatggacaggtggccgacaatgtgcaggccccagcgttggagaggccatgtgtgggcgatcagttttgtgaattgcgaacggctgcctgatccacgag

SEQ ID NO: 71245 - DNA, 388 bp, Zea mays
  unsure (1)..(388): unsure at all n locations
gacaacaattacacagcgacataacaagcaatgtaattaatattgacattcccaatctattaatttcaaaattaataaataccatctttacatatcatttatgtagcgtccaatgagaagaacacaaagaacaatgaataagaaatggagaatgtgaatctgctaacactgtagctntaggggacggcaattaaaggacgctgctggagacggagaatatatagaggacaaaaacttttagagtgttctgtaaaggacataaaataattctttacgggacgaaaattacggtacactgctggagacagccttaacccggangcgttctccacaaagccacaccacaaacagttgcggcgttctgctaagttgcgctggccgctggctt

SEQ ID NO: 71246 - DNA, 300 bp, Zea mays
gagagcatactagaggagcgcgcctacaagtgcagcgaagagaatacctgctcctgctccttgcaggttcagcgagccatcaaaatacaatcgccatacttctgcggattctgggctatccgggacttgatgatctgcccactctgatacgaaatcaaccagtgcttgagattagatggctgcgcgaggtcggaactcgatatcatgggatcccaactcgcaagcccacttggctattcggccaatggcgttcttagtgtgaagaatgccccctattggaaaaccagcaactactatgac

SEQ ID NO: 71247 - DNA, 406 bp, Zea mays
  unsure (1)..(406): unsure at all n locations
gaacttctccctctacgggggagctcccctgggcggtactctccttgccggcggcgaactggatggtggtcatggagcccaccgcggcggacgctatgccagagcataagccggactagcctcgcgcacgagcagaggggtacggtggagcangagcttgngaacgagggtgtggacttgctaccatggatgagcacaacgtccaagagccaaggcgcagggcaaggatggtcacgtaagcggagggagttccactggcgacgagggaggaacgtgtcggggggttgacggcgaggctggcctaccatggcgcccgcactctctctctttcagcgctacctagcgactcgatgttctatgggctcgaccctggtgtggttcgcggcgaggccacacgatgtgggac

SEQ ID NO: 71248 - DNA, 474 bp, Zea mays
taagcttgcagcgcgggtcactgcctcatcaattggtccattacatgctctttcttagaacaaggcgggtcttggaattctggatcttgatcgatatgcgagggggctaagactaaaatggctgtggctacgatggaagagcaaagacagggcgtggaccgccatgagacttccgtgtgacaaaattgatgaagacctcttcaatgcctccacaactgttacggtaggcaatggaaagatagcagaattctggaattctagttggatccaacgccacgcccctatgaatattgcaccctcacagttcatgaaggcaaagaggaagaacatcacggtcgccaaagcgctcactaacaacacttggattcgattatgctccccattcacgggagagggggagtttagtgagttcgcctccctttggcaggccatcggtagcatgcaagagctcaacgggacagaggacaacatctc

SEQ ID NO: 71249 - DNA, 419 bp, Zea mays
  unsure (1)..(419): unsure at all n locations
atgttagtcttagcaattaagcaagtgtcgagttcagctctatcaaaatctaccaagtatagctgaccctctaacacttccttaaatgctattgaatcatcacttcttctaaagacagtgacacctacaacagtgaatagacagttgtagcccatttgacataattgagatacagaaagcaaattgtaatctaaagaatctacaagaaaaacatttgaaatggaatggtcaagtgatatagcaattntacccaatcctttgaccaaaccttgatttccatccccgaatgtgatagctcgttggggatcttggtttttctcataggaggagaacattntcttctctcctgtcatgtggtttgtgcacccgctgtcgatgatccaacttgagcccccggatgcataaacctacaaaacaag

SEQ ID NO: 71250 - DNA, 470 bp, Zea mays
  unsure (1)..(470): unsure at all n locations
tctanagggagaagcacatttaggattaacaaatgttcatttttagaaagacaggatttgtagcgcatgccaagcagggaagcaagttggtacccatcatccacataagaacatcatgacgactgacaggccactggagctcctacacatggatctattcggcccgattgcttacataagcatcggagggagtaagtactgtctagttattgtggatgattattctcgcttcacttgggtgttctttttgcaggaaaaatctcacacccaagagaccttaaagggattcttgagacgggctcaaaacgagttcggcttaaggatcaagacaattagaagcgacaacgggacggagttcaagaactcacaaatcgaaggcttccttgaggaggagggcatcaagcatgagttctcttctccctacaccccacaacaaaatggtgtagtggagaggaataatagaactctat

SEQ ID NO: 71251 - DNA, 402 bp, Zea mays
ctcttctctccactccgccacgccaccacatcctataaccgtcacccagcctacaacaaatattattcgccgccgtctctcgcgcttcgtctggtccatccgcctcgctcgcaacctcccacctgcgccagcccgcacaacaaccgccggccgcgcgcgtctctcgcgcttcgtctggtccatccgcctcgctcccaacctcccacctgcgccagccctcatatgattcccccaccatgaaagccacgacgcatccaatccaccacgacaccaccgccccgccagatccgatcgagttgtgtgctgcagtcggtggatgagttggacacgagcaagaagagccaaagcgatggtgggggcagagctaaacgtgggttggagccggcggagggcgtgtatctg

SEQ ID NO: 71252 - DNA, 464 bp, Zea mays
  unsure (1)..(464): unsure at all n locations
aagcttctggctgaagcaaagcgcaccttctggctgaagtcgttatctcataagagcgcaccttctggctgaagcagagcttcttctctaggagcatgacgaggatgagcagggacgctacgaacgttgtggtgttgcagacgaataggaccttgaggcgcgcgtcgtggggccctcccttgaggatcgcgaaatcctgtacgctatggaaggaggacgtggatgaaggccctggttgtaaagagagttgagttgcatctgatgcggcgggagcaggggcgcggccgccgagatctgggattacctgactgaggagaggggaggaggtggcctccgatccggatgacgcggcggaggtggacggcgaggtgtctgngtcggtggagcctacgaggacgcatgatagggcgacgagggagagcaagaggcacacccaccacggtcgctgctgccaccggcgcttg

SEQ ID NO: 71253 - DNA, 482 bp, Zea mays
  unsure (1)..(482): unsure at all n locations
acctataaaactcagcttgacatagtctcgatgatgtatgccttgagattgtctttgtcttctaaagctattactttttgtgaaaccgcattgaaaaagtaacacaagcgtgtgatgacaactttgacatgctctgtttcgagggctcttactgcaattgggaggaacaccgtcatcatcacatggcagtcatgagagttgtagccaaatagagacaagtccttcatcctgactagtctgctgatattggatgagaaacctgtgggcactttgaccccacgcaaacatttgcaaatctttgttctctcctcaactgacaagntgtagctagctagggggaggtaaggcttccctttgccactatccactggatgaagttccggtctgatatgaagatctactagatcattgcgtgatttaagtccgtcttttgtcttactcngcatgcccagcaaggttccaatgatgctgtcaaaaacatt

SEQ ID NO: 71254 - DNA, 451 bp, Zea mays
  unsure (1)..(451): unsure at all n locations
ttgcgacggatcttgagggacctttctttgtttagcaaccgctgntctagnggcaccctctaaaatcaaaacatgttatgcaataaagttagacttcagttgtacaaataacattgccgagtatgaagctcttcttttagggcttcataaacttaaggcaatgggtataagaagggcaatcctcaaaactgactctcaagttatttctagccacgtggataatagtagcaaagcaagagatccgaagcttgaaaagtatttggacgcagtccaaagattggaagcttctttcatgggattctctgctaaaaatatcccaaggggagaaaatgagcatgcagatttattagctaagtcagcggcacaggggctccctctgccttcagaagtatttttgaaacaataaaagcaccctcagtcgagctcatggagagagcagtgctcatagtct

SEQ ID NO: 71255 - DNA, 125 bp, Zea mays
acaggccccaaaaagaccggcacaggcagcagcaacagggaagccccaccaccaaaaaggacgaccacacaaaccccgggagccccaaggacccccgacccgcgccaccaacgaagagaagaaga

SEQ ID NO: 71256 - DNA, 459 bp, Zea mays
  unsure (1)..(459): unsure at all n locations
tctgtnttggacctccanattctaggggcgtgattggttttcggatgaagccaacctggctcggcccccagatccaggctcatgggagtctggttccagtggtgcaaggggggcgtgattggttgccggataagcagaaccaggctcaacccagcagttgattggttgcacagttgcattagcaaattcaaacacacagatgcaagtagagtgattggttgcagctgcttacaagtggtatggtcaccactgcatacaagtggtgaggttacccaaaccaaatgatcaacaagagcacaactatcagtacaaactgagagataatcaaaccatctttccaactgaaaccaacacgatcagtcttaatgactgattgtttaaaagcagtaacagcttcatcttttgaggagtagctnttgtagcatgcccctttgaaaccatgaacttgagcatgacaag

SEQ ID NO: 71257 - DNA, 370 bp, Zea mays
  unsure (1)..(370): unsure at all n locations
gcattcaacgcgacggaggagaagaaagagtaatctacatcaagtataacacccatcgacgcccccaagctcgacaacgaggaaatggcgctcatcatcaagagctgtcgccaaatcctcaagcaaaggagggggaaggatgacaaaccccgctccaagaaagtatgctacaagtggtggaagcccggncattncattgctaaatgtccattatctagtgatagtaacaggggcgacgacaagaaggggagaagaaaggagaagaagacgtactacatgaagaagggcggcgatggccatgtctgccgggaatgggactccgacgagagctccaccgacttctcctccgacgaggacgccgcaaacatca

SEQ ID NO: 71258 - DNA, 449 bp, Zea mays
tagaatgaatcggcggtgattactatctcttccaaggaaactttggacttgatgtacagtggttgggggtttccactccaaaatgtccttgactgtgctgggatccaccgcaatccccttggcagataatacatgtcccagaaattggatctcctctagccataagacgcacttactgaatttatcatatagttgatgctctcttaagcgcgttaacacgatccacaaatgctgagcatgctcctcttcattcttggagtatattaagatatcgttaatgaataccaccacaaatttgtccaacttgggcataaataccgagttcatcagatatgtgaagtgggcaggagcatttgttagtccgaaagacataaccagatattcaaataatccataccgcgtggtgaatgccggctttggtatatcttctggtcagatacgaatctgat

SEQ ID NO: 71259 - DNA, 430 bp, Zea mays
  unsure (1)..(430): unsure at all n locations
tgccaatacttgtcaaagcaacagcacgtgccctcactttaactgtagaccataccagtaacctggcctttcgcatgctggggactggatatgattggacctttcaagaaagctcaagggggatatactcatgtattggtggcgatcgacaaattcactaaatggatagagttcaagcccattgcttctttaacctctgctaaagccgtggaattcatacaagacataatattcagattcgggataccaaacagcatcatcactgatttaggatccaacttcaccagtgcagaattcttcgacttctgcgagcaaaggagcattcagatcaagtatgcatctgtagcacatccaagagccaacgggcagggtgagcgagccaacggaatgatattagaggcactcangaaaaaggtcttctgataaaatg

SEQ ID NO: 71260 - DNA, 337 bp, Zea mays
  unsure (1)..(337): unsure at all n locations
tttttttttataagcagctctgggagcaaatatctcaaataaagacgcacaagagacacagtggtttattctcgggttcacactaggataacacatgcctaccttcatgttgggcgccccaatggtcgaaggttgcgctcaacccttgtcaagagatccaaagatcaacttggacaccacgacagtacttccctatatactttcacgtttgcgatgaatactcacanattggagcctctcgcccttacacgattgatcacaaagaaagcacggagtatatgtatggagcaacacacacaaatgcttagcacactcactcataatagccaagactcga

SEQ ID NO: 71261 - DNA, 451 bp, Zea mays
  unsure (1)..(451): unsure at all n locations
attattaaagatgtagttagaattaggtctttcttcatttgtccacatttgatgtcacatattgttccttcatctaattcacatggtattttgaaacgagaatgtgctgttcgaccacctggtaggagtaaagaagccacacctgaagaagcgacaaataacactatgtgtttgcggctgcgtaaaaatgttatgatggagttccatagattacgtttgcctgtaccaccgtaaccagagacaaagtagaagcctggtctctttgttagaacagtttctgtaatagttttgaaagcatgtagctgatcattgtttagccttgagataagcatttctgattcggattgcatagcattaatatcatatataagttcatcatcaattaggcgatttgtggcacttgaaaagaagaatttgntctagatggtaagttgaaatcctgaattcgact

SEQ ID NO: 71262 - DNA, 460 bp, Zea mays
  unsure (1)..(460): unsure at all n locations
gatcctgctaggctgtagacagaagaacattcttttgagctaccagnntttccccttctttcataatgtgtatacgacttgaacatcagtttttagactgaaaaaaaaagttaatctgccacaaaagacaaggaagaaaaacaagttaaaacctcctttgattcagaaagggagtgggggtattaatgcattttttgccgctgtgtgtctcattgtttgttttcgctaacgcgtgctgatgaagatacaccatttcatattactctttcagacgaaaatgcttgttttaatatcaaaccatgcctaaacagtctagtgaggtcccaggaaactaatctttggctggcccattgccctgttntgaagacatggcaggcagggttcactgccacattgcatattcagaaattagaaccatttgttataaatctaatgaccttagctcgtaacactagccact

SEQ ID NO: 71263 - DNA, 292 bp, Zea mays
tataaaactaagcttcttagggagaacacgtgatatgtttaactaacgtgcattttgtattagatagaccttgtgcagcttgtcaagcaggtaaacaggtgggaggagcacatcacagcaagaatgtgatgaccacatcatgacccctggagctgctacatatggacctcttcggacccgtcccttatctaagcatagggggaagtaaggatggatcagctattgcggatgacttttaccgcttcacttgagtattctttctgcaggataagtctgagacctcaggaaccct

SEQ ID NO: 71264 - DNA, 349 bp, Zea mays
  unsure (1)..(349): unsure at all n locations
tactaagcttagctcatctatgtatggatgctttgagtagtttattgtcttcggcccttcttgcagcttcctgacttccatggatagcaatgggtccctgatccgaaggtatcttcatgcaaagataggcaagatgaaggattgcttcnaaggcattgagagtaccacgaccaataattgcgttgtaagggtattccatgtcaacaatgtcaaacacaacttgctcagttctagtgttgttgatgaacccgaaggtcactaacatggtgatcttgcccagtgctacaatctgtcttcctccgaagccacagagaggatgtgtagcatcatgaatcttatcttctggctc

SEQ ID NO: 71265 - DNA, 142 bp, Zea mays
gcaccggacagggagggggttactcaaaaaccgcgagcccgccgcgaccacacaccaaaagaccccaggagaccagggcccgacaccccaggacacggaacggggcacaagtcaagaaaagaaaaaaggaaccacggacaaa

SEQ ID NO: 71266 - DNA, 467 bp, Zea mays
  unsure (1)..(467): unsure at all n locations
tctacagggagagcacannnnngggactgacaagaagcacatttttgtgttagacaggggttgcagcgcatgtcaagtatggaagcaagtcggtgttcatcatccacataagaacatcatgacgaccgcaggccgcttgagctactccacatggacctatttggcccgatagcttatataagtatcggcgggagtaaggtgtaacaccctgaatttgggggtataaaatttctttgctcatattcacaaattcgagtgttactcctctcttgacacccttaccaacctcctctttctcttttctatagaagaagaggggctattttctttgtgtaattataagtcaataaactaaactccaaaggagtatgaaatgtagcatcttggtaaaccctaagtttcacttttgatggggcataatacttggaagtgctaatttgaatttgtggcatatttagagatgaatc

SEQ ID NO: 71267 - DNA, 238 bp, Zea mays
gggaaaggacggaaggcacccccgcagaggcccgggcgccgcaccaagggaaggacacataaaagtgaggggcacactaagcacagggagaaggccggcgcaccacaaaaaaagcaaaccggcggccacagcctacaaaggccccccggggctacctacggcaacagccacgggagaccgatctcgctgacgggacacaacgcaagagaaacggaccagcagaccggaccctgctagc

SEQ ID NO: 71268 - DNA, 353 bp, Zea mays
tgcaatagctgacgttgggcaagatgaagctactgcttggtcacttttaagatcaatggctgtgaagatacatgaacttgttggtgcgaggatgcatcatctatctgtatggcagtgggaggcgaaactcaagacggactgtgatggagctgtctgtggtacctggagagtcgtaactacaaatgtcactagtcacacctgcaccatagatgtgagatgaccttactgtgttctatttggtatataacacacatgaagatttaagcatcatgcagttcttatattgcgaggactcgactgacatacatgtctatatgttctgaagcacatagtattactaatggatctatatc

SEQ ID NO: 71269 - DNA, 460 bp, Zea mays
  unsure (1)..(460): unsure at all n locations
ggggcacacgcacacgcagcanacagcccagcccacgtctactctttgccgaaagcactgtgcgggccgtgtggttttcggacgggatcacggatgggctttgaagctgccatcggtttgttctatggtttaggcctgtacgtgggttcaggagagctgcagcttttgatatagattatgcagctactagaaaaatatatagggtccaaaattnttaaaaaaacaatagagacagtgcggcaccttcttgctgtgctctttctgagaagctnttctaaggatctgcagcgggaagaatctggctgtggagaaaatctaagtatcgtggagattacgtgcgtgaaaggtaaaagaaattatagggtttaggatgtagaaaactgacggtttcctactgtcacaatgactcgactgattctgtgttcatatttattntgaacgaatttaactaaagcgacat

SEQ ID NO: 71270 - DNA, 466 bp, Zea mays
  unsure (1)..(466): unsure at all n locations
tcggcgtcgggtaaaaattgtggcaggagaacagtgctttattcaatgaatgctgtggtaacttcacacctactcgtctgtttatatagtactgcaggtaagaaggtgaagcgccaggatttttacaccaggcggatacccgcttgcactcgctgcgtggtggaccgcatagtcaaacagtaactctgcaaggtgggaccgccacgcgctgggaaattgaacgttttctcgacaacgagctcagggaaggtgttttttggaccttcggctccccgaagcttaagagacttttttcacggatcaagctcgttacgaaaaacgatctatcaccgcgaaaggggctactgttgggactatgcttcgtcgccgaaggtcttgtangaagaagcggctntcggatgaagcatgttgtatgggatggccgaaggttcctcttcatgaagcttcggtattacaaaccgactta

SEQ ID NO: 71271 - DNA, 254 bp, Zea mays
taaaggcgcgaggacgccgaataaaaaaacacaacaaaaccctgagcgaggaacaccaagcactgaaaagccgcgacccaaggccgtagacagtaaagcttaacatatgggattttggacagcaatgagtacgtgacaccgcacgagcacgccacccaagcctcccgacatgtcacccgagccaggatcacaaaacattacaggctgaaccataggcaaagcgactcacagtaccgaacgcaacaagttgaaag

SEQ ID NO: 71272 - DNA, 473 bp, Zea mays
  unsure (1)..(473): unsure at all n locations
ctaagcttggaaggttcttcatccccacatgtgctaagcggttatgcctcatccagcccatgctagtcttagcaattaagcatgcatctagaccggcctgctcttttgcaaaatcaactaaatagagtttgccgtctaatacacccttaaaagctaatgaaccatcacttcttctaaagacagacacatctacatttgtaaatagacaattatatcccatattacataattgactaacagatagtaaattatatccaagagactcaactgaaaacacattagagatagagtgttcatttgatattgcaatcttgcctaagcctttcaccttgccttggatcccatcaccgaatatgattgaatcttgggaatccttattcttgacgtaggaggtgaacatcttcttctcccccgtcatatggtttgtgcatccgctgtcgataatccagcttgaacccncagatgcataaacc

SEQ ID NO: 71273 - DNA, 349 bp, Zea mays
ccatgctagtcttagcaattaaccatgtatctagaccggccttcccttttgcaaaatcaactaaatagagtttgccgtctagtacaccccttagagctaatgagccatcacttcttctaaagacagacacatctacatttgtgaatagacaattatatcccatattacataattgacttacggataacaaattatatccaagcgactctactaagaatacattagaaatagagtgctcatttgagattgccatcttggctgagccattaaccttgccttgattcccgtcaccgaatatgagtgaatcttgggaatctttatttttgacgtaggaggtgaacatcttctt

SEQ ID NO: 71274 - DNA, 469 bp, Zea mays
  unsure (1)..(469): unsure at all n locations
ctcagcttgcaacgnttctatgtaccctcgagcgttcgattcatatatttcatgctttgtcagctgcacattaaaantttcagttgcttcggcaactctattttttaactcttccacttcagctttgtgcgcttctgcttgagcggatagcttagcttcactggactttagcctttcgaccaaagatagcaaaatcttgtcctttgcaagagcttcatttctcaaggttataacctctgattggaggtttccaagtgttatctgacagctctcatcctctgcatctttttgagccttcaaagccttgttgaggattagaccctgccaagcagaagagcgaacaaacaataaaagtaagaattaccaaaaaatagttcataaagtaccaaatatgaagccaaaatgtgcaaacctttaagctattgtaagcaaggttgtctgcaagttgatcctttgtcataacggacaa

SEQ ID NO: 71275 - DNA, 443 bp, Zea mays
  unsure (1)..(443): unsure at all n locations
ctaagctatgaagggaaccgtcccggcctctgagaagtctattgtgcggagtggaattcgatgtttgagtgagttcgtctccgtcgtccttgccgcctccgcgtccctctctccccttgaaaaggccctgggcatccccttttatagatacaaggggatggtccagctgtacatatggnggtgtagctatgtgctaacgtggccggcggagaagtgcttgagccctgtagaagcgtagctagcggtgcggccctgggtcctgctggcgtttctttgccttcgtagagagcttgagaacaaccgacgtcatggacgcatgcggngagccatcattacctgttaccggagtaatctagatgtgacaccggtcttgttccttcgtagcctgaggcggctagctagaggtagggtaatgatgtatcccctatagcgtantcggtctg

SEQ ID NO: 71276 - DNA, 254 bp, Zea mays
gcacaaaggaaggggaggtttttaagggcgaggagccgaaataaagaccaaacacagaccagaagcaaaaaccgaaagcgaaccgagacgaagagataaggttaaccgcggaccagaaagacaagaatcccagagcgaaacccttaagctgacacggcaccaaacaaagcaaaaaaaaaggtgacaagaacaatgacaaaacaccacgaaaaagcggaaaaaaaatgaacatgaaaaaagacatgtgcagagaa

SEQ ID NO: 71277 - DNA, 410 bp, Zea mays
  unsure (1)..(410): unsure at all n locations
gatagaagatttttaactgcctcaatcacattgagaattgatccanagatcaagatgtcatcaacatataggcacagcataacagactcacccccaccataccgatgatatacacacgtgtcagcttcatttacagcaaaaccagtagttgtaagagtattatcaaacttttcatagcattgcttacgtgcttgttttaggtcatacaacaattgtatcaacctgcacaccttgttctcttgaccatccgcaatgaacccttctggctgatccatgtagatctcctcatccaactctccatttatgaaagctgtcttaacatccatctgatgaatgataagaccatatgaggctgccacagctattaatgtgcgaatagtagtcaattgagcaactggtgagtatgtatc

SEQ ID NO: 71278 - DNA, 396 bp, Zea mays
  unsure (1)..(396): unsure at all n locations
acaaacatacatagatgagatagttgttacctatcgccactattatataaaaaggaagtgccatgtttctgcaagggccggacatgccgctctatgaaagcaaattgtccgcgccatatgtctgtgaatgttgcgcccacaaagcggaccgatcttgaccggccaagggcgactacctagaaccctagacgcctcaatcattgaaatgatgattctccaaatatcccatctaaacgcgnttaaatttttgcacaacattcacaatgagtagcacgaaatattcccaccaatcacaattgttaaactaatgctcaaatctacatcagagaagatatctgaataatcccaaaattgaagaattttgatgagatctctgagattatgagaaaccgggat

SEQ ID NO: 71279 - DNA, 464 bp, Zea mays
  unsure (1)..(464): unsure at all n locations
ggcacgcgcagcctgggcctacacgcaggccctgtttgtattctcattttctgctgctagtcggcggccgaggtcctccttttcggccttcacagccgacagcttctccatcaggttgcggctcttgttctccgcggccgctttgtcccgcactgcctcagtgtgctgcctccggaggcgctcaatcctcccctcgagtcaccgcctttcggcaacgaactctgaggccagggcccctgacgtaatatgttaggtgagggcggccgcctggcaaaaaaagccgtcaaattcgaagtcatataagaagaacacaatgtcgaagtccacgactacttacatgcttcagctgctgcgcaactaaacccgccacgtccttatcggcggtgaccgaagcgatctcgccgctagcgcaaatcttggaccatgggtcctgcanagaccccattgccctagtcaccacggcg

SEQ ID NO: 71280 - DNA, 235 bp, Zea mays
aagaaaatataatgcgtgtttgcacggataactaagcatgtgctgaaccaacccatacacatccgttattccaacttactgcatggcatgctgaggcgaagactgtgctgagatccatatgagccctttatattactaagggcatgaacaactctaagtctcctaaggctgtccttaaacactgactcttcaaaatacaccatgtgtagaagtaataattgatggatccagtgtg

SEQ ID NO: 71281 - DNA, 470 bp, Zea mays
  unsure (1)..(470): unsure at all n locations
tctanaggggagaacacatttgggattaacaaatgttcatttttgtaaagacaggatttgtagcgcatgccaggcagggaaacaagttggagtccatcatccacacaagaacatcatgacgaccgacaggccgcttgagctactccacatggatctattcggcccgattgcttacataagcatcggcgggagtaagtattgtcttgtaatagtggatgattattctcgcttcacttgggtattctttttacaggaaaaatctcaaacccaagagaccttaaagggattctcaagacgggctcaaaatgagttcggcttaaggatcaagaagataagaagcgacaacgggacggagttcaagaactctcanattgaaagctttcttgaggaagagggaatcaagcatgagttctcttctccctacacccctcaacaaaatggtgtagtggaaaggaagaatcgaactctat

SEQ ID NO: 71282 - DNA, 470 bp, Zea mays
tcatggtagatacccatgtacaattctaaggcagtgtatgttataaatttctatgcaattgtgtagttgcagtcgctattttgtttaactggcttcaaaatggatgtagaccatccgttctgtaagtatttgttgatcctacctaattgatgcttatagtatgtataactatattatataaatgttacatccattgtgctatatttgatttcttgatcgctatattatgatataaaaattgctagagtacaactgattaacagttgactgcctttgtctctatgatctttttgttatgtatttggtaactaaggatggcataagtgagggtcggttcacaccaaatttggagaaagcaatcccagcgatagaaaaagtaaagtgacgtgagggcaaattgtgctgaccattatcatattatgttagaactattgagctattgtatctcaagtacatttgattctttatat

SEQ ID NO: 71283 - DNA, 448 bp, Zea mays
  unsure (1)..(448): unsure at all n locations
acatanatactcagctcacggctacggcgagctgccgaacactttctttcttgannggggctggagagagctggccacggcggccgaagctctggcggcaatggcgggcggaaataagctcgccggagctaaggaacggtggctggccggtgagggtgagtgcggtgcgaantggggcgcgcctggggaggctttatatgcacagcgcggtgcacgggcggtcgtggaccggcgagtgcgcgcggacgtgcactgggaaggcgcggtgcgcgaacgggcgtgaaccacgggtgtcagccgcggtcgaacacgtgttcccgttgcctctgcccctgttcaagcgccgattgggagcaaatcttcgcgaatatgggcaagatcactgcaagggatttgttcaccggaccaagctgtgtcttttgtgtatggacgacgtgcggntttaggc

SEQ ID NO: 71284 - DNA, 454 bp, Zea mays
  unsure (1)..(454): unsure at all n locations
tggacgtganaagtgccttcctcaatggactcttcttgaggaggtctatgttgagcaaccttctggctttgaagatagtgagtaccctaacaatgtttacaaactctctaaggcgctttataggcttaagcaagccccaagagcatggtatgaatgcctaagatattttcttatcgctaatggcttcaaagtcagaaaagccgatcctactttatttactaaaacacttgcaaatgatttgtttgtatgccaaatttatgttgatgatattatatttgggtctactaacgaatctacatgtgaggaatttagtaggatcatgacacaaaaaatcgagatgtctatgatgggagagttgaagtacttcttgggatttcaagtgaagcaactccaagaaggcaccttcattagccaaacgaagtatattcaagacattctanacaagtttgggatg

SEQ ID NO: 71285 - DNA, 313 bp, Zea mays
  unsure (1)..(313): unsure at all n locations
accgcagcagcaacacacaaaggggggctgatctctnccgaaagcacacagacagaggaaacgggatccagggcacacactgaccactccgcggcggggaacaacaaaattggaagaaacccgacgcgtggaaacaaatcgcaacccaggcacgagaacgaaactgaacccgaaagaataacatcggaaaaccagaagccacagattaactactccccgggccatgagggcaaaggacaactaggggaatgacacgggggcagtgaccaaagaccagcatatccaaggcaaaagaaaagacccacaaaaagaa

SEQ ID NO: 71286 - DNA, 453 bp, Zea mays
  unsure (1)..(453): unsure at all n locations
tcagctgggcattcttcagcttcatcatgcggcacatatatttacggaangagaaaggcgcagaattcaaggagaaagtaaaagtaacaagtataagtttctcactggcttaaggaggctccgagcttcgtcaccagccatttttctgccgccgtttatccaaatctgggtcatgaacctatttcctatgcttcgggctatgcttgggatgtcaaccaaatctgtcggagacaaactgaagtttggcctatttacaatcttttcgtgcgtgcagccagccttcaggaaagcggtagccgtgcctcgagaagctagcagggcgcagaaatcagcatgcccagcaataacttcgtcaagagcatcaacctcgccttcaatgtattccaaggagctgggcangttttcagctgaaggtgcaaacttatcagagctagctgcaattgagtgaaacac

SEQ ID NO: 71287 - DNA, 423 bp, Zea mays
  unsure (1)..(423): unsure at all n locations
agcttcttggaggccagctgacagcagtatttanttctttctncaattatgtataaattatctgtgattaacttaaaacttcggagatgaagtacactggagcctgctttttgatttggccatctagcttctcttgtacaagtgctgcactaactgcagagtgcgaagctgccacatataagagtaatggagcccctagtgaaggtggagttagtgtcgttggatcaatcaagtattgcttcaactcttcgaaagcttcttgctgagccggaccccattgaaaaacttctgctgactacaatattcatagaatggcatatctctttctgctgatctggatatgaatctattccatgatgcttgttttattgtcaccgttgtgcccttttttgggctggcggtccatccaagacgactaaattt

SEQ ID NO: 71288 - DNA, 432 bp, Zea mays
  unsure (1)..(432): unsure at all n locations
tgtgagcaatacaagtacagaagggagaaagctgcttctgtctatcagccgaagcccatgctcttatgtgacgatatagcagagcagaaggtgctattgggatcttaattgttcgaggaacaggagaaaactctgataaggtttctgttcaacaacaaagatgtatttgcatggtcagctaatgatatctgcggagtcaacagggatgttattgaacactcgctcaatgttgatccaaccttcataccgagaaagcagaggcttctgaagatgtctgatggcaatgccgaaggtgctcanaatgaagtgaanagactcttcagcgccggagtcatcagagaagtgaaatacccagaatggctagccaacacagttatggtaaanaaggccaatggcaaatggaggatgtgtattgattntactgatctcaac

SEQ ID NO: 71289 - DNA, 411 bp, Zea mays
  unsure (1)..(411): unsure at all n locations
tctcctggcgccggcgccgtcatcatcccttgtcttgtttggcgcangcccctgcctggctggaaccgccccgtcgcccaccccttcctcgccttcgttggatccgtcactgtcgcggccttcccggccggatccacgttgctacgtccttctcggctcgatctgccgtccctttggctggatcgcgtctccccgtccggatctgtcgctgtcgtggccttcccgatcggatccgacattccccttcttttctgccgcgggcgcggacaccttgaccagcgcagtcgcgtgcgctgctgtcggcctccctggcggggctccttgacgtctggtcgatcgaagaagcatgaaggtcggcctgccggtgcccttttgctgtgtcgccctgccgatcgttgacgctcgaacgtc

SEQ ID NO: 71290 - DNA, 256 bp, Zea mays
cctctatagtccttttgagactgttgttcccattcaaggacaatgatgatgcttcatcgataagaacaccggtcaaagcccagactccaggaaagctcgacacaacggtggggagcaggcctttgactacctgccatcatagtaaccacctccgttcactcatcctagatgactccttgtacatggctgcaccatcggtggaatcatgatactagcctgcactcttcagactgagagaatcttaacctgttcctcc

SEQ ID NO: 71291 - DNA, 459 bp, Zea mays
  unsure (1)..(459): unsure at all n locations
ctgaggaagcatataacgtcctattacaaaaggttgnttgttccaccggaggaaacagatgcgggtctagatgagagccatagacaagacatacctcaggtctcggaagtagaaaatgatcttttgatttcaccttttactgaggacgaaattcgtaaggctctattccagatggagcataataaagctcctggtccggatggattccctgcggagttttaccaagtgttttggtctacagtaaaagatgatctacttgctatcttctaagactttcatagaggcgacctacctctttatagtctgaattttggcacgatcatacttttaccgaaatgtatggaggcggagacgattcaacaatatagacctatctgtttacttaatgtaagttttaaaatctgtacaaaggtgatgacaaatacgctctcttcggttgcttcgaaagtaatttctccg

SEQ ID NO: 71292 - DNA, 468 bp, Zea mays
  unsure (1)..(468): unsure at all n locations
tatattaagcgctagacgttaagcaggcgttaggccactatttatcgcctataaagcttaagcgtagattaattgtgcttaagcgtttgtagtaatatacaatataatacatatatttgcacagaaaacaagtttatttaggaattagtggggtacttacctagactagtggacatgtttttgcagccgtgctgcacgttcctagcttcttgccttcagcccttcaccaaacagtagtagcatcacctcagcgcgctgaccctggcgttctggataacttgaccagaaggggaagaggacaccgacggtcctggacagctggggaagaggacattggcagcggtgaacttatacgggtggngaagaggacgaatctggtggtaggctggcagttctgttttcctcctctcacacgcgataccagctgctcccgccttctttcctattattcacgttctttcacgcaac

SEQ ID NO: 71293 - DNA, 303 bp, Zea mays
ttatattgctaccatcaacactagatatgagaacatcatcaccagcaaaaatgcaactaaaaatccaatcacataatagagccatggatatgcaaattaagttaagagattcatctctaagtacatttgaaatggaatggtcatttgaaatagcaatcttacccaaacctttaacctttctctttgccattgttctcaatagtgatgatatcatacgctgagcaaccttccttactacattttgtgaacatactcatactaccgatcacatgttgtgtctaactacactccatacccaatgat

SEQ ID NO: 71294 - DNA, 481 bp, Zea mays
  unsure (1)..(481): unsure at all n locations
tataaaactaagcttgtgaggttcttcatccncacatgtgctaagcggcgatgccatattcagcccatgctagtcttagcaattaagcatgcatctagaccggcctcttcttttgcaaaataaactaagtaaagtttgttgtctagtacacccttaaaagctagtgagccatcacaccttctaaagacgaacacatctacattagtgaatagacaattatatcccatattgcataattgactaacatataacagattatatccaagagactcaactaaaaacacattagaaatagagtgctcatttgatattgcaattttgcctaagcctttcaccttgccttgattcccatcaccgaatatgattgaatcttggggatccttgttcttgacgtaggaggtgaacatcttcttctcccccgtcatatggcttgtggcatccgtgtcgataatccagcttgaacaccccgatgtataaacct

SEQ ID NO: 71295 - DNA, 442 bp, Zea mays
  unsure (1)..(442): unsure at all n locations
tataaaaatactaagcttaataaataatagaacanaattaataatcgaccgatgctatgtttatgacaaaatcgaatttaggttccataaattaatcatcagagagtcctgagctgctcatgaccgcgagctcggctagtataccagttgtacactctgcagaggttgtaccctttacccacaagtcatgttacccatctgccaatgggtcgcgactgccatacacctctacctatgaagcgtggcagggcaacactacgaggcctttacaaagttccactagcttccgaaaacccgctacagtttatgggaagagcacttgctagaatcccccgtctgaccgccatcgcagctaaatcaacccgagaacctgcttgcatgcaactcccctactgcccttgcccctttcgggtgaggtagtcttccactagctttcctaact

SEQ ID NO: 71296 - DNA, 376 bp, Zea mays
atagcttccgcgctgctcttgagaggatctgtcaaggtgttttctttctttaggatcttcggctatgaagcatacccccaacagtagcccctttgcggtgctagatcatttttcgtaacgagcttgatccatgaaaaagtcttctaggcttccggatgccgaagatccgaaaaacaccttccctgagctcattggcgagaaacgattaaaataatccacgcgcaaggtggcctcatcctgcagcagttatgcgcgcactgacgattcaccttctcggactctatggcccaccgttcagtgagtgcgggtggctggttgtccaatgcagaagaccttgatgattcaccttcccacctgcggcactatataaacagac

SEQ ID NO: 71297 - DNA, 282 bp, Zea mays
tgcgtgtgatacaatgccggagccaaccataactcgagccgttgttaagcaaggataacagacattatgctcagggcatctacactggtgctcaaagaggcgttagaaacaatctatgctgatggaaacaaaaaaaatcacgacacactctcagtaactatttggctcactaagataccgataaattactggctggatcgaaatacacatgtgtcaagtgaccactctaatgattacgtgatactagacgaaagatcatcggctaaaaactggaaagaggaa

SEQ ID NO: 71298 - DNA, 316 bp, Zea mays
cttctctgagaacatcagctcagaatcatacccccgaccataacacctttgcggagctagatcatttatcggcacgagcttgatccatgacagatgcttctaagcttctagatgcacgaatatctcgaaaacacgttccctgtactcattggcgaaagacgagtaatataatccgcgcgctatgtggcccccatactgcagcagatatgcgcgcactgacgattcactctttcagactctatggcccaccgttcaatgagtgcgaccgggcgtttgctcagtgcgtaagaccttgatgatccaccttcccacctgc

SEQ ID NO: 71299 - DNA, 458 bp, Zea mays
  unsure (1)..(458): unsure at all n locations
ngacattgtctccctattggaagccattgccctttaaattnttcattntctaagtcatggtcattaattntagcactaagttgagctatgtgatcattttgttgtttaattaaagttaggtgatcatggatagcatcaacattaatgtctctacatctagtacaaatagtaacatgattaacattagatgtaaagggtttgcaagcatttaattcatcaatcttagcatgtaaggtggcattctcatttctaagattggaaatagaaacattgcaaccatttaaatctttagccttagatattaatttatcattctcaatcctaaggctagaaaatgattgattcaacttgtcaattttagcaatcaaactagcattatcatttttcagtttgacaagagaatcatcacanacatttaatttctcaaccttagcaattaatttaacattctcatttct

SEQ ID NO: 71300 - DNA, 382 bp, Zea mays
  unsure (1)..(382): unsure at all n locations
tcaagctgagcagagagtaagcccggatttctttgtttcctctgaacancacatgcctcccgctttataactgaaggggggcatgcacaaccgtgctgagccccgacatgtgtgcctatggaaataatggatatagcactcggagctcaaaagttcgctgctggagcaatcttattgcgccctgacatccaagatctgcgtatcctcagcatgcatgcgaagcctcttgtataatggatggtgagtacagtgcgctgcatggcacggatgcacttgttgacaacagactggacaagcacgccgcctacatgatgaccacttgaatcgtctgccagcatagtggatatgacgtattatatgctgatagggcacatcacctgtc

SEQ ID NO: 71301 - DNA, 458 bp, Zea mays
tcagttccatctatattatggattgcttttgagtctgttcaatttccttcagcccttctggcagcttcttgacttccatgaatagcaatgggcccttggtccgaaggtatcttcatgcaaagataagctggatgcagaattgcttcgaaggcattaagagtaccacgaccaatgattgcattgtaagggtactccatgtcaacaatatcaaacataacttgctcagtccttgtgttgttgatgaatccgaaggccactgacattgagattttgccaagtgctacaatctgccttcctccgaagccgcagaggggatgtgtggcatcaagaattttatcttcgggctcttgcatctatctgaaggccttagcgaatatgatatcagctgcactgcctgtatcaaccaaaacattgtggaccagaaatcctttgataacacaagagataaccatagcatc

SEQ ID NO: 71302 - DNA, 460 bp, Zea mays
  unsure (1)..(460): unsure at all n locations
tgtgtnttcctccatcatgtgttgatatgcatgttcacctaatcatacatctcgtggatcagataaaaatattatggccactatatttacatcatatgtttcagttggagcgatacctgngagtattaaaaggttatgtgcgaaatcgcgctcacccagagggttcaatcatggagggatacactacagaagaagtgattgggagctgtatagattacatcagtgacggaacaatgataggtgtgcctgtacctaaacatgagggtaaactatgtgggagagggagaatgggcaagaaaacttttcgcgttgaggattacaagctagtacattgtgctcatggtagtgtactacaacatctcacgatagctgagccttacatagaggaacacctgaatgagcttcgtaaagaanattagaaccgcacagatgactggatcatgagggagcacanacatcg

SEQ ID NO: 71303 - DNA, 463 bp, Zea mays
  unsure (1)..(463): unsure at all n locations
cttaaaactcaagctggcccttaatgagttggtgtttcctgtctcgtcgtgcctctctcggnggagcaagggagtccagtgaatgacccgatgtaccagaatcctccatcgaccatggaggtcaggacccttgatttcaacgaaggtcttttgtgagagaccagacacgtcggggttgattgtctgtggtaatctcaggcaaatccaatggagtcgtaccccagtaaagaggtggagaacttgagggagaagctggttgaagaaaatttctacctaatcactgaggtaagcggcggccagatcgtgtcacctacggcctacaggagccaatcgtgtctaagctgcctcacgagatcgaagagcaacaatataatagtgcactcttactccacatacatgcagactccattacatccctctgttgaatacttgggtgcaccttgatagtcgacatccttttttt

SEQ ID NO: 71304 - DNA, 370 bp, Zea mays
cgcagctgcagctgcaggatgtggggtgttttttttgagggaacggtagtaccaagtcgtagctaacaactttctcgggtgcccatcattctctccgctttcaaggttgttcctcaacaaagaaatagctctgtatatgaccgggcccaagaatggtgtacgtctctgcactgatctagacataatggtccatccgtccgaccgtgatgcgtggaacgcatttgacgagtttgatcccgaacttgccaactaccctatgagtgtacagcttgttctatctaccgactgattcacacacttcaataagcagcgtcagcccttactcgtgttggcctgtcttcattgtgcctatattcttctactgagttgg

SEQ ID NO: 71305 - DNA, 463 bp, Zea mays
  unsure (1)..(463): unsure at all n locations
ctggatctttataaacaaatgcaatcccattgatagtatgctcgtgtgcaattcatattagcttaacagcctgtgtaacaaaaacaattacccaacttcccaagatagtcaatgcactatatatccaaaacttgatacataccttgttgattttccatgtgaagcaaatagacttcaagactcctaaagtgttcatatctcataagaattaactatatgttttctaaatgtgaaacctcaaaagttataaacaaatacaaatgatatcgaatggggaaggaatccccttgctattcaaatccatgtgtgagtaatctccttgatatttgaatagcacgtggaattcctctccatggatccnctcangatccctgatcaccaaatcagcccttactcaagtactgtgtgaaaacttaactaagccattccactgtccatgataaggtttctttatggagaacgg

SEQ ID NO: 71306 - DNA, 484 bp, Zea mays
cggacctataaaactaagcttcttagggagaacacgtgataggtctaaccgatgttctattcttaaaagatagaccttgtgcagctggtcaagcagggaaacaggtgggaggagcgcatcacagcaagaatgtgatgaccacttcaagacccctggagctgctgcatatggacctcttcggacccgtcgcctatctaagcatagggggaagtaagtatggtctagttattgttgatgactattcccgcttcacttgggtgttctttttgcaggataagtctgaaacccaagggaccctcaagcgcttcctcaggagggctcaaaatgagtttgagctcaaagtgaagaagataaggagcgacaacgggtccgaattcaagaaccttcaagtggaggagttccttgaagaagaagggatcaagcacgagttctccgctccctacacaccacaacataatggtgtggtagagaggaagaacacgac

SEQ ID NO: 71307 - DNA, 421 bp, Zea mays
  unsure (1)..(421): unsure at all n locations
tagttatggtgctactacgagtagaactttctaagatgctcgatattccatgagttccctactggagtcccgtccatctgagttagtcggtaagaccctgtccgagttacttctacgataacaaagggtccttcccatggcggcgatagcttgtgtggtccttcccctacttgtatgcgacgaagcaccaggtctcctactatgaatgctcggnggtcgtattgctttatcgtggtagcgcctcacggtttgttggtacttgaccgactgaatgactatattcgggcattcctcctctagcacataaacttcctcgatcttggttgcttccgcctctactatgatctcaaatgttattatgggtgctccgaagaccaggactgctggaacacttcctctgatagatataccatgaaaaatg

SEQ ID NO: 71308 - DNA, 470 bp, Zea mays
  unsure (1)..(470): unsure at all n locations
tctttgacagaacacaaactctattctactattgtaaaatctctcatgtggtagctgatccatttatcactttggcctttattttctccccctttggcatcaagcaccaaaacgggattaatcttggccttctaaccccattgcctcaccaagatcttcaataagaatacaaaggccataagattgcatgagatgaacttggaatttagttaccctctcatcggagtgcagtggaagtctttcatggtccaagtccaccttttccctttcaatcctccttcgagactaaattatcaaactcaagcacatggttagtctcaaagggtcaagttgtaacacatctccccctaaacatgtgcatcactttgcaacggacttgtgaggtccagggagtgttggtacaacttgagcaccataataagcaacanaatgctgaatgaacctgatcatatgcataaacacatgtatgc

SEQ ID NO: 71309 - DNA, 472 bp, Zea mays
tcggctctgtgctcttcggcttcgtcatcctgtatatattatttagttataaggaaaattcaagtttaaagaacaaggtaagcataaggtatgattttgttaccggcttaagatgacttcgagcttcgtcaccagctaagctatgtccacccttcgtccatactagctatataaatctgtttcctatgcttcgggcaagactgggaatatcaattagatctgctggtgataagctaaagttgggtctattgacaatctttccatgtgtgcaaccagatttcacgaaggcaacagctgtgccccgagaagctactatggcacagaaatcgccatgttcagctataatttcatcaagagcatcaatttcaccctcgatatattcgaaggcccctggtaggtcttcaatcgaaggactaaatgtttcatagctggctccaatcgaattgaaaatctgcttcagccagtgcacaca

SEQ ID NO: 71310 - DNA, 450 bp, Zea mays
  unsure (1)..(450): unsure at all n locations
tctaaaaatgtcaacttgttaggcaggctcccatgcctcacgataacgagggttacattntgtaccctgtcggttatcctgagagcaaaattaggagaattcactctaggaagtctcactctggccctaaccatgcttttatgtataagggtgagacatctagctctaggcaaccaacccgtgctaagttgcctaagaagaatactcctaatgcatcaaatgatcatgacatttcatttaaaacttttgatgcttcttatgtgttaactaacaaatccggcaaggtagttgccaaatatgttgggggcaagcacaaggggtcaaagacttgtgtttgggtacccaaagttcttgtgtctaatgccaaaggacccaaaaccatttgggtacctaaagtcaagaacctaataatgtttgtaggtttatgcatccggcggctcaagttggatc

SEQ ID NO: 71311 - DNA, 257 bp, Zea mays
caggaacccgcggggacaagagcgggcccccccaaaacagaccgcaggacaccgaaacctagctgaacacgcccaaaatgaatcttcaccaaaggcactacgacaggcaaaacgagaaccgaagggaaaacaaccgaaagggacaggcccacagctaaaaaacaaaacgggtaaacacagactgccaaccggcgacaccatatcaacaggaagggcgacaccggaccaagaatccagagcaacaactccggaaaacc

SEQ ID NO: 71312 - DNA, 464 bp, Zea mays
  unsure (1)..(464): unsure at all n locations
ntatcaaatggacgtgaagagtgccttcctcaatggactcttcaaggaagaggtctatgttgagcaacctcccggctntgaagatagtgagtaccctaaccatgtctataggctctctaaggcgctttatgggctcaagcaagccccaagagcatggtatgaatgcctaagagatttccttattgctaatggcttcaaagtcggaaaagccgatcctactttattcactaaaactcttgacaatgatttgtttgtatgccaaatttatgttgatgatatcatatttggatctactaacgaatctacatgtgaagaatttagtaggatcatgacacaaaaattcgagatgtcgatgatgggggagttgaagtattttctaggattccaagtcaagcaactccaagaaggcaccttcattagccaaacaaagtatactcaagacattctaaccaagtttggaatca

SEQ ID NO: 71313 - DNA, 452 bp, Zea mays
ctggacgccacgatggggagcctacatggagtagatctcttctttcttctccttcgccgctttgaatgcgatgggttgcaccttgcgtgtggaggtgctgccttgctccaagttgatgatctgtttggagcctttgatcatcaattcaaagctcacaaactttcctatcacttcgtcgggagacattagcttatatctaggatcaccatgtattaattgaacttgagtaggattgcgaaatacgagcgatctaagaataaccttgaccatttcatggtcatcccattttgtgctcccgaggttgtgtacttggttcaccaaggtcttgagccggttgtacatagcttatggctcctctccttggttgaggacgaatcgaccaagctccccctcgatcctctcccgcttggtgatcttagtcacctcatctccttcctgtgtgggcttgagta

SEQ ID NO: 71314 - DNA, 393 bp, Zea mays
ttaagcaacgcagcatgcagctgaaccaggagggagcgaatgtttatataccaactgactcgagcctagctacgtgtgcatatgtgtaaccaaaatccaaaccttcgacctgtgaataccccttggccacgagtcgagctttgatccttgtcaccacaccatgctcatcttggatgttgcggaagacccacttggctcctacaacattttgggtaggacgtggaactaaatgccatacctcattccttgtgaagatgttgagctcctcttgcatcgtcatacacccaatccgaatcttggagtgcctatctacccagtgtggctcaatagaggaaaccaacgagtaatggtcaccaaaatgcgcaccacgagatctaatagtactccctcatg

SEQ ID NO: 71315 - DNA, 165 bp, Zea mays
tcttctttcacttgatgcatatagaagctacggcctctcatttcatcacaacagacagaccgctgcataccgcgaatcaaccacagcttggtctttggtagcctaaccggaatcctccggctcaagtccttgggcacgatatgataacttatgaatttgtgatcc

SEQ ID NO: 71316 - DNA, 169 bp, Zea mays
caaaaagatagaccttgtgcagcttgtcaagcaggcatacatgtgggaagctctcatcacaccgaaaatgtgaggaccacatcaagaccctcggagatgccttatatggacctcttttgacccgtcgcctatctaagtatatgaggagagaagtatggacttgtcatac

SEQ ID NO: 71317 - DNA, 459 bp, Zea mays
  unsure (1)..(459): unsure at all n locations
tctgtgttggacctccanattctaagggcgtgattggttgtctgatgaagccaacctggctcggcccccatatccaggctcatgggagtctggttccagtggtgcaaggggggcgtgattggttgccggataagcagaaccaggctcaacccaccagttgattggttgcacagttgcattagcaaattcaaacacacagatgcaagtagagtgattggttgcagctgcttacaagtggtatggtcaccactgcatacaagtggtgaggttacccacaccaaatgatcaacaagagcacaactatcagtacaaactgagagataatcaaaccatcttttaactgaaaccaacacgatcagtcttaatgactgattgtttaaaagcagtaacagcttcatctttcgaggagtagctnttgtagcatgcccctttgaaccatgaacttgagcatgacaagaa

SEQ ID NO: 71318 - DNA, 369 bp, Zea mays
ttatctaataatgctagattaagccacgagcttcttcaaactcaagcagttataatagggaaatcctagagcttctaacaagaaaagaatgaactgctagcacaatatgaagccgaagctaataaaaacacaaagctgcacaaaatctctgaaggaccttcggaatacatccttggaatttggcagccgctgcgtgcaatgggtgaaaggtgtcttcaactcggatggagccagctctgaagatattacctctttggctgaagatatactagataccttcaagcattattgaaatgaaggtgatgcactctatgaagtgaatgctatgcatggtgaactttgtgctctgtacttcatcggcacagtgtt

SEQ ID NO: 71319 - DNA, 437 bp, Zea mays
  unsure (1)..(437): unsure at all n locations
ncatgactngcanagagagatctatgcagtcttctatattatgcngcnanggtacccctacaaaactctctctattcctcacccattaaccattatatcgataggaatcccttcatccaccttcacaagcgcctataatctgcaaattcataccaaccaaatactcgacaccgcatgggacatagggtattacgcattcacgtgactcgaacttgtacaaaccttatgttccgacgtgcacccacacgtaccattgagtagcgattaatgtcgccttcctcccacaagcactacgtgggcaaccccgtagtgtgcagtcaggaccaaactctaacacgggccccgtagccccatcacaccagttcttccccatagccctgacacgatcactatacttttgaactcccatcccttcatcctccccttagtgactaggc

SEQ ID NO: 71320 - DNA, 415 bp, Zea mays
agctcgaagcatggggaggactgatgtctataaacactcaaatctgccaatatcattgaaggatctccaagagaaatgcctaaatttcggcagccgatgcgtgcagcggctgaaggacatatttcactctatcggagccagttctgaaaaaatttcaccttcagccgaaaacctgcccagcaccttggaacatattgaaggtgaggttgatgctcttgacgaagttattggtgggcatgccgacttctgcgccatggtagcttctcgagacacagctaccgcttttctgaatgctggttgtacgcacggatagattgtgaataggccaaacttcagcttgttagcagcagatatggttgatacaccaagcttagcccgatgcatccgaaatagatttatgacccatatttacgta

SEQ ID NO: 71321 - DNA, 442 bp, Zea mays
cttgaggaccagaattattgtgatatgatgttgtctttttttctcgaaaacgcatgagaactacgcgtcattatattaagagaagaaacaaatggtcctagtggaccagtacaacaaagggcctccttatggtggccaccaacatccatacatgtaaacatccatggcgactaaacaagaactactactagcagcatccagaacaactagctaagagcatgtaaaccacggataggactggtcagcatggataacttccttgctccagccatttcccacatctctctctcctagtcggctgttctaagagcaacatcaatgttaggcctttttttgtcaaagacacatacattacagagcttgcacaaagtccatgctccaaggatcacaaaagaattcagaccttcttgtgccactccatgaacatgtgtacagatcattt

SEQ ID NO: 71322 - DNA, 456 bp, Zea mays
  unsure (1)..(456): unsure at all n locations
tatgaagattcttcatcccaacatgagctagtcggcggtgccagagccaacccatgttggtcttagcaattaagcaagtgtcgagttcagctctatcaaaatctaccaagtatagctgaccctctaacactcccttaaatgctattgaatcatcacttcttctaaagacagtgacacctacatcagtgaatagacagttgtagcccatttgacataattgagatacagaaagcaagttgtaatctaaagaatcaacaacaaaaacattggaaatggaatggtcaggagatatagcaattttacccaaacctttgaccaaaccttgatttccatccccgaatgtgatagctcgttggggatcttggtttttctcatatgaggagaacatctttntctccccagtcatgtggttggtgcatccgctgtcgagtatccaacttgttcccccggatgcat

SEQ ID NO: 71323 - DNA, 380 bp, Zea mays
  unsure (1)..(380): unsure at all n locations
gaaaaaccccccacgaagaaggagctttatttgcgaacanaaacccgaagaggcagtaccnagaggaccagcccaacatggatggatgtaccccgcataaaggaggggagacaccccgaaacatcctgcgaggaatacggcaccacccgagggagcaactgcacaagcagacgcagctaacgaaagtgtgcacgcaacaacaagggagcctgaagatcgtgagacaagacacaaccgtgagggaaggaatagagagcatgtcgataagactaagggcgacatatctcgaacccaacatggagaacaataactcggagccccaaagagcacatatcaagacaaggatcacgaaaagacggcttgggaagtgcacaacaacc

SEQ ID NO: 71324 - DNA, 284 bp, Zea mays
cttacgactctggcacagcgctggtgactgtgcgaacttccagactgttctctgaagatcctttggtgtggagcataattggctcccttctgactgatggccttgatgaatcggaggtggtggcggacgctgtcgccaggaagctcgaggttgactcagcgaagcaaccacaactgcagggggtgtgcctacataatctgggatgtaaggcgaatgatacgaagcagcgtgcatgaactgcttcggctgagcctgcagagcgcagctacgctatactctattgc

SEQ ID NO: 71325 - DNA, 457 bp, Zea mays
  unsure (1)..(457): unsure at all n locations
tggtgccgatggagaagcagaaanactatgaaggcgtggcttgtcaaatgcttgggcgaatcgactgtgagttcggacgggactccgaagcggcaaacaataattcgctagaagaatttctgggctggcttcgatgttatagtggatactgccctcgcctcaatccatttggtgaaatactcaacggtgacgaaggtgaacttgaggttcccctgagccgtgggcaggggcccgacaatgtccatgccccagcgctaaagaggccacgtgtgggcgattagcttcgtgaattgcgaagggcgtcccgagcatggagaanatttctgacaggcttctcatgaccttgtgacccaatttgcggcgcatatcatggcgggccagtaaaaaccttgacgaatcacctttgccgccagggccctangccctacgtgagagccgcaagtaccgctgtggacct

SEQ ID NO: 71326 - DNA, 418 bp, Zea mays
  unsure (1)..(418): unsure at all n locations
atggaagaaccattcttttctgggaagatatatggaataagggcaccccggctcatcaatattctgagttattttcctttgcttgtaacagcaaacttaccgtcaaagaagctatccaaaaggaacaacttattgaaatttttcagcttcctctgtcggtgcaagcctatgaacaatttcttgacttagacgcaacctgtggccaaatcatggtggccaacacaaatgatgcttggaaactcatttggggagccgataattnttctacaaagaaaacttatagacatttgatgggtcaggctcaggttcaccagatcttcagatcgctctggaaaaataagtgtcaaccacaacataaggttttttttggctttggcttaagaacagactcaatacaagggatatgttgaagaggaaa

SEQ ID NO: 71327 - DNA, 460 bp, Zea mays
  unsure (1)..(460): unsure at all n locations
ctaagctcggaattacaaccgacttacagatagaatgacttgttagttcttatgagcacgagtcattngtgtaaatttttacgaggggtatgattgtaatttctcacgggccgcgtcctgtgcctataaatagtgaacagtattcctttactgctcatgcattcttgtaattgcaaacgcttcactcgggaattattatttgtcaaggcagaggtataaatgttcataaaacattatgttcaagcatcttaaattcgtatgataagatatgtgaataatgtcacttattttcgatatattcgcctctaatgtttcatattgtatgttaccttgtattatctctgtaattttaattacgaaggtataaccttcgtaatattctgctcatggagcttgactgaagtacattaaatccttgagaaaataatgcttcaccggacgaaaggcattgatatttgac

SEQ ID NO: 71328 - DNA, 347 bp, Zea mays
gtggaagaagattttgaagggtatgactgaatccctgcctgtgaagctaagtccattagggcctcaactgacaaagatttttcaaaaggaaaaggagcccgaaaaaacgaagaaaacaactaaaacaaagagacaaagaatcatcgcagtgaccgaagtcattgacaagacaccaccgagagcttcagctcggaaaacaccatcagttgaggaaatatcaaatgttgaagtcgcaccttcggaaatcgcgactaccgaagctacctcagtcgaagatttgaacttggaaaccacaatcgaacatattgtacaaatactgctagacatggccacagaagaagctacta

SEQ ID NO: 71329 - DNA, 427 bp, Zea mays
  unsure (1)..(427): unsure at all n locations
ggacctatgatactaagcttgagactnaggaaaacctatgctggcagtttctttcctttttactgcttccaatatccatgcaactagaaaaggcagaatgtcttctcacatgatgaatataagtctcaagttggcttcttattattgcacgatcaccatccgagaaatctgcatcataaatttcagcaagtcgagcaaacttattgatatcaaatttggagaatgagttttttggatcaagacatgagaagcaaactaataactctatgtttgcttcaccaaaccgatgattcatttccacacaaattttatcaaccacaacatagaaaatctcaacccgataatgatgaaggttattaatagtgaacccttcacgcctcgatctacctttgactggtatttcatcaaccataattggcactggaat

SEQ ID NO: 71330 - DNA, 414 bp, Zea mays
ttgggagcaaatgttacattctagtgaagaaaggtagaaattataagtttgctcccaaagctgtagaagggtttttgttaggttatgactcaaatacaaaggcgtatagggtcttcaacaaatcatcgggtttggttgaagtctcgagcgacgttgtatttgatgagactaatggctctccaagagagcaagttggtgatcttgatgatgtagatgaagaagacgttccaacagccgcaatgcgcaccatggcgattggagatatgaggccactggaacgaaaggagcaagaacaaccttcttcctcaacaatggtgcatcccccaactcaagacgatgaacaagttcatgatgagtgtgatcaaggtggagcacaacatgttatgtgatagaggaagaagccaagcggacctt

SEQ ID NO: 71331 - DNA, 465 bp, Zea mays
  unsure (1)..(465): unsure at all n locations
gggatattctccatcagagaagtatggaaattcttgttaatataaaagattttcttcacgaagcatgaaaagaagggaaggtgtttttttgccgaaggctcaaaaaatggtatgtatgcaaaatttcatgcatcgtaaagaattgaaccataaatagattatatattacattcaaagttacaaagtattacacatgttacatttcaaatgtttttacaatagcatttaatcttccttaagaactacttctgcagcttcgttcagtagctgatagacaactttgtccatgatggcttcggccattnttctaatttcgtcgtccccctttgggtggnggcctagagatgcctcagcaagttctgagggaggagaagatacggctatattactattacaaaccgcgaacaaagtntgaaatcaaaaattacaacagaataaaaaccactagttaatacctatttgctt

SEQ ID NO: 71332 - DNA, 460 bp, Zea mays
tctaaagggagaacacgtgataggtctaaccaatgtttatttctaaaaagatagaccttgtgcagcttgtcaagcaggaaaacaggtgggaggctctcatcacaccaaaaatgtgatgacaacatcaagacctctggagctgctacatatggacctcttcggacccgtcgcctatctgagcataggagggagtaagtacggtctagttattgttgatgacttttcccgcttcacttgggtgttctttttgcaggataagtctgaaacccaagggaccctcaagcgcttcctcaggagagctcaaaatgagtttgagctcaaggtgaagaagataaggagcgacaacgggtccgagttcaagaaccttcaagtggaggagttccttgaggaggaagggatcaagcacgagttctccgcttcctacacaccacaagcaaatggtgtggtagagaggaagaac

SEQ ID NO: 71333 - DNA, 384 bp, Zea mays
ttctgttaagaatattctaagaggggaaaatgagcatgctgatctgctagccaagtcagcggcacaagggctgtcactaccttcggaagtattttttgagacaataagagcaccttcggttgaacttctcgaaagagcagtgctcacaatatctcatgtccatagtgaagattggaggactgagattatatctttcctccacggtaactgtctctcagatgatgatgtttataacaaaagaatggaagcaagaacaagaccatatgtcataatagaaggggaattatacaaacatgaagtttgttccccacttctcaaatgcttatccagagccgaaggtatagaactgatgaacgagatacatgcacgattgtgtggatctca

SEQ ID NO: 71334 - DNA, 229 bp, Zea mays
ccacagccaacccatgcgagtcttagctattaagcatgcattcagaccgggctcatgtgtcgcaaaaacaactatataaagggtgcccgcgaatacaccccttaaagctagtgaaccatcaacttttctaaagacagacatgtctacatttgtaaaaagaaagacataccccacgacgctaaatgactaacagatagcacagtatataccagagactctactaaaaaca

SEQ ID NO: 71335 - DNA, 399 bp, Zea mays
  unsure (1)..(399): unsure at all n locations
tcatcaggagaagttggttgattggctcggcgagggcgcttctggtgaacactgtcagacttctgaatatccaaagttttaccagcctctgggatgggcgctgcatccagtgttttagcaggggctgcgtcagaggaatcttcagccaacatatccagcatggcacttatctcagcatcacttggattcaaaggtacctcgaaatgaacctgcttctcgtcatcagggatttcaccaagtgaggcaaccaaagtactaactctcttgggagagggtcgcactctaaggccaaaaccgctatcaccagcaggaggattcgacacacaattggtaaaagccttggaaggaggcagattctatgccgagtatgcaatangagcaccgatgtttgacaccttg

SEQ ID NO: 71336 - DNA, 471 bp, Zea mays
  unsure (1)..(471): unsure at all n locations
tctaaagcgggaacacattntaggactaagcaacgttcttttttgatatacacatgacttatagggcatgtcaagcaggaaagcaggttggtgttcatcgtccacacaagaatattatgacaatcgagaggccgcttgagctactccacatggatctattcgacccggttgcttacataagcatcggtgggagtaagtattgtcttgtaattgaggatgattattctcgcttcatttgggtgctctttttgcaggaaaaatcacaaacccaagagaccttgaagaaattataagcgacaatggaacgtagttcaagaactctcaaattgaaggatttcttaaggaggagggcatcaagcatgagttctcttccctctacacacctcaacaaaacggtgttgtggagagaaagaataaaactcttttggatattgcgaagaccatgcttgatgaatacaatacatcggatcg

SEQ ID NO: 71337 - DNA, 467 bp, Zea mays
  unsure (1)..(467): unsure at all n locations
acgtgacactatgaaactaagcttcaaagggagaacacgngataggtgtgactaacgtgcatttctaaaaagatagaccttgtgcagcttgtcaagcaggtaaacaagtgggaggagcgcatcacagcaagaacgtgatgaccacttcaagacccctggagctgctgcatatggacctcttcggacctgtcgcctatctgagcataggagggagtaagtatggtttagttattgttgatgatttttcccgcttcacttgggtgttctttttgcaggataagtctgaaacccaagggaccctcaagcgcttcctcatgagagctcanaatgagtttgagctcaaagtgaagaagataatgagcgacaacggatccgagttcaagaaccttcaagtggaggagttccttgaagaagaatggatcaagcacgagttcttcgctccctacacaccacagcaaaatggtgtg

SEQ ID NO: 71338 - DNA, 470 bp, Zea mays
gcttcggactcctcctgaagtcgcgctgatgttgggcatgttgtttcttttctggctgctggcttctggtatgagtaggtggcaatggtggtggtagtggtagctaaggccaagaagcttgtgaatgacttgccgaagcaacagaagttgtaggttgattacccacgtattctggcctatagggagagtagcacgaagcagtatgtaaaacctgtttcggctgattctgacgtgcttctgcttcggcaatctcttttttgcttctgaatggtgacctggcatgttcttgtagtgtggcccttgtcttcaccacagaataagcaatagagtttcctgtgctgatgtaacaccccaacatatcattttggataatttaggacaaacatatattctgaagtaaaaatagttgtgttgaaacacgtgattaaataataagggccaatatgaatgattgccgtagtaaactatgt

SEQ ID NO: 71339 - DNA, 407 bp, Zea mays
tgcggatgctcaaaacatacattgtgcatgaagttgaggtggtcactaacgatgttggagtcacttgtgacttacttgatagtcttacaagtgaacaactacctactaactctatttgtgataaatgcaaaatttctctcaatgataacattcctcttgatgaatcaaaaattattgctgagaatgaagtgctagtagatagaataaacactctaactcatgacctataaaaggcctatggtggcaaggctaaattggatttcatattgggaagtcaacgatgctctcttaaccgcgaaggtcttggatacattcccaagaaaggaaagaatgcttttgtatagcacaagacattgtttgtgaaagaatgtgacaaagtgtgtcacaagtgtcacaaaaagggacat

SEQ ID NO: 71340 - DNA, 252 bp, Zea mays
ccgccgaacatccgcggagcgaccagagggagacatcgctcggacaccctccgggctgggccataggtagcgctacccacccgagccgaatcattcccggcaacaccctcgggggctgcggaagtgtcaacaccactctcgaggaccaagaaaactgcagtaggcgccgtttaggctgaaggagcctcagttacttccatgggaacaagaagatccaagcaaagttcctgaccctcaagaccgcgctccaag

SEQ ID NO: 71341 - DNA, 454 bp, Zea mays
  unsure (1)..(454): unsure at all n locations
tgcttcgncgtacttcccttgatctatgacgaatcttttctggtaacgaagctcctgtaatacttaataatatactagaaacaaatggttagccttgtttttgaggaccttcggaagacgaatgcccccaatagtagcccctcgcagtattagtttgttcctttgtaacaaattcagactataaaatgaacgaagacctttagtcgaaggtccaaaaaacaccttcgcttcgctagaatagcgaaaccttctgtatagttgggcccatcgtgcagtggtgctttgcatatatatatgagggttgcgatgaaaatatttttcgtgctttcaagtttgtgttgggtttgtcgctttagctttctgattctataaccgcgattgctttgtagcttcngcttttagtttcaatcaacgctaagatggccaatgggaagaaaagtgtggaccccgcact

SEQ ID NO: 71342 - DNA, 428 bp, Zea mays
cggcgaccaagggatcgagctcttcgagttctactatgctgaagaccctgagcatctgtttggtgaaggcaagtgtcctcagtcccattatgtcccatttattttataatacactgtcccgcatactatgaacaacctaaggatttactagctttctatctaccttgtccttgatttaccttttgggttactatggttagctacatgctagcgctttattttaatcaatgaacatgatgagatacaatgatgatactgtgattttattctggatatgatgatattcttgtggcatttaaggggactcgggctgtttcccgagtacctctccgtaaggacctgttcgttgagagaccacctgggataacagtgcaaccatgatggtggaatggcgtgcccttatctaattaattacaggaactacaagt

SEQ ID NO: 71343 - DNA, 450 bp, Zea mays
  unsure (1)..(450): unsure at all n locations
ggaactataaaactcaagcttcatggttgtgtcgagaagatcggatctctgtatcttatccaagngttccttgcatccaacattattcctacacgtactgtgtggaaattgctgaaggtggttaaatctaaagaagatgagcttgttactttagcttttgaattcaagaagaaagcttcattcaaagctccttcctcgaggtggttgaagcttatagaaacaaaatgcaatgagattgttggaaactatcttattaaggaggacgaatctatgttctttgcctttgggattcaaaggaaatgaagattgaatagagttatgaatgccctaagtttcgaatatctagattattccaagatagtccttagcgccaaagctagagaaaaaagagagagaaatgcacagttatctatcaagaaggctgctaagaaaggatagcaatgtgggtct

SEQ ID NO: 71344 - DNA, 448 bp, Zea mays
tcccggtcatcgatgcacctatgctgataagcagtatcattcatatgcattatctaaaaaaaaatatgttgtctctgtgcccttcctaattatatatgagatgtatgtcctttcctactgatacatactatatatatttgcagcccaaaggattgggagattctgtttgttcattcaccaatgatgaggatacactactacatacttaatgtagtgtcaccaagaaagtaataagttaatcagaggaatagaagattctacgcttactctcatgtcgataacttctaattctagtttagctcttctttgccggttctttccgctggcttttttttagttgctcgtacaagtaaccagcagtgcacacaattcagccacatgactatgttcatcaattccttggattagcagctagcaccatgcatgtgttgacctttataataaaaca

SEQ ID NO: 71345 - DNA, 460 bp, Zea mays
  unsure (1)..(460): unsure at all n locations
ctacaaagaggaaccttcggctagtgttgtcaaacagcttcatccgaggatcacttctttgtatgagaccttcggcgacgaagcatagacccaacaattaaatacttccttgtactactaatacctcttttcaaagtgatttatcgactagttttaaaaggaaaagagataacaaagaaggaagtctccacaaatgatgaaaagaagaatactaaggtgacaccaccacagatagtaagatctgtcaaactggtataataaatggcacattctatatggtggtaagtattcttaggcataagttaattcattgcaaatttgtcatgccttgaccatgatatgtaatatactcctcatgagactcttaactgaattgaaagtgcatgtgtgaagtcattcaaatacttgatgcacatatctagtgngagaacattatatatcttgtgtcatacagaataag

SEQ ID NO: 71346 - DNA, 361 bp, Zea mays
ccacagccaacccatgctagtcttagcaattaagcttgcatctataccggcctcctctttagcaaaatcaactaaatagagtgtgccgtctaatacacccttaaaagctaatgaaccatcacttcttctaaagacagacacatctacatttgtgaatagacaattataccccatattacataattgacttacagacaacaagttatatccaagcgactcaactaagaacacattagaaatagagtgctcggatgaaatagcaatttttcctaaccctttcaccttgccttggttcccatcaccgaatacgaatgaatcttggtgagcccttgtctcgacggatgaagagaacatctcttct

SEQ ID NO: 71347 - DNA, 470 bp, Zea mays
  unsure (1)..(470): unsure at all n locations
tagttatcccaatttagacataanacaacagatcaagccttgtcatgatccttcagcttataaccaaccactagactatctgnttgcctactaaataatttcccttgcaaaactatcttaccatatatatttctaacccagatggtcaataccaagaagggaggaggtatcaatctacctgctaagcaccatagcaagaggattgtaaaccaaccatggccagaaatgaatctgagagcacctagaggggggtgaataggtgatcctgtaaaatcaaacactaatagccacaaaacttagtttaaagtgttagtacggctaagtagctttgaagtgagttcttgtgaacacaacaatcacagagaaagcaacacaagagacacacacattttatctcgtggttcggccaagtgacacttgcctacttccacgttgtggcgtcccaatggacgaaggttgactcaacccct

SEQ ID NO: 71348 - DNA, 206 bp, Zea mays
atcatgtggctgagaacaaacgctaatcgacttagtataatggagaatctgacgtcccctctgtgggatcctagaaatgaactgatggcatagcttatgcgcttgctcaccgaatgcagcactaaaggcctctagagcacatacgaagacatggcactatgaccgaatccgcaggatagcctaccaaacaatgccgcacatgactg

SEQ ID NO: 71349 - DNA, 395 bp, Zea mays
  unsure (1)..(395): unsure at all n locations
aattaagcatgcatctagaccggcctcctcttttgcaaaatcaactaagtaaagtttgccgtctaatacacccttaaaagctagtgaaccatcacttcttctaaagacagacacatctacatttgtgaatagacagttataccccatgttgcataattgactgacagatagcaaattataaccaagagactctactataaacacattagatatagagtgctcattagaaattgcaattttacctagcccttntaccttgccttgattcccatcaccgaatataattgaatcttgggaatccttattcttgacgtangaggtgaacatcttcttctccccgtcatatggtttgtgcatccgctgtctataatccagcttgaaccaccggatgcata

SEQ ID NO: 71350 - DNA, 394 bp, Zea mays
ctgatgttcaaatcagaacttcagtgcaactagaatattgctagaacatcaatgcctcatctttattatgtgaatctaagtctagcccaaatgataattcttgcaaacattgtgccaaatatcatgcttcttgttgtctaactaaccatgcacagaagaatatcccacaggtgaacgtcaaataaattctgtagagatgctctagcaatgatgtggtaaagaaagttgaacccaagtacaagtcccttaagcccaacaatggaataaagaggcttatgttcaactcatccaaggaaaaccctatcacagtgcataaggtgtggagatccgcctagttcatagagggaaccaccctatatgatgccttcgcgatgatactctactcaaatgacat

SEQ ID NO: 71351 - DNA, 470 bp, Zea mays
tctccggatggtccgaagactgctgacggacggtccggtcacactcatgacccgcaacaaccacgtacattcaaaccgcgacgaccagagataggtacgtggaaaacaaatacatttaaagcagctggtcgggtggtcaaatccggaccgaccttcgatcaattattgtccaaatatgtgaaaaagaaggccggccccagtgaccggccaggaaagcgaccccgctcacccattcgtgagcaatgccaggtcaggccgattgggtcaccccaccaatcggaagaaatgaaaggtcatactgtacaagtgagacctaacatacctacatggacacctccacccccttatccgcctatgccatatccatacacatatttacctccatcatatgtcccaaatcaaatgtggggcatgccaccatatccatttgggatgccacaatacccttgctggggggcaccccaaacatc

SEQ ID NO: 71352 - DNA, 408 bp, Zea mays
attctgcactaaatccctagtgccaatgtgctctgcaataatcctgaattcagctaacacggtttgggttggaccttctggtgtcatactgcatcggggtctggtctctccgaagatcagttcaagtggactctgtaccagcttctccttgtcatcgtcaactttgatgtagaaccattccgaattccagcctgccggccacttgcttcggtagctgatcacaggaaattttgtagtcttccgatagggaaaattgtaacaaccaaaattttcatgtaacccatcctttctggccttagtttggtaatgtagctcgtgtacccggcagaaaccttcggcaaatggctccactctcttgctgcggagagcccaaatataaacactacgcctaacaatagcattaggagt

SEQ ID NO: 71353 - DNA, 466 bp, Zea mays
  unsure (1)..(466): unsure at all n locations
tccttgatctcgtanggtccaatgtagcgaggagctaacttgttcttgatcccgaatctctggacacccttggttggtgataccttgagataaacatgatttcccacttcaaactgtaggggcttccgcctcttgtcatgatagctcttctgcctggcctgagcagcttctaggttcttcttgatgatcctgacctttgcctctgcctcaagtaccaagtctggcccaaaaatttccctttctcctgcttgagaccaatttaatggggtcctacaccttctcccatataaggtttcaaaaggtgccatcttcagactggactgatagctgttattataggaaaactcagccaaggagagacacttgtcccaatccttcccatagtgtagtgcacatgctcgcaacatgtcttccaaaatctgatttatcctttctgtctggcccatctgtttggggtggtatgctg

SEQ ID NO: 71354 - DNA, 435 bp, Zea mays
  unsure (1)..(435): unsure at all n locations
tgtgaacagtacanattcagaagggagaaagcagcttcttcagatcagccgaagcccatgctcttatgcgaggacatagcagagcagaaggtgctgttgggctctcaattatccgaagagcaggagaaaaccttgataaggtttttgttcaacaacaaagatgtttttgcatggtcagccaatgatctctgcggagttaatagggatgttattgaacactcgctcaatgttgacccatccttcagacccagaaagcagaggcttcagaaaatgtctgatgataaggccgaaggtgctcgtaatgaagtcaaaagactcctcagtgcaggagttatcagagaagtaaagtacccaaaatggctagccaacactattatggtaaaaaaggccaatggcaagtggcgaatatgtattcgatttacagatctcaacaag

SEQ ID NO: 71355 - DNA, 357 bp, Zea mays
accaaggtgccagtgtcagagagcctggtcccgacgtcaaactgcgccaaaaccatgccaaacgaatttggtttgagttcaaactttcccagaatgtgttcaagggaatatggcacgactctgataaatggatctcccggctttgagatttgaaaagcagagaacaaagatgatctttgggaagaggactgaatttcagaaattcagaaatctgaatatctccaaggggtcatagatcaagggctgatttggcgatttatttgaattatcttggctaagccttctccaactttcttgctgcttaataaacatactttaaatcctataattggctcaactcaaaatattaaacctatc

SEQ ID NO: 71356 - DNA, 428 bp, Zea mays
  unsure (1)..(428): unsure at all n locations
actgtgtttatatgtgattcgctcttatgaaaagaatggcgcatagatggggctacgcttatcgggagctgctacaggacaactccaaacactatcagagccatacacagaactctaaaccaaggcttcaatgagcagcagttacctctagcatagagcagtgctccactcctgatgctctcctcccaacaataccttgagctgtatccccgagattccttaactagcgaaccaatactggtgcacgttctctntcaattaagatgttctatacctatgtttctaaatacagagacttatatcgttaaaaataattagattagtgtacgggtgtcgatatatttgtctgtcattaaaagttctatgttgactccttagaaataattatgtgaattaataatgtgtgcacacatatttacagacatagt

SEQ ID NO: 71357 - DNA, 439 bp, Zea mays
cggcacttactagcgagctgcatgaaacttcggacttgatgtatagcggctgggggtttccactccaaaatatccttgacttcgctgggatccaccgcaatccccttggcagataatacatgtcccagaaattggatctcctccagccagaatgcacacttactgaacttagcatataattggtgttcccttaagcgcgttaatacgatccgcaaatgccgagcatgctcctcttcattcttggagtatattaagatatcgtcaatgaataccaccacaaatttgtccaactcgggcataaataccgagttcattagatatgtgaagtgggcaggagcatttgttagtccgaaagacataaccaaatattcaaataatccataccgcatggtgaatgcggtctttggtatatctttggttcggatatggatctgatgat

SEQ ID NO: 71358 - DNA, 430 bp, Zea mays
ggaccttagaaactaagcttgggaggttcttcatccccacatgtgctaagcggcgatgtcactaccagcccatgcaagtcttagctattaagcatgcatctagaccggcctcttcttttgcaaaatcaactaaataaagtttgtcgtctagtacacccttaaaagctagtgaaccatcacatcttctaaagacagacacatctacatttgtaaatagacaattatatcccatattacataattgactgagagatattaaattatatccaagagactcaactaaaaacacattagagatagagtgctcatttgatattgcaatcttgcctaaacctttcaccttgccttggttcccatcaccgaatatgattgaatcttgggaatccttattcttgacgtaggaggtgaacatcttctcccccgtcatatg

SEQ ID NO: 71359 - DNA, 472 bp, Zea mays
  unsure (1)..(472): unsure at all n locations
tcggcgtctntatatatntcttcttcctgagcccctggtgttctgtcagtgatgaagtctgctaacgcctaggactgaattgaagatctatgcacatagtcaatagcgaattcgttaagctctacatgccattttccaatccttccagtagcttctctgttcctcattatgtccttcaaaggctgtgatgaaagaacaattatgtggtatgcttgaaaataatgtcgaagcttcctggaggccattaacatagcatacaacaccttctccaattctgtataatttttctttgatagacttaaaactttggagacgaagtacactggagcttggcttttgacttggccatctagcttcttctgtacaagcgccgcacttactgcagaatgcgaagccgccacatataagaacaatggagcccctggcgcaggtgtgagtaatgtngttaaatcaatcaagtattgcttcaact

SEQ ID NO: 71360 - DNA, 459 bp, Zea mays
  unsure (1)..(459): unsure at all n locations
tcaagtgctacaacacatatatatgagctggcattcgctttcggttgctgtttgttaaagtaggatgtccatttgcttgcaggagcatcccatgcatgattgggaacgtgtttgcttttttgactgccaatggcaataatgggcgttttagggttatatgaaataataaaaaaagttgccaactttttcccgtggtataccttctttgcccccctcccccctcacccccttttttttttggtgaaatatagtgtgttcccttcatgaatgtatcagagagggagaggctctctgcctcggccctcggcaaagaaggaacacctaagcattagtaaaaaantttgttgagtgctacggccctgacactcggcaaagaaacaagttttgacgagtgccttctaacgcactcggtaaagaaattggtaaaggggtcttgccgagtgtacgctgacggacact

SEQ ID NO: 71361 - DNA, 427 bp, Zea mays
ctacttccagggcacatacgtgcgctctgtgttctcctgcgatctctgaagctgccgccagcaaccgggagaatccctccgggactacatccggcgattatcgaagcagcgcaccgagctgcccaacatcaccgacttggatgtcatcggcgcgttcctggacggcaccacttgccgcgacctggtgagcaagttgggtcgcaagactcccaccacggcgagcgagctaattgacatcgccaccaagttcgcctctggtcatgaggcggtcgaggccatcttccgaaaggacaaacagcctcaggggcgccagccacaagacgttcccgatgcgtacgctcagcgcggcgcgaggaataagggcaaagaaaagtctcaagcgaaacgcgacgccgccgacgcagaccttgtctgccccgccgagcac

SEQ ID NO: 71362 - DNA, 454 bp, Zea mays
  unsure (1)..(454): unsure at all n locations
tggaggcgtcgattggttgtctacttggggtagactcctccttcttctcctccgngccttgaatgcaacgggttgggcttcngatgtggtggcatcgtcaagctcgttgatctttctcgagccttcgatcatgcactcaaaacttacaaaattcccgataacttcctcggnggtcattttggtatatctaggattgccacggattaattgaacttgagtagggttaaggaaaataagtgatcttagaataaccttaaccacctcgtggtcatcccactttacgctcccgaggttgcgcgcttggttcaccaaggtcttgagccgattgtacatgtgttgtggctcctcccctttgcgaagccggaaccgaccgagctccccctcaatcgtttcccgcttggtgatcttggtgagctcatcaccttcatgcgcggtcttgagtaaatcccaaatc

SEQ ID NO: 71363 - DNA, 425 bp, Zea mays
taccacatttgaagcatgagcgcttcccttgtcttggtcttgcttgattgccccttgcgaccttatagcgtcgtcttgaatctcttgatgatgagagccatctcttcatcattaagtccagccgcctcaatttgtgccaccttgctaggtagcgtctccttgcttcttgttgccttgagagcaagaggttgaggcacattgattggaccattcaatgcgtcgtccacgtatcttgcttccttgatcatcattcgcccgctcacgaactttccaagtatctcctcgggcgtcatcttggtgtacctaggattctcacgaatattgtttacaagatgaggatcaaggacagttaaagaccttatcattatgcggacgacgtcgtggtccgtccatcgcgtgcttccatagcttcttatctttgtgac

SEQ ID NO: 71364 - DNA, 457 bp, Zea mays
  unsure (1)..(457): unsure at all n locations
ntangagatgtcntattttaaattttgttttaaattggtaatagttgtaaaatgatatgtaaaataaacaaatggccaaatattatactgtatatattggtaaccaaaatatctctagaaatgcatgcataccaaatgcataatctctatgcagtatgaaggttgttctcttcggattaaagtcaactacctgaattgttgcagatgcaatccatagggataaaacattgtagaagccggtatggattaaagtaagtaaataggctaattatctatacgggtgtttaacacgaggctaaccaatagagtccgatgtacaaatagaatggtcttcatatgtgcttgttgatagatagctatattttgctaatcgaacaaactttgtacgtgaaagtcgcctaaaggggggtgaataggcaaatctgaaatttataaactntaagcacaactacaagcc

SEQ ID NO: 71365 - DNA, 448 bp, Zea mays
  unsure (1)..(448): unsure at all n locations
agtgattagagagagtgattngtcgtgttcatttgagttcttgcgctnggattgcttctttntctcattctttcttgtgatcatctcaattgtaatcaaggcaagagacaccaattgtgtggtggtccttgcgggaagtttggttcccgtttcattgagaagagaagctcactcggtctgagggaccgtttgagagagggaaagggttgaaagagacccggtctttgtgaccacctcaacggtgagtaggtttgcaagaaccgaacctcggtaaaacaaatccttgtgtctcacttcttatttgcttgcgatttgtttttacaccctctctcggactcgtttatatttctaacgctaacccggcttgtagttgtgatttaagtttgtaatttcagattcgccctattcacccnncccccccctctaggtgactttcaacttgagagtc

SEQ ID NO: 71366 - DNA, 461 bp, Zea mays
  unsure (1)..(461): unsure at all n locations
cggtgccaattgagaagcananatccttgaagtcttggctgtcaaactgcttgccgttgtcaactgttagttcggacgatactccgaagcagcaaacgatgttttgccaaaagaatttctgggcagtttttgatgttattgtggaaacagcccttgcctcgatccatttggtgaagtactcgacagcgacgaaggcgaacttaaggttcccctgagcggtgggtaggggcccgacaatgtccaggccccagcgctggagaggccatgtgtgggcgatcagctttgtatattgcgaggggctgcctgaccgaggagaaaacttctggcaggcttcgcaggaccttgtgacccgatttgcggcgcagatcattgcgggccagtaaaagccttggcggatcaccttaccagctagggcccttggccctgcgtgcgagccgcacgtgccactgtggacttcacgt

SEQ ID NO: 71367 - DNA, 452 bp, Zea mays
tcatcatcatcagttctactacagctatctccactttgttataccaaattataatgttgtgatctatgaggggtactgttaggactagaactgccaacagaagatgatatactctctgtatcactaaattcttcagttgttccagtatgccatttatgaccagcatggatgcatttcccgcgtagaataatgcatggggaatcaacatcatctaccttttcagccaaaggggaaaaacttctatcaaccagctttgagtaccttccatctctatttggtgtccgcaatctcttagtgatttcactgcattgaggatgtgttgatatagcagacgattttctcttgatgcctctagatgtatcaccctcaaaggcattcttggtctcaagttgacgactgtccattctgaagttatgggtctaaattttatctttttgatgacctcggaatgc

SEQ ID NO: 71368 - DNA, 459 bp, Zea mays
actacgcttaagctcttgacgtgaatacttacctagattatttgatatgcgttgtgcacgaatgaaatttttgagaggttaaactaggtatgaagcaaggttatgcatagacatgctttctcttccttttatacaagatattgcaagaatgtatagaagatttacgtatatgtgtcaatgagaggaagtagctttaccctcttgtaccttcacatagagacactctcttcattgtgcattgtccttagtcttagttatttaagacctatattcaagacagtgtatggaaatattttgcacaagagagggttctacaactagtgatcctttttaaatcattgttattatatatcaagtagatcacatattgcgtaaatatattatgaattctccttttaacttagtgcatatcaagagagatattaattgaaattatatgaggcactaagaaacataagt

SEQ ID NO: 71369 - DNA, 484 bp, Zea mays
tactcaagcttgaggtttaattcgcagaatctaccagactcagccctgacccgatttggtcaacgggttgatatattagaagatcgaggtttcataagtaaagtttccaagccgaaggggtacccctcgaccaggaccgttcgatcaagatctaaccgcccggattagatcccaagcctcgcgaaccggtatgtgcctatagccgttagatataagatccacgatctcgatttaaaatagcatgccccgctctcggccgtagatcaacagaccaacgtcctgatttcaatcgccgaatagctcacctagctgattcaatcccatccactaatcacggaacagacggctagcgcacctttccccctttcctcgccggcctgaggcggctccaggacctccccacggcggagttccactggcgcacgaccaacacaacacctagcgcaccataccataattctgcccagcaacacgatggtggggg

SEQ ID NO: 71370 - DNA, 450 bp, Zea mays
  unsure (1)..(450): unsure at all n locations
tacaagcacgagtaaaatattggggcactagctaggttttctgtatttgtggtgggcaccatatggatcttngctcattttttatggagttcttatacgtcaagacacagagccagtcccacgtgattttttttgtttttgtagaactcaatgtatactcataaaaatcatgtaaaagccctcttttggtatactttctcggtgaggatgaagggtttgaatgtggagaataaacggcatagctatttggaccgtgaaagggaattaggcttacacctagttcctaaataattttggtggttgaattgcccaacacaaatacttggactaactagtttgcccaagtgtatagattatacaggtgtaaaaggttcacactcagccaataaaaagatcaagttttggattcaacaaatgagcaaagggccaaccgaaggcacctctggtctg

SEQ ID NO: 71371 - DNA, 460 bp, Zea mays
  unsure (1)..(460): unsure at all n locations
ggtgctgatttaaccagcatagttattattgaagatatttgattataaactnttcagntcttgttgatgaggcccgagatgcatctataaaggaacaaatgactgttatattgaggtatgttaatgcacgaggtcnagttattgaaagatctcttggtattgaagaggttgctgacacgacatcgtattctctaaagccagctttggattctatgcttgcttttcatgggttgtcaatatccagattgcgtggacaagggtatgatggggcatcaaatatgaggggagaatttcatggacggcaaagaagaatattagatgagaatccatatgctttttacatacattgttttgcccatcaattgcaactagttgntgtttcagttgccaagtggtgttcctcagtgtttgatttttttcagacatctactctaattgtgaacactgtcaatgcatcctg

SEQ ID NO: 71372 - DNA, 415 bp, Zea mays
acgaatataccctggaagtgtaaccagattcttctctgatggtgcccattttttaaacgcctcaagggaaaatcccccagtaatcataccaggtgttgcaaaaagtacacagggaccagggttgttaatgaaggaacgttcaaagtggcaaactgaaatgtgaaaaatgttgtctctgttattccaatatttgcaaataaaagacagaacacctcatacctcaactgtggttacccataaaaagtgaaatagcaacaattattatcaaaaatatgattaaataaacaaatatttcaataataaagaaacaaaaaatcaattggtgacatacagttacaaataatagggaataaagggataacttggagggttggttagttaaaaatctacagaatatttagattctcactcaatc

SEQ ID NO: 71373 - DNA, 452 bp, Zea mays
  unsure (1)..(452): unsure at all n locations
tcatactcagctgcatgctagaggccgcgaatatcttctggatggcgtacttgaggtgttcgcctccaggtgcggcgaagagaatacctgctcctgctccctgcagctatagcgagccatcaaaatacattcgccatacttctgcagtttctggattatccggtacttgctggtctgtccactctgatacgaaatcaaccactgcttgagttttgatggcagagcgaggacggaactcgatgtcgtgggatcccagctcgcaagcccacttggctattcggacaatggcttccttgttgtgaagaatatcccctattggaaaaccagtgactactatgactntgtggtcgtcaaagtagtgacgcagcttgcgggcagttagaagtactgcgtataatagctactgaacctgaagatactctttcttcgatgggcctagaacttcactgatg

SEQ ID NO: 71374 - DNA, 411 bp, Zea mays
tgccctccaccaactccattttagtgagcatggtgatgttgttcttttcgcgagaaatcttgagggtgtcccatatctgcttggcattgtccaagccgctcaccttattgtactcgtccctgcacaaagaggctagcaacacagtagtagcttgtgcatttttatgaatttgttcattaataaacatagggctatccgagctatcaaatttcattccattctctacaatctcccatatgcttggatggagagagaataaatgactacgcattttgtgactacaaaatccgtagtcctccccatcaaagtgtggaggtttgccaagaggaatggatagcaaatgtgaattcgaactatgtggaatacgagaataatcaaatgaaaagttcgaattgaccggtcttctatagt

SEQ ID NO: 71375 - DNA, 469 bp, Zea mays
  unsure (1)..(469): unsure at all n locations
tctaaagggagaacacattntaggattaacaaatgtttattttgagaaagacaggatttgtagcgcatgccaagcagggaagcaagttagctctcatcattcgcataagaacataatgacgaccgacaggccactggagctcctgcacatggatctattcggcccgatcgcttacataagcatcggcgggagtaagtactgtctagttattgtggatgattattctcgcttcacttgggtattctttttacaggaaaaatctcaaacccaagagaccttaaagggattcttgagaagggctcaaaatgagttcggcttaaggatcaagaaaataagaagcgacaacgggacggagttcaagaactctcaaatcgaaggctntcttgaggaggagggcatcaagcatgagttctcttctccctacacgccacaacaaaatggtgtagtggagaggaagaatcgaactcta

SEQ ID NO: 71376 - DNA, 438 bp, Zea mays
  unsure (1)..(438): unsure at all n locations
ntagttngattctcatatattcatatatggacttatatttatatggtcaagccaattcacgattcctcatatcttattcactttagcttgaccaatcctcttaatcacttcaacctctattatgatcatatttatgcatagtgatttctcaggacttgtccatatattcaaaccaatatagagaccatattatatccatttgcattgtctcactggttatttcaccttgtgttgaaccttgttcactgatcattatacactattcaagtatgttcatcatactgaatttcctgttcaacacttagcaaacttgttagacctttaaatgtgttgttatccaaatcaccaaaactcacaaaagggatgaatgcactttcacattaagagatctataatccacacacatccgttgtgatccatccttcttctgtacaaaca

SEQ ID NO: 71377 - DNA, 276 bp, Zea mays
tacagccccagggaatctatgcgaaggctacagtaatgatgccctgctacgccacctaggtagtggtcaatggggagtagctctctctgggcagaaagggaatcacggcttgtgggtaaagtgcacaacctctgcagagcgttgaaaactgatatatccgccgtgctcgtggttatgagcggccaaaggagctccagtgattagtggtacttgactaaagacattctggtttacaggtgaccatgagactgacgagtgtcgttatcactatggtgc

SEQ ID NO: 71378 - DNA, 414 bp, Zea mays
  unsure (1)..(414): unsure at all n locations
tgtgaaggttcttcatccncacatgtgctaagttgcgatgccacagccagcccatgctagtcttagctattaagcatgcatctagaccggcctcttcttttgcaaaatcaactaaataaagtttgccgtctaatacacccttaaaagctagtgaaccatcacttcttctaaagacagacacatctacatttgtaaatagacagttataccccatgttgcataattgactaacagatagcaaattataaccaagagactctactaaaaacacattagagatagagtgctcattagaaattgcaattttacctaacccttttaccttgccttgattcccatcaccgaatacaattgaatcttgggaatccttatttttgacgtaggaggtgaacatcttcttctcccccgtcatat

SEQ ID NO: 71379 - DNA, 455 bp, Zea mays
taaagccatggtaagtagcataggcaagtaatatgcgaattgactcaagcctagctacgggtgcataggtttcaccaaaatctagaccttcgacttgtgaataacccttggccacaagtcgtgctttgttccttgtcaccacaccatgctcatcttgcttgttgcggaataccaacttggtacctacaacattttgattaggacgtggaaccaaatacatacctcattcctcgtgaagttgttgagctcctcttgcatcgccagcacccaatctgaatctttaagtgcatcctctaccctgtgtggctcaatagaggaaacaaaagagtaatgttcacaaaaatgagcgactcgagatcgagtggttacccccttatgaatatcgccgaggatggtgttcacagggtgatctctttgaatcgcatggtggactcttgggtgtggcggtcttggat

SEQ ID NO: 71380 - DNA, 458 bp, Zea mays
  unsure (1)..(458): unsure at all n locations
tgccaatacctgtcanagcaacagcacatgccagcacatttatctttttgtactcataccagtgactntggccctttcgcatgctggggattggatatgattggacctttcaagaaagctcaaggaggatacacccatgtattggtggcaattgacaaattcactaaatggatagagttccagcccattgcctctttaacctctgctaaagccgtggaattcatacaaagcataatattcagattcgggataccaaacagtatcatcactgacttgggatccaacttcaccagttcagaattctttgacttctgcgagcaaaaaagcattcagatcaagtacgcatctgtagcccatccgagagccaacgggcaggttgagcgagccaacggaatgatattggaggcactcagaanaagggtctttgataaaaacgaanaattcgcacgaaaatggat

SEQ ID NO: 71381 - DNA, 329 bp, Zea mays
ttacaggaaaactacatgtgcgaggttgacaaggccctttttccaagtactttcttctaccatttctctgagattaggatggtagtcatctatttgtttccgcaaacctggatcatatttaatctcctcttcccagttgatatcatccaaacacagattgctagcaatgttggcactatctggctctggcgcttatcttttgaaaaatctttccatcgattaatctgtatatacactgtctagtaaataactctagaaagaaagaggcgaatatctacaagaaataaatagagattaaataacttgagatagaaagaggcacatatcta

SEQ ID NO: 71382 - DNA, 470 bp, Zea mays
  unsure (1)..(470): unsure at all n locations
tccatctataccgtctcagactgttgaaaaccagctgtaagtcttcgatgaagttntacaagttctctgttntgattaccacatcatctacgtaggcctccacacgcttgccccagtgatcggctaagcatgtttgaatggctctctcataagtcgctccagcgtttttgaggtcgaacgacatggaggtataacaganagcaccaaacggagtaatgaacgctgttttttcttcgtcttcctttgccaaactaatctggtggtatccggaatagcaatccaggaaagacagcacagaacatccagcggtggagtccaccacctgatctatcctcgggagcccgaagggatccttcggacagtgtttgttgagatcagtatagtcgacgcacatgcgccaatccacttttattcttttgagtacaagaacagggttggctaaccactcggggtgtaatacttctctaata

SEQ ID NO: 71383 - DNA, 410 bp, Zea mays
  unsure (1)..(410): unsure at all n locations
ttaaaactaagcttcgcttgacatactctatatactcgtaatccaattctgattattcctgttcacacatttcacttgaaanacattgtcaaatcatgtttttgatgaccttcggaagccgaatgcccccaacaagtatgcatctcctcccacccttcttctatcaaggtgtgggttcagaccccaactcctgcgccgctttttaacataaaccacctcctncaccactttttaacattntatgctgagttgatttagaaaaaatgtagggactntntgtaaaaagatgaccgttgaaactggtgatttaagtatagtatagacatatgtacaatttatattcaatattataaacacttgagcaactctgcctatgtngattggaagacttccttgagtcgtttcaacat

SEQ ID NO: 71384 - DNA, 457 bp, Zea mays
  unsure (1)..(457): unsure at all n locations
gcgcataattatacccttgatatcttctcgtgctttcatatcattnntcacataaaaccattctgtcatccagtcgccgggccatctctttcgaaaggttggcacgggacatcttgacccagaccgagaaacaaaattgtagcagccaaagttattgtgatactgttccttaccccaaggttttgtctcgtatgataattcgtgtatgttgcagaagcttttcgcatcaggttccagaccttggcttctcacggcccatacaaagatgtttagccttataattgcttcgggggtaagttgatgaagatagacttcaaacattttcagcacctccacgacgaagctgctcaagggaaatcgcagcccagctttcaaaaagcttcggtacactacgacttcattctcttcacggtgtggaaaagtcttcttcccttcgtcggccctcacaacggacaaa

SEQ ID NO: 71385 - DNA, 467 bp, Zea mays
  unsure (1)..(467): unsure at all n locations
nggtgtggttatcaacaaggatagttacctcctttcctttcttaangcaatcgatgacttgcatgagaacctccggtctctgtcaatcactcttcctattgtcagaggtgaggccacgccacccaaaagaaactcacaaccatcagctcatagccttgaacgtacgctggaccaacttgagagcctaagcataagtggaatcacacagatggggtggcagcttcttccattgctgactgaaaaaagtaatcagctgacaaaggtgactctaagaagcaccatgctgaagcaggacggtctggaggtcctcgcccatctgccaaaactacactatctcaagctccggcacgaggcatacaaggacactgagctcaccttcaaggaggacgaattcaaatatctcaagtgctttcttgttgagggttccaatatgacccacatcatctttgctcatggagcgaccccta

SEQ ID NO: 71386 - DNA, 452 bp, Zea mays
tcgcacctctgaactaactcggctgcatcgatcttcgctgtcgttcttagaaacctgacctgagaaccttcccgactagtggtctggatgctgcatgtattccacattgccctgcatggacctcctccagaagttgcttcccagtggacgggagaacgcacttcatgaggatgcctgatgcgccccttctgtacaatatcttcccaatgagtgtatagtgagccgactgcctggcaatgcgctctgctgagttcttgtcgtctggttcttcttcattctttatatacttaataatcagccttctccagtcatcagagtctgactcgggttgatctatgatgttgcactcttctgtttgatccattgagatactcggctgcagaatttcttgcacgaagactccgggtgggacctgagttcgactggatccgagcttggacagtacatcggct

SEQ ID NO: 71387 - DNA, 466 bp, Zea mays
  unsure (1)..(466): unsure at all n locations
tggctttcagaagaaacaaggcacgcactcctgtttttattccacgtacatttctaccacagctgcaagctgttatattcattcatatatatagtagcttttattattccgcggtcgatcgtggaatgaaccttctggttgatcagatccatcagcaggcggtctcttctcactgggaggaagcangaaggaggatgaggctgctgccattctttgcctgaaaaccaacaccagctgtcagcagttcacaaattccatgagcagctggttcgttacctatgtttcagctcatcagtgtggagctagacagtgctggaaaaaaaaaacactgatcgatgatcacctcggccggcatgggttcgcccagcaggaattgctggaacacgaagagcgcctgctccgggcggtgcagcgggacctcgtgcccggcgccgcggacggtgaccaaggtcagcccttcgtcgta

SEQ ID NO: 71388 - DNA, 419 bp, Zea mays
  unsure (1)..(419): unsure at all n locations
ngacgctctgtgcatacggctcggctgatgtatgtgatttgagcgagacccaactacaggcgcgtaagagttaccgaaatctaaaccttcgacttgagagtatcctttggccacaagtcgggctttgttccttgtcaccacaccatgctcatcttgcttgttgcggaacacccatttggttcctacaacattgtgattacgacgtggaactaaatgacatacctcattcctagtgaaattgttgagctcctcttgcatcgccaccatccaatccgaatcttgaagtgcttcctctaccctgtgtggctcaatagaggaaacaaaagagtaatgctcacaaaaatgtgcaacacgagatctagtggttacccctttatgaatgtcgccgaagatggtgtcgacggngtgatctcgctgga

SEQ ID NO: 71389 - DNA, 456 bp, Zea mays
  unsure (1)..(456): unsure at all n locations
tcggcatctntgcatgtcccctcttcgtgagcccctggtttttttcagcgatgaaatctgctagcgcttgagattgaattaaagatctgtgcacgtagtcaatattgaattcattaagctccgcggcccattttccaatccttccagtagcttctctattcctcatgatatccttcaagggctgtgatgaaagaacaattatgtgatatgcttgaaaataatgtcgaagcttcctggacgccattaacacagcatacaacaccttatccaattctgtatagtttttctttgataaactcaaaacttcggagacaaagtatactaggacttgccttttagcttgtccttcgagcttctcttgacaagtgtcgcacttactgcagagtgcgaagcttccacatacaataantagtggagccnctagcacaggtggagttaatgttattaaatcgatca

SEQ ID NO: 71390 - DNA, 445 bp, Zea mays
  unsure (1)..(445): unsure at all n locations
tatctcatatagtgcctaacaaaatatgcttggtcgaatttgaacaaatatccctcaagttatgccttttcaagttctctacatgatttaaatttgaatttctaaatgaattcgaaaatgtccatttagcgctggtgtccctgggtcttcttcccttccttctttacaagacagtcctcgggatccctaggccttcttcccttccttctttacaagacagtcctcgaggcactattctcctgagtcatgggcttaacataaaaccctctggttttccagaatccaaactcgaggtccaagtttcatcaaaacagtaccggtggcaaggaatggagcatcggggcttaccggcggtggtagagctccgacgagacggttgatgaggctggngaggctntggcgaacgcgtcnatggtcgggttgtggcccgtggtggtcggagtgt

SEQ ID NO: 71391 - DNA, 458 bp, Zea mays
  unsure (1)..(458): unsure at all n locations
ntagcttcatctatgttatggatcgcctttgaatctgtccaactccctttagcccttctagcagcttcttgacttccatggacaacaatgggcccttgctccgaaggtatcttcatgcataagtacgctggatgaagtatggcttcgaagacattaagcgtccctcgaccaatgattacattgtatgggtaatctatgtcaacaatgtcaaagataacctgctcagaccttgtgttgtggacataaccaaaggtaactgacattgtgattttgccaagtgccacaatttgtcttcctccgaagccacaaagagggtgtgtagcatcatgaatcttatcctctggttcttgcatctgtctgaaagcctttgcaaatatgatgcccgctgcactgcctatgtcaaccagaacattatggatcagaaatcccttaatgacacaagatataaccatagcatc

SEQ ID NO: 71392 - DNA, 455 bp, Zea mays
  unsure (1)..(455): unsure at all n locations
tcgtctaatacacacttaanagctaatgaaccatcactccttctaaagatagatacacaaatatttgtaaataaacaattgtagcccatatgacacaattgacttacagacaatagattatacccaagtgactctactaaaaacacgtttgatattgagtgcttggttgtgatggctatcttgcccaatcctttgaacttgccttggttcccatctccaaagataatagtgtcctgggaatccttgttcttcacgtaaaaggtgaacattttcttctcccccgtcatgtgatttgtgcatcagctatcgataatctagcttgagcccccggatgcataaacctgcaaggtaattaagcttgtgtntaggtacccaactcttgttgggtctacaaagttagtacaatacttttggaacccaatgcagtcttgtctctttgattagatcccaatttt

SEQ ID NO: 71393 - DNA, 438 bp, Zea mays
  unsure (1)..(438): unsure at all n locations
gggcagagcgagccgcatacaccgagccccattgacggttcttcttttaatcgaactacaccccagatcctctaattattcagctaagggcaccccattccaccctcatggttgcactgttttcccgggcggccatccaacgaacaggtccttacggagaggcactcgagaaaccgctcgagcccncttgaaggacacaagtataacatcataataaaagaggggaaaacagcgtatcattgataattctcatcatattcattgattagagttgagcaatagcataagactaagcaataataatccaaccggtgatagatttataactcanatatggacgaagcattggaaatagatttataactcanatatggacgaagggaggtcgagacttagctggtgatgaagctcgaagttatttcaagccggtatttaaac

SEQ ID NO: 71394 - DNA, 468 bp, Zea mays
  unsure (1)..(468): unsure at all n locations
ctttagggtttgaatggaaatatgcaacataatcacattgttcttcaccttcatgtctgaatacgatgcagtggagaacaacatatgttattgcgtcgaaattttattaaaaccacatagctcatcataaatggcatgatatatcagttacttaaatgctatccaaaaaagaaaaattccagaccgtcatatctcanatgtcgatttgatggctattgatgtaatattaaaatagttatataatccctcatgggaccaatgcaaatcatacttgtttctcgttgtcgagtgtcttgaggcctagtttggataatctagtattgattctaattcatatgtattgagttggattggggtgcaacttatactaatttacacctcaatacatctcaacacatgtggattagcgtcaatactagattatccaaacaaagcctgacggggatcatgtgatgtcggcatgggatc

SEQ ID NO: 71395 - DNA, 451 bp, Zea mays
  unsure (1)..(451): unsure at all n locations
tcgagaagagttcgaatgtgaaaaatctcntgttgtatcttacgacgaatgtctaaacttcggcaaccggtgcgtgcaacggctgaagcggacttacctcagatggagctagcctgaagtattgaaccttcgattgaaaacctgccaagcacctttgaacatattgagggcgaagttgatgcgctcgacgaagttatagctgggcacggagacttctgtgccttgctagctttacgcggcacacctgttgctctcatgaagactggttgcacgcatgggaagatcgtaaacaggccaaacttcaggctatcaccagcggatntaactgacatacccagcctggcccgaagcattgtaaataggtttataacacacatctggacacagggagggcgaaacttagcaggtgatgatgctcgagtcatttcaagccggattaatctggacctat

SEQ ID NO: 71396 - DNA, 469 bp, Zea mays
  unsure (1)..(469): unsure at all n locations
ntatngataatgaaaccttntgtttacaaagtacagcttgcccaccggagttttgatgtactactacggatagaatttcctgaggtgttcaatattccacgaatttcccacttcggttccatccatctgggtaagtcggtaggatcctggccgagtgacctctgcaatgatgaatggtccttcccatggaggtgacaatttgtgtcgcccttctcccgttagcactcggcggagcactaggtctcctattgcgaaggatcgatgccgcactgctttgtcgtggtagcatctcagggtttgctggtatctagccgattgaatgacaacatccagacgttcttcttctaatatatcaacatattttagtctggttgcttctgcttcagctatactttcaaatgttatcctgngtgctccaaagatcgaatccgctgcagtattgcttccgatccatataccatgaacaatg

SEQ ID NO: 71397 - DNA, 315 bp, Zea mays
cactatctaatactcgagcttcactgacatggccacttccaggcacgtgcgatatcttgtatcaaatgctggaactagggttatggatgtagtacgagtggtgggtgggaggtcgaggaccaggacccctgtgcttgggcgtcgtaaggctgctggttggagaaattgcggaactacccacggatgaacaatagacgacgtgggggaagcacggacattgtaagtgtgtggtgggatgtggcggccaatgaaactaaggagcgggaatgggaatgcgggaacggtatctagtggatcggtaatggcattcttggt

SEQ ID NO: 71398 - DNA, 401 bp, Zea mays
  unsure (1)..(401): unsure at all n locations
tgaagatgtgcctaggccgttgagctccccgtgtttcggttattattgtatggccgatgttccttcgtcccgatccgatctgaaccgtggatcttaggttgtgtggctgagattggtggccgcgtaccctttcataccttatgatctgtgccattagatttagatccgacgtccgatagttgcgtgccatttgattgngatcgggcgctcggaaatcaatctaggcgttataaaatccgtggcgttgatttctaatcagacggccgagatcttgagataccccttcggccgtggcattttgctaaagagaccttggacttgtaggaaatgaacccgccgtccatgcgacttcttgaaatgtttgcaagttaaccttgtgtttctttgtattattgcgcgca

SEQ ID NO: 71399 - DNA, 429 bp, Zea mays
  unsure (1)..(429): unsure at all n locations
tgctactacggccagacacttgagagcttggagtctttttctcatctccgaggcgaggctaaaanttgtaatggctctggatgtatctcaccgtttggacgtcgcacaggagtccagggagctctctgttgccgagcgtcatctaagatccggccttaagcgtcgtgtgactgcacttgccgtcattgagcgtggccgcaagcggtaggcctctagagtcactaacctcaagctgggtgatgcgaacactaagttttttcattcgaggataaattcaaggagaagaaaaaactgcattcaaaggcttaaccaagaaggcgtttgggcgacctcacacgaggacaaggaanagtttgtgcacgattacttcaatgctgcgctgggagctcctggaccaagggaggtcgacctgaattggggagccttatg

SEQ ID NO: 71400 - DNA, 462 bp, Zea mays
  unsure (1)..(462): unsure at all n locations
ntatcaaatggacgtgaaaagtgccttcctcaatggactcttcaaggaagaggtctatgttgagcaacctcccggctttgaagacagtgagtatcctaaccatgtctataagctctctaaggcgctttatgggctcaagcaagcccctagagcatggtatgaatgccttagagatttccttattgctaatggcttcaaagttggaaaggccgatcctacactctttactaaaactcttgaaaatgacttgtttgtatgccaaatttatgttgatgatattatatttgggtctactaacgagtctacatgtgaagagtttagtaggatcatgacatagaaattcgagatgtctatgatgggggagttgaagtatttcttaagattccaagtaaagcaactccaagagggcaccttcatcagccaaacaaagtacactcaagacattctaaccaagtttgggat

SEQ ID NO: 71401 - DNA, 425 bp, Zea mays
  unsure (1)..(425): unsure at all n locations
gagaaaacagcgcacgcaatatcattcttctatgcgagcacnngcgaacacacacaancacagagaggagccacacaagagacacgccanctntatcccgcggaacggccaagaaacacccgccaacacccacgctgtggcggcccaacggacaaagggagcacacaacccctctcaagtgacacgatgaacaactcgaataccacggtctctccttacaagcgtgtccccggctgcgaggaaactccacaaattggagccactcgcccttacagcagatatcacaaagaaagcacagagcaaggttgggaagagcaacacacacaagactcaaatacgcagcacacccacgcacacaagtgaagactcgagctcaaatgacaacacacggagtgagcgacacgaatggagctcaattctctaac

SEQ ID NO: 71402 - DNA, 451 bp, Zea mays
  unsure (1)..(451): unsure at all n locations
tctaaagggagagcacattttaggactattaaatgtttattntgagaaagacaggatttgtagcgcatgccaagctggaaagcaagttggtgttcatcatccacacaagaacatcatgacgactgacaggccactgaagctcctacacatggatttattcggcccgatcgcttacataagcatcggcgggagtaagtacctgtctagttattgtggatgattattctcgcttcacttgggtattctttttgcaggaaaaatctcaaacccaagagaccttaaagggattcttgagacgggctcaaaatgagttcggcttaaggatcaagaaaataagaagcgacaacgggacggagttcaagaattcacaaattgaaggcttccttgaggaggagggcatcaagcatgaattctcttcttcctacaccccacaacaaaatggtgtagtgga

SEQ ID NO: 71403 - DNA, 458 bp, Zea mays
  unsure (1)..(458): unsure at all n locations
ntaccttgactcccaacaaaccagcatacccatgagagtcttttctttagtcgggtaagtcttgctgagtaattgcgtactcagggttttattcccattgttgctacaagagagactattaacacctttgtgtttttttaaactcacgatggaggcttttgtttatgtcttttatgtgtgtgctacgggaagatggcttcttcacaggtgttgtaataagttagcacttgactctatctcaggcatgtaataatactacctactacttggtttggatactttaaaagtctgctaatgtatattatcttattgtaaagtcttccgctcaacttcggtatttaaagtttatgttcttgtgggattattgtaatacttgcaactatggtgaatggtccttgngaatgaacgagttcatcanaacttggcaccctgagntaagtatctgattcacttacata

SEQ ID NO: 71404 - DNA, 471 bp, Zea mays
  unsure (1)..(471): unsure at all n locations
cttctccataaaatggacaagtacatcagggccgccaatgattttctgcaaatataggaagaagccgacagatactctgaaatggccaggggctttggaggaagattccatcccaggcatgtcaggtcaatccataatgccaacttaaatgacgataggggaaaccaaacccgaaggcagcaacacagctcccaatcatcaggggcccaacaaagttccttcaggccaccagctccaagaggtagaggggcagaaacttcggaggaagatatggagatcagcccagaaagcttttttgtttgttctgcgacaaagacaaagggcataccacaagaacgtgccaggttacgatccanaagcagaaagagattgccgaagccgaagcacgacataatcagccgaagcaggttctacataccgcttcgtgctactctctgtatgtcccagagtatgtangcaatcaacatccta

SEQ ID NO: 71405 - DNA, 471 bp, Zea mays
  unsure (1)..(471): unsure at all n locations
ntcctttaatcccgaaacgcgatacacccttcattggtgaaacctttaagtagacgtagtcttcctcaaggaatataagggcattcgacgtttatctgcataactctattgtcgagtctgagctttcttcatattatgaataattttctgaaccttttcttcgacttctttcaccatatcaggcctaaagaagcacctttcaccaggttcagacaaacattcatcccatttctgtgggaattccagaacacatgcccgtagcatatcttccagtatttggtttaccctctcagtctgtctgctaggccgaactgtggagcaacttggtacccacggatttatgaagctcttcccgaaatttggatacgaattgcgatccatgatccggcactatggtcttccgaacaccgtacagactaagaatacgagcaatgtacattgtgcatagatagtaacccggtgatctgtctt

SEQ ID NO: 71406 - DNA, 469 bp, Zea mays
tatgaagattcttcatcccaacatgtgctagttggcgatttcttaccagcccatgttagtcttagcaattaagcaagtgtcgagtttagttctatcaaaattcactaagtatagctgaccctctaacactcccttaaatgctattgaatcatcacttcttctaaagacagtgacacctacatcagtgaataaacagttgtagcccattttgcataattgagatacagaaagcaaattgtaatctaaagaatctacaagaaaaacattggaaatagaatggtcaagggatatagcaattttacccaatcctttgaccaaaccttgatttccatccccgaatgtgatagctcgttggggatcttggtttttctcgtaggaggagaacatcttcttctcccctgtcatgtggtttatgcacccgctgtcgaatacccagcttgagccccgggatgcataaacctacaaacaa

SEQ ID NO: 71407 - DNA, 468 bp, Zea mays
  unsure (1)..(468): unsure at all n locations
tatggagatntcacaagtcaaacaactacattcattgccatcactagagatgtaagtgcatggcctatatagatacatggacgacataaacgtcttatctttataaagtgctataaaacatatagtccaaaaaaacaaatactttttagtcaaaatttaaaaatgaaataattatatatccactcaaactaaatcaaaacatttgtattctatctataattcattgttcatgctagagataggtatccatggtcctgctatagctagatagatatcatgatgtcatcaagtgctaaaaagaagaaaatgtaaaaaatggaggtttataaattagtaggactactctaatatttgtacacgatcagaatattatancgtaattgggttcattgtcaatcatatcacaagagatattatgtagaaagcacatattaattagtagtgaacatattattagtagttacaaga

SEQ ID NO: 71408 - DNA, 466 bp, Zea mays
  unsure (1)..(466): unsure at all n locations
tagtttagtaattaaagcccttgattaaagtttgacanggtttgtacattgntngcacccaaacccaaaaccctagcttcttaaggcaaaactggcctaaccccaatagggtactaactcaggaaaccctagtgactcagatgtaccgtgaaggatcgccgttacttctcggacaagaagacttggtcactgccctacacgtagcaatccagtaaagtaaaagggtgataaaagacggctagtgcaggccaagtgcttgaactaggatagaaaaaactttagatgtaggtaactttacttaaccggacaataaaacttgatttttaaggattcattattagtaagcatttctacaaacagagtcttagatgcttgatcagctttaccttgattcccaaaagcgagcatatccttgagagtacttttccttagtcgggtaagacttgcgaaagtacactccgtactc

SEQ ID NO: 71409 - DNA, 421 bp, Zea mays
tagcagatcgtagtgcacaagagctaaaaattgtgtgttctggagcagttcgccagacagcgagtcatatgagtttgcggtatggccgtatatatacaccaagtgcgttgaatattgaaagaccccgcttgtcagcgaatgttgctattctagcaaagggaacgtgttttttcggaccttctgcgtgaaaccttcgtccatgtcgcaatctaaatttattatcttaaacaaattattattgcgaggggctactgttggggaccttccgcatcctaaggtactcaaaaacaagatgtaatagtatttctggaggatgatgtgtgaacacgtatcttcggactcaagtcggcctcacagtagaccacaataatactaacgatggtgtcgcgccgaacgtgtaatcaagaaagcttctgcgtga

SEQ ID NO: 71410 - DNA, 418 bp, Zea mays
  unsure (1)..(418): unsure at all n locations
tcagcgtctntatttgtttcttcttcctgagcccctggcatccaatcagcaatgaagtctgctaacgcctgngactgaattgaagatctatggacataatcaatgctgaattcattaagctctgcagcccattttccaatccttccagtagcttctctgttcctcattatgtccttcagaggctgtgacgaaggaacaattatgtgatatgcttgaaaataatgccgaagcttcctggaggccattaacacagcatacaacaccttttccaattctgtataatttttctttgataaacttaaaacatcggagacaaagtatactggagcctgctttttgatttggccatctagcttctcctgtacaagagccgcactaactgcagagtgtgaagctgccacataaaagagtaatggag

SEQ ID NO: 71411 - DNA, 482 bp, Zea mays
ttacggaactataaaactaagcttaaagggtgccatcttgatgctatcttgatagttattattatatgagaactctgctaacggcaaacattcatcccatttttgtgggaattccagaacacatgcccgtagcatattgttggagacttgttctcaaaagctaataattaagaacaaggcaacataaaaagtgttaaacattaaatcccttcgtccttcaaagcattatctcccttcggatataatgaatttcggacgaaggttatgaaggacataccttcataagcacgataaatgatgaagaaagatttatatatagaatatggaaaaatggcataatcactttaaatattattatcaatttatttttatttacgatatttgtacaaacaataataaattacaaatgtaccttcggtctaaaggaaagcaagggtacaagtgtgacacgagggcaaaatgcaaagtcagcgtgaatagta

SEQ ID NO: 71412 - DNA, 459 bp, Zea mays
tgccaatacttgtcaaagcaacagcacatgccatctcatctactacaaaccataccagtaacctggcctttcgcatgctggggactggatatgattggacctttcaagaaagctcaagggggatatactcatgtattggtggcgattgacaaattcactaagtggatagagttcaagcccattgcttctttaacctctgctaaggccgtggaattcataaaagacataatattcagatttgggataccaaacagtatcatcactgacttaggatccaacttcaccagttcagaattcttcgacttctgcgagcaaaagagcattcagatcaagtatgcatctgtagcacatccaagagccaacgggcaggttgagcgagccaacggaatgatattggaggcactcacgaaaagggtcttcgataagaatgaacaattcgcacgacagtggataagagaa

SEQ ID NO: 71413 - DNA, 136 bp, Zea mays
attattagtactgctctggtaaaccactaccccaatctaaaatgcatggaccatgttagaaccaacttgccacatggacctattcggcctgatagcttacataagcatcgacgggaagaagtactgtcttgttact

SEQ ID NO: 71414 - DNA, 455 bp, Zea mays
  unsure (1)..(455): unsure at all n locations
ntanatcggaaccattggtttgggaatatactgatagatttggctctgtgttccaacccacggattggctatgggtcgtaggatcccgatccaagggctcgcgttgcagactgatcacttaagtgcacgtacctaatctaggccgttcgggtctgatccgatggcccatcatggccgataccccttcactttgccagttcgcagaagagaccctagaaaacttaagaatcaacccgcggtctagtatcactattgtctgagtctcgggctacttaccaggaagcccctgtgttttacagaaaatggcgcccaatccagagagagctgaaaataggaaattaatattagaaatcgatttttaatacaaaaataaatctagaaacgttgttaattcatagaaaatgcatatgaactccaaaatgacccattccagtttctaaattcttataatatta

SEQ ID NO: 71415 - DNA, 450 bp, Zea mays
  unsure (1)..(450): unsure at all n locations
tctaaagggagaacacattntgngactaaccaatgttcattttgagaaagacagggtttgtagtgcatgtcaagcagggaagcaagttggtgtccatcatccacacaagaacatcatgacgactgacaggccgcttgagctactccacatggatttattcggcccgatagcttacataagcatcggtgggagtaatattgtcttgtaatagtggatgattattctcgcttcacttgggtgttctttttgcaggaaaaatcacaaacccaagataccttaaagggattcttgagacgggctcaaaatgagttcggattgagaataaaaaagataagaagcgacaacgggacggagttcaagaactctcanattgaaagctntcttgaggaggagggcatcaagcatgagttctcttctccctacacacctcaacaaaatggtgtagtggag

SEQ ID NO: 71416 - DNA, 467 bp, Zea mays
  unsure (1)..(467): unsure at all n locations
ntctcaatctatcttgttgcttatcaaatatactntatcttatataattggctcaactcanaattttaaacttttcattcccttttgcttattttcttgaattttgttcatggggttcacttagggttcttaattagggttgcacattcttatcctttaagagactcaattgtcttgatcatgacactnttaagcatatacttggtgaattctttcttacttaagttattttgatgctcatgcttactttggttcacatgaaataatggttcttggtttggctttttaagagaaaccctaggtgacactggggtgtcacacaaaaagattagaagcgacaatggaacggagttcaagaactctcaaattaaaggatttcttgagggggagggcatcaagcatgagttctcttctcactacatacctcaacaaaatagtgttgtggagagaaagaatagaactctctt

SEQ ID NO: 71417 - DNA, 453 bp, Zea mays
  unsure (1)..(453): unsure at all n locations
nttacggtgggaggcctgtttctggttccgtgcctccgatcattcacctgcaaagcaggatcaggtacctcgctaacaggcattcctgctgtccctgaaggatcacaggccatgttcttgtctgaactggaggaagcttcaacaaccttcacgctaccaagattttcaaatgatgtgatgtgaatgcttcggcttgccttatcaccgtgtagcgttcccagattattcaagtcaattggaccaacaacctcagctctttctttaataaattttggctgatcggcattgatctttgagtgaacttcagccactgcatcaaccttacgctctgatgacttgttaattaagttctccataaccattctctcattttgcccataattggtaagagagttcaatgcattgtttttctgctcagatagattatcctttgtagaatagctctgaaaagtg

SEQ ID NO: 71418 - DNA, 451 bp, Zea mays
  unsure (1)..(451): unsure at all n locations
ntggcttccctgcttatccactcaatgacgccttcggtgctgcctcgaatgaagttttcctcagaggagtaggcaccaacttttgcaaagctgtttttcaattttttcacgaagtgcaaggactnttcgaagcatctttccttggactcaagaagctcctcaatattctgctccagcctggccttccaccattcacttatttcttggctggccttcgcaacttcacagttttctttggcttctgccagttgtctctgaaggtcttcaacctcggctntttgggcttcggcctgagcattatacttagcttcgtcttctttcattntattcaccaatgaaattaaaattntgtctttttctagacctgtaacatcccaggtgttacttaaggttttcacccaagactacacaagtaagctcatcatcacatgtgacttaagttgggaaaagt

SEQ ID NO: 71419 - DNA, 470 bp, Zea mays
  unsure (1)..(470): unsure at all n locations
tctanagggagagcacantttgngactaacaaatgttcatgttgagaaagacaggatttgtagcgcatgtcaagcaggaaagcaagttggtgttcatcatccacacaagaacatcatgacgaccaacaggccgcttgagctactccacatggatctattcggcccgattgcttacataagcatcggcgggagtaagtactgtctagttattgtggatgattattctcgcttcacttgggtgttctttttgcaggaaaaatcacaaacccaagagaccttaaagggattcttgagacgggctcaaaatgagttcggcttaaggatcaaaaagattagaagcgacaatgagacggagttcaagaattctcaaattgaaggctttcttgaggacgagggcatcaagcatgagttctcttctccctacacgccacaacanaatggtgtagtggagaggaagaatagaactctac

SEQ ID NO: 71420 - DNA, 468 bp, Zea mays
  unsure (1)..(468): unsure at all n locations
tctaaagggagagcacatnttgggactaacaaatgtttattntgttaaagacaggatttgcagcgcatgccaagtagggaagcaagttggtgttcatcatccacacaagaacatcatgacacctgacaggccactcgaactcctccacatggacctattcggcctgatagcttacataagcatcgacgggagtaagtactgtcttgttactgtggatgattattctcgcttcacttgggtattctttttacaggataaatctcagacccaagaaacattgaagggattcttgagacgggctcaaaatgagtttggcttaaggatcaagaaaataagaagcgacaacgggatggagttcaagaactcacaaatagaaggctntcttgaggaggagggcatcaagcatgagttctcttctccctacacgccacaacaaaatggtgtagtggagaggaagaatagaactct

SEQ ID NO: 71421 - DNA, 434 bp, Zea mays
  unsure (1)..(434): unsure at all n locations
tctanagggagaacacgtgataggtctaaccaatgttactttcgaaaaagatagaccttgtgcagcttgtcaagcaggtaaacaagtgggaggagcgcatcacagcaagaatgtgatgaccacatcaagacctctagagctgctacatatggacctcttcggacccgtcgcctatctaagcataggaggaagtaagtatggactagttatttttgatgacttttctcgcttcacttgggtattctttttgcaggacaaatctgaaacccaagggaccctcaagcgcttcttaaagagagctcaaaacgagtttgagctcaaggtgaagaagataaggagcgacaatgggtccgagttcaagaaccttcaagtagaggagtaccttgaggaggaaggaatcaagcacgagttctccgctccctacacaccacagc

SEQ ID NO: 71422 - DNA, 437 bp, Zea mays
  unsure (1)..(437): unsure at all n locations
ntagtgngatgtgtattagcaacttgctttctagcttgacatgcactgcatggcttgtctttttcaaacaccacatcctttaatcctctaaccatatctttctttaataccttcttgagtgtgctcattccaacatgtgcaagcctcctatgccaaagccatccaagagaagctttggtgaaaaggcaagttcttaagtctgcatcttctgaagtgaaatccactaagtagaggttgttgtatctaaatcccttgaataccattgattcatcatccatttttgttacaataacctctgatggagtgaataagcattgaagtccaagatcacagagttgtcccactgataataaattgaagctcaagggtgcaactaagagaacatttgatattgataagtcatttgagattgccaccttgccaagtccttgcacttt

SEQ ID NO: 71423 - DNA, 467 bp, Zea mays
  unsure (1)..(467): unsure at all n locations
tgtntgggagctagaggaatgaagggattggagcggtgctaaaatctcccttgttattcaactntgaataggaagagaaattttagcacatctaattccctccaattttttatcctaaacaagcctttaatctcctccaatattattggtctcaaacaagatcttatggttttctaatgattcaccatatttgagaaatgttgtttttaaagcaccagctcgattgcaggagcgtcgccaacctttccgcacggcagaccctatccactagggttgaaaatagatggataattaatgtcgacccgtattgttttcgcatttgactcgtatatttttgtgagatcctatttttattcagattgaatctatatctattctatatttgagaattccacgatgaacccaacaganataagagcataaactaaagcattgtgtccttaattataacaagtatccattctagc

SEQ ID NO: 71424 - DNA, 462 bp, Zea mays
  unsure (1)..(462): unsure at all n locations
tggtgattatccaatntaaaacaagcaccatctcttaacatagattntctatggataaactcaacacaagagatggcattagtagcacaagcactagtttcttatttagcaatcctttatatgcgaaagacaagtgtgttgctaaaaacagaaaaacctcataatatggactaaatttcccttgagcccttaagcacaatatattttgaatgatatggataatatgcatggttattcaataaagtctaaagggctgacttaatccatattatggtgagtgtctaatatagaagaatcaaatccaaattaactagagagagagtacatcacatagttntggatttgttgaccatatgataatattcatttatcttccaattagacctttttcataatcaataactgatgtatatcatcaagtgcttcttttcccttagtggctacacaagtcacaaaagagat

SEQ ID NO: 71425 - DNA, 414 bp, Zea mays
gacactatacactactcaatactcaagcgttgaagccatggtaagtagcatacgcaagtacaatgcgaattgactcaagcctagctacgggtgcataggtttcaccgaaatccaaaccttcgacttgggaatattcgttggccacaagtcgggctttgttccttgtcaccacaccatgctcgtcttgtttgttgcggaagacccacttggttcctacaacattttggttaggatatggaactaaatgccatacctcattcctcgtgaagttgttgagctcctcttgcatcgccatcacccaatccgaatcttgaagtgcttcctctaccctatgtggctcaatagaggaaaccaaagagtaatgctcacaaaaatgtgcaacacgagatctagtgtgtacccccttatggatgt

SEQ ID NO: 71426 - DNA, 457 bp, Zea mays
  unsure (1)..(457): unsure at all n locations
tgtactggcctgagaagggtgccttctttgccctctcccgagataaaatgggtcttggtagtggtttatgtagttcttgtgataatatagagccagattctgatgaattgaaaatattctcgaagaccagctttgtctacagaaaggttacatataatgtcaatgagtttttatacataagacctgatttttttgctgaagatgaggatcgtgcaaccttcaaggctggccgaaatgtgggtctaaagccctatgcagtttgtcaaatattgtccatccctgaaggggctggatctaaaaaactcaatccagcatcagcaaatatcagtgctagaagattttacagaccagatgacatttcatcagccaaagcctatgcatctgacatcagagaggtcatctntntttctatcttggatgcttgagttatctactccataacttcattgttactttt

SEQ ID NO: 71427 - DNA, 460 bp, Zea mays
  unsure (1)..(460): unsure at all n locations
tctaaagggagaacacattntgggactaaccaatgttcattttgagaaagacagggtttgtagcgcatgtcaagcaggaaagcaagttggaacccatcatccacacaagaacatcatgacgaccgacaggccgcttgagctactccacatggatatattcggcccgatagcttacataagcatcggcgggagtaagtactgtcttgtaattgtggatgattattctcgcttcacttgggtgttctttttgcaggaaaaatcacaaacccaagataccttaaagggattcttgagacgagctcaaaatgagttcggattaaggattaagaaaataagaagcgataatgggacggagttcaagaactctcaaattgaaggttttcttgaggatgagggcatcaagcatgagttctcttcttcctacacacctcaacaaaagggtgtagtggagaggaagaat

SEQ ID NO: 71428 - DNA, 468 bp, Zea mays
  unsure (1)..(468): unsure at all n locations
tatcattagcctgctcctcctctgtatctcgatctttttatctcgttngcaatgatggcaaggaccaagttaagcatgcatcacgcagtggccagctcgatgatccggataattcagaattgcttgctgcgtggaaatttaatgcgactctgtgctagtacgcagccaagtcagatcgtcgaggccggcctgagacaagggggcagctgagctgggtactcatcacctagccccatatatgcatgcaatatactgctagctacctcaaatgcagttaaactgatgaagaggacaggacagatgatctgccacataactgtaagctatatatagctaccgcgtatatatagtacggcacaggagattttcactggatctcacatactagcctgcagagagagagagaaagcagaanaaggttttatagttcaagtcacacctagcagtacgtagtggtaatcaatcccc

SEQ ID NO: 71429 - DNA, 464 bp, Zea mays
  unsure (1)..(464): unsure at all n locations
ttatcaaatggatgtgaaaagtgccttcctcaatggaccaatcaatgtaataggtctatgttgagcaacctcccggctctgaagataatgagtaccctaaccatgtctataggctctctaaggcgctntatgggctcaagcaagccccaagagcatggtatgaatgccttagagatttcctcattgctaatggcttcaaagtcggcaaggccgatcctactttattcactaaaactcttgacaatgatttgtttgtatgccaaatttatgttgatgatattatatttgggtctactaacgaatctacatgtgaagaatttagtaggattatgacacagaaattcgagatgtctatgatgggggagttgaagtattttctaggattccaagtcaagcaactccaagagggcaccttcattagccaaacgaagtacactcaagacattctaaacaagtttgggatg

SEQ ID NO: 71430 - DNA, 469 bp, Zea mays
  unsure (1)..(469): unsure at all n locations
actaagcttntcttgcttttgaatgttggttgctattataatcagtatttctttcagcttttntcttattgctctgtccttttacctacctttcgacgtctttatagccatgcattntgctgcataccatcatgctgtgtggttactttaactagttgattgtgtttggttcagtaatataacttcatcatcatggtcatggactgctgttgacatggtccatatgactttgtcattaccttgggacgtctgttgtacttcaatttcttgcatgattactagataccattcataactcagacatcnagttttattaccagtcattactgatacatgttcatagaatgcaacttagcaaactgaaatgtctttgcatgaacctggataagctatcagctgtgagtntcaattttcctcatcanatgaaaaagggatgaatntgagtcgtgattccacgactaactgctga

SEQ ID NO: 71431 - DNA, 443 bp, Zea mays
tcttgaccaaatctgaactcaccaaattattgcagcttccaccatcaataataacacgtgcacgtcgattctcgattgcgaagaaagtctggaacaaattatggtgttgctgcttctctgatgattcaggttgagaactaagaacacgctgcaccatgatgcttcgaagtttcaccgtagcatcaacaccaagcatggcatcatcattagcagccacatcacaggaatcatcattgtcatcctcaccgtcggaagcactaatgtagccatcatccgtagcaatgtatgttcgctgactcgggcaatccttcttcacgtgaccaatcccatgataacggtggcaaacaatacccgaagaacgaccactggaaggtgctgcgggtgctggtgaattctgtttcttggcgggtacctgcaaaggaagttaccaacatgtgctggag

SEQ ID NO: 71432 - DNA, 413 bp, Zea mays
tacaatagcagtttattatgtggtaacttcacaagtacccgtctatttatatagtgctacaggtgggaaggtgaatcgtcaagtcgctcgcacccgctgaacagtcactcgcactcgctgaacggtggaccatagtgcccaagaagctgaatcaccagatcacgcgtacccgttgcatggtgggaccatccttcacttgaaatatttaaatcgtttcccggcaacgagctcagggaaggtgtttttcggaccttcggcaatccgaagcctgagagagtttttcatgggtcgagctcgttacgaaaaacgatctggcaccgtgaaggggctactgttgggggtctgcttcgtcgccgaaggtcccataagaagaaacaccttcggaagactggcaaaagccgaagctatcaatc

SEQ ID NO: 71433 - DNA, 483 bp, Zea mays
cggacctatgaaactaagcttctaagggagaacacgtgataggtctaaccattgttcatttcgaaaaagatagaccttgtgcagcttgtcaagcaggtaaacaagtgggaggagcacatcacagcaagaatgtgatgaccacgtcaagacctctggagctgctacatatggacctcttcggacccgtcgcctatctgagcatacgaggaagtaagtatggtctagttattgttgatgacttttcccgcttcacttgggtgttctttctgcaggataagtctgaaacccaagggaccctcaagcgcttcctaaggagagctcagaatgagtttgagctcaaggtgaaaaagataaggagcgacaacgggtccgaattcaagaatcttcaagtggaggagttccttgaggaggaggggatcaagcacgagttctccgctccctacacacctcaacaaaatggtgtggtagagaggaagaatacga

SEQ ID NO: 71434 - DNA, 444 bp, Zea mays
  unsure (1)..(444): unsure at all n locations
cccttggtccgtttggccggtcttggtgcttgctctagctncacaacgcgcgccgttgtcgaggaccttcccctgtgaagagatagaagatcgagggcctttctgcgaagtgtcagcgactcccgaaaatagtgcttatgctcattntagattagccagaacaccgaggacccttctgcaaagccgccatcgcgggcgtgggcgcgccccgtttctctgtagagttgggccgcctgagctgaaatcagcctatgactgttcattctttatctttttctttttataacagaactaaaacaattctagaaaatggtagaaaaatcctaaaattgtgaaaccaattttcctaggcttcttattttccctagaatttagtaaaaatagttntatgatttttagaggaaataagggaatttaaggcattctacgtagtttaaaatagta

SEQ ID NO: 71435 - DNA, 447 bp, Zea mays
tgaacccggctattccatacatgagaagacaatctcgcattgggagtggagagatggcgagagtggcacgtaccctcctggcaaaggaccgcctaaaaggggtggtgtgctctcgggtggtgcggacctgttcatgcagtggaggttccgtgtgaatggtagacatatccaagggttacgagaaacatatgtcgtgtggttagagatcctcagctgagtaaatcgattcggatcaccgttatatccccggatagtggagacttgatctctaacctgcaacctaagtcaggatgtaaacattatgaataaaaatgatattgtattgatgagatggtgaaattagactagatgcaactagagtctattaatatttaatctggcattaaaatattgaaagtaaggactccctttagtaagctatttctgcaaaaatatctaagttgattc

SEQ ID NO: 71436 - DNA, 456 bp, Zea mays
  unsure (1)..(456): unsure at all n locations
tgctaaaagtcttttcatctaaaggtttggtgaatatatcatcttactggttgtgggtgctaacataagcaattttgatatctccctttgttggtgatctctcaggaagtgatactggatgtctatgtgctttgtgtggcagtgttcaacaggattgcccaccatggagattacactctcattgtcacatatgagagggactntgctcaatttgtagccatagtccctaagggttttcctcatccagagtaattgtgcacaacaatgtcccgcaacaatatactcggcttcggcggtggatagagctactgaattttgtttctttgaatcacaaaacactatggatctccccagaaactgataagtctctgatgtaccctttctatcaatcttacatcangcataatcaatatcagaatacccaattagatcaaaggtagatccctttgggaccat

SEQ ID NO: 71437 - DNA, 450 bp, Zea mays
  unsure (1)..(450): unsure at all n locations
ntaccaaatggatgtgaaaagtgccttcctcttttgttctttcaaggaagaggtctatgttgagcaacctctcggctttgaagatagtgagtaccctaaccatgtatataaactctcttaaggcgctttatgggctcaagcaagccccaagagcatggtatgaatgtctaagagattttcttatagctaatggcttcaaagtcggaaaagctgatcctactctctttactaaaactattgcaaatgatttgtttgtatgccaaatttatgtagatgatatcatatttgggtctactaacaaatctacttgtgaagagtttagtaggataatggtacaaaaattcgagatgtctatgatgagggagttgaagtatttcttaggatttcaagtgaagcaactccaagagggcaccttcatcagccaaacaaagtacattcaagatatactca

SEQ ID NO: 71438 - DNA, 460 bp, Zea mays
  unsure (1)..(460): unsure at all n locations
tctcgttnttgtcaaagaccctttttctgagtgcttatagtatcattctgtttgctctttctactggtccattagccttggggtgcgctatcgaagcgtacttgagtgggatgcacttttgttcatagaagtcaaagaatttagcactggtgaagtttgaaccaggtatgtaatgatgttgttgggtatcccaaacctgaatataatctcttagatgaactctaccaccttggctgaggtcaaagtggctattggcttgtactctatccattttgtaaacttgtcaataactaccaacacatgtgtatatcctccttgagatttcttgaatggcccaatcatatctagccccagcatgcgaaggaccaggtgactggaatagtctgcaagtgatgtgctagtagatgctatttttggccaaggactgatagtcttcacatttgtgcatctttctttgtag

SEQ ID NO: 71439 - DNA, 452 bp, Zea mays
  unsure (1)..(452): unsure at all n locations
tctactcacggggccttgttcttgataacctccaagtaattattcgagngacgaacattgacgggcgccttcttgtaactcacgactaccacaaagagctttggtatgccttcaaagaaaactacaacacctagttctgttctccttcccatagatcagaaacagaacaaagatgctctcctccgagaggcacaaaatcagaagagaaaagccatctacccccactgcataatgatcaggatgagcttgaccaagaaatccgaaatcttaatgctactcatcaacaagtcgagaagcgcaaattaaagatgctttgggtctcgcaactccagaagcaatagatgaagcattatagcatatgcgcaatattacacatcaaattgagccgtcagaacacaattcttccatgaagacctccaacatgatggccacactcatgatgatcttcgcat

SEQ ID NO: 71440 - DNA, 465 bp, Zea mays
  unsure (1)..(465): unsure at all n locations
aactcaagctntatactgntttcttctctatcaaaatgattggtagagctccatctcttctttaccaganaaaggtgttgnttggcacatcctgattgtctaattaatcctaacttccactgcttggattcattattaatcattgcattggcaacaaaagtagatctttttgctacctaacaacaagaagaaagcctnttagctcgaagcaatatttgctaccgacaaaagaaattaagaactgatgttattttaatttcagatggaagcgctagtcaagaaaagaaccatgccacatctcagatacccgctctggcgccagagtatttggcaccatactcgcagctggaactgaaccaatcaattgtgtgcacccctttctctgcggactatgtttcttgtctgttatgtttctattctgaaaactagtaagcaacgtgttcttgtctatgttatatcttcctc

SEQ ID NO: 71441 - DNA, 449 bp, Zea mays
  unsure (1)..(449): unsure at all n locations
agctcccggccttggatgactattcgcgtggatgtgttgttcaaccgccgccgacgagctcggccgactgctcacgtggagcggacgattcccgccatcaccgtgctggagccgtacctcatggcgaccgccatgacttgccgaaaccaaccccgaccttcgctggacctacctagcatatgtaagcacgggcgccctaattactatcgcgggtactgttccaaaggggggagggacctcggggaagaatgaaaaaaagccggtggggtgtgaattgtcggactcagatgaatagctgcgcaagggtataagatgaatgattggtttatgacaagccataggtcctcggtgtaaactggtgtntagaaaaccttctaacatatctcttttaatcaaacagagcttgaaaattataactcagtttattcaccaatttgcatgtctaatat

SEQ ID NO: 71442 - DNA, 448 bp, Zea mays
  unsure (1)..(448): unsure at all n locations
tctaaagggagaacacattntaggattaacaaatgttcattttgagaaagacaggatttgtagcgcatgtcaggcaggaaagcaagttggtgcccatcatccacataagaacatcatgacgaccgacaggccgcttgagctactccacatggatctattcggcccgattgcttatatcagcatcggcggagtaagtattgtcttgtaatagtggatgattattctcgcttcacttgggtattctttttgcaggaaaaatctcaaacccaagagaccttaaagggattcttgagacgggctcaaaatgagttcggcttaaggatcaagaaaattagaagcgacaatggacggagttcaagaactctcaaattgaaggtttccttgaggaggagggcatcaagcatgagttctcttatccctacaccccacagcnaaatggtgtagtgga

SEQ ID NO: 71443 - DNA, 382 bp, Zea mays
taccatgatgcgtcagttgatcacgaaaagtttcagtgtatatggagagactataggtgacacctgggtttgctggatacgtgagaacaaaatagctacccgcaaattcatggtgaaacagatgtgccacctatgctctcaatcatataattactacaccaaagcctgcatatatagcaaacttaagcattgagagttaattcataactatttaacagtttgtacagaatgcacactctcgtggatgacactggactgacacctatgtatccacaaccacgcaagcgaccgacataatcctcggtgcggccgacccacgaatggtagaccgcgagggggccaatcaccactgtctatatacatctgtagagagccacgagcc

SEQ ID NO: 71444 - DNA, 465 bp, Zea mays
  unsure (1)..(465): unsure at all n locations
ttatattctacctggacatacccaaacagaacaaggaacttgctgntttgacacctcgtgtgtatggcatngatacaacagctagtcatcgtggaaatcatttctttattaagaggcgaagtgatgaattctacaattctgaattggttgcttgtccactggataatgtagctgagaccactatactgctaccacatagagaaaggtacttacattattgtcatacaaatttcagaagatatttttgtggtttatacgtaatgtacacatatcacactnttgggggaacatatttagactaactgaattgaaatactcaaacactaaggggccatttggatcagtgttattaaaactacgtctaaacgatgtttaaagtaccgttaaacgtcaaaactctaattagaggtggaaaccacggtttagcgttttggcgctctaaactgtaatacacagcgttttatg

SEQ ID NO: 71445 - DNA, 451 bp, Zea mays
  unsure (1)..(451): unsure at all n locations
tcgtacctcgttntacgcttaactgcgtgaggatatgatcatgtctactcaacgggaccatgtggatcctctcctcgaggaaatccccatcacatcttccggtgaggaagtggaccccaaggtcctcgacctcgccatgaagattgccgagaagatgttcctcaaaatgaaagaggaagatgctaagaaaaaggccaaagaagaagaatcaagaagaaaggccgaagaagataaaggtaagggaaaatttgattacaatgacgatctagtggatcttttggtgtcgaaggtgttgagcaaggtaagtctcaacaccgaaggatcatctaccaaaagcaaaggtaacgaatttagtaaagttcaattcgattactctaganattttattcccaacttctcttccgccccacttggaaagttaccaactcttagtgagtngaactatgacgag

SEQ ID NO: 71446 - DNA, 457 bp, Zea mays
tcggcatcgtcacttgctgtttccatcgccccgttctgcacgtagcccgcctaccactccacctcctcctccagcaatgggggcagtggcaagggcaaggggcgcggtggcaacggtgacaacaggaatggcggtggttggcgccaccagcaacacggcggcggccggcgcaaccagcagtagggtggcggccgccagccaccacagctagggatggcagttggacccgtgggtatggatacccgcgggtttcgtacccggtggatatggatacgggtagaaaaactcacccgcgggtcctatcgggtaggatacctgaaatatatcgggtcgggtatggataaaatactttacccgcgggtatccagtggatatccgagatatcaatatacctcttaaaatgtgctacatccactataaattaaggaccataatataatggagcccaacaaaatac

SEQ ID NO: 71447 - DNA, 395 bp, Zea mays
tctaggtcgactcgtgtaaataaaaaaataattttaaactcgttcagctgaacggagccaagctgatgtgattactagtcctgctctggtaaaccactaccccattctaaaatgcatggaccagtagagaaccaacgtgctcgtcgctatcgcccgcgcggttaagtttactcaaccaacaacttgggctactctacgtgcaaatggcatgcatgtatgcatgcattttatggttgcggatgtcgagacctcaaacttagggttttaaatggttatttaatgttccaatatttattatctcttcataataattatagaaaacattgggttcgatttttagtctatagcagaattatgaatattttgatgatgaatgttttagatatatttacaag

SEQ ID NO: 71448 - DNA, 436 bp, Zea mays
  unsure (1)..(436): unsure at all n locations
tgaagccatggttagtagacaaggccaataaataactttttgactcaagnctagctacgggtgcataggtttcaccgaaatccaaaccttcgacatgggagtatcctctggccacaagtctggatatgttccttgtcaccacaccacgctcgtcttgctagttgcggaacacccatttggtttctatcaacattttgatcaggacgtggaaccaaatgccatacctacgtcctagtgaagttgatgagctactcttgcatcgccaccacccaatccgaatctaaagtgcttactctaccctgtgtggctcaatagagcaaacaacagagtaatgcttacaaaatgttctacactagatctattggttacccctaatgaatgtttccaagattgagtcacggcgtgatctccatggattgatggaggacctatggtg

SEQ ID NO: 71449 - DNA, 431 bp, Zea mays
  unsure (1)..(431): unsure at all n locations
tctaaagggagagcacactttgggactaacaaatgttcattntgagaaagacaggatntgtagcgcatgtcaagcagggaagcaagttggtgttcatcatccacacaagaacatcatgacgactgacaggccgctcgagctactccacatggatctattcggcctgatcgcttacataagcataggcgggagtaagtactgtctagttattgtggataattattctcgcttcacttggatgttctttttgcaggaaaaatctcaaacccaagagaccttaaagggattcttgagacgggctcaaaatgagttcggcttgagaatcaagaagattagaagcgacaatggaacggagttcaagaactctcanattgaaggctttcttgatgatgaaggcatgaagcatgagttctcttctccctacacaccac

SEQ ID NO: 71450 - DNA, 430 bp, Zea mays
  unsure (1)..(430): unsure at all n locations
tctacattctttccctagtgatcggctaagcatgtctggatagccctctgataagttgctccagcgtttttgaggtcgaacgatatggaggtatagcagaaagctacaaagggcatgatgaatgcagtcttttcctcgtcttcctttgccaaactgatctggtgatatccagagtaacaatctangatggagagaatagagcagccagcagttgaatcgactacctgatctattctagggagtccgaaggggtccttcgagtagtgtttgttgaagtcggtatagttgacgcacatcagccaatcaactttattctttttgagtacaagaacaagatttgctcgccacttatggtgcaatacctccctaataaaacttgcacacaccatgtgagctaattcaacccgtatagcctctcttttatcatgcg

SEQ ID NO: 71451 - DNA, 331 bp, Zea mays
gctggacacctgcatgtacggcctatggaggcagaaccatatccatggctgaacatgtcaaaggcagaacaagtcaatggcagactactattgcttacttaataagtagtagaaactagaaaacatagaaatatgatttttgtacttctcccattcttcatccgtcacataaaataaggtgtgtgtgtttttaacataatcttttgaagcacctataggggattaataggtgatcctgttaaataaaacactgaatagccacaaacttgaaggtaaggtgttagtaaaatcaaatggtatggaacacgctcgtgcgaacaaaacaatcaca

SEQ ID NO: 71452 - DNA, 419 bp, Zea mays
tcgcacaaccgggttacgcggttggctgtgcacacaattgtcggccaatattaaccctgacgtatgactttatctgcaaggactcccggtcctgaatgtgatccacatatacccctgtggacttcgcggagaagctttatgccttcagcttcagttatgcatttcaacatgggttagcttattcctttcttgtagagatggccgttgactacagcaaagtatatgcttctgtgttttagccttttggcttcgctgtgatcggatgggtggtagtggcgctgaagatataatgtgattggagcctgccagtcttcgaccattatcagattgactatctgatgtctgtcgacgacttgcgttatttgcagatcgtcggggtttcttacagctggtgtgacgactatgtgataaaatacatc

SEQ ID NO: 71453 - DNA, 390 bp, Zea mays
atgtttagaatgacatcagcttctcccaaatctttcatttcaaaattgctcaatagaagatttttaacttcctcaatcacattgagatttgatccaaagatcaagatgtcatcaacataaaggcacagtataacagactcactcccaccataccgataatacacacacgtgttagattcatttacagcaaaaccagcagctgtaagagtattatcaaacttttcatgccattgcttatgtgcttgttttatgccatacaatgattttgtcaacctgcacaccttgttctcttgaccatccacaatgaacccttctgactgatccatgtagatctcctcattcaactctccatttaagaaagactgcttaacatccatctgatgaatgata

SEQ ID NO: 71454 - DNA, 410 bp, Zea mays
  unsure (1)..(410): unsure at all n locations
tgcgcccgtggatatcttgagagaatttttctaagcgtcttctcctcaattggcgttgcttcttattcccatagaatttcttttgtgaccctaaaacttgttgctcaatcaatgattggcttttttttgagcaacaagggttagcacatgatgatatacaattcaaatgcgcacacgtgcaagaatggggttcacatgaatttaagtttgaaattacaacctcatgagcaatattaagcatgatatggtcatcaactaattcattatgagaataagatagcatatcatatttttcacttagagcaagtttttctaaatntatcatttctacttgactcttaagcatagaattttcagttttaagttgagaaacatcagataatacatcatgattatttctttgctcaaat

SEQ ID NO: 71455 - DNA, 420 bp, Zea mays
  unsure (1)..(420): unsure at all n locations
ntagcttgtgaaagccgaagcttagatacacctaattcagctcgtcataatgttcatatagtagagtgtgaccaaagtaggtctaatgacgagccacaagaagtgtatgttgttgtgctagtttggccaaacaaagccaaaccatcggtctgctcctctttacatccgattcaaaagaatatgtaaggggaggttaaatttacttttaatgttgctaaatgtgataagatatttgatggattattaaaaagtggcaacattaaaatgactcatactattccacctactgatgaattaaaaaggcaagcttattttaagtggcataattctttttcttatgccactaatgattataatgtattctatcgacaggtacaatcgaccataaatganggccaattgagcttccaggaatacatt

SEQ ID NO: 71456 - DNA, 407 bp, Zea mays
  unsure (1)..(407): unsure at all n locations
tgctcgtctactcacatcaacttcttacatacatagttttcaaaaattaacatcacatcaatcatgcaaataaaatacacagtaataatctagacattaaaataggatcatatgaactggaatcattaaatttggagttatagattttaagttatgaattttccaaggttttatgtatttaatacaagattaagtgatagataaattttaatgtgcctttcatgccaaaacagtggcacaaatggatatataataatattacaaaaatttaagaactggaatggaccaatttggagttcatatgaattttctacaaattaaacaagttctaacatttatttatgcattaaaaattaatttctgatattaatttctgattntcaatattctctggattgggcctcaaa

SEQ ID NO: 71457 - DNA, 406 bp, Zea mays
gagaacacattctatgattaacaaatgtttatttcgagaaagacaggatttgtagcgcatgccacgcatgaaagcaagttggcactcatcatccgcataagaacatcatgacgaccgtaaggccactatagctcctacacatggacctattcggcccgattgcttacataagcattggcgggagtaagtactgtctagatattgtggatgattattctcgcttcacttgggtattctttttacaggaaaaatctcaaacccaagagaccttaaagggattcttgagacgggctcaaaatgagttcggcttaaggatcaagaaaattagaagcgataacgggacggagttcaagaattctcaaattgaaggcttccttgaggaggagggcatcaagcatgagttctc

SEQ ID NO: 71458 - DNA, 404 bp, Zea mays
  unsure (1)..(404): unsure at all n locations
tctgtgccaaanatcacagatatcttanggatggttttttatttgtgattttccaaagtttaatgccaaaaaggcactttccactaccttgctatttgaaagatgtcaaacaacagatttcatatttttcctatgttcttcataacaaaagattcactatcccaaaagttggggtgttttcactttggggttattttgtaaggttttttctaagttttccttgttttcttaaaataaaaagtatcctatttattttatactaaaccaaggtataataaattgttctagtaaactatacaaaataaataccctaacaaaaataggggtgctccctggttctttatttaaatcacctttcctattttctttaaccttaagcataatgtaaaataaatggcaaactc

SEQ ID NO: 71459 - DNA, 359 bp, Zea mays
ggccgatgaacacaaaatcttgaaaatttttgtaaacggttgtggtctcaactcgccattcagacggtactccgaagcggcaaacaatggtttggcaaaagaatgaccgggtaggccttgatggtattgcggagacagcccttttcctcgatccatttggtgaagtattcaacaacgacgaaggcgaacttaatgttcccctgagccatgggtatgggcccgatgatgtctatgccccagctcttgataagacatgtgtgggcgatcagctttgtaaactgcgaagggctgcctgatcgaggggaaaacttctggcaagcttcgcatgacctcgcgacccgaattgcggcgcaaatcat

SEQ ID NO: 71460 - DNA, 401 bp, Zea mays
actaatgttcatttcgaaaaagatagaccttgtgcagcttgtcaagcttggaaacaagtgggaggctctcatcacaccaaaaatgtgatgacaacatcaagacccctggagctgctacatatggacctcttcggacccgtcgcctatctgagcatacgaggaagtaagtatggtctagttattgttgatgacttttcccgcttcacttgggtgttctttttgcacgataagtctgaaacccaaaggaccctgaagcgcttcctaaggagagctcaaaatgagtttgagctcaaggtgaagaagataaggagcgacaacgggtgcgaattcaagaaccttcaagtggaagagttccttgaagaggaggggatcaagcatgagttctccgctccctacacacc

SEQ ID NO: 71461 - DNA, 379 bp, Zea mays
tgcacccaatatcatgaagaatatctttctgcgtatgttcgtatgttcttacgcctgatggcacaagcgccaactgtgcccaatgaaattgtcattgatgccatgatcaatgggcttcagtcaagacctgcggcccaatacttcgccaggaaaccccctcagaccctggaaaaaatgctccaaaagatggatgaatacatccgcactgataatgattttcgtcaaagaagagaggaagcttacaggttctccgaaatgaccaggggcttcggagggagaatccacccaagacatgtgagatcaatccattccactcaaaatgatgacagaggaagccagcaacattggccacaatactcctctcatgcttcggggcaac

SEQ ID NO: 71462 - DNA, 347 bp, Zea mays
atccacctatactctttctcaagcgcctcagactaacttatattaaagacttctatgctggagttaaattactttaaactcatttccctcaatctatgttcactcacgtagtcacggttttccttctacatgaatccatgttttttcaagtcatcgactagtcggcgactagtcgtccggtcggccctgggatctcgactggtggggccggctcgacttttctggcaagtcgggcgacttggcaacgaccggaaattctcagtcaactagtcgtcgacttggtctggcaagtcggccgacgtgtgtcctaatttggcccaaggagcccatatgcccatttcacaaca

SEQ ID NO: 71463 - DNA, 410 bp, Zea mays
actggacagtgttttgcgatggttcttggggagccttctgtgcatgagcagctgctgtcctagtggcaccttcaaaagtcaaaacatgttatgcagtcaaactggatttcagttgcacaaataatattgctgagtacaaagcacttctattggggcttcagaaactaagggcaatgggaataagaagggccatcctaaagactgattctcaagttattgctggccacgtggacaaaagtagcaaggcacgagatccgaagcttgaaagatatctggatacagttcaaaggctggaagcttccttcgaaggtttttctgtcaaaaatattccaagaggtgaaaatgagcatgcagatttgttagccaaatcatcggctcatgggctccccctaccctctgaagtatttttg

SEQ ID NO: 71464 - DNA, 385 bp, Zea mays
tgaactctcttttgatgcgacagtgcagtcagtgctgtcgacgctctactgacagtctgacacctgccactattcacaactacacacaggtccactgcaagctgcaatgctgcacaccgccgcctggaacgaagcccctcttctgaatccacctacacgccccgtcggaggtccctcgcccgcatcgctagttcggcacactgagtttataaacccctctgcagtctgcacgaataatccccaacccggctctcggctcctctaatccttttctcgcattgcatttactgcggcatctttgcgtcggattcggttcccctcgattcctctcccgttgattgcctcgccgggtccagtgtcaccggccggcgggggttgattgggt

SEQ ID NO: 71465 - DNA, 334 bp, Zea mays
cttagcaattaagcaagtggcgagttcaactttatcaaaatctaccaaggatagctgaccctctaacacacccttaaatgctattgaatcatcacttcttctaaagacagtgacacctacatcagtgaagaaacagttgtagcccaattgacataattgggatacggaaagcaaattgtaatctaatgaatcaacaagaaaaacattggaaatagtatggtcaggtgatatagcaattttacccaatcctttgaccaaaacctgatttccatccccgaatgtgataactacgtggggatcttggtttttctatatgaagagaacatctttttct

SEQ ID NO: 71466 - DNA, 276 bp, Zea mays
tttaaagactaccatctcatccttttctggcttctgtttaatttcatctccgccaaagtgaatcagtttctttttggcttcactgaaatagcctaacttcatcaacttaggcatatcatcttcggtaacagtggacctcccaaactccaagtggctgggtttagatggcagggcactgtaatcatcttcaaattcaccttccttagcatcaacctgctcagcttcagtggcaggtccaccttcgtcagaaacatcctccggcactaccagccccga

SEQ ID NO: 71467 - DNA, 354 bp, Zea mays
tttaactattccatctcttgacacaaagtggtctcggaggtcttcaccataagacagtggcaggaaatcttacgactcagtgcatctgctaccacattggctttgcctgggtgataatggatctccagttcatagtctttaataagctcaagccatcgtctttgcctcatatttaattctgactgggtgaagatgtacttcaaacttttatgatctgtatatatgtgacagatatttcccagcagatagtgacgccaaatcttcagggcatgaaccacagcagctagctccagatcatgagttgggtaatgctcctcatgtcggcgcaactgccttgaagcatacgcaattact

SEQ ID NO: 71468 - DNA, 387 bp, Zea mays
tttaatactttgtgttgccctgttcttgactcataacatttgagaacaagtccccaacattggcgcccacctccggtgaactcacttccactgtcgagctgatggcttcattcaacaatgaagctgaagcagcttctgctacgaaaatggtgctcccgataacaagcggttcatgttcagaaccggccaacaagaagcagaagaaagaggctcaaataagggtgcagcatgttggggtgcaaggacccttcatcaagtcaaaatggtcccacatcccaatcaccttctcccaagaggaccttcagctcaaggattaccctcacaatgatgttatggttatatcttgtgtcatcaacggatttctggtccacaatgttctggttgata

SEQ ID NO: 71469 - DNA, 343 bp, Zea mays
cttcttcgttggccaatagaatcctgatctgaaaaccctttcgactaatgttctggatgctgcatgaattccacattgccctgcgtggacctcctctaaaagttgcttcccggtggacgaaaaaacgcatttcatgaagatgcctgacgcgccccttctgtacaatactttcccaatgagtgtatagtgagctgactgcctggcaatgcgatctgccgagttcttgtcatctggctcttcttcattctttatatacttaataatcgtccgcctccagtcatcaaggtctgactcgggttgatctatgatgttgcactcttctgtttgatccattgagatactc

SEQ ID NO: 71470 - DNA, 345 bp, Zea mays
ggtgcacccactcaaagagtcttctcactccactgggcactaagtcttcgagttgagtaagaatttaagtcttcaaggaataagatttattggcctattcaccccacctctatgcgacatacagatactattgccgggtgaaagggaaccttcatccatgaacaaaaaccatacgcaaaaactgatccttgtgaggaagaagttgaacctaaaaaaattaatggtggaaaggcagaaacctcacgaagacaaagaaaacgagggcatgatcctaagcatggatctcagtcaatgtaacactcttgttcgacaatactatgaagcccagcaacaatagatcttggc

SEQ ID NO: 71471 - DNA, 430 bp, Zea mays
  unsure (1)..(430): unsure at all n locations
tgactttgtcttccgattggaagccaatgtcatcctttatgccagggcgtcttccactatagagcatgcttctagctaatttaaatttttcattttctaagtcatgctcattaattttagcagttaatgtagctatgtgatcattttgttgtttaattaaagcaaggtgatcatgaatagcatctacattaacatctctacatctagtacaaatagtaacatgctcaatggaagatgtagagggtttgcaagtatttaattcaacaatcttagcatgcaatatatcattctcatctctaagattggaaatggaaacattgcaaacatataaatccttagccttagcaattaattnttcattntcaattttaaggctagaaagagaagcattcaatntgtcaatcttatcaattaagttggcattatcatt

SEQ ID NO: 71472 - DNA, 410 bp, Zea mays
  unsure (1)..(410): unsure at all n locations
gctatccttaatgccgaaggatcatttttgtctacagcttatcatacaatagtctgaaggtttgtgtttactatccctctccatgttntggtaaccatttctagtatattttttgctcaatttaacatacatttctcttattatgagggccttattttaagcaaagctctaaaagcccaaaaggattgcgaagatgagagcacaaagatagccttcaggaatttatgctcagaaattataactcttcggaatgaagctctagaaaaatataaaattcttctttctttggtcgaaagattacaaacaagtgaagctaattcatccaaactttttgaagtggacgaaagtattctaaaattttagaaagagaaagaagcagatgcaaaacgcatagctgatatagaatatgc

SEQ ID NO: 71473 - DNA, 331 bp, Zea mays
  unsure (1)..(331): unsure at all n locations
ttatgggttgtgagcgcttttctnctataggttaaaaactctggaccaaaatcctgtgtgaagctcaccaatccaaactatcgatcacctcggagaaaaaaagtactggatttgaatcaagttttggggacaagatgaaaaagagattggagcatacgttgcgagatgtgataactgttgcagagtcaaagccatccacatgaatccagctggcctattgcagtcattatctatacctaaatgaaaatgggagatcagtatggatttcattgctggacttcctattactcaaaaagttaatgactcaatatgggtgattatggatcgactc

SEQ ID NO: 71474 - DNA, 361 bp, Zea mays
ccacatgtgctaagcggctatgccacagccagtccatgctagtcttagctattaagcatgcatctataccggcctcttcttttgcaaaatcaactaaataaagtttgtcgtctaatacacccttaaaagctagtgaaccatcacttcttctaaagacagacacatctacatttgtgaatagacagttataccccatgttgcataattgactaacagatagcaaattatatccaagagactctactaaaaacacattagatatggagtgctcattagaaattgcaattttacctaacccttttaccttgccttgattcccatcaccgaatataattgaatcttgggaatacttattcttgac

SEQ ID NO: 71475 - DNA, 377 bp, Zea mays
agaaaagcccgaatctgcaaatttccttaatagagcttcttacagatgctagaacttcggcatccggtgcgtgcaacggctgaaacaggtcttcaactcaatgggagctaactctgacaaatttttaccttcatttgaaaacctgccatgtaccttcgaacatatcgagagcgaagttgaagcgcttgacgaagttatagctgggcatggtgacttctgtgccctgctagcttctcgcggcacagctgttgcttttatgaacgctggttgcacgcacttttagattgtaaacatgctgaacttcagcctatcaccagtggattaactgacatccacagtctgtgccgaagcattggaaatatgattataacataaaa

SEQ ID NO: 71476 - DNA, 318 bp, Zea mays
aacctggatgacttgaatgtggggtggttggtggctattttaaccctctcgcccctaattaacgcatggtgaacactaattacctatgccttaaccatcactacatgtatcccaccaaacaatattcctcaactcaacacacatacattttcatctatttaatccacaattcttacatgctattattccttctcacttcctgataggacatgataacttttcacatttaattactccccctaacaataattttttttttccatttaatgctaaaaaaaagcatccattttgcatcttatcataaattgcatttatttc

SEQ ID NO: 71477 - DNA, 416 bp, Zea mays
actcaatcttgacacaaaacgggtctcgatttataacgactttattattataagccaactagagcttatagttagctactaaaataaacatgtaaacaacctaactaatagttcacctattaagtacttttaagtggagacatccaaacacctgcaacgaattatttagctacctattagctactccctcaactaccaattagttattagctagttcgacccagccaaaatcagctaatagttaccactggtaattttgatagtcagataactattaactctagcgcatttaaatatggactaagaaacacatagaaaattttaattcctaaactctttgagtttaagtcgcattgaagagatgtacggagttccaggtagggattgcaattctggcctaaaattttcatgttttc

SEQ ID NO: 71478 - DNA, 355 bp, Zea mays
taatatactaatggactcaagcctagctactggtgcataggtttcaccgaaatccaaaccttcgacttgggagtatcctttggccacaagtcgagctttgttccttgtcaccacaccatgctcatcttgcttgttgcggaagacccatttggttcctacaacattttgattaagacgtggaactaaatgtcatacctcattccgagtgaagttgttgagctcctcttgcatcgccaccacccaatccaaatcttgaagtgcttcctctaccctgtgtggctcaatagaggaaacaaaagagtaatgctcacaaaaatgtgcaacacgagatctagttggtacccccttatgaatg

SEQ ID NO: 71479 - DNA, 324 bp, Zea mays
cgaacaacatacccaattattcacaccttcatgctattgtaatcgacactggccgcaagttggatctttcgacattgtggataagccaagatcaagcccttgatatctcatattgaccatcatttctcggtagacatgtaattatatatcgtctggtaaacaataaaggaaatcattttcggcatctacaccgtacaccaatgaccctcgacgtaatgttgcaatttggcaacctgctcttctgatagctgctttcccgaaacatgtcgaacaatgaattccagctctacaacaagtgcttcaagagtatgaaccctgaatttc

SEQ ID NO: 71480 - DNA, 405 bp, Zea mays
ttgtaagcccttcaatatctaaaactttataggtaacaactttttatttaagaccatttagagacctaaatatatgttttgtcttcgaagagttgaaaattcaaaatttcaaatttcatttctagtggcagtgggctttcattttccaccgtcaacacttctataaaaaactcttatataattatatagtgatttgatatttttatacatggcataccagtaatataaattcaacgttatgcttaattggtctctgtactacccactttgtaagaaaaacctaaaaagagaaatctcattgcttcatatatgtgtgtcatctctatttatcatttcatgtggacacccccacttaaccagaataaatggttaacaaaagacactcaaataaactatccattcttt

SEQ ID NO: 71481 - DNA, 282 bp, Zea mays
atggtgtacatataatttcagccgaactgcaccatcgtctggcgatgaccacgatgactgcacatatatctcaagatatatatactatcatgtcttttgcgttcctacaaatacgacatttcgaggatggtttggagaagatactctcatgcgagtatatagatcgctatgataatgtttttcacctgaatacagaggacactactgtgatgcaaacacttccttatggacctaaggttcatatctaagaaggtcagagggagctgacactatgcgtgtaac

SEQ ID NO: 71482 - DNA, 334 bp, Zea mays
ctaaatattaatggaaaaatattatgtggtagtacacatttggacctaaactccgtgtggagaacgacagagatatattgtgtatagccttagacaccatacatacatgtataataatgaaaatatacaaatatatcatgtcgtaccattattggtatattttggttgatttgaataattgaagctcatcagtagattcaaaagcaatgaaccgcgacctggtgtactggtatgaccacatgacattgaaaaaaaaatgcgacgggcacgatgatgaacatgaccaacgcggcatcgtggtgcacacgccagacaacaagtgtggcatgagtcg

SEQ ID NO: 71483 - DNA, 380 bp, Zea mays
gtggtacccatattatagtatattagtctgggtggctccatgataatgacaccaatctagagttctgtattgcacctgctagagtccaatgaatcaagcttaccaaagttttagtttaaaacagacagtttaaccttcattcagaaatcagaagcactgaacccggtaacagttcttctgaagatttttttctctcatacaggaaatattggcaaacattcatttcaggttatcaaacatctaaggaatacaatgctatgaatcttgctaccaagcagatagagaattgttattaccgaaaaataggttattctaaatgcagcatgtgattcagtccaacgataggaaaaaatccaggcacacttttttcatacttcatg

SEQ ID NO: 71484 - DNA, 369 bp, Zea mays
cttcatccctacatgtgctaagcggttatgccacagccagtccatgctagtcttagctattaagcatgcatctagaccggcctcttcttttgcaaaatcaactaaataaagttttccgtctagtacacccttaaaagctagtgaaccatcacttcttctaatgacagacacatctacatttgtaaatagacagttatatcccatattgcataattgactaacctatagcaaattatatccaagagactctactaaaaacacattagagatagagtgctcattagaaattgcaattttacctaccccttttaccttgccttgatttccatcaccgaatataattgaatcttgggaatccttattcttgac

SEQ ID NO: 71485 - DNA, 309 bp, Zea mays
gaagtgtcctctcgtgccccatcccaaatgggtcgactccaggccgatcgcgaaagggggatatgatgtggccggatatgggtgtgagaaaagtggaaatcctgtggccttcgtgttcgttccgcgcccatatctggtgcgcttgcagtatggggttacaagcgtccacacggtggaaggagcgagtggcctcacgcgagcgcacgtctcgtactctttcccgtgcggtcaaccctctctaatatggccctggtccttccttttatatgcgttatgagagggtccatgtgttcaatttggtgtgtatca

SEQ ID NO: 71486 - DNA, 369 bp, Zea mays
  unsure (1)..(369): unsure at all n locations
gtcaagaagcatgccccaatatattttgtatatgaagntcttagtttatcaaagaaaaattatacagaattggagaaagtactgtatgctgttttgatggcctcaaagaagcttcggcattattttcaagcttacaacataattgttccttcttcaaagcctttgaaggatattataagaaaccgagaagctactggaaggattggaaaatgggctgcagagctcaatgaattttgtattgattatgtccacagatcttcgattcagtcccaagcgttggcagacttcattgctgactggaagccaagggctcaggaggaagaaatgaataatgatgctgaagcatggacagtgttttgtgatgggtct

SEQ ID NO: 71487 - DNA, 406 bp, Zea mays
gacggcgatcacgacgaatgaaaagacaatctcttagctgtgtgcaaaaaagcttcggtataacggcaggaagaggaaaccgacttaaagatgaatagtcgaatcagaccttgaagaattactatagagttattgataaatgtaaagggcattaatgtaattttgcatgggctgcgacccgtgcctattaataggtgaacagtattcccgtactggacacgctgacttggcatctacttttgcgtcacacctgtattcttattctttaaagccgaaggtacacttgaaatttattattgtttacacaagtgatataaataaaataagttgataattatgtttatctaaattatgctactctttatacttcgcatgaatattgtccatttctttatcatgatcatga

SEQ ID NO: 71488 - DNA, 377 bp, Zea mays
tctttgctgtcaaactgcttgccgttgtctaccgttagttcggacggttccccgaaacggcaaacaatgttttgccagaataatttttgggcagtctttgatgttattgtagaaacagccctctactcgatccatttggtgaagtatttcacggcgacgaaagcgaacttaatgttcccctgaacggtgggcatgggcccaacaatgtccatgccccatcgctggagatgccatgtatgggcgatcagctctgtatactgcgagggactgcctgaccgaagagaaaacttctggcatgcttcgcaagaccttgtgacccgatttgcggcgcagatcattgcgggccagtataaaccctggcggatcaccttatcagc

SEQ ID NO: 71489 - DNA, 407 bp, Zea mays
tatctatttatactcaataataacacatttgtatctttaatgacataaatacattcgtgactattactaataatatcttgccaaggttcgtgatgtatcgttcgttcattctcatgaactcgcacacgtataacccacataggaccgatccgggtggttgcttgtggcactacataacgggagattggttatttagttgcaacattgtcctatgtacgtacatgtatgatatgtattcataaattcacatacttaccggccagttataatggatgtctagtggcacgccttttttggacgtgtcgtagtttccacctcgtagcttataaaacctaaatgccctgtgatctcaaatagaatcaccatgttattctacaattctcatcgatataagtatgcatgcatag

SEQ ID NO: 71490 - DNA, 330 bp, Zea mays
  unsure (1)..(330): unsure at all n locations
aaggatgaccggtctaaatgatgtgagctgttaccttgattttatcatgctgcgaacattcataactgcatgggatttatttctacgactgaattaatcaacagcttatgattaccctaaatgctatgcactgcaacgcaataactacgattctgaccccatgttgagggcatgtggtgtttcagttgctccaaaatttacccaagttgaaggaaggatccttcaagccccaaaggttggtgacacttctctaagctttacgacaagtttgcatggaaatctaanatttggatcatggataaaaataatctctggtgtttattggattct

SEQ ID NO: 71491 - DNA, 390 bp, Zea mays
ggtaccatcgttgagggttctttaaatagaaacaaagatctttgtaacccaatgtcctttgtgctatcgtttggcaaattcattgcccttctacacaaattgcaattttggggtgcctaattatatatgaatcaaatgacaagctatgagtggaagagttaccaatgggacaatcattgcattgatgtccctttttccggcatgtgtagcataagcgttttccaagttttgaaaatttcttctttccttgtttggtggttgctacatggttagtaaaaactttcttttctaaccctatgcccttttgtttaaatggggacaagatttattaaagtgtcccttcttttgacatcttaaacagagtatatcatccttggttataatcaaacc

SEQ ID NO: 71492 - DNA, 377 bp, Zea mays
ttaccaaatggacgtaaagagtgccttcctcaatggttcaatcaaagaggaggtctatgttgagcaacctcccggctttgaagacagtgagtaccctaaccatgtctataagctctctaatgcgctttatgggctcaagcaagccccaagagcatggtatgaatgccttaaagacttccttattgcaaatggcttcaaagtcggcaaggtcgatcctactttattcactaaaactcttgacaatgatttgtttgtatgccaaatttatgttgatgatatcatatttgggtctactaacgaatctacatgtgaagaatttagtaggatcatgacacaaaaattcgagatgtctatgatgggggaagtgaaagattttc

SEQ ID NO: 71493 - DNA, 399 bp, Zea mays
tctttgcaaatttgtgctaccgctcaacttaatgatttttatgtcactcattaattggtattaatgttccaaaattttaattggcaattatgacattaactcgatggttaagataacattatttcaaattaattggaacatggagtgaccacctatgataacagtgcaaccacgagtgctatcatggctctggctttggtaattagctttgtatgcttagtgcctagcaaccttacctgaaatatgggcaagatggggagcggtatgtgctggcatcccacgttaacatggggacgtattcttgtctaatgtacctcacctagggggccaccaccatcgtctttagaaaccttaacgggttgcttcgtattaaggtattttgtgaaagcctcataatgg

SEQ ID NO: 71494 - DNA, 367 bp, Zea mays
  unsure (1)..(367): unsure at all n locations
ttaagtaacaaatgtactgtatgttaaattgaagtgcaaaatagagtaaagacctgtgtcggtggcttcccctttccccgcatgcacccagccaccaacacagcaaggggagtgatccttttgattgcaatatacattgngatgttaacccctttcaagcttgctagagcaaatcccacatttgcattgtagaaaattgacactggaagaagtttcttcgcggttatccagctaaagtcttttcgtttagacattcctagaacttgaccaaaatgtatcaaaagtgctgttgctatttgctgcagaaagtaacggagaaattgaacaaaacaatcagaattaatcaaacatagaaacatgcaatact

SEQ ID NO: 71495 - DNA, 394 bp, Zea mays
atggacgtgaagagtgccttcctcaatggtctctataaggaagttgtctatgttgagcaaccttccggctttgaagatagtgagtaccctaaccatgtctataaactctctaaggcgctttatgggctcaagcaagccccaagagcatggtatgaatgccttatagatttccttatcactaatggattcaaagtcagaaaagccgatcctacactctttactaaaacacttgaaaatgatttatttgtatgccaaatttatgttgatgatattatatttgggtctactaacgaatctacatgtgaagagtttagtatgatcatgacacaaaaattcgagatgtctatgatgggggaagtgaagtacttcctgggatttcaaggaaacaactcca

SEQ ID NO: 71496 - DNA, 353 bp, Zea mays
taagtttcatctttatccaaacattcgacttgtgaataacctttggccacaagtccggcttatttccttgtcaccataccatgctcaatttgcttgatgcggaatacccatttggttcctacaacatttttgatatgacgtggaactaaatgccatacctcattcctcgggtagttgttgagatcctcttgcattgccagcacccaatccggatctcttaatgcatcctctatcctgtatggctcaatagatgacacgacagaataatgttcacagaaatgagcaactcgagatctagtggttacccccttatggatattaccaatgatggagttgaccgagtaatctctttg

SEQ ID NO: 71497 - DNA, 401 bp, Zea mays
ctgtgtgcttcctgcaacacaataaaatgtcatattatcaactgaactgagtcagaaaaccatggagttcacaaatgaaatgaacaagacattatagaggtttgcccagttaacagtttatggcacaagcccgcaacattcctaacatattaaaaagccaaaaggcaaaaccaaaactgtctcactccatccacatatgcatgtcaaacaggtttgctcctactctcaccttctattttcacaaccaaaaaaagacatgcataccatatgaaacaaatttccacagtgcaaaattccacacatagacagcacataattaatgcaacatgtcaaacctaataaactggcaaatggtactgtaagaactgaatcgatttcacatataatacagaactaccatc

SEQ ID NO: 71498 - DNA, 414 bp, Zea mays
ctaagagtcggctagctagaacatcgacaccgcccgcttttcatcatacacgtgggcttgcctattattatcacaattcgagacaccacatacactacaacattgtataaacattcatattcataagtattttcgcacaccgaccaaatcatacgaatcgtaaactactagtgtgcaactcacaatcaccatgcatttacttgccaatgatggacacatacatgtttatcatacgaacagagcgttgcaataattatgctaaaataatgaactgcattacacaactgataccacaaacctacttgactggcttgaagtgtctactcgaatccgcgagtacaatcacacattatatgcgaagcataatttaacgaacacaaaatacgcatcggctcgattcgaactatgaatatc

SEQ ID NO: 71499 - DNA, 346 bp, Zea mays
caaaaccctaatcttctagatatgcttgccctatgaactacagttctgactccaaaaaccctagtttcggggagttccgtgaaggaaaattgtattcaaaaactaagataatctacctttattattgtgccatttcgtaagcattacatgagcatccatgggtatatatgtgatatagaaaacaataagaagtagaagtttgagaaaaaagagctacaccaccaccacctgaagacccacctgccgggaactgcttttattttgatatttgtggagcagagcccgcttttctatacacaaggcttgccccggtacatttgccacctccctgctttttaaaatcttt

SEQ ID NO: 71500 - DNA, 374 bp, Zea mays
gtgagcccttgatcatgaactcatttctcacaaaattcccgattacttcctctggagtcattaatgtatatctaagattaccacgaattaattgtacttgaatatggttgaagaaaatgaatgatcttaaaataaccttaaccacctcgtggtcatcccactttttgctcccgatgttgcacacttgattcaccaaagttttgagccgcttgtacatgtcttgtggctcctcctcttggcgaaaacggaagcgaccgagctccccctcgatcgtttcccgcttggtgatcttggtgagttcatcaccttcgtgcgcggttttgagcacgtaccaaacttccttggcgctttttaatacttgcaccttgttgtac

SEQ ID NO: 71501 - DNA, 287 bp, Zea mays
  unsure (1)..(287): unsure at all n locations
gtgctcatcgaggtcgcctgcgcgtcnactcccgaccacctcgtcgtcgtcatgaaagcctaccgcgagtcgtaccccgcctccctctatgaggacgtctccgcgtgcccgctctacaatgacccccgcgtctagcatgcgatgccgccgccggctcctgcctgccggctgtcatcgtgtgcagtgcagtgcaatgcatgcatattctgacgnttcttggccgggggtctgtcttgcatttcttggtgcgcctggtgagctcgtaccggtactccggcgatctcgtc

SEQ ID NO: 71502 - DNA, 293 bp, Zea mays
tttggctatcattaactgcccaccttttttatattaggaaactttccgagagacatgtgccagccttttctattgcaccctttttaggaaacagcggttgctaatgagaactatattggacaatttctgaccctcatgccattatttgaagacatggtaatagctggtatcaagaagctaaggagactaacctatatgggaggctatacagaaaatcaatcaattactaatagagaaacatccatatttggatgtcactatgaaaattattaactcaataacttattatatca

SEQ ID NO: 71503 - DNA, 284 bp, Zea mays
ccatttttttaaaaattgtgcgcttttgaatatggcccaaaacccatttatgaaaactgatgtgggtccctaaactattaacacaattctaaaaactaaattgctagaaactatggagctgtcgaatatggggataatagaccttttggatgaaatctcctcttatcaatgagactatttgtctcatgttcactcgtggtgctatatagagatgatagccgctctctgtacatatgcccaccttcgtgctgggcccatgggtaactgaaacaaccatatactac

SEQ ID NO: 71504 - DNA, 341 bp, Zea mays
atcaaagttaaaagtaataaaatattgcttggcctccttaatcaaaattttggtcatcgcacataaatcaaaatggtttaagtctaatggtgccgaattcctcgcctccgtaaccctatgaagcttgccaaggtgccaaaatttcatgcacacctggcacttaaaacccttgactaaatcatatttcggtattaaatttaaatttgctaaccgggagacacaaccaaaattgatatgaccaaatcgggaatgccaaatatttgactcatttgaaacaacattgttcacagacttattacatgtatcatgcaaagataatcaggacaagcctccattgtcat

SEQ ID NO: 71505 - DNA, 412 bp, Zea mays
atgagcgcttcccctttgtcttggtcttgcttggctgccccttgcgaccttttagcgtcgtcttgaatctcttgatgatgagagccatctcttcatcattaagtccggcagcctcgatttgtgccaccttgttaggtagcgtctccttgcttcttgttgccttgagagcaagaggttgaggctcattgattggaccattcaatgcgtcgtccatgtatcttgcttccttgatcatcattcgcccgctcacgaactttccaagtatctcctcgggcgtcatcttggtgtacctaggattctcacgaatattggtaccagatgacgatcaaggacagtaaaagaccttttcactatgccgacgacgtcatggtccgtacatcgcgtgctttcatagcttcttatcttgttgaca

SEQ ID NO: 71506 - DNA, 324 bp, Zea mays
gaagacccgtgaagcagaaagaaagaaaaaagataatggtgcccctgtaacacttcgtgattcatatgggtaaaacttcatgtgcatacttgtaattttgtacaaaactgttcctatccctataaatagaggaacagtgtcatgcataatgtcaccttttgtgggcccatatcctttgtgaagctcaaccttcgagccatttggacatgtacagctgaatggatgtttgaaatacatgtatatcgaaaagatgaaaggataaatgctaatgcatgaataagaagaacaatgtggtacttttcactgatattttctcatttctac

SEQ ID NO: 71507 - DNA, 425 bp, Zea mays
ttgtcttttgtgtatggacgacgtgcggttttatgctatggacaaggagttttttcgtcaccaaggtgccagtgtctgaatgcctggtcccgatgttgagctgcgccaaaaccgtgtcaaatgaatttggtttgagttcaaactttcccagaatgtgttcaaggtaatttggcacgactttgatatttggatcttctggctttgagtttggaaaagcagagaacacagatgatctttgagaagaggtctgaaattcagaaattcagaaatctgaatttctctaagggttcatagatcaaaggctgatttggggatttagttgagttattttggctaagccttctcaatctttcttgttgctcattaagtatactttaatttttattattggctcaagtcaaaaatttaaaatgttcattcccttt

SEQ ID NO: 71508 - DNA, 387 bp, Zea mays
ttatggactgccttggagtctgttcaccttccttctttccttctagcagcttcctggcttccatggatagcaataagcccttggtccgaaggtatcttcatgcaaagataagcatgatgaaagattgcttcgaaagcattaatagtaccacgaccaataattgcattgtaaagatattccatgtcaacaatgtcaaacacaacttgctcaagtctagtgttgttgatgaatccgaaggttactgacatggtgatcttgcccagtgctacaatctgtcgtcctccgaagccaccaagaggatgtgtagcatcatgaatcttatcttctggctcttgcatttgtctgaaagctttagcaaatatgatgtcaactgcactgcctgtatcg

SEQ ID NO: 71509 - DNA, 332 bp, Zea mays
gaagccgacgatcctcgtcttcttcacaaacatcaacctccaccaacgcagccactaaacaggcctcatccccaccttgggccttagcctttaccactttcaccggtcactccaacaccatgtcggaaccatacatggccgacctcatggagatgatgaaatcctggcattcggagctcaagacggagatcaaggagatgaagattgagatggctttcatgaaggagaaagcatcctcgtcatccggcgtcggtggcggcattcgcttggagcctcctcgcgaaccggatcggtcccccaggttgcagaagtgggaatttccccgttttgac

SEQ ID NO: 71510 - DNA, 362 bp, Zea mays
gagtcggattcattctagtccttgacactgaagctggtttagaccaatatcgacgatctctggagcaagccactggaacctgaaaccgcaaccgatgaacagacagtttcagctgctcaccttctcaccaagcccagaatgggccagcaaaggagacggcggcagaagcgagatttccagagagatgtcttgcctggcctttcgtcgctttcccggcctgagatcacagatgacgtccagttgctcgaggggttagtccaggcttccgggggatcctgtgagtcgagcttgactatgcgaggacgttgtggtgggcgtgctatatgcatgaaacctcggaaaactgtagtaaccgtaattgt

SEQ ID NO: 71511 - DNA, 399 bp, Zea mays
tgcaggatcactccttcatggattttttgggtgctcgataatggatgtataaatcatatctggagatagtagcaagggtggtaacaactgaatctcaagtgcatattattttcaaatcttatatcttttgtgacttgtggagccactaaagaagaagaagcacttgaggatacacatcagttgttgattatgaaataaaggtctaattggaagatgaatgaatattatcatatggtcaacaatccaaaattatgtgacgtattttctatctagttaatttggattttattattccatattagacactcaccataatatggattaagtcagccctttagacttcattgaacaaccatgcatattatccatgtcattcaaaatatattgtgcataatggct

SEQ ID NO: 71512 - DNA, 296 bp, Zea mays
aacctattaaagagcgagcgagaccaggtggagctcgtccaagggcagaaaatggtccgtccctgaaaacgcgacagcttgtataattgacataaaaacatgaagagctaaacatctctcattgttgattttggccagaaggatgaaactatttcaattgagcagcgaaacgcgttacattggatggccgaactaccaaaaacgaatggctgtgcttcggaccatgctcaaaagcttagagattaaatagagattttgcagaaaatatgatatgctccaatggtcgtatgaaatct

SEQ ID NO: 71513 - DNA, 311 bp, Zea mays
acgcccgacgcccgaacccgtgcgccccgccttgtgccaagccgagcccgttccattggccgtgcctgggcctattaagccaggcaaatctttaaccgtacaccctcgctcgctcttgaactcgccggaacgcaagaatcaccgggggtttgccggcgcacaacgtggcatcgggccgccgagccccaccaccgtagaacggccagccgagccatccccatccccgttcgaccctcgagagagactctgcgtgcctcggtgaagctcccatagcgaggaatcgagctcttgctcgccggaaacaccaaatc

SEQ ID NO: 71514 - DNA, 375 bp, Zea mays
agacagaatgagtgaatcaaattctcgagacatgttgcgagcctgtgttctacactatggtaaaaattgggacaagtgtctctctttggcagaattctcctataataacaactactagtccagtctaaagatggcacctgttgggcaccaaaatgagcggacggtccggcccttgggcccggacagtccggcccttgggcacggacggtccgtgtgtcccgagattatatcaactcggatatttatccttatctcgtgcggggttatccatctaatcacgcgggagtttgttgctatctcttaagaaaacgtccataccctcctccctatacatataaaggggtacggacgattgtaaacccccgacacatttca

SEQ ID NO: 71515 - DNA, 393 bp, Zea mays
ctttgtatctttctgtggtcattttctgagcaatccaaacagacccttaatccatgatatttttgtctggcctgctccaaattccaaatttactggtaagctcaaccactgttgttgaagaacaacatgtgttcagcacactctaactgaccccctaaccggtctacattcacccactccggacacaacaaccaaaccataccaaaaaaatcgtgcactcgcaacaacaagcacaagaaaatatagtcttcactccagacgtcttccacagtacgagggagttgccaaatttagatcaacatgcaagcacaaaaagcatgatggacacatcgcacatgcatcatcgagagtagatggccagtcacctgatcattatcaggagaaagatgctta

SEQ ID NO: 71516 - DNA, 239 bp, Zea mays
aaatccacgataatatcctcaagtcccaagaaactccgaatctttggaactgtagtgggtacgctccactccatatatactccttgactttaacaagaaccactgataaccctccatttaaaatgatatggccaaaacaggggacctcggcaatccaaaactcgcattactgtcttgcataaagttgttatctcgcacttctgagcatcatctacatgtcttatgctactctgactctg

SEQ ID NO: 71517 - DNA, 346 bp, Zea mays
aagcttctgcgacaaacgcttcagtgcgtgcttcggaagtttttacaattttctttgtatgtgtgcttgaaaatatgattgtctctaaaacatctagcacattaaccatcctttttcttttaagggtcactgctggacccttatggctttttgtcgtctcagtttttgccgaaagactcaagacttctgatgtctttatttcttcaactctcggttcttctattttttcagtcgctggcgcttccgctaacactctcatatttggcagcgaagttggctctttatcttcggtggccgaaaaggtcccaccatcaaattcatgcactgtggccagttcgatataacg

SEQ ID NO: 71518 - DNA, 410 bp, Zea mays
atatctacatttcttgtattgcatctattgcttgtctaacctatttgtataaccgccaacaaagcgtgtgataaagcttaactcggatcaaacttgacaagtcttagtctttaaaattgtagcacttaaactcttacttattatgcaagtgttggttcttgaaatatgcatgaagtactgctcttaaggggagtattcaaaactcaaaacactcatgaaaacccctattgctaggcctaaatgcaaatttgaccatttgcctattgtttctaaaattatctatcctatggcaaaatattctgaaaattatgagaaaatatatgagggtgccaataacctgtccaacaagtgctattttgtgtgattataaaattgggatgtggtttggttgaaaactagattgaaaaatt

SEQ ID NO: 71519 - DNA, 354 bp, Zea mays
gcttcttttctttctcattctttcttgtgatcatctcaattgtaaccgaggcaagatacaccaattgtgtggtggtccttgcggtgacttgttgtcccgtttgaatgagaagagaaactcactcggtccgagggaccgtttgagaaagggaaagggttgaaagaaacccggtctttgtgaccacctcaacggggagtaggtttgcaagaaccgaacctcggtaaaacaaatcatcgtgtatcgctccttatttgctcacgatttgttttgcgccctctctctcggactcgtttatatttctaacgctaatccggcttgtaattgtgcttaagtttgaaaattcagaatcgccct

SEQ ID NO: 71520 - DNA, 358 bp, Zea mays
  unsure (1)..(358): unsure at all n locations
ggcgcattattatacccctgatatcttctcgtgctgtcagatcattcctctcatagaaccattctgtcattcagtctccgggccatctcttccgaaatgttggcatggggcaacttgacccggacccgaaaacaaaactgtagcagccaaaattgttgggatactgttccttaccccaaagttttggttcgtatgataattcatgtatattgcagaagctttttgcatcaagcttcaaaccttggcttctcacggcccacacgaagacattcaactntataattgcctcgagggtaagttgatggagataaacntcgaatattgtcagtaccttcacaacgaagctgctcagggaaat

SEQ ID NO: 71521 - DNA, 332 bp, Zea mays
ccagcccatgctagttttatcaattaagcatgcatctatatcggcctcctcttttgcaaaaacaactaaatagagtttgccatctaatacacccttaaagctagtgaaccatcacttcttctaaagacagacacatctacatttgtgaatagacaattatatcccatattacataattgacttacggataacaaattatatccaagcgactctactaagaatacattaaaaatagagtgctcatttgagattgcaatcttgcctaagcctctaaccttgccttgattcccgtcaccgaatatgattgaatcttgggaatctttattcctgac

SEQ ID NO: 71522 - DNA, 329 bp, Zea mays
acacttttactcctgtccttcggcttatgaacaatatcaaattcacttgaggggctgtatatcaacacacatttaacataacaaaggagtacttgtcctcggttctggagcttaaaaacactaaaattgtaagatctttctatcaaggttagtatatacgcaccaacaagacaatgtcattggagctgggttgactcacgagaccgaatggaaggagcacatcataccatatctgagtcattagctggtggatgctgaaataaggactacaatttttgaagaaatataattatgctcgttttatgcatgtgccaaacttaagtaatatc

SEQ ID NO: 71523 - DNA, 348 bp, Zea mays
ggtacctcatcaaacacgcaagcattcctttggtttcacaaacgcccagacacccaaataactaaggaattaaacccctttctctgaatatttggcaatttctgctcagccttccttcaccaatcttggaaaaccacatctgttatttctggagccaaaagcagcaatttcaccttggtcaaaatctgggcccaaatgtctctaacaaaaatgcaagccaccaaaatgtgttgtggtggctactcttgctaatcacaaaaaagacattcatcaagatggtccaatcccctacgagccaatctatccgcagtccaacacttattaaaggatgctaacgacgtaaagaat

SEQ ID NO: 71524 - DNA, 403 bp, Zea mays
atgctcaacttatgtctagcaagaatgatttcgataagctaaaatttgcaagggatgcctacacaattggtagacacccctcaattaaggatggacttggcttcaagagagaagctaagaacttaacaagccataatgctcccattcccgccaaggagaaagggaaagcccctatggctagtaatgtgcaaaagaaccatgcttttatgtatcatgataggagacaaactagaaatgcatataggtgttataatgctcttgatgatcttgattctcatgccatgtttgcttctagttcttcctatatgcatggtagaaatatgtctaggagaaatgccattcatcatgtgcctaaaaagaatgttatttatgctcctatgaaagtagtgaatgaaccttccac

SEQ ID NO: 71525 - DNA, 383 bp, Zea mays
  unsure (1)..(383): unsure at all n locations
aaaatccctgaatcttgtctgtcnaactgcttgtccgtgtcaactgttagctcggacggtactccgaagcggcaaacaatgttctgccaaaagaatttttgggcagtctttgatgtgattgtggaaacggccctcgcttcaatccatttggtgaagtattcgacggctacgaatgcgaacttgaggttcccctgagctgtgggcaggggcccgacgatgtccatgccccatcgctggagaggccatgtatgggcgatcagctttgtatattgcgaggggttgcctgaccgaagagagaacttctggcatgcttcgcatgaccttgtgactcgatttgcggcgcagatcattgcatgccagtaaaacccttgtcggatcacctt

SEQ ID NO: 71526 - DNA, 345 bp, Zea mays
ggccttatgaaagtttaaagtacgcgttttcggcaaggccgaccgagccgatggttttccacgcctctgggataaagatacctcacatcgtccttccgcgagaagcaacatctcgctcacacaaacatccctgttaccgacagagagtccagatgctcgaaacatgaggaaaaaagaagcaaattcgcaagcacggcgagggtgtgtatttctggcctcggcggtcgcagaatgcacacgctacaagacgatctgatcctgcaggctcgggtcttcacgctgaaaggagccgtatcaccctctgcatcgacgacgtcttcagcaaagtccgacccaacctcggac

SEQ ID NO: 71527 - DNA, 434 bp, Zea mays
taaacactaagcttatctatacaaatgaaatggaacgacaaaagtgttgaggagacggttcataaggttctcatattgagcatggatttgacaaaatgtaaccccgtccttcgacagttctatgatgcgaaacaacaagagattctcgcaagggttactggaagctcgtcgtcaagcaagtgaatgttcatcatgacattgtagtgcttgaggaagtattgttagttggtttcgaaaacaagtttattttcagcacatgtggacttgacattttcctgttgtgtcatgctttggagaacaagtatatgtttgtgcacttgtcatttatctgagaatggagaacaaagttatgtttctgcacttgcgcattgtagtggttctcgaatactgctgttgcataataatagtagacttgcttaatcatattgcagtag

SEQ ID NO: 71528 - DNA, 344 bp, Zea mays
cgaaaaaatagaccctgtgcagcttgtcaagcaggtaatcaagtgggaggagcacatcacagcaagaacgtgatgaccacttcaagacccctggagctgctgcatatggacctttttggacccgtcgcctatctgttcatatgagggaggaagtatgcgttatttattgttgatgatctttcccgcttcacttgggtgttcttcttgcacgataagtctgaaacccaatggaccctcaagcgctctctcatgagagctcataatgagtttgagctcaaagtgaagaacgtaaggagcgacaactgatccgagttcaagaacctttaagtggaggagctccttga

SEQ ID NO: 71529 - DNA, 321 bp, Zea mays
cggctttgaagatagtgagtaccctaaccatgtctatatgctctctaaagcactttatgggcttcagcaagccccaagagcatggtatgaatgcataagaaatttccttatagctaatggcttcaaaatcggcaaggccgatcctactctattcactaaaactcttgacaatgatatgtttgtatgccaaatttatgttgacgatattatatttgggtctactaacgaatctacatgtgaagaatttaataggatcatgacacaaaaattcgagatgtctatgatgggagagtagaatacttcttggatttcagtgaagca

SEQ ID NO: 71530 - DNA, 390 bp, Zea mays
ccccaacgtccttcttatcgggggaagagtggaatcgacccccatcttcaacaatgaaccaaccacgccgggggaggaacctcttaacgggaatctcgccgacgaatgaaccaacgccgaaatatccggcgacatcatgataccggatagcgagatccggcacagcctgtgtcacgagatgagatctcagaggtaggagaaactctggaagaatgggtctccaaggaaagaaagaattctcgacgacgtgatcgtcggcaagctcaagagcatgccgaacaagatgcgatgcaacgccgagagaaccctcttctcggactgaacttgaaccccgacttcgccggatccatgaacacaccgagcgaaggtcggtggagtattggctcggat

SEQ ID NO: 71531 - DNA, 405 bp, Zea mays
tatgaagattcttcatcacttcgtgggctagtcgactgtgccagagccaacccatgttagtcttatcaatcaagcatgtgtcgagctcagctctatcaaaatctactaagtataactgaccctctacacacctttaaatgctattgaatcatcactgcttctaaagacagtgacaccaatatcagtaaaaagacagttgtagcccatttgacataattgagaaacagaaagcaagttgtaatctaaagaatcaacaagaaaaacattggaaatagtatggtcaggtgatatagcaattttacccaaacctttgaccaaaccttgatttccattcccgaatgtgatagctcgttgggaatcttggcttttctcatatgaagagaacaatcctttctccccggtcat

SEQ ID NO: 71532 - DNA, 351 bp, Zea mays
caacccatgttagtcttatcaattaagcatgtgtcgagttcatctctatcgaaatctactaagttaagctgaccctctaacacacccttaaatgctattgaatcatcacttcttctaaagacagtgacacctacattagtgaaaagaacaatatagcccattttgcataattgagatacagaaagcaaattgtaatctaatgaatctaaaagaaaaacattggaaatagaatggtcatgagatatatctattgtaccaagacctttgaccaaaccttgatttccatccccgaatgtgatagctcgttggggatcttggttttctcgtaagagaacatttcttctccctgta

SEQ ID NO: 71533 - DNA, 359 bp, Zea mays
  unsure (1)..(359): unsure at all n locations
cacagcgatcttgtctttattcgcgaagatttgcacccaatcggcgcttgaacatgggcagaagcaactggaacacctgttcgaccgtgggtgacacccccggttcacgcccgttcgcgcaccgcgccttccaatgcacgcccctgcgcgctcgccggtacacgaccgaccgtgcaccgcgccgtgcctattaagtcttcccgggcgcgccccacttngtcccgcactcaccctcaccggtcagacactttcccttatctccggcaagctaaattccgcctgccatcaccgccagagcttcggtcaccgtggtcaccccaccccagccatcctcaagtcgagccagtgcttctgctagc

SEQ ID NO: 71534 - DNA, 289 bp, Zea mays
atcattaaccccacaccaaggatctccccagaaactgacaagtacctgatgggctctttcttggcatgttacatccggcataatcggcatcataatacccgattagatcaaaggtagataccttgggtgaccaaagcccaaacttaggagtgtagactaaatatctcatgattcccatccttaatgccaggacgtctcttattataaagcatgccttcagaaaatttaatttttcattgtctaattcatgctcggcaattttagcagttaatttaactatgggatcatt

SEQ ID NO: 71535 - DNA, 324 bp, Zea mays
gaaaacctccctcctcatttgattaatattcttccctatgggatgaccatacataagtaaagtctttgcaacatcaaatgttatatagtgcatttaacttcgacatctactatatgtgtgtcactaatttaaatgaatatactcaatgcctttgggtttcaataatgatgactcatttgccatccacatataacgatcatcatttgtgaaacactctcttgcggtgttaatgctctattttctaattgctacaacgaagtccttgcaagagccttcaagatggattgtaaaattaaaaaaaataataaatttcaagatcacttg

SEQ ID NO: 71536 - DNA, 381 bp, Zea mays
tgtggaggttcttcatccccacatgtgctaagctgcgatgccacagccagcccatgcaagtcttagccattaagcatgcatctagaccggcctcttcttttgcaaaatcaactaaataaagtttgccgtctaatacacccttaaaagctagtgaaccatcacttcttctaaagacagacacatctatatctgtgaatagacagttatatcccatattgcacaattgactaacagatagtaaattatatcctagtgactctactaaaaacacattagagatagagtgctcattagaaattgcaattttacctaacccttttaccttgccttgattcccatcaccgaatatgattgaatcttgggaatccttattcttgacgt

SEQ ID NO: 71537 - DNA, 366 bp, Zea mays
  unsure (1)..(366): unsure at all n locations
tgatatcttgtgaacatttccaatgacttttgaagtattactcattttggcttactattacccacatgccctaatcctagggttgagtaccctaccctagggttaagaacacttcaaagcaccccatcacatttgttttgaaattttacctagtgtatgcattctaggtgtgccaaacaacatgaaatgctaatgcatatgatgtcatgctcaagttttagtaccagtaacaccaggggtgttacatccttccccccataaaagaatctcatcccgagatttaaggtcctatggtaagtagtggaaaaggaaacacgtcacatctttatttccttatttgtcttacagagcanggggtggaatggg

SEQ ID NO: 71538 - DNA, 375 bp, Zea mays
tgtccactacagccaaataggatacttgctgagtatgttgatgtgtactcacccttgctctacacaccaaacccccccccatccccaggttgtcagcattgcaaccactgctcaggcgaagatgaagctgtggaaggagactttcaggagttccaagactacgacgagttctaggcgtgggttagcggcaacccccagtcggctgcctgtgaaggtcgcggttatctacgtttcgttttcgcactttgatttactgtaaggactatatggacgtctcagacgtatgatgtaatcgactattatttccccttttaatactatttgagcattgtgtgatgatgtccatgttatgtaactgctgtgtacgtgaataac

SEQ ID NO: 71539 - DNA, 400 bp, Zea mays
ttaagctctttgacaatagaatcacttcatctagttttatcaaagatgcaataatgcatgagagaaaaattttttaagaggttaaactaggtatgaagcagggataaatgcaaaggacatgctttctcttccttataagatatgcaaagaatgcttataagaggaagatttaggtacaagtttaaatgaaaggaagtgattttacccttttgtaccttctcatagagacgctctcttcattgtgctttgtccttagtcttagttgcttaagacctatactcaatgacaatatatggaaatactttgcacaagagagagttctacaactagtgatcttcttcaagttattgttagcatatatcaaatggatcacaagttgcataaatgaatcatgaattct

SEQ ID NO: 71540 - DNA, 387 bp, Zea mays
ttatctaacatctgacgatgcattttaatgcgactattactgtttatatttgcgttgtaactaaatgttgcaatctagttgttgatcttgcaagggtggaccgtccgcgtgtactaagaagtggttagaggatataaatacaaccccaaccatccccttcaatggtatccaaacttccaacactcacattcgttgcaaagaaaaagacttcactccaaccacaccctaagcatcaaagatccctccaagagtcataattttgtttgagattgtgacagaacctcccaagtaattaggcccacctacagttgtccttgtctcacagacatcagacaaccctgtaggtgcccctgaactacttgacaagctcggtatctttccttacct

SEQ ID NO: 71541 - DNA, 386 bp, Zea mays
  unsure (1)..(386): unsure at all n locations
tctaaagggagaacacgtgataggtttgacttacgttcaattcgaaaaagatagaccttgtgcagcttgtcaagcaggtaaacaagtgggaggagcacatcacagcaagaatgtgatgaccacttcaagacccctggagctgctgcatatggacctcttcggacccgtcgcctatctgagcataggaggaagtaagtatggtctagttattgtagatgatttttcccgcttcacttgggtgttctttttgcaggataagtctgaaacccaagggaccctcaagcgcttcctcaggagggctcanaatgagtttgagctcaaggtgaagaagataatgagcgacaacgggtgcgagttcaagaaccttctagtggaggaatccttga

SEQ ID NO: 71542 - DNA, 396 bp, Zea mays
  unsure (1)..(396): unsure at all n locations
tggcccacaatgtcttccaaaaatagctcacaaacttcacatcacggtcagatacgatggttttgggcactccatgtagtctcacgatttctctgaaaaacaaattggcaacatgtgaagcatcgtcgctcttgttgcatggaataaaatgagccatttttgaaaatctatcaaccacaacaaaaatagaatctctctgtttttgagtcttcggcagccctaaaataaaatccatgcttatgtcttcccaaggaattttaggagtgggtaaaggagtatataaaccatgagggttcagttntgacttagctntgtgacaggtgacacaacgctccacanatctgatgacgtctctccctatcttgggccaatagaaatgatcactgagcaggtcat

SEQ ID NO: 71543 - DNA, 395 bp, Zea mays
tgtgaagattctttatcccaacatgggctattctgtgatgccagagccatcccatattagtcttagcaattaagcaagtatcgagttcagctttgttaaaatcaactaagtatagctgaccctctaatactcccttaaatgctactaaatcgtcacttcttctaaagacagtaacacctacatctgtaaaaagacagttgtagcccattttgcataattgagaaacagaaagcaaattgtaatctaaagaatctacaaggaaaacattggaaatagaatggtcaggtgatatagcaattttacctttgaccaaaccttgatttccatcctcaaatgtgatagctctttggggatcttcgtttttctcgtaagaggagaacattcttttcttccct

SEQ ID NO: 71544 - DNA, 397 bp, Zea mays
  unsure (1)..(397): unsure at all n locations
tatgaagattcttcataccaacatgagctagtcggcggtgccagagccaacccatgttagtcttagcaattaagcaagtgtcgagttcagctctatcaaaatctaccaagtatagctgaccctccaacactcccttaaatgctactgaatcatcacttcttctaaagacagtgacacctacatcagtaaaaagacagttgtagcccatttgacataattgtgaaacggaaagcaaattgtaatctaaggaatctacaagaaaaaacattggaaattgaatggttaggagatatagcaattttacccaatcctttgactaaaccttggtttccatccccgaatgtgatagctccgtggggatcttggnttttctcataggaggagaacatcttcttct

SEQ ID NO: 71545 - DNA, 379 bp, Zea mays
tgagccgaggcattgcctcaccggagaggctgttttaccctcgccggagttcggtcttccgccgccgcgtgtggaccgagctaaccaataagtctttttccaattccttgcacccacgaatttcctagcatctcgtgaagctctatgacccgttcaattgacctatcatgtcgtgagtaggccggattcctcgccgccgacgagcatctccgcctgcgcacgtggaccggccgactccgaccatccccgatggcgacccgcacatcgccgtgatcctcgagacctcccctacatcctcgatgaaagggaaataggcttacaccttttcctaaattgaatttgggggttgaattgcccaacataaataattggactaact

SEQ ID NO: 71546 - DNA, 340 bp, Zea mays
  unsure (1)..(340): unsure at all n locations
tatcttggaacgccccagctatctatttccttactatatcaatagcagctggtggcagaccgtcggctctttggtccaatattggtgaggttgtttcgacactagcatattgtctttctgaaagggaaatgtgcccttaggccatttctataatgttttggtgattaagtgtccaacacatagtgagtgagttattatgtgccaaacatgcaaaaaagtgcaaatcatataacaaggtatgtttctagacttagtacattggtttgagtactaacatatcttgtctaagtgctggaaatngagaaaggaagaaaggaaaagattggcaaaaaacttggtt

SEQ ID NO: 71547 - DNA, 371 bp, Zea mays
tcttcaccatgtcgctgctagccaagttgttgcatctacctccatcaatgatcaaacgacatgaacgctccttaatgacacactttgtttgaaacaacgtatgtcgctgattctgctctgccttctccatttgtgcactaagcacacgctgtacaatgaggctctcataatgctctgcatcatctgcaccaatctgttcttcgggtggttccttagtgccttcatcatcagccgcaagcaaagcaagtgtagcttcatccaaatcactagcagaggaatacccaccatcgtcttttaccaccaaaacacgctgattaggacaatcacgctgcacgtgtccatagcccttggattgataacacaaaacattt

SEQ ID NO: 71548 - DNA, 376 bp, Zea mays
ggcacgacattgcagtataagatagcgcctggtttctttattaggttaaaccaagcgactttgttctaacatatagcatatttagttagtttttagatggaatcgagccgctccaaaagtggaatgttccttcaatatgctgcatctcatgctctaaaaaagagtcctaacatgtgcacttgtgagtccaactctcctcccccatccatatcaaaagcgtcctaaccattgcacgttcggagaaggaaaccaatcacacgaccagtgtctcctgcacttctattatggcatgggttcgaaccccactcctacattgtttttaacattttatgctgatttaatcaaaatggtcgacggattaatgggccggcccgca

SEQ ID NO: 71549 - DNA, 396 bp, Zea mays
  unsure (1)..(396): unsure at all n locations
tggagaaatcctggataaatctacggtaatagccagccaatccaaggaaacttcgaacttgatgtacagtggttggcggtttccactctagaatatccttgatcttgctgggatcaaccacaatcccatttgtagacaatacatgtcccagaaattggatttcctccagccaaaacgcgcatttgctaaatttagcatataattgatgttcccttaagcgcgttaatacgatccgtagatgctgagcatgttcctcttcattcttggaataaatcaagataacatcaatgaagaccaccacanatttgtccagctcgggcataaacaccgagttcattagatatgtgaagtggcaggagcattcgttaatctgaagacataaccaaatattcgaat

SEQ ID NO: 71550 - DNA, 308 bp, Zea mays
  unsure (1)..(308): unsure at all n locations
cactatcacaaacncaagctagatctctatggagctccttcacacttgtgccttatcttttatcctgatatcaacatggtactaaggcaccaaacttagaacaagttataacattgtggcacgagaggaaacttttattctaatgatcaccaaatgataccaacgggagcacactactacggctaccaattgaaagatcatcactaacatagctccatgaattatgccctgtgtggatagctggactaatctttagtctctggctcataatcgcgtttattccctattttaccacacggaagaactaa

SEQ ID NO: 71551 - DNA, 400 bp, Zea mays
  unsure (1)..(400): unsure at all n locations
tgtcaagcacattntggtacccatcgcttgatgggtcctttaaggttagtagacaaagatctaggaacccaagtgtcctttgtgctagcgcttggtaaacttgttacctttctagcacaagttgcaattttgggttgcctagttacatgcgaaatgattgacaagctagaggtggggttgttaccaatgggacaatccttgcattgatgtccctttttccggcatgtgtagcataggcgcttttgaagtcttgaaaatttcttctttccttgtttgtcgcttgctacatggttagtaaaaactttcttttctaaccctatgcctttttgtttcaaatgaggacaagatttgattaagtgtcccttctttgagcatttaaaacaaagtctatcattcttgt

SEQ ID NO: 71552 - DNA, 394 bp, Zea mays
tcttgtccaggaggggtgtagtgtcagggcctaaggaggccaaattgcataaatatctatatcgggtagcataattagtatcattatatatcataaactagttctaacgagtttagatgcatgactgttggagcgatcctatatttatggaggaaataaagcattaaatatgagtttttattttcatgcatgacaatacttttccttttatcgcacattcttgtcatcctaaatttatgctcatgcaacaggaaacaaatttttacgcaatgtaccgaattgcataaatgtccacaccgtgtagcataattagtatcagtatatatcataatctagtgcagacgagcctagctacatggctggtggagcgatcctatatttataaagaaaataa

SEQ ID NO: 71553 - DNA, 356 bp, Zea mays
tatgaagattcttcatcccaacatgggctagtcggcggtgccagagccaacccatgttagtcttagcaattaagcaagtgtcgagttcagctctatcaaaatctaccaagtatagctgaccctccaacactcccttaaatgctattgaatcatcacttcttctaaagacagtgacacctatatcagtgaaaagacagttgtaacccattttgcataattgagatacagaaagcaaattgtaatctaatgaatctacaagaaaaacattggaaatagaatggtcaggggatatagcaattttacccaatcctttgaccaaacctgggtttccatccccgaatgtgatccgtcgttgg

SEQ ID NO: 71554 - DNA, 347 bp, Zea mays
tccaatcctccccttccgcgctttccctccccctcctcctcctcccctttccagtccccaccccagcgaagcttccaaagccgccccaaccccaacggccgcccggcccgatcgagcagacagctgccgcggccctccccgccccgcacgcgacctcggagccatggagaagtacgagctgctgaaggacatcggcgccggcaacttcggcgtggcgcggctcatgcggaacaaggagaccaaggagctggtcgccatgaagtacatcccccggggccaaaaggtccggcgctctggactggtggaaccgagtaccgacgagctcccgagacgggttcgcgtgagat

SEQ ID NO: 71555 - DNA, 394 bp, Zea mays
tgtaccaatgtggacgtgaaggtcatcacttctgttactgtcctgagaagagttcactactgatcgcctccgagatgaagctatctcagtcttcagacatggaatatgaacagaaatgcacagaaacctctaccgacaacgtaaagacaactccaccatgtaacttatcaagtcgtgcttgctttggctgtggtgataccggccatcttgttaatggttgtcctaagaaagatgtggagatcaataaggtccaaaagaaaagacaacaccctcaaacccatgcatcaacaaagaataaacaaaggaaagagaccagtggaaagataagttatgcagtgacaggaaccattcaaagtgataatgcagtaaatttttggaacactggtcattcaca

SEQ ID NO: 71556 - DNA, 385 bp, Zea mays
ttgttccagtgcacgcaagaccatgaggagtactttcagtcatatgttcgaaggttcttgtggctgaaagcccaggcaccaaccgtgcctaatgaaatcgtcatcgaggccatgatcaaaggccttcgaccaagacccacgacacaatagtttgcaaggaagccaccatagaccttggagaagctcctccagaaaatggacgagtatatcagagctgacaatgactttcgacagagaagggaagaagcctatagagactccgagatgaccaggggattcggaggaagactctaccctaggcatgtcaggatgattcataatgctagctcaagcgttgacaggggatataatactaaagggcatcaacacaactctcaatcatcag

SEQ ID NO: 71557 - DNA, 392 bp, Zea mays
  unsure (1)..(392): unsure at all n locations
tgaggttgactcgccgaagcaacataaactgcagggtggttgcctacatattctgggatgtaaggcgaatgatacgaagcagtgtgcatgacctgcttcggctgagcctgttgtgctgcagcttcggctatttccttttgcttctggatggtaacatggcacatcctggtggtatggcctttgttctcaccacagaacaagcaaaaaattcttcttggttgatcgccaaatcttccgccgaagcccctggcacctctgcctctcggagctggtggtcggaaggagccttgctgttgccccgaagcctgtgaggagcactgtggcctttgctgctggctccccctatcatcattntgagtagagttgtgaattgatctaacgtgcctcggata

SEQ ID NO: 71558 - DNA, 343 bp, Zea mays
tcacccaaactcaattggcccaaccgaggagccttccatgcgccatgatttttcggatccacacaccatttttatcgggtccattgatgatcctacaaaaaattaaacataatgctcggacccacataacctatttcgcacattggtttgacctaacgtgaccatagctgcgtgcagtggggctggtataaactatacatgtccaaatgagcgtgctgggctaacctggcccgggcacggtcaggtccgacacggatagtgccctggctggcccggcatgcagacagtaacgggccgggtcgtgcccgcccacgggccggacttaaagccaagcacgacatga

SEQ ID NO: 71559 - DNA, 355 bp, Zea mays
ttacgactactgctccccgaagacatcgtgcgtgccgtttcctactccctggtttgcttgcggtgtctgtttatcttttcgctgtgccatagtatattgttccgggttttgccggactagagaaaggatctatatcggggcgactaatccatttgaaactaaaatagacttttagttttgtatttgacaatttagagactaaaataaaataaaacgggggactaaaaattaatcgaaaccaaactcccccttagtctgctctgcactgttctatttttggttggatttggatactgttatattttccattactgtgactactatggaattttaagttggttcggataggggaaca

SEQ ID NO: 71560 - DNA, 402 bp, Zea mays
tgccgtcagatacaactttaaatgctaatgaaccatcactccttctaaagacagctacatcaacatttgtaaataaacaattgtaacccatgtgacataactgactaatggaaagcaagttatatccaagtgattctacgaaaaatacattagaaattgaatgctcgatagttgaaagtcgcctagatggggtggataggcggaaactgaaatttacaacttcaaacacaatacaagccggggttagcgttagaacaaatgttaagtccgggagagaggggaaaacaaatcaaccaagaaataaagcggatgaacacggtgatttgttttaccgaagttcggttctaaagaacctagtccccgttgaggtggtcacaaagaccgggtctctttcaacccttt

SEQ ID NO: 71561 - DNA, 392 bp, Zea mays
tagcatatatgcacaactgttcattaatcaatacattgaaaaaggctgcacgcagcccgtgttcttttgatccggaaggtcagaggtattagcaatcagtgtccggcatccagacactacgtacgcacgagtaattggagatcctagattagaataaaccacctagagagcttgatgctttctagagctgaactcatccaggttaaaagcaaagccaggacttctcggggctctatgtcagattgtcagtgttgcaccttgtactgatcgggagacagccaggccaagcaaagtagataaacaaaccatgtctacgattgaggcattgatggtaccgcgcacggtgcacatggttactttcaagctagctaatgcaaggcgctatgcactaa

SEQ ID NO: 71562 - DNA, 381 bp, Zea mays
tggatattcttcatcagaactctatggatattgttgtgataaatgaaaattcttcttcacgaagcatgaaaagaagggaaggtgttttttcgtcaaagactcaaaaacggtacgtatgtaaaatttcatgcatcgtaaagaattgaaccataaaaaacaagtatattacattcagggttacaaggtattacacatattacatttcagatgtttttacaatagtacctagtcttccctaagaactacttccgcagcttcgttcaggagttgattgacaacttgatccatgatagcttcagccatctttttaatttcatcgtcatctttcgggtgagggcccggagacgctttagtaggatatgaaggaggacaggatatggc

SEQ ID NO: 71563 - DNA, 397 bp, Zea mays
  unsure (1)..(397): unsure at all n locations
ntggcacatataagttaaaatgataccaactgaagtattataccacttgtagtatatcaattatagtatatgtgaaatgaaaataccaattgatatatcattttcttaggaatattgaataagctatgtgttgcgcttaactaaacattttaaaccatgtaggcttactcaagagtatgaattgaaaacgagcaatcctaccatatgattgtcctagtatgcatgtagttaatatcaaaagtaaatatcacatgtaaaactaggcatgtaaggtaaagactagatacaagaaaatagatacgcatatctaaaaggaaatacaataaatctagttaccttagacatgggtggaaattttgggtccaaagtattcactaaccctcttggcaatagactt

SEQ ID NO: 71564 - DNA, 382 bp, Zea mays
tagtgcaagcgtgtggaatggaaagacaacgaagttaaggtgtatgtatggcttgagtgaagggcaaggtggaacggagggaaaacgggaggaggcgcgcggcgacgggcggcagggctgttcggccttgcgtctgggctgaaaacgaagtgttcgccatggcgcacgggccgaaaacggaggctcgggcacgaactcgaaaataagctaagttcaagcatgtggaaagacaccgaacatacagtgtatgtctttggtgaagggcacagtggaacggagggaaaacgacacggatgcacgcggcgaccggcggcatggctgttcggacttgcgtttggcttgaaacgaagcgttcgccatgtcgcgcgggccgaaaacaacg

SEQ ID NO: 71565 - DNA, 299 bp, Zea mays
tatgcactaatgattagttacaagtggatctaatttaagaatttagacagatgcactactggcaacctagtcatttttagttgatcaacattgaactggataaacaattgatgatatgcatcaactaccgtaccggaactataaattaagattcctattcctataacctgaacactgattaacctgcctaaaatcaaatatataacagcaatgaaacaacataaaataaaataataataataaaaaagggggggcggatgaaccactcactgggcggctgaacccgccctcggcaaggg

SEQ ID NO: 71566 - DNA, 394 bp, Zea mays
ttgtaggagaaggagatggtatgaacctttggggtgcttgatggagttaattcaattcttatcaactcaagctatcaatcttcaaatgatctacatattcaagattgacccaaggttacttcaatttattgtattcaaaactcatatcatctcgggaagatattaatgttgtaggaaataaagaatcatcatgtgcggaatatcaaagcctacaacatggaggaaaatcaaaggatggtaacatttatattcttaagtgcaattatcttaaattgttgtgtgtcttgtgtagtcacatagaaatagaaagcacttaagcatgttttaaaattatgtcatcattctttgaagaaattcctctcgtatggtagattgtgtttttatcaattctata

SEQ ID NO: 71567 - DNA, 373 bp, Zea mays
tctaaagggagaacacattttaggactaacaaatgttcattttgagaaagacagggtttgtagcgcatgccaagcaagaaagcaagttggtgcccatcatccacacaagaatatcatgacgaccgacaggccgcttgagctactccacatggatctattcggcccgattgcttacataagcatcggcgggagtaagtattgtcttgtaatagtggatgattattctcgcttcacttgggtgttctttttgcaggaaaaatctcaaacccaagaaaccttaaagggattcttaaaacgagctcaaaacgagttcggcttaaggatcaagaaaattagaagcgacaacggtacggagttcaagaactcccaaatt

SEQ ID NO: 71568 - DNA, 360 bp, Zea mays
tgacacaggtatccgcacgttaatccttattccaatttcggctcatagaccacgcatccccatggatccgtgtccatagaccatcatcattctgttatcaaaaatggatacaaccaattcctgacctcgcgcgagtgctagaaaaatcactcgacttctaccgagatcctgatttagcatagcagctactcgacctagcatactagtatccatctcaaaaggaatcctgagttcatgcaactagggtttcaaccaactcctacacttaagtgcacggtacaagcctacaaacattaagtatagtaaaatagcatatataacggttatgcatataaccggggcttgcctttaattaacact

SEQ ID NO: 71569 - DNA, 325 bp, Zea mays
tcgggatttttaccgaggtattcgaaaccattccaaggcccgattaatccttcttggtgcccctacgcaaaaggaaacccacgtgagggccaagcacctcggtcgagtaactccatagagagtcgcgggcctctcggacgctccccgccgtctccactatcgagcttccggctgaaaacgtcatgggcctcgttccctccggtacacggtggcagacgtgacacaaacgcggctatcacggtctcgcaagactctcgccccactcggtacaattataacggctcgtgcaagagccgaggggttgtgtggttatctaaactcactc

SEQ ID NO: 71570 - DNA, 264 bp, Zea mays
  unsure (1)..(264): unsure at all n locations
ttgttgaattgggagaggatttgatcacttgggtgtgtcttgaattgaatgctagagctcttgtaagtagttggaaggtggaaaacttggatgacttgaatgtgggggtgattggggtatttatagccccaaccaccaaactagccatttggtggaggctgctgtcgcatggcgcaccnnncantcctgtgcgccacctgacattgttccgagcacccacctcttaaccaggccgctgtgtttccaccgttggagctctcactt

SEQ ID NO: 71571 - DNA, 396 bp, Zea mays
gctatccaagactcaagctggctttgcaagcttaaataacttggattgcatctaaggcttgtctattctagccgagataaccgccagcatagcgagtgatacagcgtaactcggatcacacttgacgggccttagctttaagcttttaacactagaattcttactttttatgcaattgctggatctagaaatattgatgatgtactgcacttacggggagtattcaaaactcaaatcactcatgaaaaaccctagtgcaaggcctaaatgcaaatttgaccatttgcctattttctctaaaaattatctagcctatggcaaaatattccgaaaaatatgagaaaatatatgagggtgccaatacctgggccaacaagtgttattttgcgcgattat

SEQ ID NO: 71572 - DNA, 393 bp, Zea mays
tgcgaagaatactgcggtctctgttgttgacttcttctggcatcactctgggttgagttgtgaattgacctgatgtgcctcggatggattcttccttcgaagcccctggtcatttcagagaacctgtatgtttcctcccttctttggcggaagtcattatcagcccggatgtattcatccatcttctgaagcagcttctccagagtctgtgggggctttctagcaaaatactaagcagttggtcctggacgaagccccttaatcatggcttcccgacaatttcattaggcactgtaggcgcttgtgctctgagatgcaagaaccttcggacatatgcctggaggtattcctcatgatcttgcgtgcactgaaacaaggcctgagctatgactg

SEQ ID NO: 71573 - DNA, 395 bp, Zea mays
tgattaagtgttagcacaatgaaatcaagtggattatgagagctcttgtgaaccacaattgacacagtgagaacaagcacaagagacacaaggatttatcccgtggttcggccaagtacaatacttgcctagtccacgttgtggcgtcccaatggatgagagttgcactcaactccgttcaagtgatccaatgatcaactcgaataccacggagttcttctttctttactctttcccatttgcgaggaatctccacaacttggagcctcttgcccttacaatgagatgatcacaaagaagcacagatgtaagagtgggaagagcaacacacacaagcctcaaacacgagcacaaacacgcacacaagtcacaacttgagctctaagatcacacac

SEQ ID NO: 71574 - DNA, 383 bp, Zea mays
tgaatcctcttgagaaggagtttctcaatgctgctgatgacaagcggaaggaagtcctctctaaaatagaagaggatgttgctaagctcagcggttctgcagccaagtactttcttccaccttcccctacactatgtttgcaagctactcgattgatttaacattctgctagaaaatttcattccattttgttggtagatctcgcgtctagaattgccgctagatgggggaggtgagcggctcctggtctcttcgatccaatgtaatggtcaggtttgttttgagttcgagattgttagctagttctcagatccatcatggggccctctatgttttccatttctgtgatgagcatgtggtttgttccgttgggtttaatgggg

SEQ ID NO: 71575 - DNA, 398 bp, Zea mays
tgtgaagattcttcatcccaatatgggctagtcggcgatgccttagccaacccatgttagtcttagcaattaagcaagtattgagttcagctctattgaaatcaactaagtatagctaaccctctaatactcccttaaaagctactgaatcatcacttcttctaagacagtaacacctgtatccgtaaaaagacagttgtaacccattttgcataattgagaaacagaaagcaagttgtaatctaaagaatctacaagaaaaacattggaaatagaatggtcaggtgatatagcaattttacccagtcctttgaccaaaccatgatttccatccctgaatgtgatagctcgttcgggatcttggtttttctcataggaggagaacatctttttctccc

SEQ ID NO: 71576 - DNA, 386 bp, Zea mays
tgtctctgatttgaatgctgctacactataatatatatgttctggacaactcttcatgctcacgagttgtgttttacgcatgtttcccaatctaactggatcttctatttatggatgcttttctctgcagcgtttggttgaagctaagttgcaagtggtgcagctagatgcaaatctgctaaggtaagaatgtagcctcgggctgtgattcgttgatacctgtgttgataaaggaacccgagatgtagcaatgtggttctaccaaaaataacagaaatactcataatagccatacggttttttgtgaaaaccttggaacaaaaaaaataaaatagaagggaaagacatagttgacaaagatatattagtcagcattacaatatgct

SEQ ID NO: 71577 - DNA, 386 bp, Zea mays
  unsure (1)..(386): unsure at all n locations
tccgtagcaagttctggtggtcaatcaggaaaatttataaacgacgacgacaggaattaacgatcgtgccctccttaattttcatcgtccgcgagaccggaattagtagcgatgaacatgcacagtagcagcacgagactgttttgctctagacaacaacaaagagagagagagagattaacaatagccagttttttggatggactcaggcgttcaaaagcatcctgcatggtcgttaggtgtcgtcagcagctgaacactatattagcattgcgtaatcacttatccggccctgctcacctggtgtcaagctgaagcacgtactaatgacgtggccctagaatttggaaacacgaaaaaagtccaaaccatcatatgctntcaca

SEQ ID NO: 71578 - DNA, 329 bp, Zea mays
tgcacctaggtacattggtccattcccggtactttaacaatgtggaccagtggcgtatcgactgcagctccccgaaattttgtctgctatacataatgtgttccatgtgtcataattaaagaagtgtcttcgggttcccgatcgaaccattgaagtaacagatgttgtccttgaaccggacttgacatattttgagcaccctattcgagtcttggatcaaaaggacagggttacccggagaaaaactctcaagttctacaagatatagtggaaccagcattccaaagatgaggctacgtgggaaactcaagacttcttatataaaaatt

SEQ ID NO: 71579 - DNA, 355 bp, Zea mays
  unsure (1)..(355): unsure at all n locations
tcgactccatctatattgtggattgcttttgagtctgtccagnttccttcggcttttctagcagcttcctgactaccatgaacagcaatgggcccttgttccgaaggtatcttcatgcacagatatgctggatgaagtattgcttcgaaagcattgaatgtcccacgaccaatgattgcattgtagggatattccatatcaacgatgtcaaacacaacctgtttagtccttgtgttgtggacaaagccgaaggtcactggcatcgtgattttgccgagtgctgcaatttgccttcctttgaagccacaaagagagtgtgtagcatcatgaatcttatcctctggctcctgcatct

SEQ ID NO: 71580 - DNA, 289 bp, Zea mays
ctcggccatgactaataatttgggagcaaaacagtgctatagcaattttatgtcggggaacttcacacctactcgtctgtttatatagagccacaggtgaatcggcaagatccccagcaccgaacaagcagtcacccgcactcactgagcggtgggccacatagtccgagaaagtgaatcgctggcgcgcgcgtaattggtacaagatggggcacgcgcgcgacgattattttaatcgtttttcgccaacgacctcacggaaggtgttttttatatattcggcacccct

SEQ ID NO: 71581 - DNA, 373 bp, Zea mays
tacctccttggagacttcttcagcctcctttgaagattgagcataattcaccaagacctgcagtttaaatacagctttcatattattctgatgataaaaccatttatccactatgcataatggtccatttaaattgacaatctaacagcttggtctaccaatggccattgtgggcttgaggtttgtgcacagtttaaaaaaagcatacacatttgataaacttctctatatttataagcagattacttaaacttgtaaccttgcagcctgctttttcaagagccaatgcagaggcttttccaatccccctggaagcaccagtaacaacaaccacaggaccttccaactttgatcaccttttacatgggttgat

SEQ ID NO: 71582 - DNA, 402 bp, Zea mays
actcaagcttgacactccattcctcgaagctcggaaatggatcgcaatctattctttacgcacagcgaatacaaacagacacaaacaaacaaacaaacacatatacatatacatgagaacattacaccattcagatgaaaacataataaaacatgcaaaatgaaatagaggacgttactacggtcacgcgaggaaaatgaaacatcgaactcgaagctacggtcgagaagatatcgcgtttacgctaaacaaatattaactataacgctttaattcgacctgattatattaatcgatatttatttaaaatgaaattagagctatctaaccattttaattagctgaccacactaataattcttagctaaataaagtatttaaataacatcagcgactctaagt

SEQ ID NO: 71583 - DNA, 388 bp, Zea mays
  unsure (1)..(388): unsure at all n locations
tcgggaatccaatactcttggacagggtgcttataattttagcaccagcacgatcgcgaatgcatcccacaatttcttcatcgaccccgccgaagagcatttacccaggctggtagttgcaggagatagcaaattcatttagttctaatatatcctctgcggagagctgttggtcgcccaagtgtcgtaggtcaaaatttgcattttccgaaaaggtttcttcaattttcttccccttatcagaaactgatgcggntgcatctttttccacaaccatatctgatataagtctatcaatttccgacagggtggttgtgagattttattcttcagctgccgcggtagcttaagcatccatagatttagtaactttggctggtgaagctga

SEQ ID NO: 71584 - DNA, 410 bp, Zea mays
cctataaatactaagcttaagttttttttagcttgaactggatagtgtgttctctcttacatggtattagagctcgagatctcaagttaaaatcatgttagaggcttcattagtgcctccgatacctttattttccacatttgcgcctctcttactgattgcatgtgagtggaggtgttgaagtttataaatagattacctatattcttctaaaatcttaagcttttgggttgaccaggttagtatgtccaatctaacagcacccacgtcaattttgcaaccttgtgcagatgcgtttgtgctttgtggttcatgtactgtgagcttgggatgacgcgagttggctggcttgtggcatcgctcatacctcatttttagaatctcgttattagtcaaacaacttatgattc

SEQ ID NO: 71585 - DNA, 372 bp, Zea mays
ctacatgtctcatatgattcaaaatcaaacgtagtttaaagcccatcagaatgaagcttcttcatgcgattctcacttatatgacccaaacgacagtgccacatgtaggtaggacttaaatcattaggccgaggccttttagcactaatattacagataggtgcatcatcaagatttaaaatgaataacccattcataatggatgcaaaagccacaaacatgccattcttagagatcacacaaccattgttttcactcgcaaatgaataaccatccttcatcaaacatgaaggagacataatggttcgactcatactaggaactagataacaattatttaactccaaataaatcctgatggaaggtgagttg

SEQ ID NO: 71586 - DNA, 361 bp, Zea mays
tgatcaagaatcaaagattctgtttacagaaatgcttactattattggatccttaaaaatccagttttattatcaggttaagtcattacttgtatctagggttctttctatcctagttcaagcacttgacctacactagccatcttttatcaccctttgagttcactggaatgctacgtgtaagtcagtgatcaagtcttcatgtccgagaagtaactgcaatccgaatcgattaatacccagctggggatctccgaccacacgacatatgtagcacttaacccttgcatatgtcaactcgccaccgggtttctcaagaccagaccgggttcacgccaaccgagagcacagatacaccacc

SEQ ID NO: 71587 - DNA, 362 bp, Zea mays
tcccctgcatgccgaggatacgaagatctctggttacaggacacaaggggattgccccaacagcaaacatttgtggctccaagcgctatattctttatgtccctgggcccacatgtcggggcccagtacctttgtgcatgccccttcagctataaaaggggaggcatgtgacgttacatacaggctcaatcttttagatcccaccttagactcgcaagctcatacaagctcacaagcaatacatcacacagtggagtaaggtattacgctccggcggcccgaaccactctaaaacctcgtgtgttcttgtgttcttcccgttttcctaaccaacaagcaaaacgcctaagcccctcctcatc

SEQ ID NO: 71588 - DNA, 386 bp, Zea mays
ttgacaggatgttatacatacaaaagatagacctatgtgctatggtgaattagtgcacttggagattagtgattccctaattattatgggttactgaaagtagcctaaagggggtgaataggctacacctgaaatttttcactaaaaacttcgagataatgttaaattcaagttgcacttgtgcaaactggttcagctgattttgtttacagttgaacaagtttgaacctgctcaacttagattagataaacagttaaacaagtgtgacaaagtaatgagagatttttgcttaagactttccctaaagaaaatccactcgaataggtgaaaaatcggtgtgaattggtttcacacgatttgcacaccatagaatcgaatatgaact

SEQ ID NO: 71589 - DNA, 369 bp, Zea mays
tagtcatttgtcaacttgagttaggtgaaatctgcttttttgttctatgatttcaagcattagccatgatgaaatgttatcttaatgcttgtttttaatcaaatgtcacgatacaatatagaccttgttattagagtttaactgtccaaataatataagtgttatgatacacattctcatataaattgcaataagtgtgtcatatttaagaatatggagcaactactatgttatgaccaataaatagtaagattgagccaaattttaagaagatggagcaactactaaacaatgaccaatacatgtataagtgtcccttcgttgtacccacgagtatatacctagtttactatataaattaattaatct

SEQ ID NO: 71590 - DNA, 373 bp, Zea mays
  unsure (1)..(373): unsure at all n locations
taagctgataggaagaggtggacaattcacttatattatattccaacattccccctcacgtcgagcctcttttgggtctctaacgtggaatataagagtgagcaacaattatttatttaattgtgctaaccagaattcgaactcgagacctctggctntgataccatattaaatgatgaaaccctaaccctaacaggggttgggtgatgtattaataggatgagtaaactaggccaggcccattacagaggggtgagatggtcattacacggngaagaccccaaaccctaaacgggtattctaacaccccccgcagtcacaactctaccctgtacagatngtgagactggatcgaaagtctaaaaatacactc

SEQ ID NO: 71591 - DNA, 306 bp, Zea mays
ttggaacttactcttgtcacactcaatggtgtaattacaggtttattacatcaagatgaaggttaaaccttcctgcattgtctttttagaaagaagtataaaaataaaaagaagtaaaatattacaaattggagctctcttttggccaaaacattgtgccatcttcagtagacatgccttgactcgggcataatactgttaactgtgcgagcttcaaactgctcccgaaagtcacgttattgttgaggcctaagatgcccttctaactgctgatcatgacttggggcaaacgccagtggtgggggt

SEQ ID NO: 71592 - DNA, 396 bp, Zea mays
  unsure (1)..(396): unsure at all n locations
tgtcagntgaagcatttggtcgtttatgggttttctccactcctcttgagatgatcacatgctggccctctttttttccttgacaagaatcaagaagcaacaaaaattacagcatataccaagatgcaaatcttttttttcttaagtatgtagaagtttaaaacattttttagaacaaaactgtcggttgctagcttcattcatatatagttcgcttttctagtttaagggttctttagatattatgacagattacatatgcaaacctggcctctgtatggtcgagtaggcgagatttccactttcattcatgtgttgtctgactgtgtcatccacattgacaatgggtttcttatattggccttcataattgcttgtgtagccttcttcattttt

SEQ ID NO: 71593 - DNA, 378 bp, Zea mays
  unsure (1)..(378): unsure at all n locations
tatgaagattcttcatcccaacgtgggctagtcggcgatgctagagccaacccatgttagtcttagcaattaagcaagtgttgagttcagctttattaaaatcaactaagtatagctgaccctctaacactcccttaaatgctactgaatcatcacttcttctaaagacagtaacacctatatccataaaaagacaattgtagcccattttacataattgagaaactgaaagcaagttataatctaaagaatctacaagaaaaacattggaaatagaatggtcaggagatatagcaattntaccaagtcctttgaccaaaccttgatttccatccccgaatgtgatagctctttggggatcatgatttttctcgtaag

SEQ ID NO: 71594 - DNA, 396 bp, Zea mays
  unsure (1)..(396): unsure at all n locations
tgcacacatagctcattagaatacctttgatcatatctcttgtatatgctatgactaatgtgttttcaagtctatttcaaaccaagtcataggtatattgaaagggaattggagtcttcggcgaagaaaaagccttccactccgtaactcatacttcgccatcactccgagcaactctctcttctttgggggagaaatgagcatcaaggaaaaggacttcatccttgagggagagagtaaaagctcaaaagcaaaaggaccggacctcgtctttggtataatcttaactcattttcttatgaccaaaggggaagaanatacttctagggctctaatgattccgtttttggcgattcatgccaaaaagggggagatatgagcccaaaagcaaaggac

SEQ ID NO: 71595 - DNA, 348 bp, Zea mays
tgtaatcgtcccaacatgagacgaggaccggcgtggcgtctgcatcgtcggacgtcttcaccagactagggtagtgaaacttcaggagcgaactcaacacagagttcacctgcttttgacgaccctggccggtgaaagagtactccaaccactccctgcaaaaagacgggcaagcatcaaacatgcttacatttgatgaatacagctgattcaaatcaaaagatacagcacttacctatctccgacgggggagatcaccgtcttccccgcctcggagctcggaacaggtggaggttgtacgacatggggccttctaaacttacgtggacgccttgctggagctgcctt

SEQ ID NO: 71596 - DNA, 395 bp, Zea mays
tgagacacagagcaccagtcaagtttttctagcattgtgttgttgttgctgcatgttagaccacatgaaaacttgaccttttagctgtatttcttgcactcccagggtactaattgctgaattaaaattcaacatgtgacgcatgttcgctcctgatttatttctatattccagcgaccgaattaatttgaaatctctcagaaatagccacggtctgtcatacagaattgatcttttgaaaaccattgaagaaacatctctttaccattaggcatgcagggcacatagatatttgtaaaccaccgcgtttgattgggtaactttgagcgaaactgaatcgtatgcccatattcattttcatttattaggattccacggaagcatgaagctttcta

SEQ ID NO: 71597 - DNA, 395 bp, Zea mays
taaagccatggtaagtagcataggcaagttatatacgaattgactcaagcctagctacgcgtgcataggtttcaccgaaatccaaaccttcgacttgtgaatatcccttggccacaagtcgggctttgttccttgtcaccacaccatgctcatcttgcttgttgcggaagaccacttggttcctacaatattttgattaggatgtggaactaaatgtcatacctcattcctcgtgaagttgttgagttcctcttgcattgccaacacccaatctgaatctcttaatgcgtcttctaccctgtatggctcaatataagacacaaaggagtaatgttcacaaaaatgagcaacacgagatcgagtggttacccccttttgaatatcgccgaggatgg

SEQ ID NO: 71598 - DNA, 395 bp, Zea mays
  unsure (1)..(395): unsure at all n locations
tatagattttntgagaagactaggggcttcggatgaagaatccaccctaggcatgtcagatcaatccacaactccagttagagtgatgatagatgatgaggacatcactatgagtacgactacaccagcagcacctccacatcaagcgccacttccttcattagctgggccaatcactcgggcccgtgctagagatcttaacttcgtcatgctactgaagaatgagggcccagaagaatagacgaccagcccaactgcggcccatagtggacgacctatggttggtcgcccctaggggctgcgccccctctctctatttatataggagctgcgcctcctttatttttcgagttttgttttacatctagctntagctaccccagaacacgcacaaa

SEQ ID NO: 71599 - DNA, 393 bp, Zea mays
  unsure (1)..(393): unsure at all n locations
tgcttgntctgttatttagtcatgtctgcctctttactactgaaacctaaaatctgaaactgaaaatctaaaactaaaaatctgaaactgaatattgtatgtcatgtttgtgtcatgttttcttaaactgcattgaactccaacagagactgagaaacaaggaattatagctagaacttggatcaatggctgtgatattcttgcttgcggaaactgggaattatagagagacgaaaatactttttaaattagaatctaacctacagttcgatttagttcaagtcaatattcagagttctaatttctggaagttttgtaaactacaaatacaatgccccaaacagcaattacatgggaagctgtggggctgggccatcaaagagaggtggaacc

SEQ ID NO: 71600 - DNA, 352 bp, Zea mays
tcacatctctggactaactcggcagcatcattcttctctgttggccaatagaaaccagatctgaaaactttcccaaccagagttctcgatgcagcatgtactccgcattgtccggcatggatttcctccaacagttgcttcccaatagccgagtgaatgcacttcatgaggactcctatcgcacctcttctgtacattgtgtcccctacaagggtgtagtgggccgattgtcttgcaatgcattccactgctactttgtcagccagttcctcttcattctttatgtacctgatgatgggctccctctagtcattggggtctgactcaggttggctcagagagttgcattctt

SEQ ID NO: 71601 - DNA, 276 bp, Zea mays
tgtggcgccctcgagcgtgatgccgcagccgaagtaccaagtctcccacctggaagcctcggggccgaacccctcgggcgtggtagcgttgtaaaactggtgatacccggccgagtgtagtaaggcacgtcccgagcctcttcgagctggtccagtgagtcttctcggctggtctggttgcttcgatcgtcgtacgcctttgtcctcggggaaccgtattctaagtctgtgggcaagatagcctcggccccatagactagaaagaacggcgagaaa

SEQ ID NO: 71602 - DNA, 382 bp, Zea mays
  unsure (1)..(382): unsure at all n locations
tcttcatgcgattctcacttatatgacccaaacgacagtgccacatgtaggtaggacgtaaatcattaggccgaggccttttagcactaatattacagataggtgcatcatcaagatttaaaatgaataacccattcataatggatgcaaaagccacaaacatgccattcttagagatcacacaaccattgttttcactcgcaaatgaataaccatccttcatcaaacatgaatgagacataatgtttcgactcatactgtaatacccactttgtaagaaaaccaaaaaggagaanattatgttcttacatgtgtgccatatctatttgtcatttcatgtgaacaccttatttgaaaacaggagattaataaaagtcattaa

SEQ ID NO: 71603 - DNA, 383 bp, Zea mays
  unsure (1)..(383): unsure at all n locations
tttaaggcttccagacgaagccagtcacagctcatgctctgtttcaatgcacacaagttcacgaggagtatctncaggcatacgtccgaaggttcttgcgtctgagagcacaagcgcctacagtgcccaatgaaattttcattgaggccatgatcaaggggcttcatccaagacctactgcctagtattttgctagaaagcctccacagactttggagaagctgcttcaaaagatggatgaatacatccgcgctgataatgactttcgtcaaagaaaggaggaagcctacaggttctctgagatgaccagnggcttcatagggagaattcacccaaagcacgtcagatcaatccactccacctagaatgacgacagaggaagt

SEQ ID NO: 71604 - DNA, 396 bp, Zea mays
tcatagtcgaccaggtcttctcccagtaggtcttcctcctccatgggtgtcggcacgtcgttggaggtgtcctggtgtactgcggacggcccggacttgagagtcggacggtccgtgtcatccgcggatggtccgacctttatagatggactgtctgtcgtacctaagtgagctgtgaagttgctgtctcattttctgtcttcgtggttgtttgatttatttcaatggcctttggcctccacctcttttgcggtggtgggtactgcgaatgtgtgtcattaattatttttctacttccttttcctttctctcctttgctctcaagcgttgcaattttcgtttttgagaccgtgtcagtcccgatgggcaccatcgaggcatggagtactttggatc

SEQ ID NO: 71605 - DNA, 392 bp, Zea mays
tcagctccatctatgttatggattgcttttgagtcagtccagtttccttcggcccttctggcagcttcctgacttccatgaatagcgatgggtccttgatccgaaggtatcttcatgcaaagataagcaggatgaagaattgcttcgaaagcattgagggtgccacgaccaataattgcattgtaagggtattccatgtcaacaatgtcaaatataacttgctcagttctagtgttgttgatgaacccgaaggtcactgacatggtgatcttgcccagcgctacaatctgtcttcctccgaagccacagagaggatgtgtagcatcatgaatcttatcttctggctcttgcatttgtctgaaggccttagcaaatatgatatcagctgcact

SEQ ID NO: 71606 - DNA, 393 bp, Zea mays
tgctttgcatgtttaaatttcttgtattgcatctagggctagcctaacctaggtgagataaccgccaacaaagcgagtgaaaaagcttaactcggatcaaacttgacaagtcttagatttaagcttttaacacttgaattcttactttttatgcaattgttggtacttgaaatattcatgaggtactgcacttagggggagtattcaaaactcaaatcactcatgaaaaaccctattgcaaggccaaaatgcaaatttcaccatttgcctattttctctaaaaattatctagcctatggcaaaatattttgaaaaatatgagagtatatatgagggtgcccatacctgtcccaacaagtgttattttgtgtgattataaagcgggatttggtt

SEQ ID NO: 71607 - DNA, 396 bp, Zea mays
tagatatcaagtgagctgataatcaactagctctaccttctcttttttggtctagtgtagttctagtttaattggttcctagttcacattttgtctatcttgttctgatcctcatagcttcagactgccttaccatacccacccccctctacactgctccaccccttccttttatggcattcccctgatgctgacactatcaaactataaatccgtactacatacttcagtttctaagaaacggaaaacaccttgagaccaatacctgattcactataaccaattaagttacctacacaactataaacccaagtagaccttgctgctgtatgcatagacatcaaatgaactaacgggacgtttggatctattcattttggaggaattggtaattac

SEQ ID NO: 71608 - DNA, 362 bp, Zea mays
tgctacaggtcttcttctttctctccataacagaaacttttctggaacactaccccacttaaaaagaatgagggtagaactcttgaatcttggggatctgaactccttgaagtacctcataacaagggtgttacggatccttcttctgctgctgttgcttgaacaggctgcagagagatgactgacataaggttgattccgggagaaccttcttcttatcttctcttcactatcttcttttcactgaccctttctttctctttgctcttcccactggacgattctatcgatgagtattaccatcctacagaggaggaagccaaagactatgaaccatgtgcaacagtcttcaacccaagaat

SEQ ID NO: 71609 - DNA, 392 bp, Zea mays
  unsure (1)..(392): unsure at all n locations
nttggggcagctgattgagctaggacatgtctgtcatgacgcggtactcggtcttagcgttggagcgggagacgacagactaccgcttcaaggatcaggagacgaggttgctgcctgggaacacaatgtagctcgaggtggattggcgcgtgagacaccccacccagtcagcatcggtgtagacgactagctcggaggctagagaggatcgaaggagaaggccttggcaagggagccgcgaaggtaatgaaggatccgctttgcagcggtgatgtgtggctcttgaggggtgtgcatgtgaaggcacacctgctggacagcgtaaacgatgtcgggcctagtgaacgtgaggtactggagggcccttgtgaggctctggtangccgtcacat

SEQ ID NO: 71610 - DNA, 387 bp, Zea mays
  unsure (1)..(387): unsure at all n locations
tgtgattntaccaattgaaagagcacaatctctacttatgaatttccatgaaatatcttaaaagagattgtattagtaacacaagcaatagtttcctatttagcaacctctagtatatgaatgacaagaaggttactaaaacaaggaaacctcatgatatgaactaaattacccttacaagcatcatgcataacatcaattgtaaaaaaagatgaaagtagcatgattatttaattaagtttacatggcaagtttaattcatagcatagtgagtgattaatgtagaagactgaaaggaaaatgtgccttgggccatttctaagtattttggtgatttagtgcctaacacaagtgcttaaatgtaaaatggtggacaaagtacaaacc

SEQ ID NO: 71611 - DNA, 389 bp, Zea mays
tgccgcagttgtgacagccgtcgtctcgtgtctgtttcttgttgccgacggcgccgccttgggcacctccacgggcaccaccctcagcatgtcctcgcgccccggcctgggcgcctccacgcgccttgcggctgcttgccgcgtttgcggcctcatgtcgaggactcccccttcttcttgtcaccctgacaggcctcccactgctcccgagtgagatgtagcttcccgccgatagtgataggcccagagggagcctgtggttcgtcgccgtcgaccatcttgagacgacctatcgcttcttcgatcgtcatcgtgcagaggtctaccagagactcgatcgagcgagcaatctgcttgtacttctcggtgatgcaacggaagagcttctc

SEQ ID NO: 71612 - DNA, 358 bp, Zea mays
  unsure (1)..(358): unsure at all n locations
ntgagcattttggtggtattattcaccatatgtgttagcttcgtgtcatcaatatcatcatcacttgagctttcatcttctacttgcacttttactttgtcctccttctcaagattacctttaagagccaaatccttcttatttcaagaagaggtatgacttgcgggattcaaatacattgagaaaccaagtgggcggatctatagttcattgatgtcgtcaaagatcctggtgctccagctatttaggtaatcataacagtaaaccttcctctgtattgatgtcggatttggtgtagctgttgaggaatcanggctccgacgattgatgatggccggctccaatgacgacacgattg

SEQ ID NO: 71613 - DNA, 376 bp, Zea mays
ttggaaaaccgacactcttcgatagagtgccgatttcttttgccccggtacggtcacgaacacatcccaaggcctcttcaatgattccaccgaagagcatgtctcctagctagtagccacaggaaatgccatattcctgtatctcctttttctcggcctcagatagttcttgtccgactaagttctgaagatcgaaacctttttcttccgaagcagcttcggcaattcctttccctttgtctggcactagggccatgacctcttctgcagccacagatgcttctcctataggcatacctagtatcaatttatcaatcctagataaggtagcctccaagttggcagcttcgatggcagatgcagcttcagctgatgt

SEQ ID NO: 71614 - DNA, 333 bp, Zea mays
tgaagcttgtatagaagcacggattcatgggatgtacttgggagtgtctaccttctccagttcttgtagcgaagtcgatcaactgttgaatgttgtgtgactgatgccgacatgcagtagtgtgccatagtacggcccataccggcatgactcatgggtagtacgcgcggtgaggtgacgggttgtcgttgggctcatccatggtgcatgcaaaggacagcctagctagctgctcactactacagggatcctctgtacaggcggtccggttagcctctacacaggcggttccaggaaccgcttgtggtgcaccgcctgtgatgtaaacaactc

SEQ ID NO: 71615 - DNA, 368 bp, Zea mays
atcaggacctataaaactcagcttctaagggagaacacgtgataggtctaaccaatgttcatttcgaaaaagatagaccttgtgcagcttgtcaagcagggaaacaggtgggaggctctcatcacaccaaaaatgtgatgacaacatcaagacccctggagctgctacatatggacctcttcagacccgtcgcctatctgagcataggaggaagtaagtatggtttagttattgttgatgacttttcccgcttcacttgggtgttctttttgcaggataagtctgaaacccaagggaccctcaagcgcttcgtcaggagagctcaaaatgagtttgagctcaagtgaagaagataaggagcgacaacg

SEQ ID NO: 71616 - DNA, 400 bp, Zea mays
tgtgaagagagttgtggcctttgctgctggctccctctatcatcagtttgagcagagttgtggattgacctaacatgcctcgggtgaaatcttcctccgaagcccctggtgattttagagaacctgaatgcttcctcccttctttggcggaagtcattgtcagctcgaatgtattcgcccatcttctagagcagcttctccaacgtttgcggtggcttcctggcaaagtactgcgctgatggccccggccgaagccccttaatcatggcctcaatgacaattttattgggcactgttggcgcttgtgccctcaggcgcagaaacctccggacatacgcctgaaggtactcttcatggtcctgggtacactggaagagagcctgatcggtgactggctttt

SEQ ID NO: 71617 - DNA, 379 bp, Zea mays
  unsure (1)..(379): unsure at all n locations
taatgcccctaagaaattgtctaattntgttaagggtatggctcccatggttcaggatagagaaggttacattttataccctgcaaactatactaagcataaaatttggaaaattcatgctataaaacctcacactgcttctcatcatgcttttatgtataaaaatgaggcttctagttctaggcataccactaatgttaaaatgcctaagaagaaaattcctaatgcatcaaatgaacataatatttcatttaagacttttgatgcttcttatgtgcttactaacaaatcaggcaaagtagttgccaaatatgttgggggcaaacacaagagtccaaagacttgtgtttgggtacccaaggtacttgtttctaatgtg

SEQ ID NO: 71618 - DNA, 382 bp, Zea mays
  unsure (1)..(382): unsure at all n locations
actatccaanactcaagcttctataatccacacacattcttcttgaaccatctttcttgttcacttatagaactggggctccccatggtgatgaactggggcgaatagaacctttttctaataattcctctattcgattcttcagttcaattaaatctttgacatccattcggtaagctctttttgaaattggcgtggttccgggtaatagttcaatagaaaattctatatcacgaacaggtggcatacctagtaattctttcggaaatacatctaggcattcacacactattctgatgtgctccaaagatttctctttcagctgatttaccattgcctttgcttttggtgcatactgacattgacttcaattctttctcct

SEQ ID NO: 71619 - DNA, 374 bp, Zea mays
tctaaagggagagcacattttgggactaacaaatgtgcattttgagaaagacaggatctgtagcgcatgccaagcagggaagcaagttggtgctcatcatccacataagaacatcttgacgactgacaggccactcgagctcctccacatagacctattcggcccgatcgcttacataagcatcggtgggagtaagtactgtcttgttattgtggatgactattctcgcttcacttgggtattctttttacaggaaaaatctcaaacccaagagaccttaaagggattcttgagacgagctcaaaatgagttcggcttgaggatcaagaaaattagaagcgataatgggacggagttcaagatttcataaattg

SEQ ID NO: 71620 - DNA, 396 bp, Zea mays
taaggtctgacaatgcttgaacaatattaatttttatgcgattatggaaaatagtgtcttggaatactacctcatggacgagaactggatcaaagaaaataactcgtgaggcgatttcagcttttgttgtgtcacccaacggtgctcttcttgcaatgtgagattggaaagatccacttgttttttatagtcatctttctaaaatgttgccattcatgatatttctttggagaatgcatacataccttgttggttgtagtgtatcaccagttttttagcatcaccagtttagaatgttccttttccctacgtgcgcgtgggtacacgtacaccatggagggattaaaacatgtgcgtgcataggggggcaaggttgtattcaactcaaagtcagtg

SEQ ID NO: 71621 - DNA, 394 bp, Zea mays
tcgaatttaactctaatattttagcctcagtttctgccagcaagccttcggtcgattggagctcgaagtctttcttttcaatgatggcagattgctcttttattttgctttccaagttttcaattatagcttcgtgctttttgtcctccaagtcttgttgcatcttcagagctttgctcagtagcatgctctgaacagaaacaacttatgttaagtaatattttcattgttaacggcaataaaaaccagagaaaaaggttgtttaccttgaagttagaataaaacaagctgccgacgatatgttgtcgtcggtagcggctgatgtctgtctctaacttcggaaaaccgatactcttcgatagagtacagattaccttagctccagtctggtctc

SEQ ID NO: 71622 - DNA, 378 bp, Zea mays
tctgcaacatacacgaattatcatacgagacatttccttggggtaaggaacagtatcacaataactttggctgctacaattttgtttctcggtctgggtcaagctgtcccgtgccaacctttcggaagagatggcccggcgactagatgacagaatggttttatgtgaaaaatgatctgaaagcacgagaagatatcaatggtataattatgcgccctatttggcaaagcttcggccttcggaggccgaaggttgaaatgaatgaagctgccgaagaatgccagagagccttcggcgttatctgttcttttattggaacgagagatttagtacaagagcatattgccttcagggtgtggccgctcgcggagaaatggg

SEQ ID NO: 71623 - DNA, 355 bp, Zea mays
tagttgctgaggttcgcgcgaccggatcagcacatctgcgtgctccgtgttggagaggtcagtatatatatggcagccaccgaagggtttgagctgctgcggttttcatcatcatcaagaggttcacgcccgccggccgtgatggatctggatcgctgagactgttcttcctcggccttgtgcagactgtgagctggtagatagctccatgcctccatcgtccatgggtatcgtatcgatgggggtcggtggagacgatctgtcagtgcctctctgtattctttgctgcgccctgtactgtatgtgcgttgtacatgtaccgtgtcctcttgctcgggtcaaatgttcccatggc

SEQ ID NO: 71624 - DNA, 356 bp, Zea mays
  unsure (1)..(356): unsure at all n locations
tcggcactattttcaagcttacaacatatttgttccttcttcacaacctctgaaggatattatgaggaaccgagaagctactggaaggattggaaaatgggctgcagagctcaatgaattttgtattgaatatgttcatagatcttcgattcagtcccaggcgttagcagacttcattgctgactggacgccaggggctcaggaggaagaaacaaataaagacgccgaagcatggacagtgttttgcgatgggtcctgnggaaccttctgagcgggagcggctgctgtgttggtttcaccttccaaagttaaaacttgntatgcggcaaagcttgattttagttgcacaaacaaca

SEQ ID NO: 71625 - DNA, 382 bp, Zea mays
tgaagccatggtgagtagcatatgctaatgatatacgaattgactcaagcctagctacgagtgcataggtttcaccgaaatccaaaccttcgacttgggagtatcccttggccacaagtcgggctttgttccttgtcaccacaccatgctcgtcttgcttgttgcggaacacccatttggttcctacaacattttgattaggacgtggaactaaatgccatacctcatttctcgtgaagttgttgagctcctcttgcatcgccaccacccaatccgaatcttgaagtgcttcctctaccctgtgcggctcaatagaagaaacaaaagagtaatgctcacaaaaatgtgcaacacgagatctatgtgttacccccttatgaat

SEQ ID NO: 71626 - DNA, 199 bp, Zea mays
  unsure (1)..(199): unsure at all n locations
cacatatcatcattataatgaagaagacagcgcacctcgaacattattcctgattccctattactatattgatgatcatgttcttgaacgctgcgagaagattgaactgcctgtcgacaaatctgnaaatctgcgttctcaggtaacggggcgctgatgcctttttagcacattaatcttgcatgtgtgtagaatcaag

SEQ ID NO: 71627 - DNA, 384 bp, Zea mays
  unsure (1)..(384): unsure at all n locations
tctgagatcaagaatatttagttcattcctcaacatgcanaagcgggtcttatcaagaggcttagtganaatatccgctaattgatcttccgacctcactccttctaagatgatatctcctttagcaacatgatctctaaggaagtgatgacggatatcaatgtgcttggtgcgagagtgttgtacaggatttattagcaatttaacagcactctcattatcacacaacanaggtaccttttctagaactacgccatagtctagaagagtttgtatcatatacaaaatttgtgtgcaacacgcacctgcggcaatgtattccgcttcggcagttgacaaggcaacactttatttgcttttggatgccatganactagtgatcta

SEQ ID NO: 71628 - DNA, 426 bp, Zea mays
  unsure (1)..(426): unsure at all n locations
ctaagcctcttcgtgggcgagagaatgtactccgatgtgtggatgaagggcgatcgtgagatggctgattaatcgatcagaacanatgaataagaatctcacgacgctcaagaagaagccaagcaagctgaagaagctaccgagcgcgcaaggcttatatgtacctttactgaggtttagcttcngagttcgctttcagcttcgagactaacaaacattntntatgtagctgaactctcacctgcaccggagccatttaactccgaagcttgacccaccatgaaggangtgttagatatgataagaattgttaatgaagttgttgacgaagccgtcgacagactgttgaatgaagctgctgataagtgctgaagagagactaaatcttgattcttagagtgaatgctngatatatcntagtctttt

SEQ ID NO: 71629 - DNA, 433 bp, Zea mays
  unsure (1)..(433): unsure at all n locations
cctcacactactgaatntaccacatgtacttacaatcgtgattggttgtcttggtattcagaatgatatccataaaggatatgatgaatctgtgatagattcgaanatntcagattattaatgaccatcagtaatgaattgtcatttccaactggttatggttggagtcaggaagatttgcacgctcctgacttgtgattaactgcatgtactgcatgtacaagttccnctatgggttttagaacgtgngaatccgtacaagatttccatgcgtacatagggtatgttcccaatctcaccaccgcagcgtacatatatgggcacacagaagactgnngatctatgtgagaattcattctccgtcgatcattaagaattagaatctcttcatgagaatctatntatggcccgtacgcttgcttgaatcatgagc

SEQ ID NO: 71630 - DNA, 494 bp, Zea mays
  unsure (1)..(494): unsure at all n locations
gctcctgcgtacacgtgttctgtactgtctacgatctcttcagagattactntaccctgcctaacctcagcgatcacgacaagcccaacctgatcagaagaatcatggattgagatgcctttctctgttaaaacatcctcaggaacaccaacaacagcacaacagcctggtcgaagaacatcagaagaacattccactgtcttctctacatctgcagaataaatatctctaccagcaacactgataagatctttgatccttcctgtaataaaaagttaccatcaatgatccgtcctanatcaccagtccttgataactttattgtagggtaattcttgagccaattgcaaaaggttctctggcttgtctcttatttgttcataaccaactccagactagaactgctgaccatatctaccctcacaccatcctctgatgtctgcaatagccggacaacattctgatccacattgttcattgatcacataccacac

SEQ ID NO: 71631 - DNA, 464 bp, Zea mays
  unsure (1)..(464): unsure at all n locations
ctaagctcagctcattatgtatggatgctntgaatctgccagtttcttctgcttctgcagcttctgacttctgaatagcataggccctgatccgagtatcttatgccagattgctggatgaaaatgcttcaaagcatgagtgtccacgaccatgattggttgtagggtttccatgtaacaatatcaacacaacttgtcagtcctgtattgtgataatccaaagcactgacatcggatctgccagtgctcatctgcttctcgaagccacaaggatggtgcatctgatctactcggctctgcattgctgaagcttacaatatatatcgtgctgctatgcaccaacatgtgactaaatcttgtaccagaatactacatgtggagtatcttactaagtctttaaaagattgagggactctgttgtaggtctgcccacttgcctcttgctctcttgttgtgcgttacta

SEQ ID NO: 71632 - DNA, 452 bp, Zea mays
  unsure (1)..(452): unsure at all n locations
ctccctgtgggagccaatgccatccttaatgccatggtgtctcccattataaagcatgctacgagcaaatntaannatttcattntctagttcatgctcggncaatttagcactctagttagatatataatcattnntgtgtttaatcatagcaatgtgatcatggatagcatcaacattaatatctctacatctcatgcaaatagaaacatgatcaacggtggatgtagaagggttgcaagattntaattcatctatcttagaatttagcatgacattntcatctctaagacaggaaatagaaacattgcanacatttaaatcctttagccttagaaattagtttatcattctcaatcttaaggctagaaatngattcattcattntgtcaatcttagcaattaaattagcattctcatttttaagaaatggcaattgaatcaccacactc

SEQ ID NO: 71633 - DNA, 277 bp, Zea mays
ctttttatggcacaccatacacgtggaaacgtttagtctttatacggtaccacatatcatctatattattgtcaactgataacaccttgtcatccgctcatttcatatcgggcgagggcctgttttcgctcttgatgcgaataaacccatatccctgttcccattctcacgcggtatttctcgtcggctgatataaacggcaaggaagtctcgatttgaacggtatcctgttatgttcatattcattaaatcttatctgttaggtttataaactgat

SEQ ID NO: 71634 - DNA, 301 bp, Zea mays
ctgtcggactgtatctcgccgtcacccggcgccgcaccagccgcctgccgcctggaccgacgggcctaccgcttgtgggcagcctccctttcctcgaccggaacctacacgcctgcttcgctggcctcgccgcgaagtacggtcctgtcttcgccatccgtctgggctccaaggtggaaatcgttgtcacctccccggagctggcccacgaggtcctccgtgacaaggaccctgtcttctccaaccgcgtcatcctcgacgccggccgcgcggtggcgttcgacggcgtggagaacatcgt

SEQ ID NO: 71635 - DNA, 294 bp, Zea mays
  unsure (1)..(294): unsure at all n locations
gtctctctgaaatccttaagggtgaaatgcttataatgattccaacatgctttcataagtgcatagtctgtcatgagcatcacactnttattatgacacattgcacttcacagtttctatgataaagatatgttctcattaacctaattatgtgcacttggccaaaaatttgtattcctctcaaggcacatatttatggggagcaatctatattatatagaactggttaagcttaattgacatatcctttcaaccatgtctctttcctttggtactgttgggactatgcttcgt

SEQ ID NO: 71636 - DNA, 381 bp, Zea mays
  unsure (1)..(381): unsure at all n locations
tacctcgacctgagaggagaacttatcttaagtgtgaagagggtgaagattaattnttgtgtgtgctaaaggactcanaagggtttccttgagttcctttggtcttaaggaagaatgtgttagttntgttgataatacttatcatatgcnttcttgtgtattatatggngataatgcataattagtgcttttgttgatatgaatcaattggtatctatttgtgttgtcctgtaatagatattcatgtggttctggtgctttanactggatcttaatgatgaatagtgatanggtaatattcctatggtatatccatttaattggtgttaactcttatttatgcactgtgtgtatatgcatatagttaattcttgaacaatg

SEQ ID NO: 71637 - DNA, 434 bp, Zea mays
  unsure (1)..(434): unsure at all n locations
tctatgttgagcaacctcccgtctttgaagatagtgagtatcctaaccatgtctataagctctctaaggcgctntatgggctcaagcaagccccaagagcatggtatgaatgccttatggattntcttatcactaatggattcaaagtcggaaaggacgatcctactntattcactaanactcttgataatgacttcgttgtatgccancattatgttgatgatattatatttgggtctactaacgagtctacatgtgaagaatntagtaggatcatgacacaaaaattcgagatgtctatgatnggggagttgaagtatctcttatgatttcaagtataacaactccaagagggcaccttcctaagccaaacggagtataatcaagatattctaagcaangttggaatgaaggatgccanacncatcaagaca

SEQ ID NO: 71638 - DNA, 373 bp, Zea mays
  unsure (1)..(373): unsure at all n locations
tgactagtgtnctggacgctgcgtgtattccacattgtccagcatggacctcgtctagaagtcgcttcccagtagatgagagaatgcacttcatgaagatgcctgatgcgccccttctatatagtgtctccccaatgagtgtgtagtgagctgactgtctagcgatgcgctcggctgcattttatcagctgggtgctcttcattcttatatatctgataattcggcttctccagtcatcagagcctgactctggttgattcacgatattacactcgtctgcctgatccattgagatgcttggctgtggtatttcttgtacaaagactncgggtgggatttgagttcgactggatgccagcttggacagtacat

SEQ ID NO: 71639 - DNA, 401 bp, Zea mays
  unsure (1)..(401): unsure at all n locations
agttccattgtcaatactaggatgggatcttcatgcgagcgcactcacagaggtccaacatgtgcagatattcacgatggatctatatataacccttagcctcgacatcaagatccacaacaagtagtcccttgccttaatcatgaacctcgccacacaaactagagttgtgcggctagtgtgtcattgtccctgctctagcctagcacaactganagcactacgtntagatctggtaactgagataactagtagactaatctctatgatattatgattgagagagcttaagttcatacaaatattgagaaagggtggtacttactcatggatgttgtgatggtggccacaagatgatcnagtgcttaattcttaananataanagagagagagaaacata

SEQ ID NO: 71640 - DNA, 311 bp, Zea mays
aagcaccaagtctcccacttgcaagcctcagggctgaacgccttcggcgtggtatcgtcttaaagactgctgataccgtgccaagtgtagtaaggccacgtcctgagcctctttcagctggtccaaggaatcttctctgctggtctggttgcttcagtcgtcgtacgccttcgtgctccgagaaccgtattccaagttcgtgggtaagatatcctcgagctcatagactatgaaatacggcatgatacccatggcccggctcatcgtcgttctcagactccacaccaccgatggtagcgtcttcatccatc

SEQ ID NO: 71641 - DNA, 412 bp, Zea mays
  unsure (1)..(412): unsure at all n locations
tgcaacgggttgcacctctggtgtagaggtggtgccttgctccaagtttacaatatgttgggagtctttgatcataagttcaaagctcacaaacttgcctatcacctcctcgggagacgatctgttatatctaggatcctcacgaattaattgaacttgagtatggttacaanaaacaagggatcttagaataccttgaccatntcatggtcattccgctcggtgctcccgagggtgggcacttgattgaccatggtattgagccgattgacatcgcttgggctcttctccttgttgaggacgaataaccaagctctcttcgatcgtctccgcttgtgatctggcacctcgccccacatgnctgtatatgacgtccatattttttgcatttcaaccttgacatatatactct

SEQ ID NO: 71642 - DNA, 260 bp, Zea mays
  unsure (1)..(260): unsure at all n locations
acattntataccctgccggttatcccgaacacaaaattatgagaattcattctatgaagtctcactctggctctcatcatgcgtttatgtataagagtgaggcatctagctctaggcaatccactcatgttaaatggcctaaaaagagatctcctatagcatcgaatgaacctaatatttcatttaagacttttgatggcttctatgtgctcactaacaaatcaggcaaaatagttgccaaatattgttggggcaaacac

SEQ ID NO: 71643 - DNA, 78 bp, Zea mays
gaataatatatatattatcatcaactcatttttatttgcttatcatgtcagaatacaattataatgacctttgttgac

SEQ ID NO: 71644 - DNA, 319 bp, Zea mays
  unsure (1)..(319): unsure at all n locations
gacaggatntgtagcgcatgccaagcanggaagcaagttggtgttcatcatccacacaagaacatcatgacaactgacaggccactcgagctccttcacacggacctattcggcccgatagcttacataagcatcggtgggagtaagtattgtctagttattgtggatgattattctcgcttcacttaggtattctttttacaggataaatctcanacccaagagactntganaggattcttgagatangctcanaatgagttcggcttgaggattaagaagataagaagcgacaacggaacggagttcaagaactcac

SEQ ID NO: 71645 - DNA, 414 bp, Zea mays
  unsure (1)..(414): unsure at all n locations
atggctcatgataacgatggatacagtntataccctgccggatatcccgagcacaaaattaggagaattcattctaggaagtctcattctggctctcatcatgctnttatgtataagagtgaggcatctagctctaggcaatccactcatngccaaatgcctaaaaagaaatctcctatagcatcaaatgaacctaatatttcatttaagactttngatgcttcttatgtgctcactaacaaatcaggcannagtagtgccanatatgatggnggcaaacacaaggggtcaaagacttatgtntgggtacccaaggtgctnngttctaatgtgaaagaacccaagaaccgttgggtacctaagaacaaggcctannnattgtntggtaaaatgctatatcacctgaccattcta

SEQ ID NO: 71646 - DNA, 396 bp, Zea mays
  unsure (1)..(396): unsure at all n locations
ctaagctattcttcgattctaattagtgcatatcttgtattttagctncgtctaaagagggagcttctgcataatcacaaagtaatcaacttcgtcataaccatatgagattcagtatcaaatggctacggtgcgttcaactgctagagtcacacgcgacggtgaggaggccaaagctgccgagaccgccccaatcttctaagcaatgagacaatcangcttggttgtgccataaggtgcttgtgacgaaggtgcacctcctgccgaaaccgagcangctgacattgaagaaggtgaggctgatgaagaagaaatagagtattccgtcatgccatctaaacccaaccacctgcagattggaaagtctactgtcttctacgccgatatgcccatgat

SEQ ID NO: 71647 - DNA, 128 bp, Zea mays
tcgctcaactatcctgatagatcgcaagtggagaaactttgccataacaaaaatttcaaatgaatctacctaactttactatttttcttcatccatacaatatagcctcgtgagaacaggcagcttca

SEQ ID NO: 71648 - DNA, 326 bp, Zea mays
  unsure (1)..(326): unsure at all n locations
gagataactactgtacactcttcacgaagaatgcttggaatatagcaacaactgcattcaacgatttagaaagatttttactcagatggagccagcagtgaaaaattcaccctctcagctgaagatctaccgaagaccttctgacatattgaaggggagatcgaccagctcgaccaagtcttagctgggcatggtgacttctgtgcctgngtggcttctcgagggactgctgcatcctatctgaatgctggctgtgatcatggaatgactgtcaatatgccacatgtcactttatcaccatcacatctggatgacatgcctgatct

SEQ ID NO: 71649 - DNA, 331 bp, Zea mays
cctcgatctgacactatcttctttggcacgccatgaaggcagactatccgtgacatgtataactcagctaacgttgctccggtgtatgtcgtcttcacaggtatgaaatgggccaccttcgttaagcggtccacgaccacccagatggaatcataaccggcccgggtacgaggtaggccaactataaaatccatcccaatctcatcccacttccactgatgaatccgcaaaggctgcaacaatccggcgggcctctgatgctctgctttggttctctgacagctatcacagagggcgacatattctgcgatctcccttttcataccatacc

SEQ ID NO: 71650 - DNA, 314 bp, Zea mays
  unsure (1)..(314): unsure at all n locations
accctgaactctctctctagagtgtccccanattccttgagaaancatcaaggctggccagcgacatgttctctgtgtccgactggtttctgagagggtnttcttcctgctgctcagtctgacatccttggctattggtcttcttgcgggttttccttgcggaggcgagcttcttcagtaccttgtcgtagtccattttgagggtgcagtaagcttcacaggtgttggtctcttccgcttcagctaacgagaagctctcttggagggacgcttcntcttctgaaagtccctgacttctgctccggctttcacct

SEQ ID NO: 71651 - DNA, 433 bp, Zea mays
  unsure (1)..(433): unsure at all n locations
gcttggatatctcatatggaccatcatttctcggtagacatgtaattatttattgtctggtaacaataaagganatcatcttcgtcatctccaccgtacaccaaggaccctcgacgtaatgttgcatattggcaacctgctcttctgatagctgctntcccgaagcatgtcgaacaatgaattccagctctacaacaggtgcttcaggagtaggagccttgaatntctcagaaacactctctnttctcagtgttgtcgctgcagtttccgaaggcctagcttatgcagaagtttctgaaggtccagcttcagctggagtgtggattatgttagtatcagtagttntccttanatctttagcctgtgtgctgngagctctggcagaagtaggagttgatgtcttcacagacttcataacanaatctaacacact

SEQ ID NO: 71652 - DNA, 310 bp, Zea mays
  unsure (1)..(310): unsure at all n locations
tgacctgtgtcagtatgcaggctaccatgctgacattgatgaacagaagagacacaggttcacgaggggcctcaacactaagctccgcgactgtctcaacacagtcagggcccatagctacaacgagntggtcagattggccatctcttaggaggatngcatcatatctcgacaggcagagaagaagaggaagacccctatggcagggccatcagcacagcctcaacgcattaagattgtgtccgacactcagagcataggacctcagcagcattatggacgatgggtgatccgaccacaacagcagcag

SEQ ID NO: 71653 - DNA, 281 bp, Zea mays
gtgtactctgaaaaccgaaaaaaatctttgcattgagaacttgcatttagcactggctataatcgaaatatgttttggataaaaaggcattttggtgtggataacaaggtcgactaccaatagataacttctcgatgcccaatcaaaagggctacatgcagagtggtcctataattattcagcacgaagattccttttgatctatcgcgagtttaagggcgtcacaagttaaagtacatttgtactgaactatcctttagactcttcgtggtgtcattgat

SEQ ID NO: 71654 - DNA, 362 bp, Zea mays
  unsure (1)..(362): unsure at all n locations
tctgatntccagtctgctgcccacttgcttcggtagctaattacagggaactntgtagttntccgataggcacagntatagcaaccaaaattatcgtgtaatccatcttttctagcctttgtttgataatgtagctcgtgaacccggcagaagctgtctgcaaatggttccactgcttggcttcngagtgcccagatataaacaataagcctaacgatagcgttaggggtcagctgatgaaaatagataccgaacctcttcagtacctctccaataatcccatgtagggggaaccttaatccagcctctagaaaactnttaanaataacaatctcatccttctctggcttcggngtagtctc

SEQ ID NO: 71655 - DNA, 375 bp, Zea mays
  unsure (1)..(375): unsure at all n locations
tcagaacaatcattgtaatatccatatatactcatgcatgtaatatatgagctngatagcctatgaactnttgtgaatcagttggcatataaacgtcatcaaccaatattgcggnggttaatggtttatcctgantattttgttgcttgtggtagaaaacagtcctactattattgcccgtatctctataaatctgataacagtatttgatgccatgcgtatcgttacatttacaaaatcaataagctgtttggtttgagggatgagctagtccatcatcttctcactcctcactntttttgtttggtttgtggaatagaattgagtgatccatcatcaccttattccttatagttatntagttagtactaatat

SEQ ID NO: 71656 - DNA, 396 bp, Zea mays
  unsure (1)..(396): unsure at all n locations
gatgtgtgcttcttgatgagatcagctaagggccgactcgataagccgaagttcttcatgaactctcggtaaaatcccgctaagcccaggaacccacgcagttctcttgcattaacaggtactgaccactgttgcaccacctgcacctttgccggatcggtggccacaccctcggcgctgattatatgtcccaggtatgcaatggtcgtctacgcaaaggcacacttggtcagattgactntccactggtctcgttgcagcagtcgcagaacagtggtaaggtgttgcatgtgctcctcccaagaatgactgtaaatcacaatgtcgtcaaagaaaacaagagcacatttgcgcagtactggngagagagtgtcatctatgggcttctaaaatgtg

SEQ ID NO: 71657 - DNA, 153 bp, Zea mays
ccagtgaaacactatgaataccccttctttagtcaaatcacctatctaaagaggggttactactatggctcaaaccttgtctaatacaaaagagcaaatattaagaaccctgaaagttgaaccaccaaaccgtgacacatggactgtttgtct

SEQ ID NO: 71658 - DNA, 289 bp, Zea mays
  unsure (1)..(289): unsure at all n locations
cgtcaagctatagtcagaanaggagtttctagtattcttgacatgacaatngatgcaattggatgtcgaacacttctctgttggctcatgcagaagctagaccccacgtacatgactcttcgtattggtccagacaaagaactcaaaatcaccaagcagactgtccatcagatattgngtctttcaaaattgggtggtggaaagccccttaatattaatgaagcgaacgctgcggtaacactttgggtctcattgaatattagcaaggatgaagtttgtatttaaagct

SEQ ID NO: 71659 - DNA, 452 bp, Zea mays
  unsure (1)..(452): unsure at all n locations
tactgattatgcaagatgctccgctgcgtatgtcatanaagatgccagcacaataccaccagcgaccattaatcctagcctgccanaggagagaatatattggactcatcacttaccggcatgagaaanaatcagatgtctcgacatttactagcaagcataatntaacccttcagacgaatntatgtgcattagttgctagactcgagttgtattcataagctagaattgaagttatatcccagaatntggcattccacactacaaagccatcataaggatggaagaagcacactcatcttctgaaactagtttgtcctaagcatattatataagaccnctaattaattatatgatgtgttaagtacanaagtatagccttagctgtcatncatcgaccatactctacataccaacaccctcagttctgctcaatcccaatattaagtatt

SEQ ID NO: 71660 - DNA, 306 bp, Zea mays
acaagagcgacatggcgggcccacgcgtcagcgagacagtgcgcgcgcggaacaggagggactgacggctggaacccatgcgtcattggctcccacgacgagatcgcgtgggcgtgactgagtggccaatgatgctggcccacaagtcggcacaacatgtcgtggacgcggactatatgtgttgggctgtctcgtgtggcccacacgccaacgtaacaggaactccacacgagcccataagtgtggaggcagggagtcaggccagtgggcctcgcatgtcagcaccaaaacccacatgtgggctat

SEQ ID NO: 71661 - DNA, 282 bp, Zea mays
  unsure (1)..(282): unsure at all n locations
agagatatcttggtcttgcaggcgaggtgccataagactgagatccacgccgaggtgagcggtcacgtgctgagtctcgaaaggagcggtggaaccatccttcangtgacgacgttccgcgcgctcagactcgagctgggcgatctcagcacgagccctactcatctcgtctagtgcatggtccagctccgtgttagcacagcagctatgttgactgtgctgttcaacctaagattgccctcaccgacaggtgagacaatcacgcctgctgtgctttcagat

SEQ ID NO: 71662 - DNA, 485 bp, Zea mays
  unsure (1)..(485): unsure at all n locations
ctaagctgctgcttcctgtggaatcccttgtcacgattaagtccacgatacctgaatntccacatacagaaacatgtgaactacttattgttgagcggtcaatagatcacgtaggtggtgaatgtcagtgtacacatattcatattgctgatgcatccttagatatcatgtttccttgagcactacagattgcaccaattattcatgagtggacgtatgatgctatgtgccatgatctatcgtgtatggatggcaacaagtacgtgcaagaggtgagtacatcagcagcatacagtcttacactgtacctcactagtttaccttattcagntcttactnatgttttgatgcatgactcttagaatctatgccaccctcagacaatatgtttcaagtaagaatggttcagcatatgagacaaaggatgggtttgtggaggatcatgatccagtatggcttgagctgtagcatgacatatagctcat

SEQ ID NO: 71663 - DNA, 337 bp, Zea mays
  unsure (1)..(337): unsure at all n locations
tagaccttgtgcagcttgtcaagcanggaaacaggtgggaagctctcatcatgccaaanatgtgatgacaacatcaaggcccctagagttacttcatatggacctcttcggacccgtcgcctatatgagcataggaggaagtaagtatggtcttgntatangtgatgatttttcccgcttcacttgngtatttcttttgcttgataaatctgaaacccaagggaccctcaagcgcttcctaaggagagctcanaacgagtttgagctcaaggtgaagaagataangagcgacaatgggtccgaattcaagaaccttcaagtggaggagtatcttgag

SEQ ID NO: 71664 - DNA, 397 bp, Zea mays
  unsure (1)..(397): unsure at all n locations
atatgtgtctttctctaatcgattgtgatatagaagttccatacacaatgatgcatangtgctctgtgaaacttgtgttgttagcgatgcttttgtatcatcactagaagaactaatggaaagccgtatcataataaataanatgcgcgtacttgtgatgtcatagttgtgttacgtaaataaataaaatggttgtgtattttcaatggtggtaatggtgaacgccgatagcatgtagataaatgatgctaacatgtggntgcttacggggtcttccaatataatgttagttcgctactgtgtccttatatatcttgtggtatttgtcattatattcatacatatgcatcctacatctcatttangaccgagagatgatgatcgtgctagtgacgtg

SEQ ID NO: 71665 - DNA, 318 bp, Zea mays
  unsure (1)..(318): unsure at all n locations
tctcgtncgcttgtaaccctatatgagcagtgagcaacaaaggtgccggtagtgcgagtcatcatagactatatgtatgaacgttctgcccgaaccactatatgtggcagaaccgccaaatggttccagcttaagtgccttagtcttgcctcaagggcaacgacacacatntaaatcgaaataaactatcaagtaatttggtcttctgatcaaaattcgaattgatgtctgaataagtaagtcacgttcaaattacctcaccacattatagttaataggaatccgaagcctttttattggatcatggagacatatgcc

SEQ ID NO: 71666 - DNA, 356 bp, Zea mays
  unsure (1)..(356): unsure at all n locations
taattagttgtcacttccatgtaaccttttctttgatggttngcatatgacgtanatgataggtacccaatatacacactgngttaggtaatgagataatgcataaaatcacataaacattttataaaatgtgaatagaaatatcataaacaacaatatatggaagggagccatgaactggaatatatgtcgtaaacacatattgacgttggcataaaatatgtatacaaagtagcatanaaacaggaccgccactcgcggaactaccacctcgcctctgggatccgccaacgctcgcgcctaggggaggccgtcgntgtcgctagcacctaaggaagtctgccgcgccactccca

SEQ ID NO: 71667 - DNA, 473 bp, Zea mays
  unsure (1)..(473): unsure at all n locations
ctcagcttaatggtactagataactcgggcatcgcaacaacctgacctacattatatgttcataacctatcccaatcattcagaagcaggacaaccaaaccagattatggctaatatcatttaacttatagccacctactaaactagctgctccacctactactatatcttaactacatgtgcctaattcggataacaacttcaagaatgaagatcgaagatgatcaacttcatcaagaaaggatgagcaccaactcaagtcttcaaggatcaagtgagatcaccaagatgagtcaagatccacaatcttggatggagtctgttcttaccccattccttcttacccagaactatatatgctttanagatatctttcatcctgcataatagagtgggtatacccatatatacacatggccttctaatacccactattgtctataaaatatatgaatctctagatcttgacctat

SEQ ID NO: 71668 - DNA, 360 bp, Zea mays
  unsure (1)..(360): unsure at all n locations
ctccgatgatggtgtaatanaagttacatactccttaccgtatgggtgtatgctatattggggttgctctgtgcctcaccatcgagcgagtacatggcacttgatcctgttagtgagctcttctgactagatccgagggactgacgtgatattctcatttaagtgtgggctactcttttanggtggacataggcacttcaagttggaatatttcgggcggttcacgcacagctggtatcggagctcgtaccaccacagagggatcaatgaactgtataaaccatcctttncaaaagtataacttggtagacacaaatgttggatagagtcgcaggacgatattgataaacctatgacatg

SEQ ID NO: 71669 - DNA, 403 bp, Zea mays
  unsure (1)..(403): unsure at all n locations
atgttagtcttagcaattaagcaagtgtcgagttcagctctatcataatctactaagtatagctgaccctctaacactcgcttanatgctattgaatcatcacttcttctaaagacagtaacacctatatctataaaaagacagttgtagcccattntacataattgcgacactgacagcaagttataatctaaagactctactagaaaaacatnggatatggagtggtcaggagatatagcaatgttacccaatcctctgaccaaaccttgatttccatcctcagatgtgatagctcgnntgggatcttggatnttctcatatgaagagaacatcttcttcttccatgtcatatggtttgtgcacccactcgcgatgatccaacttgagccccctgatgcat

SEQ ID NO: 71670 - DNA, 257 bp, Zea mays
atgactccactctattaccatgtttgcctattttaaatggccttaacagacaaattttcttactacattccttacggcatttttgttataaagacaagcagactaaactcaacgaggtctataggatgtcgggttgtgctatatcattgaacttaatttctttaacatattacttttaatgcctacattttacagggctgagaatccttttacgagaaatatctcgcttgtactcactagactattgatatgggatc

SEQ ID NO: 71671 - DNA, 263 bp, Zea mays
  unsure (1)..(263): unsure at all n locations
ctcacatgtcagcagttcacaatgtatatcacgtatctcagctgcgaagatgtgtccgcctacccactgaagtgctacctgaactagatcttgagatagaaccagacttatcttatcaagagtacccagtcaagatattggatcagaaggagagatcaacacgggcaaagtcaatcagaatgtataaagttcagtggagtcaccattcagcagaagaagctacatgggagactgaggattntctacgctcccgcttccccgac

SEQ ID NO: 71672 - DNA, 435 bp, Zea mays
  unsure (1)..(435): unsure at all n locations
tgagatagacagggtntgtagcgcatgccaagtangaaagcaagttggtgcccatcatccacacaagaacatcatgacgaccgataggccgcttgagctactccacatggatctanttcggcccgatgcttacataagcatcggcgggagtaagtattgtcttgtaatagtggctgattattcacgcttcacttgngtggtctttttgcagganaaatctcagacccaagaaaccttataaggattcttgagacgagctcanaacgagttcggcttaaggatcaagaaaaatagaagcgacaacgggacggagttcaagaactcccanatcgaaggcttccttgaggaggagggcatcaagcatgagttctcttctccctacatgccacaacanaatggtgtagtggagaggaagaatcgaactctattagacat

SEQ ID NO: 71673 - DNA, 326 bp, Zea mays
  unsure (1)..(326): unsure at all n locations
actgctgtattgctgtccacaaaanactctgctagtgcgctcttgattgtgtagttcacccttcttgctaanaatgcttggtttgctcttaagtaatgtagacttgccatggttaagctagagatgacatgtgtgtcttggtttatatgctcctttatctagtggtgcgatatangagttccttagacattgacgctatgccctctttngaatttgtgatacgatgatgcttgtgcgcgatcaataggagaactaatgaatagccgcatccaaacaaataaattgcgcgtatctgtaatgtcatagttgcgttgcgtaaataaata

SEQ ID NO: 71674 - DNA, 308 bp, Zea mays
gctaatccggataacattgaagctatcatgaacatggaagctccacgatcgcaaaagaatgttcagcgacttaccggatgtatggcagccctgagcagaattatattcaggctgggagaaaaaggttaccattttacaagctactcaagacagtggacaatgttcagtggacttcagaagcacaggaagccctatatgcactgaagaaattcttaacaaccccaccagtactgataccaccgccgcgagccacatcaactcaaccagctgaagatctgctgctgtatatctcttgcacgactcacgtg

SEQ ID NO: 71675 - DNA, 388 bp, Zea mays
  unsure (1)..(388): unsure at all n locations
cgaaaagatagaccttgtgcagcttgtcaagcanggaaacaggtgggaggctctcatcacaccaaanatgtgatgacgacatcaagacccttggagatgctgcatatggacgcttttggacccgtcgcctatctgagcatangaggaagtaagtatgggttagttattggtgatgattnttcccgcttcacttgngtgttctttntgcaggataagtctganacccaagggaccatcaagcgcttcctcangagagctcanaatgagtntgagctcaaggtgaagaagataatgagcgacaacgggtccgaattcaagaaccttcaagtggaggaattccttgaggaggaagggatcaagcacgagttcttcgctccctacacaccac

SEQ ID NO: 71676 - DNA, 465 bp, Zea mays
  unsure (1)..(465): unsure at all n locations
atgatattatgaagaagagtgaanaagacatctacgacgcccgagaacaagctaagctagctgaagaagctgcagagcgcgagaggcgcataggtattgtttcgtggcatctagcttcgtcatttgctttcgtgacttcaaaatgattaatattgtctactgtagctgaactgtctctctcaccggaaccgntcgaactcgtgaccactccagaatcgaagaaagcaatagagatcatcaatatggccaaatctattgttgacgaagttgttaacaagttgttagataaaattacggagaaggtcctatcagaggactagtacttattgctaacaacattttagatgatcaatgtagcctctgtgtatcaagactgtnatattcgatgtgcatcatattgaatctaatatgtacactatctgtcattagtttcttgnatgcatgaactctatatacataccgttt

SEQ ID NO: 71677 - DNA, 167 bp, Zea mays
  unsure (1)..(167): unsure at all n locations
ggatggttcctaacaactaagtgccaagtcttattcatattaagtgcatcaaattcttcattgatagctcgcttgcaattgtcatcagtcactacttcatcaaaatatcatgggttacctactatagntagaaggcacaagaaatcatcatagagagactctgattt

SEQ ID NO: 71678 - DNA, 395 bp, Zea mays
  unsure (1)..(395): unsure at all n locations
accctgaanttgcggcgataattatactctctaattacctaccacattcaggtgatacatcttctctctctatatagcttctatctctctctatatctattggctagacttagctgaattagtgacggagtaattattttattttgtcaaaacattatgagtcatganatgctgcatcatgctgagctccanatattattngaaatgttgcacatgcttgattcacttgaattgagacgtggtttgaactgaattgtaaccctacagaaataatagaaagcatggacattcctataaatggaaacccatgtagtcaagcggccacatgcgacctcccgcgccctcagcctgacagggcccgctgtggccaccccttctcttcttctttctctctt

SEQ ID NO: 71679 - DNA, 383 bp, Zea mays
  unsure (1)..(383): unsure at all n locations
atatagaccttgtgcagcttgtcaggcaggtaaacaagtgggaggagcacatcacaacaagaatgtgatgaccacttcaagacccctggagctgctgcatatggacctcttcggacccgtcgcctatctgagcgtaagagggagtaagtatggtctggttattgtagatgatttttcccgcttcacttgngtattctntntgcangataagtctgaaacccaagggaccctcaagcgcttcctcangagagctcanaatgagtntgagctcaaggtgaagaagataaggagcgacaacgggtccgagttcaagaaccttcaagtagaggagttccttgaagaagaagggatcaagcacgagttcttcgctccctacacaccac

SEQ ID NO: 71680 - DNA, 384 bp, Zea mays
  unsure (1)..(384): unsure at all n locations
tgcatttctctttagttgngtcaagctcttctttagcctctcattntcttctttgagctnttgatatgaatcatcatttgttcctgcacattctagctcacaggaagaattgcttgttgacaaacaacaagcattagcacatggtaatatatgtattaattgaatacatgtgcacgagtgagggtgttgggaatttaagttctctatcacaacctcatgagcaatggttaatatgatatgattatccataagaatttcatgagaacataaaagcatatcatatntatcttgaanagctagaatttcaacttttagcttttctacttggtccttgagcaaggtattcctatntactaattgagagatacaatgtngaagcgtatc

SEQ ID NO: 71681 - DNA, 392 bp, Zea mays
  unsure (1)..(392): unsure at all n locations
tatgctactntaacaatgaaagcaacaatcctttgatagagtgacattattttgacaacttggatggacatgtagtagcatacttcatgagacacttattctcataatgaagaagacttagaatgcttacaaccacaccattgattgttntgaagagctcattatccaagtaggggttgttgctctngattgcttcctttntcatttgagtgtcctccctctatangtgactctttttccttccanacttatngaaaatactcaagagagatattaatagcacacgggagtacatgatgaagaatgagttcttttagataaggaatataaacaattcatcattcataagtcacacagacatgaagtaaaatcattaacattagtgcacatta

SEQ ID NO: 71682 - DNA, 416 bp, Zea mays
  unsure (1)..(416): unsure at all n locations
agacaatcgcgcactgtgagtgtagagatggcgagagtggcacgtaccctcctggcaacggaccgcctaaaaggtgtggtgtgctctctggtggcgcggacctgttcatgtggtggaggatccgtgggaatggtatacatgtgcacaagagctaagggaagcatatgtcgtgtggttggagatccccagctgggtattaatcgattcggatcgccgaacttctcggatatgaagactggatcttcgtccctcatcgtagataacaagtgatactaatgctgctaaaatgaatctattgtacgacaagcgaatgatctacattanngaaatctatatttacgagaattacttaactggtgaagtaaaagcttggcataaggatccactactagtaagctcttctgcagaaatgagtc

SEQ ID NO: 71683 - DNA, 261 bp, Zea mays
  unsure (1)..(261): unsure at all n locations
tatattgtccgggatatgatactatcatgtaacggactcttcttcttcttaatataaagatacatagctctcctatatattcaagagnaaatattataaatacacttttttagttccagagacctgtcccagccgaactttgcagaaggaccataacacctcacacaggacacattgatcacacagtcaaacaacctgaaatcaacaggttccangcgcgcgcgcacacacacatcagataagaaaaatactttagcatcg

SEQ ID NO: 71684 - DNA, 311 bp, Zea mays
  unsure (1)..(311): unsure at all n locations
cacttacaagatgatgggcgcgatactgtcgacgcaatcttggagctacggctgcctgctgactcgcaggagtacggtataagtgcacaggttaagaccgcttttgttngaactggtttcagatggtttcttgtggagctgattagtattgttttctctgcagatattacgccatcttggtgccaggaccatgcggctgatgactaacaaccctgccaagtacactggactcaaaggctatggtataagtgtccttggtagagtgccattgtaacaccgataaccaccgagaatatgcgctatatggaaac

SEQ ID NO: 71685 - DNA, 340 bp, Zea mays
  unsure (1)..(340): unsure at all n locations
aaatgtgaatatttatctagtgagctaagcactngccatgatactatngtcaaccttagaaatgagaatactagtctaatatctaagggtgattcanatgtgtgtgatgatntaatttccaatcttagagataataatgctaatttgcttgctaggattgagaaaatgaatgattctcttgctagccttagaaatganaatgaaaatttgattgctaaggctaaagacttagatgttngcaatgttacaatttccaatcttagaaatgaanatgacattntacatgttaagaatgttgaactaaaatctttcanaccctctacatctactgttgagcatg

SEQ ID NO: 71686 - DNA, 421 bp, Zea mays
  unsure (1)..(421): unsure at all n locations
acctggaagcctcanggccgaacccctcgggcgtggtagcgtcgcagagactgctgataccacgccgagtgtagtaaggccacatcccgagcctcttcgagctggtccagtgagtcttctcggctggtctggttgcttcggtcgtcgtacgcctttgtcctcggggaaccgtattctaagtctgtgagcaagatagcctcggccccatagactagaaagaacggcgagaaacccatggctcggctcggtgtcgtcctcagactccagaccaccgagggtagctctttcatccatcgcttgccaaacttgttgaggttggtgtagatcctcggtttaagtccctgcanaaatcataccgtggcacgctccacctgcccattcgtcatggggtgagctacgacggcccagtccacacggatgt

SEQ ID NO: 71687 - DNA, 442 bp, Zea mays
  unsure (1)..(442): unsure at all n locations
ctaagcttacctgagagattacttgacagccgctangagaattctaagatatttgatgttctctctcaatatcggtctatggtatcccanatgtgcccaatnntgaataattggatattcggattcggactatgcggngtgcaaagttgatagaaaaagcacctccgcgtgttgtcaatctcttggtagatctcttgtttcatggtcttctaagaaacataattcggttgctctctctacccgcgaagcggaatatatatctgccggagactgttgtgctcaactattatggatgaaacacaccttattggattatggaatcattntcaagaatgtgcctctcatgtgagataatgagagtgcggtaaaaatggctaccaatccggtccaacattcaagaactaagcatattgattacagcatcacttcttaagagatcatg

SEQ ID NO: 71688 - DNA, 355 bp, Zea mays
  unsure (1)..(355): unsure at all n locations
gtgtctgctgactcactccccgtcaatccaccttatgtcacgccaactaccatatctgtcctcgcggctgactgacccgcggcccacacgcctggtggtttcgtcaggccacacgcggngcgcttcgttgctgcagcatcactttaaaatattaccttgtgtcttctgcagtggccccaatgaggtgcgctacangcgcgcgcgcgatggttcactcttttcgcacccgtagtccgacacacaaaccgtatgacttgtggacccgggcccccgtgtcatatactgtgttcgtcttctgcagaggcccaaagaggcgcactacatgcgcgtgcggctggtcgctcttcatgcgcgt

SEQ ID NO: 71689 - DNA, 318 bp, Zea mays
  unsure (1)..(318): unsure at all n locations
agaagacgagaggatatatgataattgtggttgtattctgataattgatgatgtccttcttagcctatacaaatgtccttttatagttgtagaaacccacttgtctcctggcaatagccccacatggcagccactcctaacacacagccatggcgcggcctatgtcgtgtcctcgtgtgcgtgtagtggcatcaagacttcaagctcagacagaacataccactgatcagtgcgacaattacatacaacgaatntcgctgggaacacttcgatacatcatgacatcctacaattntgcaccttgcggctgtatttatc

SEQ ID NO: 71690 - DNA, 241 bp, Zea mays
cgattcctcataatctattcactttggcttgaccaatcctcttaatcacttcaacctctattatgatcatatatatgcatagcgatttctcaggacttgtgcatatattcaaaccaatatagagaccatattatatcccattgcatcgtctcactggttatgccacccatgtgtgaacactgttcactgatatatatacactatctcagaatgttcatcatactgatattcctgttcaaca

SEQ ID NO: 71691 - DNA, 231 bp, Zea mays
aacccgctcaagagtctgcaaaagcaggcatgtccagactggcgaacacagcggaggtatctttcctttcgaaagagaccgaatacgttcgccatcgaactgggaaccctcagattgcgaggctcctggtacaacgcaaaagtggacgcattcaaggtaccggactcttgacataggcagacgaccagggccttgaaaaatccagtcgtcagcagagcggacgaataactt

SEQ ID NO: 71692 - DNA, 477 bp, Zea mays
  unsure (1)..(477): unsure at all n locations
gctcgtncagagcgctantagcgaaggagcacgccgaagaaattaacttcatcgtctgaagactgcgtacgaagcagganaagagaaggattagaagactngctctacaagaaataaggaggagaaaagacgatattgctcatgtgntaattgtaaatcataattgtaaactccgtgagtatacttgcaatttcttatgaagttgtacctctgctctataaataggtgaacagtgtcatggataaattcaccttttgaaggcacatagctttgttagctcagcctccgaaatacctttgagctatcccttgtgtaaagccgaagatatgcttgtaatcaaatggtatattgagaagaatgaaatgataatggccaaagcataaagatgagtngcacgtttcactattcngntactcattttctcatgcattcaatatatcttcgtcctcacttcttatcttctccctttaaatatct

SEQ ID NO: 71693 - DNA, 314 bp, Zea mays
  unsure (1)..(314): unsure at all n locations
atgctcttatgtgaggacatagcagagcagaatgtgctattgtgatctcaactgtccgaagagcangagaaaaccttgataatgtttttgttcaacaacaaagatgtttttgcttggtcagctaatgatctttgcggngtcaacagggatgttattgagcactcgctcaatgttgatccattcttcagaccaagaaagcaaaggcttctgaagatgtctgatgacaaagccgaaggtgctcgcaatgaagtgaanagactcctcagtgctggagttatcagagaggtaaaatatccagaaatggtggtaacact

SEQ ID NO: 71694 - DNA, 459 bp, Zea mays
  unsure (1)..(459): unsure at all n locations
agagagtctattcaatncttattaactcaagctatcaatcttcaatgatctatatgtccaagaatgacccacagctattttaattggtatgtctaanactcatatcatcccggngaagatattgatgttgtaggacataaagaattaatcctatgccaaaaagtcaaggcctacaacatggaggaaagccaaagaatggcaacaattatgcttttaagtgcaagtatcttaaattaccatttcttatgtgtctcgtgtagtcacatagaanaagaaagcacttcanatgtntttaaattatgtcaccattctttgaagaaattcctctcatatggtagattggatattcatctnttctataccatggcaatctacatgctntannatngtgtangtatctcatggcatgctnntacactaatcatctattattgccatgttctagatatagagagatat

SEQ ID NO: 71695 - DNA, 282 bp, Zea mays
  unsure (1)..(282): unsure at all n locations
atgcgaccggtcgagcttcagatgggtcgccaagctcgttgattcttcttgagccttctatcatgcactcaaaacttacaaaatgcccgataacttgctcgggggtcattntagtatatctatgattaccacgaatcaattgaacttgagtgggattaagaagaatgagagatcttaatataacatttaccacttcgtggtcatcccacttcttgctcccgacgatgcgcacttggcttaccaaagtcttgagccggttgtacatgtgtagtggctcctccc

SEQ ID NO: 71696 - DNA, 163 bp, Zea mays
ccgcattattcgagagcaatactctttgcaagcaaggacttagtgtttatattccgataattatatatcttggtctaaccactaatcaagggatctagtacggggataaagtgttaattctcaggtttctgctatccacccctctctaggcgactatcagcta

SEQ ID NO: 71697 - DNA, 341 bp, Zea mays
  unsure (1)..(341): unsure at all n locations
atctgttggagcagacaggtctacagggactgcgagtttctggagcaccgaaatatcatggactatagtcttctggttggcgtacattctanggacactaaggataggctattgaccggagagtggttgagatgaacactatattagtatgtctattactacatnggttatcatgtatgtatgtaccttacacagtgtagtgccgcattaatgaagtacttgaaggttcattctatagcgactgcagcagaggatcgtcgcctcacttgtctcgaggagatacggatccacacaggtaaacaagaatgggactcatgccttaacctatttcatctattaat

SEQ ID NO: 71698 - DNA, 391 bp, Zea mays
  unsure (1)..(391): unsure at all n locations
gagtccctngagactgagctntggcatgacacgacccttagtaacatgcaactcgggtccccctgcgagttggccgaagtggaatntatagttgtggcggagcatattagtactcgatacttggtgcaagaatatctggccaacaaaacatttccaacttctggtgggtggnggatgccgaagaacaagggagaagagaataaatatgaacttgtacgacttcccttacctgttaaatntcagaaaagctntaacaagacctgtgccgaatgtgtggaattaatagaaacaatctacaatgagattcttggaaattatacaaagaaggaagatcagttaatgacggctgccttcagcacccgagaaaaacaaagacggaatcgagtgatgg

SEQ ID NO: 71699 - DNA, 425 bp, Zea mays
  unsure (1)..(425): unsure at all n locations
tgatctcagttctccagtcttcactatatacaggagatatatngaggactgctctntcaagaagctccactgaaggtgcttctattngttcgaagaacacatccgaaggtaagggtagccnctgtgctgctgacttggctagcanatcagcatgctcatttgtcctcgggaatattttgacagaaaatcttcaaggaggctcaattctttgaccgtgtctagatatatttcgagcttcngatctttagcctgacaactcttgtcgatatgacctgaaacaacctgngaatcagntntaagaatagcccttctgattcccattgcttttagcttccgaagacccaaaagcagggcttcatattcagtaatatttgttgtgcaactaaaatcgagtcttgcttgcataacaagtttaactttagatg

SEQ ID NO: 71700 - DNA, 267 bp, Zea mays
  unsure (1)..(267): unsure at all n locations
atggttacactttatatcctggctggtatcctgagcataanattangagaattcattctatgaagtctcattcaggttctcatcatgcttttatgtataagaatgagacatctagttctatgcattctacccatgttaaaatgcctaanaagaaatctcctgttgcatcaaatgatcataacatttcatttaagacttntgatngttgcttatgtttaactaacaaatcangcaaagtagttgccaaatatgttgtgggcaaacaca

SEQ ID NO: 71701 - DNA, 468 bp, Zea mays
  unsure (1)..(468): unsure at all n locations
gaagatgtctgaagctgctaatatagctgctgctgagatgaagctgagtcttgatgaagagaagaacttanggtttcttatagcgatgtcgaagaccaacacagagaanatcaccaaggagattctggaagggctgtctgaagatactggtgacagtgaaagttatgatgtggacagcggtggcgaagactccgaagatcgcccctggcgaccaagccattcagtttatggtaaatcaactatcacagagaatcatctcgttaacatgagaggaaggtatttccgggatctggtccgtgntagggccgacgaaggggagaagacttgtccacacnccgaagagaatgaagtcgtagtgttccgaagctntntgaaggctgngctgcgattgcccttgagcagcttcatcgtggaggtggtgaagatctttgaagtctatcttcaccaacttacccccgaggcaatcat

SEQ ID NO: 71702 - DNA, 368 bp, Zea mays
  unsure (1)..(368): unsure at all n locations
cagctatcgactccaatttgatgctaccatgctgtatcactatgaacagttccgcanagggttcnggtccgcaggtgctcatggaccgagctctgngatgaagttcatgcccaattnttgatccttagagntgcgcacaagttgaaattggtgcaagagcaactgtgagctcgaattatggngtgtggtggactgcgcaagttcactggagtagttgcgccgtcgtctgcggtcaatgacctggttgtgtgaaggagaaacactacaagaaactggttaaaggacgtgggtgacaaaccgtcgaacttaatgcaataagccgtcgaacttactgtaagaacgtgggtttaccgacgaatatatccgac

SEQ ID NO: 71703 - DNA, 374 bp, Zea mays
  unsure (1)..(374): unsure at all n locations
ggagacacgtgatggtctaactaatgtcactttcgacattatatttctgtgcagctngtcaagcagggatacatgtgggaagctctcatcatgccacacatgtgatgacaacactaagactcctggagttcttcatatggacctctatggacccgtcgcctatcttntcataggaggaagtaagcatggtcttgttatagttgatgatatttcccgcgtcacgtcggtattctttgtgcacgataaatctgatactcatggcaccctcaagcgctcctaaagagagctcataacgatgttgagctcaatgtgatgaagatatagagcgacaatggtgtcatgttcatgaacttatagtggaggagctcttgcga

SEQ ID NO: 71704 - DNA, 418 bp, Zea mays
  unsure (1)..(418): unsure at all n locations
ctaagttaatattattataatngctggatagtgagttctttgtctttggagttctgatacatgaatagatagcctggtcgaagatttatgagaataagtggtgaaaatgcttaaagatttaggtacagacaagatgggtgtagggattcatgtaagatataaaaaatttgtagtcttggtataaaaatcgaagtacgcatggaatttccagtgcaaattgcgccttgaatacaagaggtggagatatgaatttgtttagtctgattgttgaagttggaatatagtagtgatgctggtaatagaattggacaaaactttgtaaaaaagacatgatatggagtgtttggtgagattctaaaagaatgatggaaattgatataagtctgatcaatgtgacttttactcttttgtttgtgtg

SEQ ID NO: 71705 - DNA, 275 bp, Zea mays
  unsure (1)..(275): unsure at all n locations
gaagaaagagatggctatcactaagtagtaggcgacagcaaaatccaaaatatgctcttctatcttgatcctactaccatacccgagacctgcatgagccagctcataacctacattngtatgacctacatgaccattgagatcatcatctatgacaagcttctcattggtgagtaccgctctgaccatgccatctatatcttcccagaactatctatcgtcgctctcattgtgaccaacctgatgggcatatgcacttattatgtgcaatacaa

SEQ ID NO: 71706 - DNA, 349 bp, Zea mays
tataaaaaactttctgttgccaacttgtatgcagccgttgttcattcaaatggactaaacttctctgatccgtgtgaataacaaattgcgaatgttgcagataagctctccaatggtcgacggccattaatattgcgaggtattccttttcgtatgtagagaggcctcgagtttgtggtcccagtgctttactgacataggcgagtgggtggccaccttgcattagcactgccccgatgccctggtcacaagcgtctgtttcaagcctgaaaggcttggagaaatcaggcaaggctaaaactggtgcttggctcagcttgtttttcagacaatggaatgcaatgtcctg

SEQ ID NO: 71707 - DNA, 349 bp, Zea mays
tctaaagggagagcacattttaggattaacatatgttcattttgagaaagacaggatttttagcgcatgtcaggcaggaaagcaagttagtgttcatcatccgcataagaacatcatgatgactgacaggccactggagctcctccacatggacctattcggcccgatcgcttacataagcatcgacgggagtaagtactgtcttgttattgtggatgactattctcgcttcacttgggtgttctttttgcaggaaaaatctcaaacccaagagactttaaagggattcttgagacgagctcaaaatgagttcggcttaaggatcaagaaaattagaagcgataatggg

SEQ ID NO: 71708 - DNA, 347 bp, Zea mays
tgaagccatggtaagtagcataggctaatattatacgaattgactcaagcctagctacgggtgcataggtttcaccgaaatctaaaccttcgacttgtgagtatcccgtggccacaagtcgggctttgttccttgtcaccacaccatgctcatcttgcttgttgcggaagacccatttggttcctacaacattttggttaggacgtggaactaaatgccatacctcattcctagtgaagttgttgagttcctcttgcatcgccaccacccaatccgaatcttggagtgcttcctctaccctgtgtggctcaatagaggaaacaaaagagtaatgttcacaaaaatgt

SEQ ID NO: 71709 - DNA, 345 bp, Zea mays
taccgcatttgaagcatgagcgcttcctcttggctttggtcttgcttggctgtcccttgcgacctttaagcaccgtcttgaatcttttgatgatgagagccatctcttcatcattaagtccggccgcctcaatctgtgccaccttgctaggtagcgcctccttgcttcgtgttgccttgagagcaagggtttgcggctcgttgatcggaccattcaaggcgtcgtccacgtacctcgcctccttgatcatcattcgcccgctaacgaatttcccaagtacttcttcgggcgacatcttggtgtacctgggattttcacgaatattgttcaccaaatgaggatcaa

SEQ ID NO: 71710 - DNA, 362 bp, Zea mays
ggacctataatactcagctttgggatgcacaggaccttgaaaacttttacatgagattataattgaaggtttagaaagcaaaataaaagatcaagcaactgctcttgaaaagaaagatttcgaacttcagacgatggaaggcttactggcagaagctaaagccaaaattgcaaagttggataaggagcttctctcaaaattagaaaacttcaaacaagaaaagtagaaatttgatacgaagtttgagactgaggtcgaaaaaagttcaaatttgcaaaaatcattgaaagagcttcaagataaatgtctggagttcagcaaccgatgcgtgcagcggctaaagcaagtcttcaactcggttg

SEQ ID NO: 71711 - DNA, 343 bp, Zea mays
tccattatcagtagtgtgtcatccgcatattgtactatttgaaaatcttgaccacaattctcggccaggggtaacttgagcaggtcttgctgtcgcgctttattgatgatgctctgtaacagatccgccgtgagaacaaaaagaagaggcgagaggggatctccctgcctaaccccacgcttgcagtgaaaggttttcccaggaacaccattaagaaggactgatgacgtgccagaccgaagaatatccctattccagctcatccatctgggcccaaagcctctatgcaacattacctggagaatcaactcatgctcaagagaatcaaaagccttttcaaaat

SEQ ID NO: 71712 - DNA, 344 bp, Zea mays
tctaaagggagaacacgtgataggtctaactaacgtgcatttcgaaaaagatagaccttgtgcagcttgtcaagcaggcaaacaggtgggaggctctcatcacaccaaaaatgtgatgaccacatcaagacccttggagatgcttcatatggatctcttcggacccgtcgcctatctaagtataggaggaagtaagtatggtcttgtaatagtcgatgatttttcccgcttcacttgggtattctttttgcaggataaatctgaaacccaggggaccctcaagcgcttcctcaggagagctcaaaatgagtttgagcttaaggtgaagaagataaggagcgaca

SEQ ID NO: 71713 - DNA, 338 bp, Zea mays
tcaccgaataggtttaaactatcaagagttttattaatatactaatatgtgcagcagatgggtgcaaaaaaagtgccacatcatctgcgtacatagacacatgatgaaggtgggctctgggagacagatccaagagcagccctgcctgttctgctctagaaaacatcaggccaggaacatccataattagtataaaaagcattggagagagtggatccccttgctggagccctcttttatggacgattgaatctcctggaatatcattcagcaacacctgagtgctagaggaggacaacagcccacatattatacccctccatgtttgtccaaaagct

SEQ ID NO: 71714 - DNA, 340 bp, Zea mays
tctaaagggagagcacattttgggactaacttatgttcattttgacaaagataggatctgtagcgcatgtcaagcagggaagcaagttggtgttcatcatccacacaagaacatcatgacgactgacaggccgcttaagctactccacatggacctattcggcccgatagcttacataagcatcggcgggagtaagtacagtctagttattgtggatgattattctcgcttcacttgggtattctttttgcaggataaatctcaaacccaagagaccttaaagggatttttgagacgggctcaaaatgagttcggcttaaggatcaaaaagattagaagc

SEQ ID NO: 71715 - DNA, 303 bp, Zea mays
tttttcgcttcatagcattatttgtcaactttttcagagagactcgaccattttatagaaaaaacttgtttacggactgatgtgggtttctggctaatttttgaaccataggacctggacgaaacccttttatcatgggaccaatgacaattctattatgcgctgtgggcgcttgttttttcttacgcaataacctagagacatacacctgaaggtattcctcgtggtcctgcgtgcattgtaacaaaacctgagcagtgaccggttctgactgaaattcttgaaaactggtgatcaacgtat

SEQ ID NO: 71716 - DNA, 279 bp, Zea mays
ttgtaacctgttacttgggccgcgactcctaaacaggtaaaaatgggtctgtccaaagatatatgggccagactttgattggattgtggaaacatccccttgctttaattcatttggggaagtttttgacggctaaaaggcgaacttaaaggtccccttatcggggggcaagggccccacaatgttcaagccccatcgctggagatgccctgtttggggcaacatctttggtatattgcgaggggtttccttacccaagaaagactttttggaagcttt

SEQ ID NO: 71717 - DNA, 348 bp, Zea mays
tgacaacaccatttgacatcttaaataaaatttctgagatcaagtatatttaattcattcctcaacatgcaaaagcgggttttatcaagtggcttagtgaaaatatccgctaattgatcttccgacctcactccttctaaaatgatatctcctttcgcaacatgatctctaagaaagggatgacggatatcaatgtgcttggtgcgagattgttgaacagggttattagcaattttaacagcactctcattgtcacacaacaaaggtaccttttctagaaccgcgccatagtctagaagagtttgtttcatatatataatttgtgtgcaacaagcacccgcgacaatg

SEQ ID NO: 71718 - DNA, 349 bp, Zea mays
tgcttaggtaccacatcacaatcaatataatcattgtatgaaccaattataaattccacatggaccatacgtgttaccttaagcttaccactgtcgttgaaccattggatgtagtaggggtgtggatgtggaagcgttttcagcccaagcttctctaccatggtggtgcttgctaagttgttgcagcttcctccatcaattataatacgacaagatcgttccaaaactacacatttagtttggaacaaattgtgtcgctggttttgttcagctttaataatttgggcactcaagacacgtcttacaacgaggctatcatagtgttcagcatgttcagccccaatatgct

SEQ ID NO: 71719 - DNA, 347 bp, Zea mays
tgacatacagctgacaatcttgtagcctcttctgtactttcctcaaatgctcctcatgttcttgttcattctgggaatatataagaatgtcatcaatgaacactactacgaacttgtcgaggtagtccatgaacacactgttcatcaagtacatgaagtaggatggcgcattcgtcaagccgaatgacataaccgtgaactcatacagtccatacttggtgatgaatgctgtcttcagtatatccgagggtcggattctaagctgatggtagcctgacctcagatctatctttgagaatacactggctcctctcaactgatccaataaatcttcaattctgggcagg

SEQ ID NO: 71720 - DNA, 345 bp, Zea mays
tttaatgttatttaaaagccttgggtaaagtttggtatgatttggaccatgtttggtacctagaacccaaaaccctagtctcgtgccctatgaacttcactatagactccaaaaaccctagtttcccgaagatccgtgaaggaaaattatattcaagacctaagatgatatacttttattatctttgcattttcatgagcattacatgagcattcatgattatatatggctatatatagaaaacgaggaagagatagaagttgaagaagcgaggactacaccaccaccacctgaagaacctcaggttggaaactgcttttactttgacatctatagagcagagcc

SEQ ID NO: 71721 - DNA, 344 bp, Zea mays
ttctcaacatttcttgttgctcattatatattcttcaatttttataattggctcaagtcataactttaaacttttcatcccctttttcttattttcttgaattttgctcatggggctcacttagggtttttaattagggttgcacattctacccttttcaaggactcaattgttttgatcatgatacttttaagtatatacttggtgaattctttattacttaagttattttgatgctcatgcttactttggttcacataaaataatggttcttggtttggcatttgagataaaccctatgtgacactggggtgtcacagccttccccccttaaaggaatctcg

SEQ ID NO: 71722 - DNA, 346 bp, Zea mays
taaagccatggtaagtagcatagacaagtaatatacgaattgactcaagcctagctatgggtgcataggtttcaccaaaatccaaaccttcgacttgtgaataaccttttgcaacaagtcgagctttgttccttgtcaccacaccatgctcatcttgcttgttgcggaatacccacttcgtacctacaacattttggttaggacgtggtactaaatgtcatacctcattcctcgtgaagttgttgagctcctcttgcatagccaccacccaatccggatatcttaatgcatcctctatcctgtatggctcaatagaagacacaaaagagtaatgttcacaaaaatg

SEQ ID NO: 71723 - DNA, 344 bp, Zea mays
tgtgaagattcttcatcccaacatgggctattcggcggtgccagagccaacccatgttagtcttagcaattaagcaagtgttgagttcagctttatcataatctaccaagtatagctgaccctctaacactcccttaaatgctattgaatcatcacttcttctaaagacagtgacaccaatatcagtaaaaagacagttgtagcccatttgacataattgagatacatagagcaagttgtaatctaaagaatcaacaagaaaaacattggaaatagaatggtcaggagatatagcaattttaccaagacctttgaccaaaccttgatttccatccccgaatgtg

SEQ ID NO: 71724 - DNA, 344 bp, Zea mays
tgagtgatgctcttaggtcattaacaatcttgattaacacatggtctccaaggttcttatgttctccttaagtttctaccatatgtgattacagtcctcagtagtaccaaggtgtgctctagccatggtaacacctgaggtgttacagccctcccccttaaaggaatctcgtcccgagattttaggcagagtcctctagaggggtgctatgaaggcacgttggtgggctactctttcttatactcaagtttctctagttaactactcttcgaatgtcattctctttgcaacttcagaaggaagtcctttttaagttaaatccacaacttagactacccttgtta

SEQ ID NO: 71725 - DNA, 343 bp, Zea mays
tcggcatctttacttgcttcttcctcctgttcccctggcgtctagtcagtgatgaagtctgctaacgcctgggatcgaatcgaggatctatgcacataatcaatgctgaattcgttgagttccgcagcccactttccaatccttccagtagcttctctattcctcataatatcctttaaaggctgtgatgaaggaacaattatatggtatgcttgaaagtagtgtcgaagcttcctggaggccattaagacagcatatagcaccttctccaattctgtatagtttttctttgataaactaagaacttcggagacaaagtacactggggcttgctttttagttt

SEQ ID NO: 71726 - DNA, 336 bp, Zea mays
tcaggtctcttgccttactgcttttgtccacatggcccgagataacttgcgaatcagtcttgaggatttcccttcttattcccattgcctttagcttccgaagccccaagggaagagcttcgtactcggcaatattgtttgtacagctaaaatccaattttattgcataacatgttcttactttggaaggtgcaactaggacagcagttgcccctgcaccgaaggtcccccaagacccatcgcaaaatatcgtccaagattcgtcatcttttattgtttcttcatcctgagcccctggcgtccaatcagcaatgaagtctgctaacgcctgagatt

SEQ ID NO: 71727 - DNA, 337 bp, Zea mays
tgtggaggttcttcatccccacatgtgctaatcggcgatgccacagccagcccatgcaagtcttagccattaagcatgcatctagaccggcctcttcttttgcaaaatcaactaggtaaagcttgccgtctagtacacccttaaaagctagtgaaccatcacatcttctaaagacagacacatctatatttgtaaacaaacagttatatcccatattgcataattgactaacagatagcaaattatatccaagagactctactaaaaacacattagagatagagtgctcatttgagattgcaattttacctaacccttttaccttgccttgattccc

SEQ ID NO: 71728 - DNA, 349 bp, Zea mays
ttagcacttgatccaactagaccacttggtgctcttcacaccttgcttaaatagtgttacccttcacaattttagtagggtgagcatgatacctatcagtggtggaggatgcgccaaaatcaaggtgttgctaacgcaacgccgaaataattcataaacataatccaaatcaattcatagctacaaaataagcgatgaatataaaaatacatatcttatttaagagtcatcatgatcataatccacttaaaatgttagaaaatactatgtcggttccttctagctcctaggctccttgtccttgccgttccaacaatggagacggtgacatgggctacaacgggaatcg

SEQ ID NO: 71729 - DNA, 348 bp, Zea mays
tctaaagggagaacacgtgataggtttgactattgttcaattcgaaaaagatagaccttgtgcagcttgtcaagcagggaaacaggtgggaggagcacatcacagcaagaatgtgatgaccacttcaaggcccctggagctgctgcatatggacctcttcggacccgtcgcctacctaagcatagggggaagtaagtatggtttagttattgttgatgatttttcccgcttcacttgggtgttctttttgcaggataagtctgaaacccaagggaccctcaagcgcttcctcaggagagctcaaaatgagtttgagctcaaagtgaaaaagataaggagcgacaacgg

SEQ ID NO: 71730 - DNA, 345 bp, Zea mays
tgaagccatggtaagtagcataggccaataatatacgaattgactcaagcctagctacgggtgcataggtttcaccgaaatccaaaccttcgacttgggagtattctttggccacaagtcgggctttgttccttgtcaccacaccatgctcgtcttgcttgttgcggaaaacccatttggttcctacaacattttgattaggacgtggaaccaaatgccatacctcattcctagtgaagttgttgagctcctcttgcatcgccaccacccaatccgaatcttgaagtgcttcctctaccctgtgtggctcaatagaggaaacaaaagagtaatgctcacaaaaat

SEQ ID NO: 71731 - DNA, 346 bp, Zea mays
tctctttcctcgacatgccaccggaataccggatgccgattgccaagcacgcgcgcttgagctttcatttcatatgccacgcactgtcacaccgacacccgtcccctgtgcgtctccttatctctggccaccgccacagaactggccgcgcgcgtcgcaaggctctctcgctcacttcttcccagcggagtgcgcagtcgtcatggctaacgctagccgtggtcgtgtcggcggcggcgggcgaagttccgtgctcgcgctgcttctcctgctttccgccggaggagcccgagcgtcctacgacggcgagggcgaggcagcacgggcaggggcagaggagaaggag

SEQ ID NO: 71732 - DNA, 337 bp, Zea mays
tctcctggacaagcgctgcacttaccgctgagttcgaagctgccacatataataataaaggagcccctggcattggtggagtcaatgttgttagatctattaaatactgtttcagctcttcgaaggccttctgctggagtgatccccattgaaaaacttcggctgatttcagcacttcgaagaatggtaagtttctctctgctgatctggatatgaatctattgagggatgccaatcttcctgtcaatctttgagcccccttctttgtagttggtggctccatccgaagtatagcttctattttacttggattagcttcaattccctttgttgaaac

SEQ ID NO: 71733 - DNA, 346 bp, Zea mays
tctagatagtggtacctcaagtttgatatttctataagaaaatatggttttgaggaaaataaggaagataattgcatttatgcaaagtttaagaatgcaaagtatatcttcctagttctatatgtagatgaaatgctattggctagtggtgataagaacctactgcaagtgacaaagaagtttctttcctcaaattttaatatgaaagacataggagaatcctcctatgtgctaggaatagaaatccatagagacaaaacaaagaaattttaggacttccatagaaagcatacataatatactaaagatgtatggtatgcacaagtgtagaccattgtctacgcca

SEQ ID NO: 71734 - DNA, 346 bp, Zea mays
tttgctggcaatttccagggcacgtacgtgcgccccgggaattcctgggacctccgaagctgccgacagcagccgggagagtctctccgggactacatccggcgattctcgaagcagcgcaccgagctgcccaacatcaccgactcggatgtcatcggcgcgttcctcgctggcaccacctgccacgacctggtgagcaagctgggtcgcaagacccccaccagggcgagcgagctgatggacatcgccaccaagttcgcctccggccaggaggcggtcgaggctatcttccggaaggacaagcagccccagggctgcccatcggaagatgcccccgaggcatcaa

SEQ ID NO: 71735 - DNA, 344 bp, Zea mays
tcacttctgtcccaccgtactccggaagcttaacagtgtcgccttcgctcaaagatacagggatcagcttgccatccctatcacgatcaccaaggccaacagcaacgactttagcggcgttcagctgcattcagaataaagtgatatgttaggcctaaaagaggcaggaaaactaaaaacccatgataaaaaacagtccacagacaactaaagctaaaaaggaaataccttgatttaatatatttgaactcacgcaacctacatactgagcatgtatggatattgcagcgaaattcacaggcagatcgccctgacagtattattctagaggctgctacaagcta

SEQ ID NO: 71736 - DNA, 344 bp, Zea mays
tcccccgacattcttcagcccctcgggcattctaaagtaataataggtaccacttggggtgatgaagcttgtttttggctcatattccttcttcatccatatttgatggtaccctgaataaaagtccaacatactcaaaagctctaaagtgacagcagcatctacgagtgaatctatctgtggcaagggaaattcatcctttggacaagctttgttgagatctgtgaagtcgatgcacattctccacttcccatttgcttttttcaccattatagtattggtaacccactctgggtaagtaacttccctgattaccacagcactaaggatccttttgacttctg

SEQ ID NO: 71737 - DNA, 343 bp, Zea mays
tctcggcatattcttgggcaaggggcttttttcttgagatgggttaagatgagaatggaagcataaggtgaggattagctctaatttgtgatctatgtttttagagaaaacctttcttaaaaagaaagaaaacacacaagctcagcaatgataagcacaaacaaatcaaatgttttgaataagggaagaatagagtttttccaaagcacggactactcagattcgggggctaagcataactactattgctcgactcctgaattgagaactgtgctaaccaggacttatgagcactaacgttaaagcatcacatatgcactcaaaagggaagaaaatatcaagc

SEQ ID NO: 71738 - DNA, 337 bp, Zea mays
tgtcggcgctgctgggggcgtccccgccgtcttcacgttcgccaaggtgcccgcgctgaacgggatcttccgccaggcggtgcgggcgctgcatgtcttagtgcgcatcgagctcaacgcacccgtcaaattggggaagagggatgctggtgaaaccggtgaggggaaggaggaggcactggtggtgctggccacacagctcgctagagcagtgcaggcactcagcaagctgagcattgcccgggcacggctctgtgcggagagtattgctgatgctgagcttcgggagaagcttactggtggcgttagcgttgatgatttgaaggggatgcttgac

SEQ ID NO: 71739 - DNA, 339 bp, Zea mays
tcagctttacaagatacagtggaaccttcatttaattttctaggctacaagggaaactcaagaatttttataaaagaatttcccaagctttttagcctcatgtaatttgtaaaggatggtcaattattaaaggaatgagccccaaaccatccctgtcttgttccaaaaacaaggaaataaagatatgttgcgttttcttttccattacttaccctaggacttttaatctagggacgagattcttttatggggggaaggatgtaacacccctggtgttactgccactaaaacttgagcataacatcataagcattggcatatcatgtgttcgttacactt

SEQ ID NO: 71740 - DNA, 348 bp, Zea mays
tttccttgtcgtcatcaactttgacatagaaccactcagatttccagcctgctgcccatttgcttcggtaactaattacaggaaacttagtagttttccgataggcgaagttataacaaccaaaattgtcgtgcagtccatcccttctagccttcgtttgataatgcaactcgtgaacccggcaaaagctgtccgcaaatggttccactgcttggcttcggagtgcccagatataaacaataagtctaacaatagcgttgggggtcagctggtgaaaataaataccgaacctcttcagcacctctgcaataatcccatgtagagggaaccttaatccagcctttagaa

SEQ ID NO: 71741 - DNA, 347 bp, Zea mays
tgaagctgaagttgcaaagagttcgatctttctttagtcattgaaggaacttcaagataaatgtctgaacttcagcaaccgttgcgtgcaacgactaaaacaggtcttcaactcagttggagctagctctgaaaagtttaaaccttcaactgaagacctgccaggcatctttgatcatattgaaggcgaagttgatgctcttgatgaagtcatagctgggcatggtgacttctgcgctctgctagcttctcgtggcacaactgttgcttttatgaaggctggttgcacgcacgggaatattgtaaacaggccgaacttcagcttatctccagcggacttgaatgaca

SEQ ID NO: 71742 - DNA, 342 bp, Zea mays
tcatccgctggccaccgacgagcgggttgttgctggagaagaacatttccaaggaccccccagaccagcggacaatctggtggaagcgctttgtcaagttgatcggcgccgtgccacggaacgcgtcgcgccgcatcgtgcagtacatggaccgccaccctttcccatggatgcggaaccctgtcactatatcctctgttgctatgccgtagatgtagccgacgcccttgccccagtcagtccctccgtcgtaggaagctgccacaaccatctccacgtcaagtggtggtactggtggcggcgtggtcagcctttctcgttctcccatggcttccgagaccg

SEQ ID NO: 71743 - DNA, 347 bp, Zea mays
tgttcaaacagaggtagttgaaaaatgtgatatagatgttccttttgttttgcctctttgatagaaagtttagtggtgcaagcaaaagagaataattcaaggtattgttgagctggaatgcccctattccacagatcgtcccagaaaaaaagatggttcttccattgccgatggttggagatgccagtcccttgaaattttgtaaaaggcttagtaaacttctccaccaaaaggatccaattcttctacaactaggaagtctgcctgacctgtagtaattattccagatgagatttgcccaaggtaagtcataattattgaagaacttgtgcaaatatttcaagagt

SEQ ID NO: 71744 - DNA, 345 bp, Zea mays
tattaattccaatagaattaagctcattgatgattaaattcaaatgagaatacatgtctctaacaagctcattatctttcatagcaaaagaattgtaatcatttaagactaggcaatgtttttgctcatggacattggatgtgtcgtcatagagctcatgcaattttagccaaatctcattagcagtttttcatgtaaaacttggttgaaaatttccatgctaagagattcatacaagcaaattttgtctctagcattcaaataaatttctttttcctcactcatggtgagcttctcgggatttttaggtggtttcatcccgtcatgagtgactctccaaacacc

SEQ ID NO: 71745 - DNA, 344 bp, Zea mays
tattgtcggcgtttcgagacaggggggtctttaagccgtcgagtgagtgtgctgcgtgccccagcccagatgggtcgagcgcgtgggcgagcgcgaaggggggagaggcgaggtggccagagtcgagcgtgagagaggtggaagtcccgcggccttcgtgttcgtcccgcgcccaggtcaggtgcgcttgcagtaggggggttacaagcgtccacgcgggtgagggaagcgagcggccccaagagagcgcctgtcccgtcctcggtcccgcgcggccaaccttctctaagaaggccctggtccttccttttatagtcgtaaggagaggatccaggtgtacaacg

SEQ ID NO: 71746 - DNA, 344 bp, Zea mays
tgtgaaggttcttcatccccacatgtgctatgcggcgatgccacagccagcccatgctagtcttagctattaagcatgcatctagaccggcctcttcttttgcaaaatcaactaagtacagtttgccgtctaatacacccttaaaagctagtgaaccatcacttcttctaaagacagacacatctacattagtaaatagacagttatatcccatattgcataattgactaacagatagtaaattatatcctagagactctactaaaaacacattagaaattgagtgctcatttgatattgcaattttacctaacccttttaccttgccttgattcccatcaccg

SEQ ID NO: 71747 - DNA, 301 bp, Zea mays
ttggcgacagtgtcgtttgtaggtgccttatgcattgctttctcttgggggtgccgagctttttcccttctaaaattgtcttccaatggcgttcggtgtcgtgtcctttcctaagacgtcattattggaatttcgtcttgattttgatggatgtcaccttcaatgattgcccttcacttctcagtgtccacttgaggtgtggaggttggtctttcaacgtgaagttgggacttggctcaacaattaatgggttattacataagtcgaactctttttcgacgacttggggtttctgcatatg

SEQ ID NO: 71748 - DNA, 321 bp, Zea mays
tctgacttgtgggcctgccgaggtgtcctgtgcacacctgacatgcactgtttgatgtccggtgcaccggtatgggcagccctgacgtttgcgcgcgctgcgcgcgcatttaatgctgcgcagggagccgttggcgccgcagagagccgttgctccgctggcacaccggacagtccggtgcacaccggacagtccggtgaattatagcggaacggctgtcgggaaaaacccaggatgacgaattccggaagccgcggttcgttggcgcaccggacatgtccggtgcacaccggacagtccggtgaattataacgcgcccgg

SEQ ID NO: 71749 - DNA, 338 bp, Zea mays
tcgtcatccgaaagacaattaccttggaggtaagatataatttcagtcctccaatcttcactatgtattggagaaatagcaagcactgctctctccatgagttcaaccgaaggtgcctttattgtttcaaaaaatacttccgaaggtagagggagcccctgagccgctgatttggctagcagatctgcatgctcattttcacctcttggaatattcttgatagaaaaaccttcgaaagaagcctccaatctttgaactgtatccagatatttttcaagtttcgagtctcttgccttgctacttttgtctacatggccagaaatgacttgagaatcagt

SEQ ID NO: 71750 - DNA, 333 bp, Zea mays
tcggcgaccaagtgatctagctctttgggttccacgaagttgaagactctgagcatctgtttggtgaaggcaagtgtcctctgacccattatgtcccatttactttataatacactgtcccgcatactatgaacaacctaaggatttactagctttctatttaccttgtccttgatttaccttttgggttactatggttagctacatgctagcgctttactttaatcaatgaacatgatgagatacaatgatgatactatgattttattctggatatgatgatatacttgtggcatttaggggactcgggctgtttcccgagtacctctccgt

SEQ ID NO: 71751 - DNA, 346 bp, Zea mays
tgccagtacttgtcaaagcaacaccatttaccatcacagcaattgcagaccataccagtaacttgtccctttgcatgctggggactggatatgattggaccttttaagaaggctcaaggaggatacactcatgtactggtagcaatcgacaagttcaccaaatggatagaattcaaacccattgcttccttaacctcagccaaggtcgtggaattcatacaagacataatattcagattcggaataccaaacaatatcataactgacttgggatccaactttacaagttcagaattcttcgacttctgcgagcaaaagggcattcaaatcaagtacgcttcggtag

SEQ ID NO: 71752 - DNA, 345 bp, Zea mays
ttaatgcacaatttctccccctttgtcatatatctccaaaaaagatacaaagaatataaagggtagaaattatgattaagcatgatgtgaacacactatcatgaagagggtccttagatggcacaaaggtaatggagaagtgtcataagtgatgtacctttgcgttttaccttttcaaaggggtgttccacacttgtgttgtatttagagttcattttgcaatctcttgttggcataattgtgacataggtccaagatatcaaatgaatattgtcatactaattgaaagataaatcttgatacctggagtctagatgtcacctagcattttcttatcataacaag

SEQ ID NO: 71753 - DNA, 342 bp, Zea mays
tggaggcgtcgattggttgtctacttggtgtagactcctccttcttttcttccgtcgccttgaatgcgacgggttgagcttcggatgtagatggatcatcaagctcgttgatcttcctcgagccttcgatcatgcactcaaaacttacaaaatgcccgattacttcctcgggggtcattttagtatatctaggattaccacgaattaattgaacttgagtggggttaagaaaaatgagagatcttagaataaccttaaccatttcgtggtcgtcccacttgacgctcccgaggttgcgcacttggttcaccaaagtcttgagccggttgtacatgtgttgtg

SEQ ID NO: 71754 - DNA, 345 bp, Zea mays
ttaactctcgcgagacctttccccatttctttctagccaaggtaaattcattatcgtatgtgatattctatgcatatttactttatttgttcccttgtatggtgtactatttgtttcctaatttgaatggatggatgtatgtatgcttgcaatcgcatagagaacgatccggttgaagagcccgaggaacccgcaggagaagcccctgagcagcagtcggttggtggaggcaagtgtcctttgacctatctctgtcctattcattctttaattcacctcccgcattacacatttatacctaaggattgactagcttttgctatccatatccttgttcacctattt

SEQ ID NO: 71755 - DNA, 341 bp, Zea mays
tgaagctggcctttgtgccatgacgaaagccattctcgcagatagtcttgcatacaatagtctgaaggtacaaaaattgtgaattttgaagtttatggactttgaaaatgaagtcttttattctcatgttaatcctttattctttcatgcagggcttaatacttagcaacgccctaagggcacaaaagaatgctgaagatgagagctgcactatagctcttaacaaccttcgatcagaggttatcatgctgagaaacgaagccactgtaacacccggttttaaaggacaaagccgggtgcatctcatacatgcgccaaagaagacaacttatataataaca

SEQ ID NO: 71756 - DNA, 342 bp, Zea mays
tcttattaatcctcgttggagacccatgcattggtagcccacacgaaggtcaacctcctggtcaggtaactctataggtagccccaaaccttctccacttgcaagttgtgctccggttctggcggcgtctctcatatctccctaatgtatggccactctcaaccttttggctcaaacactacgagccttgttccatccagtacacgcttatggccacactataaatacagttgatgtgatcttgcaagactagatgccccactcgttataatacaatggtgcacacaagcatcaagaggttgaggatgtttaacctcacttataaaaactagggattaacct

SEQ ID NO: 71757 - DNA, 345 bp, Zea mays
ttgcaggaagaaggagatgatatgaagtctttgggggtgcttaagagagtcaattcaatttttgttgactcaagctaccgatatccaagattgacccaaggttattttaaattgttataccttaaactcatatcatctcgagggaagttgttgatgttgtaggaaataaagaattatcctataccgaaaagtcaaagcctacaatatggaggaatgccaaaggatggtaacatttatgcttttaaatgcaagtgtcttaacttatcatttctcatgtgtcttgtgtagtcacatagaaaaaggaagcacttaagatatttttaaatttatgtcaccattctttgg

SEQ ID NO: 71758 - DNA, 343 bp, Zea mays
tgcaccatgatatattgggccttttcttattcttgaaagatatgggccagtggcatatcgactccagttacccgaaactttgtctgcggtacataatgtgttccacgtgtcccaattgaagaagtgtctttgggttcctgatcgaaccgttgaagtgacagatgttgtccttgaaccagacttgacatattcagagcaccctattcgagtcttggagcaaaaggacaggattactcgaagaaaaactctcaagttctacaagatacagtggaaccaacattccgaagatgaggctacatgggaaactcaagactttttagataagaatttcccaggattttta

SEQ ID NO: 71759 - DNA, 340 bp, Zea mays
tgctacatgcacatgccttctttttctccacagcatcaatcttactgaacactacccacttaaaaagaatgagggtagaactcttgaatcttggggaattgaactccttgaagtacttcacaacatgggtgctacgtggccttcttctgttgttgttgcttgagcaggctgcgtagagatgactaacaccgagttgattttgggacatccttcttctcatcttctcttcactattttcttttcacttttcactgcccctttctttctcttttttcttcccactagaagattctatcagagagtattaccatcacatagaagagtacccagattaagagtg

SEQ ID NO: 71760 - DNA, 340 bp, Zea mays
  unsure (1)..(340): unsure at all n locations
tcggcatctttacttgcttcttcctcctgatcccctggcgtctagncagtgatgaagtctgctaacgcctgagatcgaatcgaggatctatgcacataatcaatgctgaattcgttgagttccgcagcccactttccaatccttccagtagcttctctattcctcataatatcctttaaaggctgtgatgaaggaacaattatatggtatgcttgaaagtagtgtcgaagcttcctggaggccattaagacagcatatagcaccttctccaattctgtatagtttttctttgataaactaaaaacttcggagacaaagtacactggggcttgctttttag

SEQ ID NO: 71761 - DNA, 337 bp, Zea mays
tcggcacaatgacagatctcttgacgaatggttgaaccgacttaaagatgaaatgacttaaagacccatgatgttttgtgtcattattgtagtcgattgtaaagggcataaatgtaattttacacaggttgcgccctgtgcctataaatagatgaacagtacccctgtactgttcacgcaatcttataatcaccggcacattacgctggaattattgctttatacgaaggcgaaggtataaatgtacctaaatattatgttttaatatttaggttcatatgataaaatatgtgaataatattatctgttttttgatacatctttctctaatgtttta

SEQ ID NO: 71762 - DNA, 334 bp, Zea mays
tgaaccgaggacccgcgtcaccggaatagttcaatcgtgctcgccggagttcaaaaacccgccggcgcacgtggaccgggtaagcctctgcaccttttcccaattcgttgcgcgcatggcctctacatcaccccgtggagctcctcgtgcaccttaattgtactataccgccgtggtttggccggaacaggagccgccgctgacccccgccgccgacccgcacaccgacgtgaccgtcgtgacctcccggacgtcactgaccaccccgccggagctctactgccgccggtaagcctcgccactgtaatctatgccgcgggtactgtttaagtca

SEQ ID NO: 71763 - DNA, 346 bp, Zea mays
tgtgaaggttcttcatccccacatgtgctattcggcgatgccacagccagcccatgctagtcttagctattaagcatgcatctagaccggcctcttcttttgcaaaatcaactaaataaagtttgtcgtctaatacacccttaaaagctagtgaaccatcacttcttctaaagacagacacatctacatttgtaaatagacagttatatcccatattgcataattgactcacagatagcagattatatccaagagactcaactaaaaacacattagatatggagtgctcattagaaattgcaattttacctaaaccttttaccttgccttgattcccatcaccgaa

SEQ ID NO: 71764 - DNA, 343 bp, Zea mays
tggtataaaataaagattaagttgtgcccaataatcctcagatcaaccatttattggcctattcgtttgcctgccaaataattttccttacaaaaaaaaatatataactatattcccatatgcttctaactttcatggtcaataccaggaaaggaaagattatcacgcaacagcaaacagaaatgaatcctccaaatcctccacctgttgaaatcgatcaagtggttgctgcccaaagactgataatacaacaattaacagccctggtgaccgagatgcaaaatcagataagacaagaacgcgaggaaatacgtcaggtccgccaagaaataaggcaagcgcg

SEQ ID NO: 71765 - DNA, 343 bp, Zea mays
tctaaagggagaacacattttaggactaacaaatgttcattttgagaaagacagggtttgtagcgcatgccaagcaggaaagcaagttggagcccatcatccacacaagaacatcatgacgaccgacaggccgcttgagctactccacatggatctattcggcccgattgcttacataagcatcggcggaagtaagtattgtcttgtaatagtggatgattattctcgcttcacttgggtattctttttgcaggaaaaatctcaaacccaagagaccttaaagggattcttgagacgggctcaaaacgagttcggcttaaggatcaagagaattagaagcgac

SEQ ID NO: 71766 - DNA, 343 bp, Zea mays
tctaaagggagaacacattttgggactaaccaatgttcattttgagaaagacagggtttgtagcgcatgtcaatcagggaagcaagttggtacacaccatccacacaagaacatcatgacgaccgacaggccgcttgagctactccatatggatttattcggcccgatagcttacataagcatcggcgggagtaagtattgtcttgtaattgtggatgattattctcgcttcgcttgggtgttctttttgcaggaaaaatctcaaacccaagagaccttaaagagattcttgagacgagctcaaaatgagttcggattaaggatcaagaaaataagaagcgat

SEQ ID NO: 71767 - DNA, 344 bp, Zea mays
tcggcgatggctaaagattttggcagcaaatctttgcaaatagcaatgaatgctgtggtaacttcacacctactcgtctgtttatatagtactgcaggtaagaaggcgaagcgccaggatttttacaccaggcggacacccgctcgcactcgctgcgtggtggaccgcagagaccaaacagtaactctacaaggtggggccgctacgcgctgggtaattgaatcgtttctcgacaacgagctcagggaaggtgttttttagaccttcggcgctccgaagcttaagagacttttttcacggatcaagctcgttacgaaaaacgatctagcaccgcgaaaggggct

SEQ ID NO: 71768 - DNA, 342 bp, Zea mays
taatgggcaaaaaattttacactgacatctgggcaaaatgggggccgagaaatggctaacgaaattatgaagaaaagtgaaaaagatattcatgacgctcgagtggtagcaaaacaggttgaggaagctgcagaacgtgagaaacgcataggtattattttgtggcctttagcttcggcgtttgtttttataacttcggactacttaaccttttccttcttcagctgaattatctccaccactggaaccgttcgatccactagtcgatccaacaacgaaggaagcactagaaatcataaatatggtcgaatctgttattgacgaagtcgttaacaaattgct

SEQ ID NO: 71769 - DNA, 344 bp, Zea mays
  unsure (1)..(344): unsure at all n locations
ntattccagtgtacccaggaccacgaagaataccttcaggcgtatgtccgaaggtttctgcgtctgagggcacaggcgccaacagtgcccaatgaaattgtcattgaggccatgattaagggacttcggccgggaccttcagcgcaatgctttgccaggaagccaccacaaactttggagaagctgctccaaaagatggatgagtatatccgagctgacaatgacttccgccaaagaagggaggaggcattcaggttctctgaaatgaccaggggcttcggaggaagatttcatctgaggcacgtcaggtcaattcataactccactcagaatgatgatagagg

SEQ ID NO: 71770 - DNA, 342 bp, Zea mays
tctaaagggagaacacgtgatatgtcttatttacgtgcaattcgaaaaagatagaccttgtgcagcttgtcaagcaggtaaacaagtgggaggagcgcatcacagcaagaatgtgatgaccacatcaagacccctggagctgctacatatggacctcttcggacccgtcgcctatctaagtatagggggaagtaagtatggtttagttattgtggatgacttttcccgcttcacttgggtattctttttgcaggataaatctgaaacccaagggaccctcaagcgcttcctaaagagagctcaaaatgaagttgaacttaaggtgaagaagataaggagcaa

SEQ ID NO: 71771 - DNA, 356 bp, Zea mays
actataaaactcagcttaaaacttaaaaagctaagaaaatcttggtgcgcaagagctaaaaattgagtgagcgggagcagatggcaagagagcgtgccaaatgagcttgcggtatgatcttatttatacgcctagtgcgttgaaaattgaaagaccccgcctgtcagtgaatgttgctattctagcaaagggaaggtgttttttcggaccttcggcttaaagccttcgtccatgtcgcaatctaaatttattattttaaacaaattaatattgcgaggggctactgttgggggccttcggcttacgaaggtcctcaaaaacaggatttaacagtatttctggagtataatgtgtga

SEQ ID NO: 71772 - DNA, 342 bp, Zea mays
tatgttaatgatgtagtgattaagactgatttcttcattgaagatttgcagttggtcttcaatagtctgaggcgatttcggtggaagctcaatccagaaaagtgtgtctttggagtgcgagcagggaatttgctcggattcattgtcagccaccgaggaattgaagctaacccagaaaagatcgaggctatcatgaggatggaagcaccatagtcacagaagaaagtgcaaaggctcactggatgcatggcagctttaagcaggttcatatcaaggttaggagaaaaggcctaccattctacaaattgctcaagaaggtggacaagttccagtggacctcaa

SEQ ID NO: 71773 - DNA, 335 bp, Zea mays
cttaaagccatggcaagtatcatttgctaattttatgcgaattgactcaagcctagctacgggtgcataggtttcaccgaaatccaaaccttcgacttgggagtatcccttggccacaagtcgagctttggtccttgtcaccacaccatgctcatcttgcttgttgcggaagacccatttggttcctacaacattttggttaggacgtggaactaaatgccatacctcatttctagtgaagttgttgagctcctcttgcattgccaccacccaatccgaatcttgtagtgcttcctctaccctgtgtggctcaatagaggaaacaaacgagtaat

SEQ ID NO: 71774 - DNA, 336 bp, Zea mays
tatgaagattcttcatcccatcttgtgctatacggcgatgctagagccatcccatgtttgtcttagcaagtaagcatgcatctagatcgacattgatctttaataaagtcttctaaataaagcttgccgtcagatacaactttaaatgctaattgaaccatcactccttctaaagacagctacatcaacatttgtaaataaacaattgtaacccatgtgacataactgactaatggaaagcaagttatatccaagtgattctacgaaaaatacattagaaattgaatgctcgatagttgaaagtcgcctagatggggtggataggcggaaactgaa

SEQ ID NO: 71775 - DNA, 347 bp, Zea mays
tcgtgactaggaccagcggttgaaacagagtggctttgcgaataccatgggagataagatgtgacggcaatataatttatattttcctttccagatttattgttatgcatgtttttcataatgtcagatgtgggaaagtttttcagaaagacttaataggtctaatggctattaaaattaactgtggctacggaggggtgatgacatcacatgatggtacatcgtaaacaaaatagtgagaaatgggtgcacgacgagggttgtgagttttctagcttatattatacagcacggtagtggtgccgacacaccaatttcttgtaggctactagtttcatcattccaat

SEQ ID NO: 71776 - DNA, 345 bp, Zea mays
tgacaatgaggaaatggctctcatcatcaatagcttctgccaaatcctcaagcaaaggagggggaaggactacaaaccccgctccaagagggtgtgctacaagtgtggtaagcctggtcattttattgctaaatgttcattgtctagtgatagtgacaggggcgacgacaagagggggaagaagaaggaaaagaagaggtactacaagaagaagggcggcgatgcccacgtgtgttgggaatgggactctgatgagagctccattgactcctcctccgacgaggatgccgccaacatcaccgtcaacaagggcctcctcttccccaacgtcgaccacaagtgcct

SEQ ID NO: 71777 - DNA, 295 bp, Zea mays
cccctattagtcttagcaattagacaagtgttgagttcaggtggggtctcattaaaatcaactaaatatagctgaccctctcacactccccttaatgctattgaatcgtcacttcttctaaagacagtaacaactacatctgtaaaaagacagttgtagcccattttgcataattgagaaatggaaagcaaattgtaatctaaaagaatctacaaggaaaacattggaaatggaatggtaaggagatatagctattttacccaaacctttgaccaaaccttgatttccatccccg

SEQ ID NO: 71778 - DNA, 329 bp, Zea mays
  unsure (1)..(329): unsure at all n locations
nttaggttttcttaacttgggtaaagttttacccctatgatccctatttagggttaagttccttaaccagggttctagttgcaaaacacttaaaacaatacaacttgtttgaaatttttgcctagtgaatgcactctaagtgtgtcaaacatatgcaatgccaatgcttatgatgtcatgctcaagttttagttatagtaacaccaagggtgttacagtattgctgcggcagccaggttctggccgaccccactggaagccggtggcggccttgccctaacgtcgtcggcaatgcggtgctagatgcccttgggtagatgacgcgcttc

SEQ ID NO: 71779 - DNA, 344 bp, Zea mays
tgtctatggagcagaataaggcaaagtcggatgtttcaccggacctcggtccgacgtgcactagaccttcaaaagtcaacgaccaaattagacagcccaatggccaagctaatgaggagctgatgtgttacggtccaatggtgcaccgaaccgatccagtgctacctgacacctgacatctggttcagaacagtcgctgaaaagacaatctgacagaagtccggtgtgcaccggactatgcactcttcaaggtttggtgcactcgaattcaatgcaatttttggaagttggttctaatggctatttgggtagtaggggtctataattacaccctcaaccagccc

SEQ ID NO: 71780 - DNA, 339 bp, Zea mays
ttccagattgtgaaaaattgcattcatatgtttttgaaactccagttatgaatgttttacatgggatgttcttatttgcgtgacaaaaatgagcgggtctgttcactggtaggtttcatcaggtaaatggccgaattggctcttccaactatgaagacttctgtagagggataaaagttcttactgccagtagaatttcatgatctttaattgagtggattgtgagatatcgaattttgaagttacctacgctgctgtctgaaacagattcagtcagttatcttgtcagatgttttaaaacttatagatggcagaatttaattatccattgaataccga

SEQ ID NO: 71781 - DNA, 344 bp, Zea mays
tatagtaattattgaaggaatccaaaccagttttattacttcccttcgttccatacaaaacgaacaggtagctgccggatggaaatgcaacggctgtgtggcatggcccaatcaggcctaccaggagtgccacacgcgctgtgttttgttcgggtacggtgcgctttccttcacgacggcatgcatgcatgcacgcagacgcaggccagcatctttttatagatatatgtaatttctgggccgtcgtgttgggccgccatttttgtatggtttcagttagttttgaggttaagggcgtgtttgcgaccctgcaccaagctggctcggcctgccctactggccca

SEQ ID NO: 71782 - DNA, 342 bp, Zea mays
tcataactcctagtggcacttattgttatcttcagatgcctgaggggcttattcagcaaaataactgccaaagttcttcactcccaaattggtagaaatgtgctaacatatgtcgatgacatcatagtaaaaagcacaaaacaagagaaccatgttgtcgatttgcaagagacatttgccaatttcagacaagctggtcttaagttaaatccagaaaaatgtgtcttcagagtgaagaagggcaagtttctcggctgtttggtatcaacaaagggtattgaagctaacccaagcaaaatcgaagctatccttcggatggagccgccaaattcaaaaaagggg

SEQ ID NO: 71783 - DNA, 343 bp, Zea mays
  unsure (1)..(343): unsure at all n locations
ntgaagagttgactaaagaacatgaggtagcttacgtgctctcatgtttatttggtccaaaggtatgaaactatttcaattgagcaagataactctttattatgtgttgctcaattagtaaataggaataccttgcttaaggaccaagtagaaaggctaaaaattgaaaatctagtttttcaagaaaaacctgatatgcttctatgttctcatgaaaatcttatggatgatcatatcatgctaaacattgctcatgaggttgtgatagaaaacttaaaatctcaacaacctcacgcacatgtagtcaaattgaaactatattgccatgtgttaatgcttgttg

SEQ ID NO: 71784 - DNA, 334 bp, Zea mays
tatatcataattgttccttcttcacaaccttttgaagatattgtgagaaatcgagaagctactggaaggattggaaaatgggctgcagagctcaatgagttttgtattgattatgttcatagatcttcgattcagtctcaagcgttggcagacttcattgttgactggacgccaggggctcaggaggaagacacaaataaagatgctgaagcatggacagtgttttgcgatgggtcttggggaaccttcggagcaggagcagctgctgtgttggtttcaccttctaaagttaaaacctgttatgcggcaagactcaatttcagttgcacaaata

SEQ ID NO: 71785 - DNA, 336 bp, Zea mays
tctaaagggagaacacattttatgactaacttatgttcattttgagaaagacaggatttgtagcgcatgccaagccgggaagctagttggcactcatcatccccacaagaatatcatgactagtgacaggccactggagctcctacacatggacctattcggcccgatagcttacataagcatcggcgggagtaagtactgtctagttattgtggatgattattctcgcttcacttgggtgttctttttgcaagaaaaatctcatacccaagagaccttaaagggattcttgagacgggctcaaaatgagttcggcttaaggatcaagaaaattag

SEQ ID NO: 71786 - DNA, 334 bp, Zea mays
ttacatgatgaggatcaatatcagtaaatgtccttagcatgaggcgcacgacatcatgatctgtccatcttgtactcccgtaacttcagatcttgttcactagggtcttgagcccgttgtacgtgtcagttggttcctcacctctattcatggtgaacctcaccagctcactttccaccaactccatcttggtgatcattgtggtgttgtttccctcatgagcgattttgagggtgtcccatatctccttggcattgtccaagccactaactttgttatattcatccctgcatagagatgctaaaagcatagtagtggcctgcgcatttttatg

SEQ ID NO: 71787 - DNA, 342 bp, Zea mays
tctaaagggagaacacgtaataggtctaacttatgttacttttttaaaagatagacctagagatgtccaataagcatgaggcccgcgagcccggcacgaagcccgttgtttgagcccggtccgagcccggtacggcccggttctatgcgggcccgggctggcccggcacgaataagcgggccgggctcggacaagaaactaggcacggtgggctagcccggcacggcccgtttagctctaagcccgttaagcccgctttttttatactaaaacgtgcttaccggcccgcatagccagcttttcggtccgttttattctggctaaacaggccggcccagacca

SEQ ID NO: 71788 - DNA, 347 bp, Zea mays
tcaaaaggtgacatcttcagactagcctgattactattattatatgataactcagcatatggtaaacttttatcccaacttcctccatgctgaagggcacaagctctcacatatcttccaatacttgatttgtcctttcagtctgtccatcagtctgagggtgataagtcatactaaaattcaactttgtattcatattctcatgaaagcttctccagaatcttgaggtaaactgtgaacctcgatcagacatgatcttctttggtaccccatgtgaacacacaatccgagccatatataattctgccagtcgagaacctttataagtagtcttgacaggaatgaag

SEQ ID NO: 71789 - DNA, 344 bp, Zea mays
tgcaatcttcgagctttttttgtagccctattgttggccaccgttaggaagctctttgatgtttgcactggttatctaagactcgtttttttcttcttaatataatgatactgatacgtaattatgccgtgttctcgagaaaaaaagtgagtggaatgtgtttctaaaccttcagaatgtgcatgtaagtgatagaggttgtgggctcatgctcattggcacgtccggtgggaccactacaacaaacttttgcaatggcggaaggggatgatgatccaaacgcggtaattccagtggccatagagcagttgaccgaaaaaccaccgagaccatcggcaaagcct

SEQ ID NO: 71790 - DNA, 344 bp, Zea mays
  unsure (1)..(344): unsure at all n locations
tgtggaactttgtaaaggcctcgtagtgtttctttgtctcgcctcctcggtagaggtgtatgggattggccgtctcttggaaaatgggtaacatgacttgtgggtaaagatgcgcaacctctgcagagtgtaaaactggtatactatccgtgctcacggtcatgagcagctcggacactcacatgattaatttatggaactaaattcaatttttcatatgcattgcatcgcaggtgatggtgttacttttgttctactacttaattgngtaggtatctacttatacttaataactgctaataaaattttgaccaactttaaaagcaatgcttagctcttaccat

SEQ ID NO: 71791 - DNA, 336 bp, Zea mays
acggtgaagggattcaaggttttttccttcttttggagaaggacctgagttaagaccagcctgagggcttccgcaaagataccaatgacttggtacaaggttccaatcacattaaagaggatctcaccataagatgaaactacaacaccgacactgaccaataccatgttcaaaaaaaggggccatcttaatttgtcagtgccacagaaaacagccattataaatgttgctacaggcactgcgttttaaagaaactcaagtcagtaatctattctataaactcatccaaggatctttgtaaaggaacatatagggagtagcatgcggacgcactca

SEQ ID NO: 71792 - DNA, 341 bp, Zea mays
taccacataattgttccttcttcacaatctttgaaagatattatgagaaaccgagaagctactggaaggattggaaaatgggctgcacagctcaatgaattttgtattgattatgtccatagatcttcgattcagtcccaagcgttggaagaaacgaataaagatgccgaagcatggacagtgttttgcgatgggtcttggggaaccttcggagcaggagcagctgctgtgttggtttcaccttccaaagttaaaacttgttatgcggcaaaacttgatttcagttgtacaaacaatattgctgaatacgaagctctgctcttggctcttcggaagttaaa

SEQ ID NO: 71793 - DNA, 340 bp, Zea mays
tgttgaggcacttccagaataatacattgatacctttcgtgtagcaacgttgtatttacggagacttaagatataattttctctaagtatgaatatgatcattcttatttgccaaatttgttagcatcgattgaagcctcaactaatccagacttgatcttactggtaataaatagaactgaaatagtataaaattcctggttaaatgtatggtatagtaggcatgcaatcatcttatataatctatctctattgtatctcaaaatgcttctttcactcctttgaaatttatgtacgggttatcttttctgcagaactagatgaaagtgaaggtgcttct

SEQ ID NO: 71794 - DNA, 343 bp, Zea mays
tgcctcggcttattctttccctaggccccatttaagtgagagcctctagcattgggtctatcctttttgtatatttattagatggctattaatcttctgaaccctgtagtcaacggcaactgctttctgtgcaatagattagtatattacccgatagcagttactactgtacaaagtacaaaccaactcctgaattcattctgcaggatttttgcaaagaccctacaatattatgtgattcgtatgttcaaaagagttcttatttcaacaccagctctactcccagcttttcgagaggaaggtgtatgggacctgttattctcagggaattttttctactttg

SEQ ID NO: 71795 - DNA, 332 bp, Zea mays
ttgtcttttgtgtatggacgttgtgcggttttaggctagggacagggagttgtagcgtcaccaaggtgccagtgtcagaatgcctggtcccgaggttgagctgcgccaaaaccgtgtcaaatgaatttggtttgagttcaaactttcccagaatgtgttcaaggtaatttggcacgactttgatatttggatcttctggctttgagtttggaaaagcagagaacacagatgatctttgagaagaggtctgaaattcagaaattcagaaatctgaatttctctaagggttcatagatcaagggctgatttggggatttagttgagttattttg

SEQ ID NO: 71796 - DNA, 334 bp, Zea mays
ttaccaaatggacgtgaatagtgccttcctttattgaccaatcaaggaaaaagtctactggaacaccccaggtgttactcaaggtggccatcccaaggttaccccttttacccattatcacataaagactgaattgggcaaagtataccaaacttggaattctaaggtctaagcaagtgtaatccaccttggatgtcatgccctaacttatcatgcacatctaagtggggatctcccaaaaccctataacaaaccccccccatatgcaataataaccctaatagaagccatgatcaaaagatcatgtaaacaccatgatcatggtttgggccaa

SEQ ID NO: 71797 - DNA, 330 bp, Zea mays
tctaaagggagaacacgtgtattgtttgactaacgtgcatttcgaaaaagatagaccttgtgcagcttgtcaagcaggtaaacaagtgggaggagcacatcacagcaagaacgtgatgaccacttcaagacccctggagctgctgcatatggacctcttcggacctgtcgcctatctgagcataggaggaagtaagtatggtttagttattgttgatgacttttcccgcttcacttgggtgttctttttgcaggaaaaatccgaaacccaagggactctcaaacgcttcctcaggagagctcaaaatgagtttgagctcaaagtgaaaaa

SEQ ID NO: 71798 - DNA, 412 bp, Zea mays
  unsure (1)..(412): unsure at all n locations
accttcngcgtcacgtacgggcagcttcagccgaagctgtctctttctgcaggaccttcggcgacgaagcagtggtcccaacaggaagttattggcctctcggaattngcttatttggtgtagtgtgcaccggattcnggctagttagctggccaaacaagccactctcggtttggcgaggacttcgccggctataattcaccggactgtccggtccggtgtattagccctcgcgttgcgacaacggtcaactgtgcaatcggcgccagccacgtcagctcgaccaatggtcaccatgcttangggtgggcatttaaaaccgaaacctaatccgaacccgaaccgaacccgaatagaccgaattgcngtctattcgggntttgggttcgggntcngtcctatatgtgctata

SEQ ID NO: 71799 - DNA, 392 bp, Zea mays
  unsure (1)..(392): unsure at all n locations
gctgggaacacgctcaatcgcacgcgaagcaagacaagaggtcaatcttctacatnttatgcatagaacatacaccatgtcaatgaaacataataaanacatgcaatacgaaatagagctcgctactaatatggtgacgcctaagaagtgagtgaattatgacttctaanactttctctatactangccacaattaaatccctagagcanaacctatgcagataaacgatctataatgtgcaaatatgttatgtctaagtgttgctatgtctacctcaatggactaagtttcaatcctaaacaatctaattataaagacaagagtaatatctacatgcttaatatacatgtgggaaggtaagagcaatgtagagatgcaatctctcgtggat

SEQ ID NO: 71800 - DNA, 330 bp, Zea mays
  unsure (1)..(330): unsure at all n locations
gcttcataccagctgtggcggaactgcgcgaaaatattcaacttaagtgccttaatcccgtcttctaggctagaccacacttacatgggaataacccgtcaatctctcggatctagtccgacaaggccactgatangatcaagtaccacaatctcactcgatggtgagtcacagagcaaatacaataaagcataaaaccatacattaaggagtattanacttattacatgatcatctgagtcttatcacacgtagtcatcattggtcgaagtgcagcgtaatataactaacgataatataacagagagatggagaagcctgtctcatcac

SEQ ID NO: 71801 - DNA, 431 bp, Zea mays
  unsure (1)..(431): unsure at all n locations
agccaatatggcccacaccanatggacttcagagaacagtccgaagctcgcacagtcaacagtactgtgccagagtcgaagcacatctattgacaaatatcctaccttgatagcagtctttntcattcagttntattntccgtgtaataaaggacattnttcanatttcatgtaatagtttcgttctttgccacaaggaaaacatattttcttcacaggctctagtcgttgaagcttaaagatntgcgataacaagaaggaccttcgaattatcaaanaattcttcgaagcaacananagtcgttctaaggaacgcagagtaagttttgccgaaatcacaaaagccgttccatagggagcgcagtgtaagtttctgctcanagtcgttcanagggaatgagagctacagcgaaagtcatgctgatccgcta

SEQ ID NO: 71802 - DNA, 357 bp, Zea mays
  unsure (1)..(357): unsure at all n locations
ctggatgagaagtggtcacccaagttttgtngatgaagcaccagaagaccaatcaaggaaggaatccatgtggaagttcgcaagagaaaggtttgcgtgttggcatcgatgcttcttcaataagctagctgccaagcgaaacctagaagcctgaagatgatcttgagtagccagaatcagtgtttgcaatcggcaaccggatgctcctganagggccagatttgttgaagttccatctcctcgaagagttgcanagtgaagatatgtagctgaagtaaagctatacccataacccttctaagccgaatctcgaggacgagaatcctttaagtggggtagagttgagcatccccaaaa

SEQ ID NO: 71803 - DNA, 345 bp, Zea mays
acacaacttaactatcacacattggctgggcctagcgtcatgtgcactagccatcacccaagttactcacgggcttgacactttccttttataatctaactaaacattctattccgcggcggcattaagcgaactgacatgggctatgtttgcataacaaatgtcagcgagttatcagccgctcctcctcgtgataaagtatgtctcgcgagctcgcagcgtcccctgcttaaagccattccctactacaggctaggcctgaaagaattaaattcaaatacatatcggcagaatacctgttgaacttaaacaccttatttgtggaacctctgcacaaacctatgt

SEQ ID NO: 71804 - DNA, 469 bp, Zea mays
  unsure (1)..(469): unsure at all n locations
gcaacttgtgctctgttaccattgntcttcacggagttctntctatcattganattctatantttaacattntaatgaattgttcttatgcagtatctcgaatcttgggatgtaccctgtggaccatttctgtgcaatcattaaccctccacaggtccnctatgtgcacatgtntgcttccctagtaatgggacccttctaatatatatactgacgttcctattcttcatttctttctatcagtctggcattctcgcagtgggtagaggaaacaaggttgttgaacctgttgtggacagcgatggatatatctagaccactgcgctctgttatacaacgatacactntctttttaactcgtgtattgtcaggaaccagaagctgtgcagtacaagatgacctgcactattgtgacatcggtattgatggcaagagangtggcatccttcttgcttgttgcttatatatt

SEQ ID NO: 71805 - DNA, 218 bp, Zea mays
  unsure (1)..(218): unsure at all n locations
aatcaccaacctgacacacgagacagacattatgctgtgaaagacaggccaactctgtaatatacatcatggtggctatcttggactngtaaaatatctatgtaatctcgctctccttggatctgtgtccaattaacaataacaaagatgaagagtcatcaatgattctaagcatggcataatagaaaggcatggagaagcgtacatgtctctgtcta

SEQ ID NO: 71806 - DNA, 391 bp, Zea mays
  unsure (1)..(391): unsure at all n locations
tcacatctctggactaactcggctgcatcactctntgntgntggccaatagaaaccagacctaaagactntcccaaccagagttctggatgctgcgtgtattccacactgtccggcatgaatctcatctaatacatgtctcccagtaaccgaggaaatgcacttcatgaggactcctgttgcaccccttctatacagtgcgccgcctatgaaggtgtagtgggccgactgtcttgcgatgcgttctgctgcagccttatcatctggntcttcctcattctttatatacctgatgataggctctctccaaccatcagagtctgactntggctgactcannagtgtgcactcttctacctgatctganggaatagcttgggcgtgacacttct

SEQ ID NO: 71807 - DNA, 329 bp, Zea mays
  unsure (1)..(329): unsure at all n locations
tgttatcttgattattgcttccctggtccaagcanaggtcataataggaatagcgctttgaagtcaccttccgctgcgccgaagaagaaaaaggtgaaagttntggcaaaatagccaaaatcttactatgaagagagagcagcagtgctggctacgctcgtgacttctgtcaagggaagtactattgcggccgcaccagctgatgagccgaaggttgaatcaccaaaggttcaattgctcgtatctacaaaggtaatggttgatgtattctctgtttggttttatttaatggatcanttatatctntatgatagactntagtcttcaat

SEQ ID NO: 71808 - DNA, 422 bp, Zea mays
  unsure (1)..(422): unsure at all n locations
tcatgaatggtaccttcngcgtcacgtacaagcagcttcagacgaagctgtctctttctgcaagaccttccgcgacgaagcatggtccanacaatatgtaactatattatctaaattaanatgattctccacacttgattgttgtgaaattcttgtttgtgcaacaaacgagtcattcatattggtactgtcatgaccatctattgtggaaccccttaaaagtagttgaaagaaaatctccttatttatctaaataaagaagagcaataatcatcaactacttatctaatcttcaattcacaatcaaaagtgaatattctaatctaatccaaatattcaatctcatactcaatctgtcaaacgaatggaaacaatatccactatatcgaagtcctacgtagcttgtcgaatgtcgatctcct

SEQ ID NO: 71809 - DNA, 89 bp, Zea mays
ctgtctcaccaacaacgtttaataagaaggaaatggtcacatacaatatgcaatggaacaaagggatccccttggaatttcaaaccacc

SEQ ID NO: 71810 - DNA, 359 bp, Zea mays
  unsure (1)..(359): unsure at all n locations
tctccttgaaatccttaagggtaaatgctngggatatatataacatgctntcataagtgcataanatgtcatgagcatcacacttatactatgacacaatgcactttacactctttatgatatagacatggtctcattaacctaaatatgtgcacttggcattttagaccaaagatttgtttcctctctatacacatatttatggggagcaatctatattgtatagaattgactaagcttaattgacatatctnttttaatcatgtctctttcctttggtacatttgcatatttcatatctctcattgtgtgccaaggctaagactaatatgtttcatgagcatctcatgtataaagtc

SEQ ID NO: 71811 - DNA, 480 bp, Zea mays
  unsure (1)..(480): unsure at all n locations
gcttctcttattctngatgaaacacagccccttgatcacttcatcanaacgaatgttccaactccgagatgcttgcttcaacccataaatggatatctgaagtttgcatatctttccagcattgatcggatcgacanaaccctcgggctgtatcatatacacgtcctcatctaggtttccattaaggaaagcntgtttgacatccatctgccaaatctcataatcgaaatatgcggcaatagctagaatgatccgaatagatntaagcatcgctactggcgagaatgtctcgtcatagtcaactccttgaacttgtcgaanaccctttgcaacaagtcgagccttatagatgtgaacatttccatccatgtctntcttcttcttatagatccatttgcattctatangtctaacaccatcanngcggtcaaccaagttccaaactttgatttctccatggaatctatctcggatctcatg

SEQ ID NO: 71812 - DNA, 277 bp, Zea mays
  unsure (1)..(277): unsure at all n locations
tgtgcataatagcaactctcttcccatggcagatggcttcggatagaaccacgcctaccgcctccgggattggagcaagacttcctctatgagctgacggagaggctggcggagaagggggtgagacccacctccccgcacctccagaactaccactagacctagcccanattctggccaatcaaaccagactcattgaagtcctcactcgaagcctggagaaccagcgcccaggcggtggaaggccccaggacaggatggtgagaatcctgagact

SEQ ID NO: 71813 - DNA, 394 bp, Zea mays
  unsure (1)..(394): unsure at all n locations
atataagacgaagcatattatatccactctaacganaccaaacatgaccattgatagttgagatggtcatatatnttcaactaattagtaaaataacggatcataaccgcatactcgccggaatggtccttattaaactagactggcatggcatgataacatgtcactgtacgcgtgacggtattcactcgacagcgccgtggcattggcaaacgccatcgagcagcgtgtagtacagctgctgctgctgctgctacactgacggtctgatcccgtgatccgatccatacagtgccgtactcagaacatngtacaatacaagagaaaggaaataantccatgtagaaacacacgtatgggntatctgcatgagagcttctattggtatctctct

SEQ ID NO: 71814 - DNA, 469 bp, Zea mays
gagctccgcttggtgcaatgccgtcgtccgtggcgagctcttcgtcgatggcaaccaatctatatgagtggacgaggaatggcgagtgatcgcggagaacagactggcgtgatggcgtgttcgtacgaatgaggcaggcgctgctatgggcttgctcacgcgcggtgactatgcgcggcgcagagccgagcgcggcgtccacgctatctggcgcgcgccaacctggcggctgcaatctgcccgagctgctggcggtagggacagaacgggagcacgaagcgtcgcctgcttagcctaatgttcctcttacactcaacttgtgagcgtaggggtactgtgattgatacagctcaacttgttgcacctatgcaacaggaactgtgctacatgcaatatgcaacaatcaactcgtacgctattggggcctagatattacatttgtatgacgatgataaatatttgtcactac

SEQ ID NO: 71815 - DNA, 452 bp, Zea mays
  unsure (1)..(452): unsure at all n locations
ctcaagctntgctagtggaagatngcatcatctctatataacgccatgaggatgtgtctatgtagtagtgcggcacctgacacatctgtaatatcaataatatattcataagcacgtcaaagtctccttgatacagaaacacatcaatatctctgatgtatatttccacacaagtcggctgagaagtgaaaccagtctccaatgtcatccagatagtggtgctttaatatctctgcatgcatattgcactcgagcctgaatcatgtcattacaagagcatatctcataaacatgttctacatctgatatggtgcacaacctgccgacgtgtgacattcgacatcgatatattatcgcacatgttatgtgtataccattgtgatctcaacgatagggttggattgctcatgcctatctgcaaatgacactgcatgcttatctactcgctacta

SEQ ID NO: 71816 - DNA, 413 bp, Zea mays
  unsure (1)..(413): unsure at all n locations
ctcaagctgcagtagatatcctgagctctgccacaagaatagtctctatctcaagagaagaataccatgtntgngccacattccgaactgtcatgacgaaagaattagccatgacagctgcattgcctccatatgaagatatggttgcttcataactcatcananactgcttcggatccgaatgcccatcatacatanggagctgaggtggcttgtatgatgaaggccatgggatagcctgcagttctgctgccaagggagaagcatcatcaaaggtataggtatcatgagtaanatcatcataccatccatcctcattgaatatgccttctcgattaagctccctgtgttgaggcctttgatcttgttcgtcttgagaaagatggcgtacttcttcagtggcttcgcaatct

SEQ ID NO: 71817 - DNA, 376 bp, Zea mays
  unsure (1)..(376): unsure at all n locations
ttctgatgtcagaattctgnattcagaccttgagccacagatcagggatgttcaccttgatctctaactcgaatcctaatggcctcattgacacaattgtgtctaactaacctctctgtcgtgtgccagaagatggcattgtgacgcgagctctatacacgacaaaaccttggatttgcctcaggtttgggcagggagacagaccagatttcctggctccatatctctgcaaccagtatgccaaatcctatgacctccacacaagaatggtagcttgtatggaggagaagaggntntgtgcactgaccaatgcgagagcatgctcggatgagcgaccacacgcgccagaacttggcataacgcaggtcacacgtgt

SEQ ID NO: 71818 - DNA, 512 bp, Zea mays
  unsure (1)..(512): unsure at all n locations
tgaatgcaacgggtttagcttcngatgagtcgccaagctcngttgatttcctcgagccttctatcatgcactcaaaacttacaaaatgcccgataacttccttcggggtcattntagtatatctaggattaccacgaatcaattgaacttgagtgggatttagaaaaatgagagatcttaaaataacatntaccacttcgtggtcgtcccacttcttgctcccgaggttgcgcacttggttaccanagtctttgagccggtgacatgtgttgtggctcctcctttgtgaaccggaaccaccgagctcccctcgatcgtttccgcttgtgatcttgggagctcgtctcctcgtgcggggtntgagacatccanacctcttggcgtcttcaaccttgtacttgtatattctcttactagtgagcangagattgtgtgctnggagtgaatgctcgattggcactcatctatatagctgatcctatgcngacctgccacaactacacatcatatac

SEQ ID NO: 71819 - DNA, 271 bp, Zea mays
  unsure (1)..(271): unsure at all n locations
ctctgtccatggtgaccacgcaattcatggacanatcatagtgttcctgtcgatctactctggtttagagcaattggtcgggccgatgagctttaagaacacacacgaatgctataacaagagcgaggggaacacgatcggacctgtggagagctggccacggtgagttcacttctgcggtgttcttgaccgatttggtgaagatcccacattggagttctctggtgactaatcggaggcacgggtgggtgcgttgagtgcttgactacat

SEQ ID NO: 71820 - DNA, 367 bp, Zea mays
  unsure (1)..(367): unsure at all n locations
tggagctcacagatctttttctcaataacatccgattgctcctttattctgctctccanattatcaattataacttcgtgcttcttgtcttcnaaatcttgctgcattntcaaggctttgctcaacagcatactctgcacgaanacaatcttcgtcagatatattgtcattattagaaacaatagaagttaagggaagagtagttcaccctcgaaattggaataacataaactaccaacgatatgttgtcgtcggtagcggctgatgtccgtttctagcttctgatagccgatactctctgacagagtaccgataattntggccccggtctgatctcgaatgcaatctaaattttcatcatcaatgc

SEQ ID NO: 71821 - DNA, 436 bp, Zea mays
  unsure (1)..(436): unsure at all n locations
acgtgaagagtgccttcctcaacggaccaatcaatgaagatgtctatgttgagcaaccctccggctttgaagatagtgagtaccctaaccatgtntataaactctctaaggcgctntatgggctcaagcaagccccaagagcatggtatgaatgcctaagagaattccttatcactaatggcttcaaagtcggaaaggccgatcctactntatttactaanactctaaacaatgatttgtttgtatgccaaatntatgtngatgatattatatttgggtctactaacgaatctacttgtgaggaatttagtaggatcatgacacanaaattcgagatgtcaatgatggnggagttaaagtacttcttatgaattcaagtgaagcaactccaagagggcaccttcattagccaaatgaagtatacacaagacattct

SEQ ID NO: 71822 - DNA, 296 bp, Zea mays
  unsure (1)..(296): unsure at all n locations
gctgtgagggagtcatgtgtatgactaactgatgtgtgttctgagatatatcgttcttgtgtatcatggtaggcagganagcangtgggaagttcttatcatagcatgaacatgatgacgacatctagaccactacaactcctacgtgtggatctcttcgggctcgttgcttatcttagccattggggaagtaagtatggtcttgtaatccgtgatgaatattcctacttcacttgggtggtcattttgcaagatganacccaaggaactttanagcgcttcctatcgagagctca

SEQ ID NO: 71823 - DNA, 426 bp, Zea mays
  unsure (1)..(426): unsure at all n locations
ggaacacattgttcaattggtagatgatcaatagtagttccttccaagtggcattctttcaattggtaataatatattctatggaaaggaatgtcaatatgaaggctaacattctctctggcttacatttgtnaattaatgcatatcgtgaattcactgcttcatgtgcattaacttaataggaagttaatttatgcctttacgcctcataaatgatgatgtgtttgccattcatatatagatatcatcattcattaaatacttccttgtactactaatacctcttttcatatgttntaatcgactagtttataggaatagagataacacagaacgaagtctcacaaatgatgaaagaagatactaatgtgcaccaccacagatagtaagaattgcaaattgggataatacatggtcattctatat

SEQ ID NO: 71824 - DNA, 462 bp, Zea mays
  unsure (1)..(462): unsure at all n locations
ctcagcttacggctactgcgagctgccgagcactggtgggctggagggtggctggagtgngctggccacngcggccgaagctctggcggcaatggcgggcggaaataagctcgccggagctaatgaacggtggctggccggtgagggtgagtgcggngcgaantagggcgccgcctgggaggctntatangcactgcgcggtgcacgggcggtcgtggaccggcgagtgcgcgcgggcgtgcactgngaatgcgcggtgcgcgaacgggcgtgaaccatgggtgtcagccgcggtcgaacacgtgttcccgttgcctctgcccctgttcaagcgccgattgggagcaaatcttcgcgaatatgggcaagatcactgcanggggattgttcaccggaccaagctttgtctttgtgtatggacgacgtgcggtttatgctanggacanggagttgagagtcact

SEQ ID NO: 71825 - DNA, 297 bp, Zea mays
ctcctgcttcttcttctccgttgccttgaatgcaacgggttgggcttctgatgggtcgccaagcctcgtgattatcctcgagccttctatcatgcactcaaaacttacaaaatgcccgataacttcctcgtgggtcattttagtatatctaggattaccacgaatcaattgaacttgagtgggattaagaaaaatgagagatcttaatataacatttaccacttcgtggtcataccacttcttgctcccgaggttgcgcaacttggtcaccaaagtcttgagccggatgtacatgtg

SEQ ID NO: 71826 - DNA, 217 bp, Zea mays
  unsure (1)..(217): unsure at all n locations
gaaatgaggctacattttataccctgccggctatcccgagcacacaattatgagaattcattctatgaagtctcactctggctctcatcatggntttatgtataagagtgagacatctagctctatgagatcaacccatgttaaattgcctaacaagaaatctcctactgcatcaaatgaacctaatgtgtcatttaagattattgatgcttcatat

SEQ ID NO: 71827 - DNA, 360 bp, Zea mays
  unsure (1)..(360): unsure at all n locations
ctcagcttagctgatagttagagctaaatgagaggggaaacatatacttctatcctatanatatacttgaacgattattgaatctgggagatgtgtatatctcgattccaatagaagaacaggatcagaagagaaatgcaccgactagacctgcgtaaagtgatctcgtgttcaaattanaacaagtacgtgtatatttctagcagtacaagtgctcgtgtaaggctgcttgccaccaactctactaccatcgtggtgcagagatggtggttcgttcgtccttaaagaagaagaagattggcttcattcggacgtaaccacaaatctgttcattctttcttttcactggatcttntctca

SEQ ID NO: 71828 - DNA, 474 bp, Zea mays
  unsure (1)..(474): unsure at all n locations
ctcagctctaaggagagccatttatgactaccaggttcatttgatatatacagggttgtagcgcatgccaagcanganagcangttggagcccatcatccacacaagaacatcatgacgacagataggccgctcgagctactccacatggatctattcgtgccgatagcttacataagcatcgacgggagtaagtactgtctagttattgtggatgagtattctcgcttcagttgggtgttctttntgcaggagaagtcacaaacccaagataccttanaaggattcttaagacgggctcanaatgagttcggattaaggataaaaaagataagaagcgacaatggggcggagttcaagaaatcacanatagaaggatntcttgaggatganggcatcaagcatgagttctcttctccctacacacctcaacaaaatggtgtagtggagaggaagaatagaactctactggata

SEQ ID NO: 71829 - DNA, 347 bp, Zea mays
  unsure (1)..(347): unsure at all n locations
agcagatagtgactcctaattttacggcatgaaccacagcagctagctccagatcatgagttgngtaatgctcctcatgtcggcgcaactgccttgaagcatatgcaattactcggccctcttgcattagcacacagccgagtccactgcctgatgcatcacaatatacatcataagggcttggtatgtccggttgagccaataccggagcagtggttaataatgtcttcaattgttcaaaagcttcatcacactctgaagaccaattgaacttaatatcattcttcaataaacttgtgattggcttcataagcttcgaatgatctggtatgaatctgcggtaatat

SEQ ID NO: 71830 - DNA, 480 bp, Zea mays
  unsure (1)..(480): unsure at all n locations
agagagagataatactatatgaatgtggtggcatggaatgcttgttctcggagaaggatgctagcagagtagcagtagcagttataagtagaacgttgtctgagatccaaaggccatgaatctgtactctgcagactgcangtcccgtctgtgccgcacacctgtggtattcttctctgattccctgngttgggtgctcgtccgtccattgaccagtcggcggtctttggtagacaactattatcaaccggcggagactggagggaactggacgtcactactcatggggactggaaagacccaatactacttgggctgtctaccgaaagcaacagtactagtacccgtccgcgcatctttgaagtcgtagacacattcaatcaaccatgacaacactgctgccgcgcggcctacctcaactgggcgcgagttatgctatcaaagctctttttcagaaaaaaaaaaaaaaaaaatgcctca

SEQ ID NO: 71831 - DNA, 312 bp, Zea mays
  unsure (1)..(312): unsure at all n locations
gatgtattcatagaaccttgctccgaatggctaganatgattgagactatgtgcaatgagaatttatgtaactntatgaagaagaaagaccaattaataactgctgccttcggcaaccgagaaatgaaggttgaacagagttatggatgctttgtgattcacactacagganaacagttaattcctgtcggtcaggaaccgacnggaataagcaaaataccgacgggaataagtaattcccgtcggttaggtcttattcccgtcggttgtcagccgccaggcgtcccttgtcggngatacgagtatacccgt

SEQ ID NO: 71832 - DNA, 465 bp, Zea mays
  unsure (1)..(465): unsure at all n locations
cagtttacgtaccataccactcctgttagagaaggcgcagtaactccccacaaggatatntccagcaatagtctgcctaaacacctcgaccccaagcacatctgcaatgaactcctcagtctcctgttgaattcattagcacaaagaatttagcttgatgtaatcgatgatgtgcagagtttcaggggctagcgacagaataaactcctcagtctcctgtaaatttaccttgtcaggtcanggtgcgtaagtcaacatggtcattgcaggctatgcaatngccaatggcagataacctctcatcaatgcgctgaaccaccacttgatcaggcatgcaattcctcagatgctgaagctctacanaagttccaaagcacatggaggaaaanatacatatcatttgtggaaaccangacctactgatacctatacagccccagtgacanggatagtaccactatcctc

SEQ ID NO: 71833 - DNA, 364 bp, Zea mays
  unsure (1)..(364): unsure at all n locations
taagctcgaatttactctatcaaccttcgccaaggccattatcctcaatggaataatgtntcatgcacgaaggacgttaacatntaacactntatgttgccttgttcttaattcatagcagntgaaaacaagtccccaacaaatgctaaactgcgcatcttaattaagttgtgcaggaaccaaacaacaacatatggatatacagcaagtcctaacctgttacatgaacaatctgtttttcttgaacgaatgtacatataattaagaacaagcatgcatgcatactcttagtttggacgacaacaaaccatgttttttccgcgccagaataaacgaacaaaccgtgtaccatgatatgaattta

SEQ ID NO: 71834 - DNA, 310 bp, Zea mays
  unsure (1)..(310): unsure at all n locations
acatttgtgtctaactcttattacttgcggtacgaaaatattntctaatgaaagctatttgttcgcagagcatgcttttgagcaaggcattaaaaatgcaacaagaattggaggataaaaggcaagaagttataattgataatntaataaacacaatataggagcaatctgctgccattgagaagaaagacttctagctacaaacagctgaatgtttattagtggatgctgaagcanaaatatcagaattcaattcgaagcttctttcccagtcagaaaaatttgaacaagagaaactgaagcttgatgc

SEQ ID NO: 71835 - DNA, 484 bp, Zea mays
  unsure (1)..(484): unsure at all n locations
ccaagtgctaaagttatcataataattagtagtttaaactttagccggtcctaaactntaacaccgtgaaaacaaagaggcccttactntatttggacattntcctgttgtcatttgatatgagtgcatgactattaagggcattaaacgttagtctcgtaacatcggacatttggatactagttataagtatcaaatntaagtctaattttaaaccaattacacatatgtgaactaacaggttgttcgcttcggataaagacagtgctcggactgctgagctataatccatagagacaaaacactatataaacaataggaatcgcttcggattatgaagttggttcttgtggaacaagaaaatctgaatcatcgcaatgaactctgtgtggacctactggccannaatgcctccggagtacttgctanggcatatatactccattngtgcgtgctgcagctggatcaaaagactctagaagta

SEQ ID NO: 71836 - DNA, 317 bp, Zea mays
  unsure (1)..(317): unsure at all n locations
caatagctggctcggtggcgcatcggctgcngtcgtgcangctgcgagcctaacacgacaatggcactattggcgcttctgggctaaataccaaatgaaccataaggccggcacgtgacgtgcatgaacttgngtcggctctgagtggacgcggatcgtccacatgtggcggccggactatccgcaatggcgcanagagatgtgctcctttctataggtgcgtgcaccatccgcgtgtaggtggtggatcagaccattcacgatggcgatgagaactctcgangtaaagtagatctaccttctgggaggaaccacat

SEQ ID NO: 71837 - DNA, 397 bp, Zea mays
  unsure (1)..(397): unsure at all n locations
acctttccgcaagaccgccagcgcgggcacgcgcgggcgctnntttcccctctgagctgngtcactgggctgaactcagcccagtactattcacgggttttctttttctttttcctcccgagttaaaacaattatagaaaatagtagagnaatgatgaaaatgtgaaaccaattntcctagggtcattattntccctagaatataataaaaatagttttgtgattttagaggaataagagatttaaagcatttaaatagttaaagtcttattctggattttagaacaagataataagtcaaaatgctcnagatttatatgagttcttatttattagaagcctggtaaaatgngtgattgacctgtngataccaacccaaacacccctgctttgactc

SEQ ID NO: 71838 - DNA, 362 bp, Zea mays
  unsure (1)..(362): unsure at all n locations
gtgaagagtgccttcctcaatggaccaatcaaggaagaggtctatgttgagcaacctcctggctntgaagatagtgagtaccctaaccatgtatacaaactctctaaggcgctntatgggctcaagcaagccccaagatcatggtatgaatgccttagagaattccttatcactaacggattcaaagtcggaaaagccgatcctacactnttcactaaaactcttataaatgacttgtntgtatgccaacattatgttgatgatattatatntgggtctactaacgagtctacatgtgaagaaattagtaggatcatgacacagaaattcgagatgtcaatgatgggggagttgaagtactt

SEQ ID NO: 71839 - DNA, 498 bp, Zea mays
  unsure (1)..(498): unsure at all n locations
atatacgaattgactcaatcctatctacgagtgcataggtntcaccgaaatccanaccttcgacttgngagtatcccttggccacaagtcgggctatgttccttgtcaccacaccatgctcatcttgtgtgttgcggaagacccattcggttcctaccaacatttggttaggacgtggaactaaatgccatacctcatttctagtgannagtgtgagctcctcttgcattgccaccacccaatccgaatcttgaagtgcttcctctaccctgtgtggctcaatagaggaaacanaagagtaatgttcacaanaatgtgcaacacgagatctagtagttacccccttatgaatgtcgccgaggaaggtgtcgacggcgtgatctcgttgaattgcttggtggactcttgagtgtggcgggccttgtcttcatcctgctttcttgacatntgcatctccctcgatcattgcatcatgctgaggtgctcatcttctcatct

SEQ ID NO: 71840 - DNA, 356 bp, Zea mays
  unsure (1)..(356): unsure at all n locations
cgccatgctgtatctatgatctattccctctcacacacaatgcaagctgaacacatgcatgtaatccatgcatggtggaaagtaaccataataatgtactctagctagcgacctttcaataattaaagaaccatatatatatacagagaagccacgtactgaactgcatggccccgtcgtacgcgcgtcgctgaacatctagtcagaaataacatgcatgcatggcaggctctgctggatgcatggctcttctcgactgtacgtacgttctanggatcgagagtagctagagccaccacgatcgacgacgtgaatngacgagctgtgctggccggacacgggccacctgttggatg

SEQ ID NO: 71841 - DNA, 554 bp, Zea mays
  unsure (1)..(554): unsure at all n locations
cataaaagactacttcttctatctgccgaagcttttctttnntgacanaacatanaagactacttcttctttctgccgaagcaaccacttagtaacacagatgccatgaatgaatgcttatgaatgcaaatgctatgatgtaatgtgttgtgcgaatgaatgtccaaaacatataaccgaagccacactcaaccattatntccttggaatcaaccacacatcagctctgcattcccttaggaacgactntggagcttcctcgtctnttacttagacggtataaactctgcattcccttangaacgtctntggagtntcttcgccttttacttaggcggtataagctctgcattcccttaggaacgtctntggagcttcttcgtctnntacttagacggtataaactctgcattcccttaggaacgtctntggagtttctttcgctttacttangggtaccagcgttgactttcgtgaagctctgatcncttaggacgctttgagctctcgcnttacttttagttctgactcatgtgcgtctcactgtacattac

SEQ ID NO: 71842 - DNA, 422 bp, Zea mays
  unsure (1)..(422): unsure at all n locations
actactgaattactaatatgctacaatgacgattgtttgccttggtattcagaatgatacccataatggatatgaganatctatgattcggacatttcanatagttcatgactattagtaattaattgtcatttccaactagttattggatggaatcaggtagtttgcacgctcatgactnttgattaactacatgtactgcacgtacaagttctcctatggttntagtaagtgggaatccatcanagaattcccatgcatacattgtgatgttntcccaatctcgccaccgtagcgtacaagtatgggcacacagaaagctangtatctatgtgagaattcattatccgccgatcattaagtatttaanatctctttgtgagaatctatntatgacccatacgctaacttgaatcatgatc

SEQ ID NO: 71843 - DNA, 383 bp, Zea mays
gcttattcttatcttacatacagtgctggacatcctcaaggcgaagtgctcgtgctatataatcccttatccagcaactcttgcaatagcttcttcaattctgccaactcagcgggtggcattcggtatggcctcttggaaatatgggccgttcccggttgcaacttgatggcgaattcaatatcccggtctggtggcattcctggcaattcatcatggaagacatctgcacactcacagaccactgggatcttcttcagaggtaactccgtcatagagaaagcacatgactgagtagaaccttgactatgcagaattaatgtgaagttcccgcagaacggagaactaacttccacggtactgctggctacatcaagcacaac

SEQ ID NO: 71844 - DNA, 372 bp, Zea mays
  unsure (1)..(372): unsure at all n locations
acagtggatgcacacaacatatgacaggcaacccacggatgttcacctcacttgatgagaatgttgatggacaagataaaatcacttttggagacaattcanaaggaaaagtgcaaggacttggcaaggtggcaatttcaaatgaattatcaatatcaaatgttctcttggttgcacctttgagcttcaatttattatcagtgggtcaactctatgatcttggacttcaatgcttattccaacagaggttattgtatcaaagatggatgatgaatcaatggtgttcaagggatntagatacaacaacctctacttagtggattcacttagaagatgtgactaagaacttgctcttcacaaagctcacttgat

SEQ ID NO: 71845 - DNA, 369 bp, Zea mays
  unsure (1)..(369): unsure at all n locations
tctgcaatacttactcttatcttctgccttanattatctcttcggagaagagatagttgaggggagaagggttttatcttctaacttgtgttgccttggttttgatatcacatagtaatcaagagcaagtgaccaatattggcgcccacctccagtgaactcactacaaccacaagaagcctcatcatgtcgccaaagaagacagcgacaatcggtgttgtcctcacgacgttgaacaccaaccaaggagacgaaactctccttcgagaggtcatgctgcagatgaggaaagctatcagccctgacccctangatgatgaactcgatcatgagatcgacaatctcgagctaatccatcaacaagtagag

SEQ ID NO: 71846 - DNA, 388 bp, Zea mays
  unsure (1)..(388): unsure at all n locations
tatgtatggattgctnttgagtcagtccgagttccttctgaccttctggcagcttcctgacttacatgaatagcgatgggtccttgatccgaaggtatcttcatgcatagataagcacggtgaagaattgcttcaaaagcattgagggtgccacgaccaataattgcattgtaagggtattccatgtcaacaatgtcaaacacaacttgctcagttctagtgttgttgatgaacccgaaggtcactgacatggtgatcttgcccagtgctacaatatgtctttctccgaagccacagagaggatgtgtagcatcatgaatcttatcttctggctctngcatttgtctgaaggccttagcaaatatgatatcagctgcactgcctgtgt

SEQ ID NO: 71847 - DNA, 366 bp, Zea mays
  unsure (1)..(366): unsure at all n locations
actcagctgctcgccgagggtcttcgatatcatgctacggagctttgtcttatccatggttaacatgctcacaacccgacttctgcaanatagctgcaattcccctcgcaccagagaacgcacagacgtccccacggtcactcataatntcctcaaaagcttcggcttcgctgctgatccactcaattgngccctcacgatcgcctcttatgaaattgtcttcactcgagtacgcgcccacgttggtgaagctagtatntatctttntgacgcattctatagatntctcacaacatctgtcttttgatgagcgaagctcttcaactggtgtttcaaaataatatatacagtaatcactggcatctc

SEQ ID NO: 71848 - DNA, 278 bp, Zea mays
  unsure (1)..(278): unsure at all n locations
gctggacagtgtntgcgatggttctttgggagccttcggtgcaagagcatctgctgtcctagtggcaccttcaaaagtaaaacatgttatacagtcaaactggatttcagtngcacacataatattgctgagtacgaagcactnttattgtggcttcggaagctaatggcaatgggaataagaatggccatcctanagactgattatcaagttattgctggccatgtggacaaaagcagtaaggcacgagatccgaagcttgaaagatatctggatac

SEQ ID NO: 71849 - DNA, 376 bp, Zea mays
  unsure (1)..(376): unsure at all n locations
tctgtatgccgaagcgatatcatatangctagnggatcacatctctaatatcacctctcttatccaagntgaatttcatataanaccacttcttcatccatgagcccagtcatttttgtcagaatgttgggacagggtgcatggcatctgaatggtacatgaaggtataacaaccaaagttattatggtaccgctctttcccagttgctcttgttngatacaggagctcgtgaatattgcaaaagcagtctgcatctagttctaatacttgactcctcactacccaaataaacaccccaaccttaattaaagcaccagaggtatgtngatgaagatatatntcanatcttntaaggacctcaaccaacatcttatg

SEQ ID NO: 71850 - DNA, 487 bp, Zea mays
  unsure (1)..(487): unsure at all n locations
ttatggtctctatnggtcaaaattggcttcttgtggggagaagtgtttattatggganatanngggagtttttganatctnntgatcaatctctttggaatgactctctntatgcctcaacatgtgtgtttgacatagaaatagaggtttgagtttgatttgcaaaaaaaaaaaaacaaaccaagtggtggcaaaggatgatccatatatgccanaattgaatcanaaccaattttgagttttattnggagtgattntgcacttgttctatctactntatgttgtgttggcataaatcaccaaaaagggggagattgaaagggaaatgtgcccttgngccatttctaagtantttggtgattgagtgacaacacaagtgcttaaatgtaaatcaatggcccatggtgaacaaagtgcanatctgcagcaaanggtatgttctaagtcttagtacatttgttntgtgtactaatatattnatctaagt

SEQ ID NO: 71851 - DNA, 370 bp, Zea mays
  unsure (1)..(370): unsure at all n locations
actcattattgtatgtgatattntatgcatgtctaatctactgattctcttgtatggtgtaatggtggtttcctaatctcaatggatggatatatgtatgcttgcaatcgcttagagaacgatccgattggagagcccgaagaactcgcatgagaagcccctgagcagcagtctggtggtggaggcaagtgtcctttgacctatccctgtgctattcattctntaattcacctcccgcattacacnatcatacttaaggatngactagctcttgtatccatgtccttgttacctatntggtcggattattattattagctctatgctattgctcanactctaatcaatgaacatgatgagatcgatatga

SEQ ID NO: 71852 - DNA, 359 bp, Zea mays
  unsure (1)..(359): unsure at all n locations
tgttcttaattcagagcatttaagaacaagctcccaacattggcgcccacctncggtgaactcacttccaccttttgagctgatggcttcgntcaacgatcaagctggagctgcttcngacccgaagctggtgctcccgaatacaggtggttcgtcctcagagccagccaacaagaaacagaagaatgaagcacagagaatggtacagcatgttggggtgcaaggacccttcatcaagtcaagatggtctcacatncctattaccttcttccaagaggatcttcaactcaagggatacccacacaatgatgccatgggtatctcttgtgtatcaaanggattctgtccacaatgtcttg

SEQ ID NO: 71853 - DNA, 329 bp, Zea mays
  unsure (1)..(329): unsure at all n locations
ctacaagtgtggtaagcccggtcactctatttgcaaatgtccattatcaagtgacagtgacatggataacgacaagaagggcaagaggagagaaaagaagaggtactacanaaaagaagggcggcgatgcccatgtttgtcgagaatgggattccgacgaaagctcaagcgactcctctgacgaagaggacgccgccaacatcgccgtcaccaagggactcctcttccacaacgtcggccacaagtgcctcatggcanatgatggcaaacggaagaaagtaaatccaactcctccactanatatgagtcttctagtgatgataatgcta

SEQ ID NO: 71854 - DNA, 448 bp, Zea mays
  unsure (1)..(448): unsure at all n locations
ttgagaatagtggtaatagcctcgaatacccacacaatccttattgtggcctntctctttgtgtaggcacccacatatacttgacaaccatcttacatggtttcaagtcaatatttaatcacatagataaaaaaactagagttaagaataggagccttttctccttttattaatacatcattgtgttgccttcttgatgatgaacctaccttgactntgggtgcacctagcttatcaaggttagtcgcacaagcattcatatcatatagacaagttatgcatggaagtaacaacttagtgatccaattcaatgtgaagcattnggataccgattgaagtagattctaagatatcaaaatatgggtttccaaannattagagtgtgngatcactaatngtacctttacagtntannaatcatatccatggtagtgcatatgtatgtcat

SEQ ID NO: 71855 - DNA, 404 bp, Zea mays
  unsure (1)..(404): unsure at all n locations
gtcttatcctcacatgtgctaagcgacgatgccacagccattctatgctagtcttagcgaattagcatgcatctagaccgacctcctctttcngcaaatcaactaaataaagtttgtcgtctagtacacccttaaatgctagtgaaccatcacttcttataaagacagacacatctacatttgtaaatagacaattatatcccatattgcataattgactgacagatagtaaattatattcaagagactcaactaaaaacacattatagatagagtgctcatgggatattgcaatcttgcctaaacctttcaccttgccttgggtccatcaccgaatatgattgaatcttgggagatcttattcttgacgtaggaggtgaacatcttcttctcccctgtcatat

SEQ ID NO: 71856 - DNA, 340 bp, Zea mays
  unsure (1)..(340): unsure at all n locations
ctttataagaccttcggcgacgaagcatatacccaacagtagcccctttcgcggtgctagatcgttnttcgtaacgagcttgatctngtgaaaaagtttcttaagcttcggagcgccgaaggtctcanaaacaccttccctgagctcgttgtcgagaaacgactcaatttccctgcgcgtagcggccccaccttgcagagttactgttcggtctctgcggtccaccgtacagcgagtgtgagcgggtgtccgcctggtgtaaaacttctggcgcttcgccttcttacctgcggcactatataaacagacgagtaggtgtgaagttaccacagcatttact

SEQ ID NO: 71857 - DNA, 455 bp, Zea mays
  unsure (1)..(455): unsure at all n locations
ctcagctattatgtgtactgtgcatcagaagtgcgccactatttattctcacacggttgtggtggtgacctcctacccgttaaaggccatcctncacaactctaatgccacnggcaacatcgccaagtgggtggcggagcttgccgagttccaactggagttctagcctcgccatgctgtcaagagctaggtcctagctgacttcatcgtggagtggaccccttcctcgagtgctccacggggtgcggatcccgattcggaccccacacctacngagcccagggctccggtcttcaccgagccncactagacgctcttcttcgacggatcccgccgacagcanggtggcagagccggagtggttcttattgacccaagcggagatcaagtgaagtacatggtgcaccttgagttcaatgccaccaacaacatggcggagtacgaagcactgatct

SEQ ID NO: 71858 - DNA, 406 bp, Zea mays
  unsure (1)..(406): unsure at all n locations
gagatgcttgcttcaacccatatatggatttcttgaagttgcatatctttccagcattgatcggatcaacanaaccctcgggctgtatcatatacacgtcctcatcaagggttccattaagggaagctgttttgacatccgctgccacatctcataatcganatatgcggcaatagctagaaatatccgaatagattaagcatcgctactggcgagaatgtctcatcataatcaactccttgaacttgtcgaaaaccctttgcaacaagtcgagccttatagaatgtaacatctccatccatgtctttcttcttatagatccatttgtactctatgaggctaacaccatcaggcgggtccaccaagttcaaacttgatttctcccatgtatctatctcggatctat

SEQ ID NO: 71859 - DNA, 311 bp, Zea mays
  unsure (1)..(311): unsure at all n locations
gtatgtcaggcacggaagcaagttggtgttcatcatccacataagaacatcatgacgactgacaggccactcgagctcctacacatggacctattcngcccgatagcttacataagcatcggctggagtaagtactgtctagntattgtggatgactattctcgcttcacttgtgtattctttttgcaggaacaatctcatatccaatagaccttatatggattcttgagacgagctcaatatgagttcggcttaatgatcaaaaagaatagaagccgatacgcgactggagtcaagaactctcaaatcga

SEQ ID NO: 71860 - DNA, 274 bp, Zea mays
  unsure (1)..(274): unsure at all n locations
caacatgggctagtcggcggtgccagagcctactcaagttattcttagcaatcaagcaagtgtcgagttcagctctatcaaaatctaccaagtatagctgaccctctaacactcncttaaatgctattgaatcatcactccttctaaagacagtgacacctacatcagtaaatagacagttgtagcccatttgacatagttgcgaaacggagagcaaattgtaatctaaagaatctacaagaaaaacattggaaatagtatggtcaggtgatat

SEQ ID NO: 71861 - DNA, 408 bp, Zea mays
  unsure (1)..(408): unsure at all n locations
ctcgactaagtcggcgacagggcctcatggacgggtgatagtacgtgtaagcggcaaggccgaccgagccgagggactcctacgccttcgggatacggatacctcactcatcaccttccgcgagaagcaactctcgctcgcgcaaacatccncgttaccgacggaaagtccagatgctcgaaacaagaggaanaaagacgcagcttcacaagcgcagcgagggtgtgtttntctggcctcggcgggcgcagaaggcacacgctacaagacgatctgatcctgcatgctcgggtcttcacgctgaagggagccgaagcaccctctgcatcgacgacgccttcagcgaggtccgacccagcctcggacggcgacgcggtccatggacttctncgggaatccggnccgagc

SEQ ID NO: 71862 - DNA, 324 bp, Zea mays
  unsure (1)..(324): unsure at all n locations
tgtgctaagcggcgatgccacagtctttccatgctagtcttagcaattaagcatgcatctagaccggcctcctcttttgcanaatcaactaaatagagtntgccgtctaatacacccttaaagctaatgaaccatcacttcttctaaagacagacacatctacatttgtgaataaacagttatatcccatattacaaagttgactcacagacaacaagttatatccaagcgactcaactaagaacacattagaaatagagtgctcggatganatagcaatttttcctaaccctntcaccttgccttggtcccatcaccgaatat

SEQ ID NO: 71863 - DNA, 378 bp, Zea mays
  unsure (1)..(378): unsure at all n locations
accttgtgcagcttgtcaagcaggtaaacaggtgggaagctctcatcatgtcaaanatgtgatgacaacatcaagacctctggagttacttcatatggacctcttcggacctgtcgcctatctaagcataggaggaagtaagtatggtcttgttatagtcgatgaattttctcgcttcacttgngtattcttcttgcaggataaatctganacccaagggaccctcaagcgcttcctaaggagagcccaannacgagtttagctcanagtgaagaagataagaagcgacaatgggtccgagttcaagaaccttcaagtggaggagtatcttgaggaggaatgaatcaagcacgagttctccgctccctacacaccaca

SEQ ID NO: 71864 - DNA, 493 bp, Zea mays
  unsure (1)..(493): unsure at all n locations
gactccaactacccganaccttgtctgctgtgcataatgtgttccatgtgtcacaattgaagaagtgtcttcngattcccgatcgaactattgaagtaactgatgttgtccttgtgccggacttgacatattctgagcatcctattcgagtcttggatcataatgacagggttacccggagaaaaactctcaagttntataagatacagtggaaccagcattccgaagatgaggctacatgggaaactcaagactntctagaanagaaattccaggcttttagcctcatgtaatngtaagcctgttaactatgaataagaagaaccccacatacccctgcttgtccnanagaatgaataaagattcccgttcctttcattctatcctgactttaactcggacaatcttatggggaagttacacctgtgtcttactaactgacatctctacatgcatgtattgaccctaagcttactagaaattaacagtgttg

SEQ ID NO: 71865 - DNA, 430 bp, Zea mays
  unsure (1)..(430): unsure at all n locations
gacctagttataaagaggattatcccatgttcttaaatgaatagagtgctaagtaagagattcaaattcttaaagcacttaccaanaggggaattctctatatgacntagagtgtgagactaatgtttctatctaagtgtttatgtagtctcacaacatgagaatgtgtttctcaaatggaatgtgtcattcaacattcaaagaagatcaaaccaatactatgtgatgtattccttcttggttaaatgggttntgagtctgtctaaataatcactcagcatgctactgaataaacttgccatgtaaacataattaaataatcatgctatgttcaccatcgttaaatcactgttatgcatgatgttngtacgggtaatcanttcatatcatgngggttccttattttagtgacctctcgcattcatatact

SEQ ID NO: 71866 - DNA, 504 bp, Zea mays
  unsure (1)..(504): unsure at all n locations
taagctcaacctcttcgccgatccatngaatgactccttcngggtcgccttgaatatatttttgctccgatgagtatgcacccacatttgcanaactgtctctcagcttctttgcgcaatccaaggatttttcatagcatctctccttggattcacgaagctccttcacattctntngcaaccttgaacttgtccattcacttatttcatgccttgcctntgcaacttcaaaatctatcattcattgtggcaagcttttttaagtcttcgatntcggctttgtgagctatggattgtgcattaagttttgcttcgctgctcttcagcctatccactaaggaaagcagtattctatcttnttcaagggcttcatttcttagcgtaataactactgaccgaagttnccaagggctgtnggcagctttatctctgcgttcttatgcctaaagcttacttgatanccctcaaaatgaggatcaccacatataaaaagatcaatatatc

SEQ ID NO: 71867 - DNA, 219 bp, Zea mays
  unsure (1)..(219): unsure at all n locations
attattacacttaatcagatatgctntgatgccaggtggacttatcacttatgtaacatatgcattggtacaaggatatattggactcatctattcaaatggctcagtcggatcactaattggagtgtactataccacagcaccctagaggactatactgttcggagcatgctattatggggtcaagtgctctcaagtctggcangaatgcttgatctg

SEQ ID NO: 71868 - DNA, 483 bp, Zea mays
  unsure (1)..(483): unsure at all n locations
ctaagctctatctgctggtggagatttactctgatgtgtggatgaatggtgatcatgagatggctgatgaagcgactagaaaaaatgaanaaaatctcacgacgctcaagaagaagccaagtgagctgnaaaagctgctgagcgcgtaagacttatangtacttttactgagggtttagcttggagttcattttcagcttcggaattaaccaacattntntattgtagctgaactttcacctccactggaaccatataaccccgaagctgacccagccatgaaggaagcgttagatatgataagaatcgctaatgaagctgttgacgaagctgtcgacagactgctaaatgaagctgctgaanaagtgcttaagaaagagtaatnntttgtatcttaagagtgtaatgcttgtgtatggctntcgtcttttgaagaaacaatcatcaagtttttgtatgaatattaatgtaatatatttcttt

SEQ ID NO: 71869 - DNA, 518 bp, Zea mays
  unsure (1)..(518): unsure at all n locations
taactctcgcgagaccttcccatntcttctaaccanggtaaattattatcgtatgtgatattctatgcatatntactntatttgttctctggtatggggtactggttggttcctaatttgaatggatggatgtatgtatgcttgcaatcgcatagagaacaattcggttgaagagcccgaggagcccgcaggagaagcccctgagcagcagtcggttggtggaggcaagtgtcctttgacctatctctgtcctattcattctnntaattcacctccgcattacatatttatacctaaggatttgactagnntttgtacccatatccttgtntacctatctggngttggatatannttgttagcttatgctattgctcaactctaatcaatgaacatgatgagaatatccatgataccgatgtttccttctcttatatgatgttgacttgtggccttaagggggctcgagcggttctcgagtgcctctcgtaggacctatctatggataccgcccggaa

SEQ ID NO: 71870 - DNA, 373 bp, Zea mays
  unsure (1)..(373): unsure at all n locations
tcaatccaaccctttgtagacatgcncaaaccctccttcctcaagaatgctgtccggtcggaagttcttggttggcatttttagatcattgaacgtgaatgccttcaaattagaagatgacaagatttcaccttctgtccgaggagtaggaagctcatttcaatctctcattgatggaagagtcagtgttgaacgacttgagttgctcttaattgtggaagggactgacgacaaacttgtcttgctggtcactttngatgggtctgatctctcaacaagaagcacagganaaatacgcatgagaagaactngatatggtatcaacagtgtttaacgatatgaaggtgtcatatatatactcatgaagtctggt

SEQ ID NO: 71871 - DNA, 477 bp, Zea mays
  unsure (1)..(477): unsure at all n locations
ctaagctctaagggagagcacatttaggataacanatgttcattttgagatatacatgtattgtagcgcatggccaagccggaagcaagttggtgctcatcatccacataagaacatcatgacgactgacaggccactggagctcctacacatggacctattctgcccgatcgcttacataagcatcggcgggagtaagtactgtctagctattgtggatgaatattctcacttcacttgnngtattcttttgcaggagaaatctcanacccaagagaccttatagggattctcgagatgggctcaaaatgagttttgcttaaggatcaagataataagaagcgacaacggaacggagttcaagaaatcacatattgaaggttccttgaggaggaaggcataagcatgagttctcttctccctacacgccacaacaaaatggtgtagtggagaggaagaatagaactctactggaca

SEQ ID NO: 71872 - DNA, 358 bp, Zea mays
  unsure (1)..(358): unsure at all n locations
tgcagacagatgatcgtatatggttaacgtanatggtatacagataaaccaatgtagaagaaaggcctaagtctcataccgagttgagcagtttccgagcttcatctctagctagctcgcgagcgcccttagcctaaatatgcgtgataaatctgattgcaattcttcgggctgtaccgggaatatcaactatgtcgaacgacaagaggctgaacgttggcttattaactgatttggcatgagcgcagctggcccttcaaaatatagcagccgcggcgcgagaagctaatagagcacagaaatacccatgcccagttataacttcatcaagtgcatcaacttcattttcaatatgcac

SEQ ID NO: 71873 - DNA, 359 bp, Zea mays
  unsure (1)..(359): unsure at all n locations
ccttcaggcgtatcctacctctgaaactntagccagcatactcaccagcagcgagactntagggagcagtccgaagctcgcacagtcaacagtactgtgccagaatcaaagcacatctactaagacatatcctacctctgagacagttnttacatttgttatcatttacctttntcaataaagagcaatcattgaaaggttagttcttttgttgatttcaatttcttgtaatagcttcatcattatcataatgtaatataccttcctcataaattgacgaagttccaaaagttttgacgaagcaacananagctgtgttaaggaatgcatggcaagtctttgtcggagcaacanaagtc

SEQ ID NO: 71874 - DNA, 441 bp, Zea mays
  unsure (1)..(441): unsure at all n locations
atcgttgcagtttcttgcacgacagcatggctcagtagagcgtactcacatagatncttttttcacacanaactaaccgtctctaaagtcgtattntgtgcagggtagatacccnttctcttctgtaccgcagacctaatcgccttcatttcctacgagcaaaatgacgggatggtgtgctgctcctgctagagaccagatcanagggtaaaaggaatagaagtcgacagaatgggagggcgcaccgatttcagctgttccacttcagagtcaagtcctttcttgagaccctggagttcctgtaagcaacacaattcaaattcaccggtggtatggngtgatcattactacaagcagcaaccttgaantccaaggtgagtgaacaagggcagagcagagaactcacattctagcatgtcttgacatgcgtctctacattgg

SEQ ID NO: 71875 - DNA, 445 bp, Zea mays
  unsure (1)..(445): unsure at all n locations
tacatactctgngatgtaaggcgaatgatacgaagcagtgtgcatgacctgcttcngctgagtctngtgtgctgtcgcttcngctatttccttttgcttctggatggtaacatggcacatcctggtggtatgacctttgttctcaccacagaataagcaaaagattcttctcggttgatcgccaaatcttccgccgaagcccctggcgcctctgcctctcggagctggtggtcggaaggagccttgctgttgccccgaagcttgtgaggaacactgtggcctnntgctgtggctccctctatcatcattntgngtagaagtatgaattgatctaacgtgcctcggatagaacctnccttcgaagccccctgtcatttcagaaaacctganagcctcctcccttctnntggcgaaatcattatcgcgccgaatgactcgtcatctt

SEQ ID NO: 71876 - DNA, 437 bp, Zea mays
  unsure (1)..(437): unsure at all n locations
gagtcaccggaggtgggcgccaatgttggggacttgttctcaaatgcttcgagttaagaacaacgcaacataaaaagcgttaaatgttaaagtccttcatccttcaagacattatatnccttcngatataatgaattccggacgaaggttacgaaggaatagaccttcgtatgttcaacgtatgatgaagaagaatcatacatganatacgaataataacacaaatgctatcgtcaacttctttctattttatactatcagaatcataatgaccaattattaatgtaccttcggattgtcgaaaagaaaggtacagggcgtatgcataaagcagatgccagatcagcgtgaacagtacgggagtacttgtcatnctattataggcacacgacgtagcccgtgaagaatacattttatgccttatattatcaatactc

SEQ ID NO: 71877 - DNA, 436 bp, Zea mays
  unsure (1)..(436): unsure at all n locations
tcacaggccatcacactcttgtattttcgaatntgaatcantttaccttatctattcgatcttcagtgaaatcgtattcgatcttcagtgaaattgtatntaatcttcgatgaaattgtattcgatctgcacatctctattattaaaaccccatggngttntaacgcctctccacactctacggacactccagcactcgcgcgtggacgcgtggcggcgtgccggacctgaatattttcttcgattcagcagagccgtcgtcgagctgcgtctgttaatcctctgatttcgagtctgtagagaaccnggtgcggtttcaacgtcgatgcattgcccgcttcacctccataccgtccagtctttcacccacttcgctcaccgagtgccagtggagcgcttttcttgattcgcaccatctgtccctgatggatcttga

SEQ ID NO: 71878 - DNA, 317 bp, Zea mays
  unsure (1)..(317): unsure at all n locations
aagctgtggcgcnctcgcgtcttgtcgcaccgagtacaagtctccacctatatcctcgggctgaacnncctcggcgtggtagcgtcgcagagactgctgataccgtgtcgagtgtagtaaggccacgtcccgagcctcttcgagctggtacagtgagtcttctcggctggtctggttgcttcngntgtcgtacgcctttgtcctcggngaaccgtattctaagtctgtgggtaagatagcctcagccccatagactagaaagaacggcgagaaacctatggctcggctcgacgtcgtcctcagactccagaccaccg

SEQ ID NO: 71879 - DNA, 227 bp, Zea mays
actcattatgacctaatatttctggagaccaacctatgcggtcccggactctacccatcgttcggagcacaccaaagtcttcgattctttctagcaactcttgatggtgcaaagtggtggtcctaacatatatggatgacgaatgcttgataataccatctgtgagaatatccatgtgacggtgccctgacgggaagaactgaagctgtcccgtgaatgctttgaaa

SEQ ID NO: 71880 - DNA, 514 bp, Zea mays
  unsure (1)..(514): unsure at all n locations
ctatcaacaatgaggaactctaaccagtacgctataaatatagagttgaatatacagtaaaggactgccgcagtggtgaggtatttgagctattctaaacgctacgaggaaaccaggaacgctacttccgaggaaaccaggaacactacttccagagaacattagaactctcgctcgataactgttgcaggagtgcgggaatggccagaacggaggagagaaggaagcaattcatgagtgatgttagcaattctcttgaacggcgttggatctgttcttggccggttacgacagggtctcatgactcgaggctatataatcgatagtcttggtgtgttaagctccanaattagtctctcgagtcaagatccatggacgagttacctatactatgtatgtgcccgtgcgtngccacnaaagttataattaatataaacataatatgaacaacaacattgttgatatgatatcgaagacaaatataccgacactaaatatattgcgattaatatgt

SEQ ID NO: 71881 - DNA, 480 bp, Zea mays
  unsure (1)..(480): unsure at all n locations
tcagcttatagcgcaagttaaggtcttttttttaagtatggcagaactcntgctcctcaatctaagtatttctagtcaactgagaatacagatatgtatgtatgtntntcacatgtcaacttatacctgactgaaagatgggtngatacctctgctatggaaatcaatgtatttaagcataaacatgccacagtcccacctataacgagagaataatgtcaaagatagtctcatgcttgcccattaatgtgcacaacacggattcaaaatagaaaacacttggacgttgaaaaatagtaatgcgttgactggaattaatactttatatgaattccttccttaatcaaatcaatcagcgccacatggctggatttatggtgatagactagaagganggatacccgttctgctgcanggcaaagactctgcactacagtcacgactaggtctactctatgtactcttgtcttcaattcatca

SEQ ID NO: 71882 - DNA, 266 bp, Zea mays
  unsure (1)..(266): unsure at all n locations
gctgtatgcggatcaaggtattatgaagatctggttcacatatcgataacataatggactaaccatacacgtaaattatgtttgcttaatttcaaccgtaattgataccacactagaaatgaatatcggcttattcaaacttgttaccatcggtattcgagtgtgaatcattactattaccatctaggttatatttcgtgaaccanacngcacatgagtctttgacagtgagagtgtagntattagttaaatatgacacaatacac

SEQ ID NO: 71883 - DNA, 358 bp, Zea mays
  unsure (1)..(358): unsure at all n locations
ccgggcgggtgactngcactatatatgagtctcggtgtantgtctccgtctgagtcgattaatgaccgtgtcgatgtatgcttgatgaccgaggaccctntaactggccacatgtctcgtcatgggtaagccttgcctcgggaagacttatgccagaataagattacacgtaatgggcgtggagcggtggcgagagtaacgtgtaccctccgtggcaagaggctggacggtggtgtatctgtgctctcgngtgacgtgaacctgatcttgtcttaagaaccccgtggcgggttgcatatgcagggtaagtgctcatatgtcggtgattgagatctcactgagttaatcgattggatcg

SEQ ID NO: 71884 - DNA, 322 bp, Zea mays
  unsure (1)..(322): unsure at all n locations
gttgggtcaactgttctttcctgacgatctgcatcatgaccgccaaaagggctggcaagcanaatgagtgatccatatgcatggtcacgggctcatatattgcgcctttttgtgtgtttnttttgttccccacagttgaatgtattattcttattttattgccctggtttcttatgatgactctagcccattattaccgtttgaatcatgggttctcgacatattgcttgagcatcgctttgcgtaccgtcatttttttacaagaagaagaataagaggctaggactcactgacattatgcggtgtataggagtatgtcatc

SEQ ID NO: 71885 - DNA, 328 bp, Zea mays
  unsure (1)..(328): unsure at all n locations
tatgtgatgaatcattgtaaaagcacgaagcaagataatcacattgttgatctgtaagagaccttcgctaatattaggtaggctggtttaaagttgaacccagaaaaatgtgtcttccgagtgaagaaagggaaatttcttggctgtctagtctcaacaaaagggatngaagctaatccaaacaaaatcgaagctattcttcgaatggagccaccaagtacaaagaaggttgctcanagattgacaggaagactggcatctctcaacagaattatatctagatcagcagagagacacttaccatctttcgaagtactgaaatcagctg

SEQ ID NO: 71886 - DNA, 227 bp, Zea mays
  unsure (1)..(227): unsure at all n locations
acgtattctggtatgtaggagagtggcacgaagcagtgtgtaagacctgcttcngctgattctgtcgagcttctgcttcagcaatatccttttgcttcagaatagtgatttggcacattcttgtagtgtggcccttgtcctcaccacagaataaacaataatatttcctgggttgatccccatatcttcctccgaagtccctgccgcctctgcccattggagctggt

SEQ ID NO: 71887 - DNA, 340 bp, Zea mays
tgagccgaggcattgcctcaccggagaagctttatcaccctcgccggacttcggtcacccgccaccatgtgtgaaccgagctatctggtgagccattttccaattcctcgcgcctatgtcttccctgacctctggtgaagctcactgaccagttcaattgaactttaccaccctggttaggccagagtcctcgtcgccgacgagctcgcccgcctgcgcacgtggaccgacctactccgaccatcaccgaagacgatccgcacatcggcatgaccatcaagacctccactacaccctcgaccacttcaccggagcaatctcgccgtcggtaagcccctcc

SEQ ID NO: 71888 - DNA, 256 bp, Zea mays
aaaacaggagttgtatcgcatgccacgcgggaaagcaagatggagtccatcatccacaccagaacatcatgacgaccgacaggcctgctgtctacttcacacggatctattctgagggtttgcttacataagcatcggcgggagtaaatattgtcttggaatagtggatgattattctccgcctcacttggggtttcttcttttcctggaaaatctcacacccaacagaccttttagggatttttggaacgggcct

SEQ ID NO: 71889 - DNA, 339 bp, Zea mays
  unsure (1)..(339): unsure at all n locations
tgtcaagcacattttggtacccatcgcttgtgtttccgttaaggntagcaaacaaagatctaggaacccaagtgtcctttgtgctagcgcttggtaaacttgttacctttctagcacaagttgcaatcttgggttgcctagttatatatgaatcaaatgacaagttaagagtgggagagttaccaatgggacaatccttgcattgatgtccctttttccggcatgtgtagcatatgcgtttttgaagtcttgaaaatttcttctttccttgtttgttgcttgctacatggttagtaaaaactttcttttctaaccctatgcctctnttgttcaaatcga

SEQ ID NO: 71890 - DNA, 340 bp, Zea mays
tttgtctatactcattatattttcttgcgaatgaacaccgatcgtttggtggcgcttcaccagttttccacggtctacgtgtcgtgttcagtaggcggagaatatttactagtaacacgctgtagtttggattggatccacacatccacccactagctagttcaggtcaacctccctaacattcatcaggcagttgtgtgcagcttctaggtttattttcatacagcaccaaactatgaaaggtcaccgattggtgcctgccttattgatacacaactatattacgatgacctggtcataaatttcatctctacactatggaatcgcttcctgataatgg

SEQ ID NO: 71891 - DNA, 343 bp, Zea mays
taattgataaatctaatgcgtatgtgggtcttttgttcacttgtgttatttggttgatcattgaatgactttcattaacaaccatgcctcttagtgcctcatattctttcaaccaaatatctctcttgatatgcactaagttaaaaggagaattcatgattcatttatacaattggtgatccatttgatatatgcttacaataacttggaaaaggatcactagttgtaaaactctctcttgtgcaaaatatttccatatagtgtcattgaatataagtcttaagcatctaaagactatggacaaagcacaatgaagaagagcatctctatgtgaaggtacaaa

SEQ ID NO: 71892 - DNA, 335 bp, Zea mays
tctaaagggagagcacattttaggatttacttatgttcattttgagaaagacaggatttgtagcgcatgccaggcgggaaagcaagttggagtccatcatccacacaagaacatcatgacgaccgacaggccgcttgagctactccacatggatctattcggcccgattgcttacataagcatcggcgggagtaagtattgtcttgtaatagtggatgattattctcgcttcacttgggtattctttttgcaggaaaaatctcaaacccaagagaccttaaagggattcttgagacgggctcaaaatgagttcggcttaaggatcaagaaaatta

SEQ ID NO: 71893 - DNA, 337 bp, Zea mays
tcggcataccccattccctcagcgtttgaattactctgttggccaagtattcttgaactaagtccctagttccgatgtgttcagatacaactctaaactcatacacaacatctgggcatggtgcccccggcgtcatgttgcactgaggcctagtcagcccgaaggttaactccagcagactctgcactagcttctcctttttctcatcaattttaacataaaaccattcaaatttccaaccggtcggccatttagtgcgatagctgaccaccggtgtcttcatgtctttgcgataagcaaagttgtagcagctaaagttctcatacagtctgtcttc

SEQ ID NO: 71894 - DNA, 335 bp, Zea mays
ttggcaccaagctccttgtgctgacttgatatcgttcctgaacatgcacagggacgtagggtactactggatgcgtctggccatctacatgggcattggcgtgtgcctaggcactatcttctaccaacttggctacagcacctacagctctatccagagtcgatgtgaagtaatcatgtacaccatcgcactcctaactttcatgtccatcggaggatttccatccttcgtagaagacgtcaaggtgttcaaaaaggagaggctgagcggccactacggcgtgtcggagttcgtcatctccaacaccatctccgccactccgtacctgtccgtcg

SEQ ID NO: 71895 - DNA, 338 bp, Zea mays
ttattctagtgcacgcaagaccatgatgaatattttctagcgtatgtccaaaggtttttgcgtctcagagctcaggcgccaactgtgacaaatgagattgtcattgaaaccatgatcaaggggcttctacaaaatatggacgaatatatcagggctaccaatgactttcggtagagaagagaagaggcctacagatactccgagatgactaggggcttaagagggaggctccaccctaggcatgtcaggacgattcataaccctagatcaagtgatgataggggcaatcatactcaagggcatcagcacaactctcagtcatcagggacacaacaaag

SEQ ID NO: 71896 - DNA, 327 bp, Zea mays
taaaccctagggggctaagtgcaaatttagttttcttttggactaaagtgcaaaaaccatgaaattaaggtgtcttaagacatatggtttacaattatgtggatttacaagttaaaccctaagttttggactaatttgcaaaatagccacactaatactcaaatggctaagtctgaaaacagtaagagagggctaattttagggctctgtagatctaaaaatatagagaatttgcctacggtcaccacatcaattctatagggctatgttaggagaacaactttgttaaagggattaaacattgttgttatgaaaaattggagaaaa

SEQ ID NO: 71897 - DNA, 330 bp, Zea mays
ttgaacactaagctaaaaattattctatactctatgccctatgtcaattattcaccctccctttatatattactattagatgtttaacttatcatgtattttactccacaggatcgtaacttgggagatgaacggttttctgatttcaattgcagatagaaaaggtagctctttaatctcaaccattgaacaacaacacacaacatgagggccatgactttgattctcatttaatttggcgttattagtgatgagagcgatgagtctactgatgagtctagtttatgagtcatcctttgtttgtttcatattgtcataggaaaaaatgtc

SEQ ID NO: 71898 - DNA, 323 bp, Zea mays
tttcttctgacgaagtaggcaccaatctggtatcttcgtctgaatacgagagtcaagcttcggctatggttaaaatttttggcagcaaaacagtgcaatagcaatgaatgctgtggtaacttcacacctacctgtctgtttatatagtgctgcaggtaagaaggtgaattgtcaggatttttacaccaggcaaacagctgctcgcactcgctgcacggtgggccgcaaagaccaaaatagtgaacctgcatggtgggaccgttacgcgctcggaaactgtatcgtttctcgacaacgagctcaaggaaggtgtttttcggacc

SEQ ID NO: 71899 - DNA, 336 bp, Zea mays
tatccaagatctgattagattaaaatgtaaatggaactattttatactctgaaaaataactgatgaggcgtgattgttggcaccaagatgacttacattctcattgtcacaagcaatcatgtcactgaatgtggtgtaaaaggttgatgtattgattgggggaaaatgtgatcattgatctgaaacattggtttttttacttgttacagtagttcgcctattgctcattgcagatcttcaaggacaagggtccgttgtggtgtttagaggcggaggcggtgcccggccagcatacactctggtttcacagaatgaagcacactttgctggtgactg

SEQ ID NO: 71900 - DNA, 338 bp, Zea mays
tagagaaatccggaataaatcggcggtaatttccttccagtccaaggaaacttcgaacttgatgtacagtggttggtggtttccactctagaatatccttgaccttgctaggatcaatcgcaatcccgtttgcagagagtacatgtcccaataattggatttcctccagccaaaacgtgcacttgctgaatttagcataaagttgatgttccctcaagcgcgttaatacgatccgtagatgccgagcatgctcctcttcattcttggaatatatcaagatatcatcaatgaagaccaccacaaatttatccaacttgggcatgaataccgagttcatc

SEQ ID NO: 71901 - DNA, 339 bp, Zea mays
ttgtttcccgggccatgaggcttggggatattctttttcttatagagggaagaatgtgaggatcaagaaggggatggctgatgaagactcggtggtggaaaagacaactcgactaaggaggcccaatagtcgagtctatgggctgtagagggccacatcatagtgtggggtgtccagagtcgatagaaggagttatgtattatgtaaggaataatgatgaagggggacgaggggaggaactcgggcccagttgcatctagcttgcggtggactcgtcgtgtaacaccacgatacccttcgagtgctgggagtagcgctcaaccccgatccatactagtg

SEQ ID NO: 71902 - DNA, 343 bp, Zea mays
tcagcgacacggactgtcgctctgcagtcgctggacccgaaccaggagaccctttctcttcgagaggcccgaatccagaagaggaaggccaccagtccaacaccccaagaggatgagttggaccaagagatcaggaatatggagatgcttcatcagcaagtgcaaaagaagaaggaaaaaatggctcggctagctgacctacaaaggcagattgacgaagccactgaagaagtacgtcatcttgctcaagatgagcaaaatcgaaggccccagcacagacagctgcaccaagagggcttctacaacaaggatgaatgctatgaagatttccatcatggaaatt

SEQ ID NO: 71903 - DNA, 344 bp, Zea mays
ttggatttaaggacatattttcgtcagttccgaagattaaatgtctcaagacaagaagattgctgaaatgaagctaaccgaagaggagaagcttctcaaggaaaaaactgatggattcatcgagtcaattgcaaagaccaacacagaaaagattacaaaagaaattctagaaggcttatctgaagataccgatgacagcgatagttatgatgcggaaagtgggggcgaagactccgaagatcggccctggcgaccaagtcacgcagtcttcggaaaattgactatcagacaaagtcatcttgataacatgagaggaaagtattttcgagacatatccattgtga

SEQ ID NO: 71904 - DNA, 334 bp, Zea mays
tcgtctaccaagggacacggtctcgtctcttcgagcccggcctcgggtggaacagtggtcccggacaaatccacgtctcgcccgagggtctcctcagacagtgagcgcaccctcggctcagccaaaggcaagccttgtcgtgcaagcgaccttggccaaatcgccttacaagccgaccatattgcatgcgcatttaatgctgggatcgcctgacaccttatcttgacacgcgcgccttagtcggcaaggtcgaccgcagtcactttgcccttccactgaccgatctgacaggaaaacagcggcgcccgccccgctccgcctgctgtgccaacct

SEQ ID NO: 71905 - DNA, 334 bp, Zea mays
tcacgggccactggcggagctagcctaagcactggctcaacttgggggtggctggagtgggctggccacgacggccgaagctctggcggcaatggcgggtggaattgagctcgccggagctaaagagaggtggctggccggtgagggtgagtgcggggtgtattgaggcgcgcccggggaggctttataggcacggcgcggtgcacgggcggccatggaccggcgagcgcgcgcgagcgtgcactgggaggcgcgggtgcgcgaacgggcgtgaaccggaggtgtcagccacggtcgaacacgtgtgcccgatgcttatgcccgagttcaagcg

SEQ ID NO: 71906 - DNA, 339 bp, Zea mays
ttattctagtgcacgcaagaccatgatgaattcttgcaagcgtatgtccaaaggtttttgcgtctcagagctcaggcgccaactgtgacaaatgagattgtcattgaaaccatgatcaaggggcttctacaaaatatggacgaatatatcagggctaccaatgactttcggtagagaagagaagaggcctacagatactccgagatgactaggggcttaagagggaggctccaccctaagcatgtcaggacgattcataaccctagatcaagtgatgataggggcaatcatactcaagggcatcagcacaactctcagtcatcagggacacaacaaagg

SEQ ID NO: 71907 - DNA, 312 bp, Zea mays
tctaaagggagaacacattttgggactaactaatgttcatttccagaaagacaaggtttgtagcgcatgtcaggcaggaaagcaagttggtgttcatcatccacacaagaacattatgacgactaacatgccactcgagctcctacacatggacctattcgacccgattgcttacataagcatcggcgggagtaagtgctgtctagttattgtggatgactattctcgcttcacttgggtgttctttttgcaggaaaaatcttatacccaagaaaccttaaagggattcttgaaacgggcttcaaatgagtt

SEQ ID NO: 71908 - DNA, 340 bp, Zea mays
ttaggggaatagtcataaaatgttcccaagtttgaacttgaatcacatttatacccctgggataccaaaaaccccatttgaaccctggaaaaccctaagtccaaaccctaggggtctatgtgcaaaaatagtgcacatttggactaaagtgtaaaaactacaatattaaggcatattaagtcctttggttcacaaatatgtgaatttgcaagctaaaccctaagttttgggtctatttgcaaaaatcacctcttaagtcctatatagcctaagtctgaatttcagacctttgggctcaactttggagcaatgtaactttcaaagtataaggtttttgccc

SEQ ID NO: 71909 - DNA, 319 bp, Zea mays
tctaaagggagaacatgggatttgtttaacttacgtgcaattcgaaaaggatagaccttgtgcagcttgtcaagcaggtaaacaagtgggaggagcgcatcacagcaagaatgtgatgaccacttcaagacccctggagctgctgcatatggacctcttcggacccgttgcctatctgagcataggaggaagtaagtatggtctaattatcgttgatgacttttcccgcttcacttgggtgttctttttgcaggataagtctgaaacccaagggaccctcaagcgcttcctcaggagagctcaaaatgagtttaaactc

SEQ ID NO: 71910 - DNA, 325 bp, Zea mays
  unsure (1)..(325): unsure at all n locations
tcatcaacgacaccttcgncatggagtccatttgcagccggtgcaagtatcaagacgagtacctggctgccctggacactgccattcgggtggccgcggagctaagcgtaggtaacatcttcccgtcgtctagggtgttgcagagtcttagcacggcgcgacgcaaggcgatagcgtcccgcgacgagatggcgcgcatcctcgggcagatcatccgcgagaccaaggaatccatggatcagggtgacaagacttcaaacgagagcatgatctccgtcctgctcaggcttcaaaaagacgccggcttgcccatcgagctcaccga

SEQ ID NO: 71911 - DNA, 340 bp, Zea mays
tatgaagattcttcatcccaacatgggctattcggcggtgccagagccaacccatgttagtcttagcaattaagcatgtgtcgagttcagctctatcaaaatccactaagtatagctgaccctctaacacacccttaaatgctattgaatcatcatttcttctaaagacagtgacacctgtatcagtaaaaagacagttgtagcccatttgacataattgggaaacagaaagcaagttgtaatctaaagaatcaacaagaaaaacattggaaatagaatggtcaggagatatagcaattttaccaagtcctttgaccaaaccttgatttccatccccgaa

SEQ ID NO: 71912 - DNA, 221 bp, Zea mays
tgcgtgtatgccagtctactgtagaggcgctttttgtaccggggtaccagtcgccccatagtgcgtcggatatccagtcactggcttgctttttacgacctccggactgcgaaagccctcaacttacccctctctttctgcctgtcatccagcctccgttcctctgctggggtggaggctaccaggtgcgaatcaagcgcccttacggtccgcctcactat

SEQ ID NO: 71913 - DNA, 338 bp, Zea mays
  unsure (1)..(338): unsure at all n locations
ttggttgtagcaccttcagaagaagcaacatttttgcatttgctgntgntttttatgctgaagctggtggtggcgtttcctcaatagcttgcattatagtaataatcctccgcctttttggcccagcagacttcttggttgccgaaggctcctccttcttctgtaaaagcttcatcagttgtggtcccagtggacttagcttgataggtaaggattcggtcattaccttcagaatttcttttacattaacagcagtaggtgttgaaggagtttcttcctctatctcagctgtttttggcttcggagctgcagcttttctcttcttcgaagcagccacc

SEQ ID NO: 71914 - DNA, 338 bp, Zea mays
tgggccgccgccgggtagcatgcatgcagttttgatgaatggtacatacatatggatggctggctgctgtgggggagctgtccgcgatgttggtggtgctgtcggatgcgggcggttggtaatggtggtggtggtgatggtggcgcctggtgtatatgtggttgccttggttggtcagtcatccatccatcattcgtcaccatgcatcattgtcactgcaatacgcctgcctaccaagaaaaaaacatgtggtttgctcagagtaaagtagccgttacgcacgttggttaccaatttattagctacgaattaattgaaggcaccttatagtttgcttc

SEQ ID NO: 71915 - DNA, 306 bp, Zea mays
tgaaccgaggacctgcgccaccgggatgattttatcgtgctccccggagtttggaaccacgccagagcacgtggaccgggtaaacctctgcacgatgtgtcaattctatgcgcgcatggcctctacattaccccgtggagctgctagggcgctttaattggaccctaccaccgtggtttgggccgagcacgatcactcgacggccttccacaccagcgctcaaggctaaggcagctccgaccccctatgacgcacgaccggacaaccacgtgaccggcgtgacctacccgacgtcactgaccaccc

SEQ ID NO: 71916 - DNA, 334 bp, Zea mays
ttggccccacctgcaggcttgcatctttttttgaggtggacccggtggccactgtcagtaccctaaaactagggtaccccttactactgtataaagatgcagtacccacgtggctatttttagtcgcgtggtaaaggagttatatgtgggaccaggccatgactcgccccagcctcgggcgactactctggaccagcaacagcacctgaccgcaccacataggcgggtccggtgccgccacgtgtccagagaaagtgacatactctgaggtatcaccagtgagtccagacccccatgagaaggtgtcggacccctgtatatacggtgcgggtct

SEQ ID NO: 71917 - DNA, 334 bp, Zea mays
taaagccatggtaagtagcataggcaagtaatatgcgaattgactcaagcctagctacgggtgtataggtttcaccgaaatccaaaccttcgacttgtgaatatcccttggccacaagtcgggctttgttccttgtcaccacaccatgctcatcttgcttgttgcggaagaccacttggttcctacaacattttggttaggacgtggaactaaatgccatacctcgtttctagtgaagttgttgagctcctcttgcatcgccaccacccaatccgaatcttgtagtgcttcctctaccctgtgtggctcaatagaagaaacaaaagagtaatgc

SEQ ID NO: 71918 - DNA, 334 bp, Zea mays
ttatcaaatggacgtgaaaagtgctttccttattggaccaatcaaggaagaggtctatgttgagcaacctcccggctttgaagatagtgagtaccctaaccatgttttcaaactctctaaggcgctttatgggctcaagcaggccccaagagcatggtatgaatgccttagagatttccttatcgctaatggcttcaaagtcggaaaggccgatcctactttattcactaaaactcttgaagatgacttgtttgtatgccaaatttatgttgatgatattatatttgggtctactaacgagtctacttgtgaagagtttagtaggatcatgaca

SEQ ID NO: 71919 - DNA, 335 bp, Zea mays
  unsure (1)..(335): unsure at all n locations
tgcatctttctatgccctctgaattttactattttttaaggacaaangattatcattggatcaacattttccagacgtctactccatggaattctttagttattccaagatttcgtccacttgttttaaaggttttaggcgaattcattgaatttataggctctgattttgatgtccagttcgctgattggatttcaaatcggttgtaaatctcagcctaactgatgaggagatgcagctgtaggcgttggatttcgagagttgatttatcagacttttgttattttttaaaaaaatgcgaactcggttcgccttcctttgcacttttggtagtt

SEQ ID NO: 71920 - DNA, 340 bp, Zea mays
tctaaagggagaacacattttgggacttatttatgtgcattttgagaaagataggatttgtatcgcatgtcaagcagggaagcaagttggtgttcatcatccacataagaacatcttgacgactgacaggccactcgagctcctccacatggacctattcggcccgatcgcttacataagcatcggcgggagtaagtactgtctagttattgtggatgactattctcgcttcacttgggtattctttttacaggaaaaatctcaaacccaagagaccttaaagggattcttgagacgggctcaaaatgagttcggcttgaggatcaagaaaatcaaaagg

SEQ ID NO: 71921 - DNA, 326 bp, Zea mays
taagcgtgccgcgtatctgtgcctaacccctttgggtgaggggatgactgcagcagcgcctgcccccgcatggcaccaagcgccgtcgcagtggattgtccaaaccttctctgcggacggatccgactgtgttattggcccggtccagtcgacgacgaagtctgctagaacttgtgacttgatcgctgtcctgggctccaaagtgatgtggtagccggagagttcggccgcccatttggcgatccgtactgatgcctccgggtttctgaataattcaccgaatcccctatccgaagtgacacagaccttgaatgcttcaaagtagt

SEQ ID NO: 71922 - DNA, 331 bp, Zea mays
tagaactttagagacaaaatatactggtgcttgttttttgacctagtcgtcttgcttctcctgtacaagcgtcacactgactgcagagtgagaggctgctacatataagagcaatggagcccctagcgaaggtggagttagagttgtcaagtaaatcaagtattgctttaactcttcgaaagccctttgccgagccggaccccattggaaaacttcggctgacttcagtatttcaaagaatggtagattcctttctgctgatctggatataaatctatttaacgatgccaaccttcctgccaaccgtggggcccccttctttgtatttggc

SEQ ID NO: 71923 - DNA, 339 bp, Zea mays
tattgaacaccggttaagatggtttgggcattgtatccggagatccccagaggcacagatacacataggcatcataagacgggacaataatgtgaagagaggtaggacgaccaaacttgacatgggaggaggcaatcaaaagggacttgaaggaatggaatattccaatggagttgtgtttggatagaagtgcttgaaaaaaagctatccaagtgcccgaaccgtgattaggcctttttccttttagtgctctcaaaagcttcccccctcccctttctctttctctttttggtgacatcttgttgggtttcaactctagcctaccccaacttgcttggg

SEQ ID NO: 71924 - DNA, 341 bp, Zea mays
tgtactttgcctcaacatggcctgatcggtgattggctctctgttttagcacgtctgctgacgcacctgctgtcaatccaccttcggtcaagtcaactgccatatttgtccctcgtggctcactgacccacggtccccacacctggtggtttcgtcgggccacgtgcgaggcgcctcgttgccgctgcattggtttaaaataaccttttgtcttctgcagcggccccaaggaggcgcgctatcacgtgcgacggttcacatcccgctctttccgcacccgaaatccgacacacgaactgtatgacttgtggacccgggcccccgtgtcagacactgggctg

SEQ ID NO: 71925 - DNA, 340 bp, Zea mays
ttaccaaatggacgtgaagagtgccttcctcaatggaccaatcaaggaagaggtctatgttgagcaacctcccggctttgaagatagtgagtaccctaaccatgtctataaactctctaaggcgctttatgggctcaagcaagccccaagagcatggtatgaatgccttagagattttcttatcactaatggcttcaaagttggaaaggtcgatcctactttattcactaaaactcttgaaaatgacttgtttgtatgccaaatttatgttgatgatattatatttgggtctactaacgagtctacatgtgaagaatttagtaggatcatgacacagaaa

SEQ ID NO: 71926 - DNA, 344 bp, Zea mays
ttgttcaatgtacacaggaccatgaagaatttcttcaggtgtatgtccgaaggtttttgcacttgagagcacaagcaccgacagtgcccaatgaaattgtcattgaggccatgatcaaggggcttcgacctagatctacaactcaatattttgccaggaagcctccacaaactttggagaaacttcttcagaagatggatgagtacatccgggctgacaatgatttttgccaaagaagggaggaggcctacatgtttctgagacgaccaggggcttcggaggaagacttcaccccaggcatgttcgatcattccacaactccaacaccaacgatgatatggcta

SEQ ID NO: 71927 - DNA, 331 bp, Zea mays
tgacattggtagtttgacaagcatattctttcgttagttggaaacttaacaatgtctttgactgcacagtgactacattgcaaattcggatgtatcaattcaagcagtacatatccttatttatttcactgttatgctgatatgctgctttggttgtttagatctataattttaactatgaacttttagtttgctttaaatatttcttctataaggcaagagaatgccatttttaatttgttgacctgggctttgtgatagcatatatgtgttttagtggtgtggtgtggttgtaacattgggagttatgtgtgacttataaggtaatcag

SEQ ID NO: 71928 - DNA, 273 bp, Zea mays
ataaaacccagcttccaaaggttaggcctctttggttttgtaataaatagatgttaaactgggactgatctgtcatctggacacaaagctttaggtctttgccttattaatttgatcacttggatgttataaagaaagtgacatttattaccttcagaagctaggatcattggttaatgctgacctgtagtggaattttgaagcgcagtctgaatctgtcaatctggacgactgctggtacacaatcgacttgctaagctatctatggagata

SEQ ID NO: 71929 - DNA, 334 bp, Zea mays
taaagccatggtaagtagcataggcttgtattatgctaattgactcaagcctagctacgggtgcataggtttcaccgaaatccaaaccttcgacttgtgaatatcccttggctacaagtcgagctttgttccttgtcaccacaccatgctcatcttgcttgttgcggaatacccacttggttcctacaacattttggttaggacgtggaactaaatgccatacctcattcctcgtgaagttgttgagctcctcttgcattgccagcacccaatccgaatctcttagtgcatcctccaccctgtatggctcaatagaagacacaaaagagtaatg

SEQ ID NO: 71930 - DNA, 323 bp, Zea mays
tgtgaaggttcttcatccccacatgtgctattcggcgatgccacagccagcccatgcaagtcttagcaattaagcatgcatctagaccggcctcctcttttgcaaaatcaactaaataaagtttgccatctagtacacccttaaaagccagtgaaccatcacaccttctaaagacagacacatctacatttgtgaataaacaattatatcccattttacaaagttgactaacggataacagattatatccaagcgactcaactaaaaacacattagaaatagagtgctcggatgaaatagcaatcttccctaacccttttacc

SEQ ID NO: 71931 - DNA, 337 bp, Zea mays
taaaggatactattcaactaaagtaagaagtttttgatattatgccaaggtatgaaaacttcctctccttcagttgttttagtattctatccttagtgggatgtaccatagtataggttaaattccttgcaatataaaatgttcaatagtgcatataactttgacatcaactatatgtgtgcactaatttaaatgaatttagtctatccttttgggtttcaataatgatgattcatttgccatccacatataaggaccatcatttgtgaaaccttcccatgtgtttttaatgctctcttttctcagtgtttgaacaaggtccttccaagtgctttca

SEQ ID NO: 71932 - DNA, 339 bp, Zea mays
tcgaccgaagggttttaatatcctccgctgagaaaacaaatcatggccgaactacagccttggcatggtcgcaaccagctttatctaaaatcgtcgtggtcccttgggcaccagcgaaggcacagaaatctcctcgatcatttaaaatttcgtcaaacacttcggcctctccgctgatccactggacaactccatcagggtcgccacagatgaatttttgctcagaagaatatgccccaaccttagcaaagctatcctttaacttcttggcgcattctaaggacatctcataatgtggcagaacctcccaagttattgggcccacatgcacctgtcctt

SEQ ID NO: 71933 - DNA, 334 bp, Zea mays
tctaaagggagaacacgtgataagtctaacttttgttttattcgaaaaagatagaccttgtgcagcttgtcaagcagggaaacaggtgggaggagcgcatcacagcaagaatgtgatgaccacttcaagacccctggagctactgcatatggacctcttcggacccgtcgcctatctaagcatagggggaagtaagtatggtctagttattgttgatgacttttcccgcttcacttgggtgttctttttgcaggataagtctgaaacccaagggaccctcaagcgcttcctcaggaaggctcaaaatgagtttgagctcaaagtgaagaagata

SEQ ID NO: 71934 - DNA, 340 bp, Zea mays
tttgaacgtactaagcacatgccaggaaaaatggttaccggtaaacctagtacctgagtgaagccgggcgcggactttatccctcatgcgacctgagacagggtctcccatgctagctatggtgggtacaagtgcggccactgcacgacggcagtcggggtcagtggagcattgtatgccaaggcggtgaggcctggacgcgaacggggaatcgatggggacggttgtcatgtgtggggtcggagtaccctgacatgccgtgtgtttaggtttaccttgcaaggtttaaaaactcgattcgaatcgtctgcttctcgcagctaatgagactgcttgattc

SEQ ID NO: 71935 - DNA, 334 bp, Zea mays
  unsure (1)..(334): unsure at all n locations
tgagtgatgcttcttaggtcattagcaatctttgttttacatgggcnccaagggtcttatgttctccttaagtttttaccacatgtgatcaaagtccttagtaccaaggtgtgctctagccatggtaacacctgaggtgttacagtatgcgaagtcatgtcactcctcgactgcttctctggctatcaccaaatatatatgaagaaggaagacaaggccagtaccagtttcattacaccctttggcacgtactgctttatcatgatgccggagggacttaaaaacgctgggtctaccttctctcgcctcaccaagacagtgctcgagagccaag

SEQ ID NO: 71936 - DNA, 335 bp, Zea mays
tgtgaacagtacaaattcagaagggttaatgcagcttcagcagatcagccgaagcctatgctcttatgtgaggacatagcagagcagaaggtgctgttaggctctcaactatcagaagagcaggaaaaaaccttgataaggtttttgttcaataacaaagatgtttttgcatggtcagccaatgatctatgcggagttaatagggatgttattgagcactcgctcaatgtcgatccatccttcagacccagaaagcaaaggcttcggaaaatgtcagatgataaggccgaaggtgctcgcaacgaagtcaaaagactcctcagtgcaggagttat

SEQ ID NO: 71937 - DNA, 331 bp, Zea mays
  unsure (1)..(331): unsure at all n locations
tcgcagttgcacaatgaaacctgngataatgtctttattagcaacaaaggagactaggagaacacttaaatgtcacctaaacacaaaacactcttaccatgtataccatagtcctttccttcagttatcagccgagcatacaccactgcatgagtggaagctttccccaagccaccaggccaccactgccaacatgaagatagatgtaacgaattgtggacaagattttgaacaagatacaaatggctaaagtaacaaaaaaaaggaaaggaaaagaatagtttttaaataaatcaaaatggaggcagttgattcacaggactttactttg

SEQ ID NO: 71938 - DNA, 351 bp, Zea mays
atacaacctcagcttccccctccgcagcacaagttcgatgtttttcttatgccatattttcttctccgtacgtcctccgaagtgttcgtcctcttttggctcattttggtgacgcatacacagtggctaatctagaatttcactgtagagtatatcatctaaaattttcatatatattcgatcaaaccctctaacaacttagaaactatttttaaatcaaattaccggtaaattttaaacttaaaggttaaattaaaaacttaaataataactcttaaatttggaataaactataatataaatatatgaaaagttatactgataatttatatgatttttagctaagacttt

SEQ ID NO: 71939 - DNA, 335 bp, Zea mays
ttgcctcgggcagactaataccagaattttattattttccatgggagtggacagatggcgagagtatcgtgtaccctccgtggcaaaaagctggacggtggtgtatttgtgctctcggttggcgggaacttgatctggtcttaaaaaccccggtggcgagtttacatatgcaagggttaagtgctacatatgtcatgtgattggagatcctcagttgagtataatcgattcagatcgccgtaacttcgcggacatgaagacttggtcactgacctacacgtttcattccagtgaataagaagggttgaaaagaaattggctagtataggtcaagt

SEQ ID NO: 71940 - DNA, 340 bp, Zea mays
tcagacaccctcccaggtaccggaacaccctctaatcatggtatggcgcagcggcggcggtgtccttcttatagctcggcggcggcatggctactggtgcgtgcaaggcgaaaagaaggggaggatcgcgaccagggctaccttataacgaccggggaagagggaggggtccacgcaacgtgctccggggttcgcggcgcactccgccatggccggactccgttgaggcgaatccacggagcggttgaagcaactgacaacggggccgatttgtcagcgacacatcgcaaccgcacgcgccagaaggacagacaactcggccccacgcgacagtgcgcgg

SEQ ID NO: 71941 - DNA, 332 bp, Zea mays
tcacagacattcttctcaatatgcataagaatcttgacaatgacgcacacttagatcgcgccaataaggtaacctccaaaatatggattttttcttccaaattccagacaatgctaaattgtgtttcccgaacttattttcaatgtccttcacactctcataaaccacatgtccagacctacgtgatggagccttttcattttcaatactcccatcaaatgcatcaacattctttcggtatggatgatttctgcgtgtccacctacgatgtcccaggtatacaatttttctactgttttttagataacgactctttgtattctcttgacaaa

SEQ ID NO: 71942 - DNA, 333 bp, Zea mays
tgtatgggttgtgatgtcgccacttacttgatgctaacaagacatttccatcaccaaagccatcttcaacacttcgcccataaaaaagatcaattctctttttcaattgcatgtctgcaagacaagtgataattgcaataagtaatatgatatgttaactagaaggtatgctagcaccagaaacgaccaaagaagatggtatgctaggaaagatattatgaagaagacattcgcccggctcaggaaggaatcgctcccctagttttcaatcaaaaccacttactcgagcagttgctgatggcgacgacgacatataagttctagtttacaacg

SEQ ID NO: 71943 - DNA, 331 bp, Zea mays
tgctgatcttccgtgagcccttgatcatactttcacagcttacaaaattcctgattacttgctcgggggtcataattgtatatcttgggttgccacgaattaattgcactcgagtagggttaaggaaaataagtgatctttaaataaccttaaccacctcatggtcattccactttttgctcccgaggttgcgcacttgattcaccaaggatttgagccggttgtacatgtattgtggctcctccccttggagaagacggaagcgaccaaactccccctcgattgattcccgcttggcgatcttggtgagctcatcacctttgtgcgcggt

SEQ ID NO: 71944 - DNA, 338 bp, Zea mays
tggtctcttttgttgggtagaccttgggaatttgattctgatgcatgtcaccatggtaggagtaatacatacacttttaggcataaagataaaaacattaccttgctacctttgactcttactgaaattgtacaagctgataaagatagagctgcaagtatccataaagaaccaactaatgagacagaaattcagcaacaaattaaattgaaagctcctgtcatgcttgctactcaatctgatcttcttgaaactcatgctactgatgcttgttgctatgccttggtttgcaaagatgctctcttttctattgatgatattgctagcactttgcctgc

SEQ ID NO: 71945 - DNA, 353 bp, Zea mays
ggacacttaaaactaagcttgattatgattggtagcatttataaagggcttgtatgttttttctcacaggctgcgtcctgtgcctataaatagatgaacagtacccccgtactgttcacggaatcttgtaatcgcttgcacgcgacactcggattatttcctcctgtcaagccgaaggtacatgtgtaattaattactatgttctaatatttaaagttatatgataaaacatatggataagtttatgggtgtgaacatattaacctttggatttcatgtcttatatattttatcttttcattatttcataaccctagtcatgaaggtacgcccttcatgacctttgtccaaga

SEQ ID NO: 71946 - DNA, 342 bp, Zea mays
tacaacataattgttccttcttcacaacctcttgaatgatattatgaggaaccgagaagctactggaaggattggaaaatgggctgcagagctcaatgaattttgtattgaatatgttcatagatcttcgattcagtcccagacgttggcagatttcattgctgactggacgccaagggctcaagaggaagaaacaaataaagacgccgaagcatggacagtgttttgtgatggatcttggggaaccttcggagcgggagcagctgctgtgttggtttcaccttccaaagtcaaaacttgttatgcggtaaaacttgattttagttgcacaaataacattgc

SEQ ID NO: 71947 - DNA, 330 bp, Zea mays
tcatacatataggaaagttgggcctatattcttaattttttccttcaaaccgcgatattctttgcattgacacctccatgcactacataacaaaaatgatatgttctccgcgcctgcgtgatataattatttagaggcttagagagtttaatttgaatagtaagaattactcatcacgaagattcactatttcttgtaactctgtgactagcttccacacggccacggctcatcggggcacgaccgcacccatggatgtggccaccagtcatggtaggcgctacataaaggagacatagtacgacacgaatgccaacacccctgtgctcg

SEQ ID NO: 71948 - DNA, 237 bp, Zea mays
tgcaaccattatttttatgtaaccctctctttctgtccagcctcccagactagatcctacaggtcccgttacataagtcaaaggatgaaggataccacttaatgggtctgatgggtgcactactaaaactccctggctaaaactgcgtgcaggtctggatcccaatcaaaataccctcctgggggccagggcaccaacttctttttaaatatactggcattcatccctgacaagtct

SEQ ID NO: 71949 - DNA, 331 bp, Zea mays
tttaatcgtataggagaataaacccttccttttttcttctaggggaaatcaaatttacattgtagactatatatattaagaaatagcttaatcctaatccttttatatatcctatcccaaaggcaatttagattatctaagtatctttaattatgtatttttaacatatacatgagtggaaactcctaaattatgattatctttaaggaaaggtgttttgatttaaaatctttgagaatatttctttgtcttcacaagattgaattctagggtgttacaacgctggcgcatgagttgttttggacccgtgactgcttggaggacccccgct

SEQ ID NO: 71950 - DNA, 335 bp, Zea mays
ttaattggaaggagctctcatatcttatgcttattttaacaacccctcatctccttctatctgtactttctattcatttttaaatatctctacctctttcattcttttcctatttctctccctctccaacaatttctcctattcagcttcccttttatactttaactaaactatttgactttcatacatcaattttggagttttaaaaaactatacaatatttttagtaccgtaatacacatttttaattaattaaatgtgaaaaatgattaaactcccaattaagaacactaatttgtgaaagggggagattggagctcttctgtatcgagggt

SEQ ID NO: 71951 - DNA, 287 bp, Zea mays
  unsure (1)..(287): unsure at all n locations
tcctttgccgagtgcctactatgnggtatcttgttatagaagactctttgccgagtgccaaccgttggctctcggcaaagactgacggtcgtcagctatgggacggccgctgacagccctttgccgagagccctctttgtcgagtgtttgacactccgaaaacttgtctttgccgaatgctgttctgtgcccagaggtcagcactcggtaaaggggctttttgtcgagagcccaactttaccgagggctgctcttagaaagacttttttgcgactgcccgacaaaaa

SEQ ID NO: 71952 - DNA, 332 bp, Zea mays
tctaaagggagaacacattttatgattaatttatgttaattttgagaaagacagggtttgtagcgcatgccaagcaggaaagcaagttggagcccatcatccacacaagaacatcatgacgaccgacaggccacttgagctactccacatggatctattcggcccgattgcttacataagcatcggcgggagtaagtattgtcttgtaatagtggatgattattctcgcttcacttgggtattctttttgcaggaaaaatctcaaacccaagagaccttaaagggattcttgagacgggctcaaaatgagttcgtcttaaggattaagaaaa

SEQ ID NO: 71953 - DNA, 334 bp, Zea mays
tccactgcaaatctacaagaaattttaaaatttcacaattggtatcatttacatgtcttctccagattttgataagactatatttcatatcttatgcttcccatgttgctataaatacacatgttgttaatatatatcttttacctatgcataaagggagttagtctaatcaaatcatatcttatacctctctttctcatgtgcttttcctaactagaggatcttcaatagggggattatattttcgtctatgacaaagggggagaatattctttcaaagagggagaacactttttatggggagtcttatttgcttcctatatgcttttaatgt

SEQ ID NO: 71954 - DNA, 339 bp, Zea mays
tggaaggccatccttgccttctgtcgagtggtgcaccggacaatctggtgtgccaccggacaagtcctgtagacggtccggtgcgtgatctccttccaaatttggcatatctgaccgttgctcctctgggctgattagcgcaccggacagtccggtgcaccagctgaccgttggagcagtctacgtgtcgcgtgaagattgcgtggccgaccgttgctcaggcgaccgttggctcaccggacagtccggtgatttttagccgtacgccgctgtcaaatctcaagagcagtgagttcaccgaggaccaatgttggggacttgttctcaagtgctatgaaa

SEQ ID NO: 71955 - DNA, 341 bp, Zea mays
tgcaacccacagtttcctttaataaatctttattctttactcataatttttggctcttggagacaaataatagttgcgctggtagaaagaattgtttgactcacactttcacgcttaacacgggcattcaaaccccttacattccaagataaaatacagcagtttgtattcattaaaagatgaaccctcctctacttgaacagacattgccacataaagaatataacatagctaacatttgatgcagactggcaagcttgttcaccaacagtaagatacacatgtcccatgagacacacaaaagttccaaactgaaattagtaagatacagaggtacaatg

SEQ ID NO: 71956 - DNA, 329 bp, Zea mays
  unsure (1)..(329): unsure at all n locations
tgtagtcaccgatgattatgctttgttgtaantctattatgtgttggctatgggcacgggtaaaaagtagtaatgctcatgtgaagtctaaattaaaacacaaactgttgggtgattatcatgaggaatgcgtggttaattggttgtagtaattatagtgcactaaatgacttgaataaaatttgcaagttgacttgttggtccttatttgattggtttaactctaacaaatggtaaagtgttagaataattcaaatctctagatcatggcaattcttgaattgtataaaagctgaaatgtattgattgctggtttgggctgcacacac

SEQ ID NO: 71957 - DNA, 343 bp, Zea mays
ttaccaaatggacgtgaagagtgccttcctcaatgttttcaatcaaggaagaggtctatgttgagcaacctcccggctttgaagacagtgagtaccctaaccatgtctataggctctctgaggcgctttatgggctcaagcaagccccaagagcatggtatgaatgccttagagatttcctcattgctaatggcttcaaagttggaaaggccgatcctaccttatttactaaaactcttgacaatgatttgttcgtatgccaaaattatgttgatgatatcatatttgggtctactaacgaatctacatgtgaagaatttagtaggatcatgacacaaaaatt

SEQ ID NO: 71958 - DNA, 340 bp, Zea mays
  unsure (1)..(340): unsure at all n locations
tgaaggactgcttcggcaggagagcttccgttcttttttacttgntcggnccacggagtcgctttatccgagcgcgagttacttctcgcagaaggtgatgagtgaggtatccgtatcccggaggcgtaggagtccctcggctcggtcagccttggctgcttacgtgtactccgtcgtttccaggatccgctttccgaagtagtcaagaagcacgaaagtaatcctgctgaaaagagatcctttttcgaggaaaaattcgacgcagagggggtctccccccttttagcccccgagggagggtcgggctttgtcgaagctaagccgaccctttcttgacgac

SEQ ID NO: 71959 - DNA, 323 bp, Zea mays
tcgtgaaaatattttccgaagctactctccttagatcaatattgtatctccttgtgacttagcctgattttccctttttcaaagcattcttccgaagatcaatattgtgtccccttcttgtatatgcagcatgatgtatcatgcttatgctatgcgaaatgatatgatgatgttatgctatgtaaaatggtatttattccgaagatacacgcacatccctgcaataaaacacataatctttttaaatcagcgttgacttttcgctgtaagcctcccttaagagcttcttcgccttttacttcagcgggatcagcgtttatttt

SEQ ID NO: 71960 - DNA, 335 bp, Zea mays
tactaaagacaaagtgtagccagttgtggctataattgcaggacagctccagaattggaaagctgaattattgacaagggcaggtagaagtattcatgtgcaacatgtcgtcataagcatgatcatttacctagctatagctattgatttccctgcttgggccttggatgccgttgataaaatccgaaaaggtttcctttagcggggacgcaaagaaacaaatggggggcactgccttctgtcttggggaagagtgtgccggccccttaagctgggaggtttgggtatttccagcctgcatgagttgagctgagcgcttcgtatgaaatggctat

SEQ ID NO: 71961 - DNA, 333 bp, Zea mays
ttctaaagctctctatgggcttaagctatcttcacgcgcttggtatgaaaggcttagggatttcttgctttccaaagacttcaaaattgggaaggttgacactactctattcactaaaagaattggtaaagatttatttgtttgtcaaatctacgttgatgatattatttttggatctactaatgaattattttgtgaggagttcggaaaaatgatgtcaaaggaatttgaaatgtctatgataggagaattgagcttctttcttggccttcaaatcaaacaattgaaagatggaatttttataagtcaatcaaaatatttgagggacatgct

SEQ ID NO: 71962 - DNA, 335 bp, Zea mays
  unsure (1)..(335): unsure at all n locations
tcggtaaataacaacttcattttcttcatgatcatatgcggngctgactcctccaactctcataatagacatatcacgaaagtaccttcccctcatggcgtcaacctgaatttgcttaatggtcgactttctgaagatagtatggcttggccaccatggtcgatcttcggaatcttcatctccagtttccacatcaaaatcatcactgccatcagaatcttcagataaatcctccattatctccttggtaatcttctctgtattcgtttttgccatagattcataaaacccagcaataaaagggtccacaaccttttttccctcagccaacttcg

SEQ ID NO: 71963 - DNA, 330 bp, Zea mays
cttatggatgatagcttccgcactgcttttgtttagatctgcccaagggggttcttcttacaggatcttccgcgaagaagcatacccccaacagtagccccttcgcggggctagatcgttttttgtaatgagcttgatccgggaaaaagtctcctaagcttcggaatgcccaaagtccgaaaaacacctttcctgagctcgttgccgagaaactattaaaatattccgagcacgaagtggccccaccatgcggcgggtacacgcgtcctggcgattcaccttctcgggttctgtggcccaccattcagtgggtgcgggcgattgttcgtc

SEQ ID NO: 71964 - DNA, 331 bp, Zea mays
ttaattgatttagagtcccttgttggatgatccccaggtttagcttttccatttcctgacacaaagtgttctcggaggttttcgccataagacagtggcaggaagtcttacgactcaatgcatctgccaccacattggccttgcctgggtgataatggatctccagttcatagtctttgatgagctcaagccatcgtctttgtctcatattcaactctgactgggtgaagatgtacttcaaacttttatgatctgtatatatgtgacaaatattacccagcagataatgacgccaaatctttagggcatgaaccacagcagctagctccag

SEQ ID NO: 71965 - DNA, 333 bp, Zea mays
  unsure (1)..(333): unsure at all n locations
tcaactccatctatattatggattgttttgtaatcagnccagcttccttcggcccttctggcagcttcctgactcccatgaatagcaataggcccttggtccgaaggtatcttcatgcagagataagctgggtgaagaattgcttcaaaagcatttagggtaccacgaccaatgatggcgttgtaggggtattccatgtcaacaatatcaaacacaatttgctcagtccttgtgttattaacaaatccgaaggttaccggcatggtaatcttcccgagtgccacaatctgccgccctccgaagccacaaagagggtgcgtagcatcatgaatc

SEQ ID NO: 71966 - DNA, 339 bp, Zea mays
tcgtctatctgtctctgaagatcagctagactagccatcttctccttcttgcgatgcacctgttgctgaaggatctccaggttttggatctcctgatccaggtcatcctccgaaggtgtcggactaacagccttcctcttctggcttcgggcctctctaaaagaaaggacgtcctgattgggatccagcggctgtaaagtaccagcccctgtcgctgaatcttttttcggcggcatgaccaaggtgatgcttgccgaaagtgttcaagactcaaaaaatggaagtgagttcaccggaggtgggcgccaatgttggggacttgttctcaaatgctatgaa

SEQ ID NO: 71967 - DNA, 341 bp, Zea mays
tgacccttgcattcaaacgaagcaccactcctgactctgcttcgtcacaagaatagcttcggaaaaaaggtcattaatcccaaaaaactttaggaattcataaataaatggctagattgcgctccactgccaggattgagcgtgaggaagacgaggccgaagccactgaaactgttccgatttccgaagcaatgaggcgttccaggatcgtttcatcagaggacacacctgctgccgaagcaacacaagctgttactgaagaaattggttccgaagatgagtacagcttcgggatgccaagtaaacctagtcatctggattttggaaggtccaccatctct

SEQ ID NO: 71968 - DNA, 343 bp, Zea mays
tgtgaaggttcttcatccctacatgtgctattcggtgatgccacagccagcccatgctagtcttagctattaagcatgcatctagaccggcctcttcttttgcaaaatcaactaaataaagtttgccgtctaatacacccttaaaagctagtgaaccatcacttcttctaaagacagacacatctacatttgtaaatagacagttataccccatgttgcataattgactaacagatagcaaattataaccaagagactctactaaaaacacattagagatagagtgctcattagaaattgcaattttacctaacccttttaccttgccttgattcccatcacc

SEQ ID NO: 71969 - DNA, 341 bp, Zea mays
taaaggatactattcaactaaagtaagatgatgttgttaagaggccaaggtatgaaaacttcctctccttcagttgttttagtattttatccttagtgggatgtaccatagtataggttaaattccttgcaatataaaatgttcgatagtgcatataactttgacatcaattatatgtgtgcactaatttaaaggaatttagtctatccttttgggtttcaagaatgatggttcattttcatccacatataaggatcatcatttatgaaaccctcccttatgtttctaatgctctcttttctaagtgtttgaacaaggtccttccaagtgctttcaagatg

SEQ ID NO: 71970 - DNA, 336 bp, Zea mays
  unsure (1)..(336): unsure at all n locations
taaggagaggctagctaaggttttgtttacttcncccagattattatgactctagtttcacagatcttccaaatagagttgtttgtgttcagataacctgctatactatttagtttccatttgattttgccatgacctggtactgacttaaagctctctctcgtcaatgacaaaagtggcacggtcgaaagaaagagctcgagacagtgataagttcacgggcaaggaaaagaggattgcgaaatccaccacgaaggcaaatggcagcagaaagcctcgaggctctgtcaacttcggctgcaggagcaccataggaaggatgggcatgtaccctaa

SEQ ID NO: 71971 - DNA, 303 bp, Zea mays
tggacttcccagtttatttttctctaggcttggatcaaacggaggatgattggaaaggggctggccactgaagttgctctcgagcggctttggcggtacgtggggaggtcgcccgagctaatgtcgggcttgaggaattcatgcatggtacggacgagtgaactaggaaggcatccgatcactgtgacgggctttataatcgaggagccagcgttgtcacaggcggacgccggcgcgcgggggtaaacgcacagtcgtgctttgagcgcgcccccgagtgttagcccgcgtctaacacttggg

SEQ ID NO: 71972 - DNA, 332 bp, Zea mays
tagtttgatgattaaagtccttgggtgaagtttgatatgatttggacaatgtttggtcccaaacccaatgaactagcctcctagggtttaattgcctaatactgataaaatactaacttaggaaaccctagtggctaatgtgtaccatgaaggaaagttgtattcaagatacaacttagtatgtatcaaagaggaaattctccggtcgggtggtggaacgcacccgccctaaaccctaagatgaggagggggcctaagcgttttgcctgtcgatcgaaaggtggaagaacacatgaggacacaaggattaaagtgggagtggtccgggccgc

SEQ ID NO: 71973 - DNA, 336 bp, Zea mays
tgagagagctcgcattaactattatttctatttatagatatgggacaagtaaaaaggggtataagtgaaatgttttccaaaaagagtgcgatgaagggtactcaccctcatcacctagcgaagtaagatgatcagggactccctggtttaggggaggtcctaaggtgttggctcaactggtttaggcgtgagcagaaggatcgtcctctcatataaggaccggctgtcatcttttattacctgtactctcaaaaagtacaaccactcgaggttgtgtgggcagccactcaatctgaactcgtacggtcccaccccagggttatgaaagctggggta

SEQ ID NO: 71974 - DNA, 337 bp, Zea mays
tgtggtgccctcaggcgtattgtcgcagccgaagtaccaagtctcccactcggaagtctcggggccgaacccttcgggcgtggcagcgtcgctgggtaaagccacgtcccgagccttttccagctgggccaatgaatcctctcggatggtctggctgccttggtcgacgtaagcctttgtgctcggggaaccgtattccaagtccgtgggtaagatggcctcggccccataaactaggaaaaatggcgagaaacttgtggcccggctcaacgtgctcctcagactccaaaccaccgagggtagttcttttatccaccgcttgccaaacttgttgacg

SEQ ID NO: 71975 - DNA, 335 bp, Zea mays
tatctcagacaactctcttaattggagccattatgactagagataacatgatgatctgattatttgtatgtgtaagacataacaatgagagacaaaactagtgtttatgtgtgacagtgagagaacttgataatctgattatagaacttccagtggtcacgtactgtctatgtactctagtaaaaactgaactacagatccgatataattatgcaagttactttctacatctagttatctactgttagtttgttatatttagtgtctgaagttgagaaaccataatagaaatgtatgaaatactcttaccaaatgttttccttgtattggattta

SEQ ID NO: 71976 - DNA, 318 bp, Zea mays
tctatatactagtggacatatttgttttacttttatatggctacttccatgatttatgctacaaaatagatacgccacgcattagcatatctatcatgtttttataatttatgagtacatgattatcaatcattatcattagatatacaatataggggaataacatggtgactatatatacaaatagtcctacatcctcgcataccagcattagaatcacactcattcatgcttctaaagattatcgtcgatcaataccatatcagtaacaacagagtcttaatagtattcacctgtgcggcgatgaaacgacgggat

SEQ ID NO: 71977 - DNA, 329 bp, Zea mays
ttgatcagcttatatgtgggttttctagtttgttacaaggaaatctgacatatagaattgatttctaaatatatattgatatatgttgtcttccaaatagacgaggtatcttgtgtgggttgggcttctcgtgtagcctaatttgtgtacctcatttcctttggattatttttcatgtggtaaggtactctacatatatatcaatgatatatctgatcctcaatggactaaacataattttgttgagcccaaaaaatgtttgttatttggttgtagtccaaatttgttagttcaaagaaagcttactaagatcaagcgataatgagacg

SEQ ID NO: 71978 - DNA, 302 bp, Zea mays
agcagcttaaatatagcggtgaatagaatgctcagatagcaaaattcacgagtaaactccgtaccatttgtgaggattgaggaaacaaacatctgagatacacagaatataaagaacactctcacctgtgctgtgatatttctctggtcaagatgaggattattgtcacaggtgggataatcattatgccaagtctgcggtctttttttttgaaacatgctgaatgtgcacatcgatttttaacattggagtgagatatccacatagattgtactctctatacatgcgtgactttttacttc

SEQ ID NO: 71979 - DNA, 249 bp, Zea mays
  unsure (1)..(249): unsure at all n locations
gctaccttctgatgtattcttccaaacaataaggcaccttcagtgcgagtactntgaagagcagttcttactatttctcctgtgtacagtgaagaatggagaactgaaataatntcttaccttctaggctacttcctatcagatgacgaagcttataataaaagaatagatgccagagctcgaccgtatatcattatagaatgggagttatacaagcactgaggttgtgcaccgctggtcaagtgcttg

SEQ ID NO: 71980 - DNA, 340 bp, Zea mays
  unsure (1)..(340): unsure at all n locations
gcacaactacaagccggttgtatgcgtagaaataaatcccagtccgaaagagagggcgaacactaatcaaccanagaaatagagcggatgacacggtganttgtttaccaagttcggttcaaaaacctagtcccgtgaggggcacaagaccggtcttattaacctttcctcttcaacgtacctaatcagtgacttctcttataaacggtactaactctacaagacacccacttgtgttcttgttgattacattgctgaaacagaaggtaagagaagtgatcagcgaaaaactcatgacacgaaatcttttcacatactagttaagtctgatgatgcaatc

SEQ ID NO: 71981 - DNA, 231 bp, Zea mays
atttagcaacaatggtattcaacaactatagaagatcctttactcatgtggagccagcagcgggaaatttaccccttccgatgaagagttaccaaaagccttcgatcatatcgaagctgaaattgaagaacttgacgaagttatagctgggcacggtgacttctgtgcctgggaagcttctcggtgtactgctgcagcattcctgaaggctggctgcgagcatggaaagat

SEQ ID NO: 71982 - DNA, 432 bp, Zea mays
  unsure (1)..(432): unsure at all n locations
agcgaccgagctgcagcttaatgtattagaagccttggtacagttgttatgtattgtgaccaagttggtacctagaacccaagaccctagtcttctgctctatgaacttcactatagaatccannaaacctagttntccggagatccgtgaacgaagattgtattcaatacattacataatatacctttatctgtctnntgaatttcttgagcaacatgagcattcatgattatatatggctatatatagaaaacgaagaagagattgaagctgtagaagcaacgtctacaccaccaccaccaccttgagaactccaggtctggaatgtcacactctgtgttctgtgcaccatgacctgtgcgcgaacataatcaccaagtgtgctgtgaccaagtctcacacatatgatgaatcattgtacacgatctaat

SEQ ID NO: 71983 - DNA, 224 bp, Zea mays
gcttacaaccataattgttccttcatcacaacctctgaatgatattatgaggaacagagatactactggaatggatgcgaaatgggctgcagagctcaacgaactctgaatgaatatgttcatagatctatgattcagacgcaggctctggcagactatattgctgactggacaccagtggctcatgaggaggaaacaaataaagacaacgaagcctggatagt

SEQ ID NO: 71984 - DNA, 231 bp, Zea mays
  unsure (1)..(231): unsure at all n locations
gctaatgaaccatcacttcttctatagacagacacatctacatctgngaatatgcaattataacccatgttacacagttgactcacagacaacaagttatatccaagcgactcaactaagaatacattagaaatagagtgctcggatgatatagcaatctttcctaaccacttcaccttggcctgattccacgcacccgatatgattgagtcatgggagactttgttcttg

SEQ ID NO: 71985 - DNA, 186 bp, Zea mays
cattctttgaaaagctacaatcctagttgaaccctctatttttttaataacgtcaattaacgacaaaccgaacaattttaagttgaaaacctacgtctgatgtattttagtctcacctcctttaattctatactatagctgaaattagattagcataacggaatgtcattacctctcaataaaaat

SEQ ID NO: 71986 - DNA, 363 bp, Zea mays
  unsure (1)..(363): unsure at all n locations
ctaggagacaagcaacatagggctgttgctctaattattcagaacagatacacctgtaaagtgttgtcacaaccagatgttcncatggcagcaatgatcttgcggataaccggatgtattgacactcgtcatggtgccatccttaacccaaagtagagtttgaaatgtctgagaaggtcaagtgccaatgaatcaaaatctcatgctagtataagaagtagcctaatggtccttcatgatgtataagcctgccagggatgtatcattatacttacagctgtccacgacatacttgcagatactctatgtgccacctcccactatagtttcgtgttacgtaatcattgtgagggaactaacatt

SEQ ID NO: 71987 - DNA, 300 bp, Zea mays
tcaacgagagtttctcttttttccagccgaacgcgatatttcactacccagctatgaactacgtattaggcctcgatcacaagaacatgcgcagttgcggtacactgctacaacaagtaaagatgatgtcaaatcgtgtaactcccttgaaatacagtctgatactccgacaatgcgagctaattgaggtttgaagtatacaaaaaattgaaagcattaaattttgaaactactgtgtatctcgatgcccacactgagaacatatgcaattctcagacgtcaattacttagttccttata

SEQ ID NO: 71988 - DNA, 153 bp, Zea mays
gtcttgatgttcactatctctgagctcataatatctttctactttatatcaccaatcgacgattagctagaggatggacaatattgtgcacactacgacatgagcctctatagctattgtgtgctggcttccaatcatgcctgtgagtaccct

SEQ ID NO: 71989 - DNA, 336 bp, Zea mays
  unsure (1)..(336): unsure at all n locations
tcacangctgtgtcctgtgcctattaatagtgaacagtattcctatactgttcacgcaatcctgtaattgcaaacgcattgctcaggaattatattttggtaacgtataggtataaatgtacctaaacattactgtttaacatctgatattcatataataaatatgcgagtgacgtatttattactatatattatcttaatgctcacattcatatacttcgtttatctgtaaggttattacgaaagtgtaccttgtatactctgtatgatcttctcaagttataaaccttggagatatgttatcgaccaagcatatattacatttatgtgctgtct

SEQ ID NO: 71990 - DNA, 203 bp, Zea mays
cccttacctatccgatcatgcgcgatagctctgtgtacccgtgagctctcggcgcctgatgactatgctgcgggttggtcgagcagcgtgcgtcgaccccgcgtctggtcgtggcagggagttcgccagcttgacgcgaccgctctctacggacgttcacctctgacataccgacacttgcggactccttgcgtcggtagcgg

SEQ ID NO: 71991 - DNA, 299 bp, Zea mays
ctggacgtttatccactggctagcggagcatactgcctgcaactaccatagcacgctctaacggctcatctttgaaaataactatataaagactgtcgtctaatacaccctataagctatgaccttactctttaagaagaccattacattggaaagacactatatccaattcataatgctacgatacaatatatcaagacttctaaatcttggaaaaggccttgaatgtattgctaacttacttgcttgttcatcacgaataagagctgggacctgtctgagagagaaaatcttttccc

SEQ ID NO: 71992 - DNA, 250 bp, Zea mays
ttgatacgcgaaaatttgaattaaaataatctattgtaatgtctcctgaaaatttacttttgcctgtggaatgcttgatgggacaaactgattttttgaccgaagcaaaaaccttcctttttttcacaacaacataattgtttttgtgagcttgcatagactgagcactgctgtctttgtgattatatgagatctcccagttaatgatgtttgaatgatgatgatggagttatctatgaagctaccacct

SEQ ID NO: 71993 - DNA, 263 bp, Zea mays
ccgtgatagaagctaccggctagaatgacttgcttatcttggcagatgaccgggatatgctagtgatgcatggtctaatttcatttgccatagagtgcacctgtgctgtaacgaatttaatattggtctccctgcttcagacggatcaaaggctacttgcttacgaactaatcgatatgcgggcatgcctatgttggacttagaacaactctattgcctatcacgtgagccacttgtgtgaagaatagtgccacactgtttga

SEQ ID NO: 71994 - DNA, 223 bp, Zea mays
tgctcattctagagaaaagcacgagcacatgtttagatcaagcaaattatagatgagaaatccatatgagctggattggaagaccaataagtgcaacttttgtgtaaaactactaaatagaacgtctaagtatttacataaatcgcacttacattacactcatctgtttactactaactctcttggcaagaaaggtggcatttgtacttagttcgcacatatt

SEQ ID NO: 71995 - DNA, 131 bp, Zea mays
  unsure (1)..(131): unsure at all n locations
tagaccttgtgcagtctggctatcacgtanacaagtgcgatgagcacatcacagcaagaatgtgatgaccacttcacgacctctagagctgctgcatatggacctcttctgacccgtctgctatctgagca

SEQ ID NO: 71996 - DNA, 183 bp, Zea mays
agtgtcgagttcagctctatataaatcaactaagtatagctgaccctctaacactctctttaaagctattgaatcatcacttctcttaaagaaagtaacacctacatctggtaaaagatagttgtacccattctacataattgtgaaactgaaagcaagttataatctaatgaatctacaaga

SEQ ID NO: 71997 - DNA, 84 bp, Zea mays
caacacgccgcacagcgagaccaagagattttcacacccgaaatcaaacccgccacaagcccactcaaaacaaacaccaatgca

SEQ ID NO: 71998 - DNA, 171 bp, Zea mays
tacctaaagtcgcgctgattcctcttctcaaaaagcaacttagagatcctcttgtaaccactctgggttaggggacccttgtaattctgaaatttgcaagtttcctttcctgccaccaagtaatacaaaacttcacagcctcacgggtcacctcggatacctctatactcc

SEQ ID NO: 71999 - DNA, 304 bp, Zea mays
  unsure (1)..(304): unsure at all n locations
tgtgccgatgacatctcttcatcttgccacaagctgtggcagaattcatggtggtatccgagcgtatcatcaccatagatctagtccaagaatatctgacctataatggtgttccgacgctgagtgaatggaatatgccgaagttaaggtgacaaaggacaagaatgaacttgtgcgactgtcttatcggttcaaatatgagaaacactttacagggccatgccaattactggtagaaatggtataaactatgtgcantgatatntgggtaattacactacaaacagaagatctgctgatgact

SEQ ID NO: 72000 - DNA, 235 bp, Zea mays
caactgcagaccatacctgtaacatgtgcgttcgcgtgctagggactggatatggctggaccctctcagatggctcaatgaggatacactcatgtactgtgtgctatcgacaaatacactcatgtactgtatatgattggacccttcaagaaggcagcggaattcatacagaacgtaatattcaggttcggaataccgaacaacatcataactgacctacgatctaacttcacta

SEQ ID NO: 72001 - DNA, 441 bp, Zea mays
tgcagctttagtaatagtagtcgcagccaagaataatttatatgtatagtaataaagaaaatggggtttagtattaaataatctaaacttgttaaatatattaattcgtgtaactccaatttgaacccgtcaagttgctataattttgtgataaaattgcctacgcagtagtagcattcattgagtcatatcacacacttttataggtagaagtttggtacccttttgagagcataattatttactaaccaacggtgatatatctataactatgaatttactatgacgtgatttccagaatatagttatatgctatattaaagagtaattaattatttagagtatattctctcatatgagggatatacactacattataatataggttaataagtaaccacgtggatcttcgacaaaaacctaacttatagatgtagctcg

SEQ ID NO: 72002 - DNA, 433 bp, Zea mays
tgacattgttccctgttggaagccaatgccatgctttatgccatggcgtctcccactatagagcatgcttctagcaaatttaaatttttcatcttctaagtcatgctcattaattttagcactaagttgagctatgcgatcaatgtgtttcttaattaaagctaagtgatcatgaatagcatcaacattaatgtctctacatctagcgcaaatagtaacatgttcaacggtagatgtagagggtttgcaatcatttaattcaacaatcttagcatgtaaaatagcattctcatctctaagattggaaatagaagcattgcaaacatctaagttgttagcctcagcaattaatttttcattctcatttctaaggcgagcaagggaggcattcaatttttcaatcttagcaattgaactagcattatcatttcta

SEQ ID NO: 72003 - DNA, 422 bp, Zea mays
gtaccaaatggacgtgaaaagtgtcttcctcaatgttcctatctttgaataagtctatgtcgagcaacctcccggctttgaagatagtgagtaccctatccatgtatataaactctctaatgtgctttatgggctcaagcaagcccaagagcatggtatgaatgcctaagagattttcttatcagtaatggattcaaagtcggaaaagttgatcctactctattcactaaaactattgcaaatgatttgtttgtatgccaaatttatgttgatgatatcatatttgggtctactaacaaatctacttgtgaggaatttattaagatcatgattcacaaattccagatgtctatgatgggagagctgtaatattctctatgatctgaaagttaacaacttccatatggcaccttcttcaccaa

SEQ ID NO: 72004 - DNA, 430 bp, Zea mays
  unsure (1)..(430): unsure at all n locations
tctaactaaactcctggcaaatatattatagaatgttatcacaattactcatccacaagcactaatatggctttatcaagggaaggatcattcaagactgccttgcatgggcctttgagtaaatccatatttttcaaaagtcaaataaggaactggtcatcctcaagcttgactttgaaaaggcttttgataaggtagagcatgttttcgttctacaagcattgcatcacaaaggttttggttcgaaatggataaactgggtgaaaggtattatgcagacatgtacctcttctgtccttctcaatggtgtacctgngaaggtctttcaatgtaaaagacgagtcagacagcgtgatccactatcacctctcctttttgtgttagtagccaacatcttacaaagcattgttaatgtaatgaaaatggaccc

SEQ ID NO: 72005 - DNA, 424 bp, Zea mays
tgaagctggcctttgcgccatgacgaaggaggatctcgcagatagccttgcttataatagtctgaaggtacaaaaattgtaaattttgaaacttatgaattttgaattagtcttttgctgttatattaatgcattcattcttttgaatagggcttaatactcagcaatgccttaagggcacaaaagaatgctaaagacgagagctgcactatcgctcttaacaaccttcgaacagaggttatcatgctaagaaacgaagccttggaaaaggacaaaattctgcttacattggtggacaaaatgaaggaagacgaagctaactctaaaactcaagccgaagcttagaagcgcaaaatcgaagatcttcggaaacaattatgcccgagctaaagaagaacgcattcttgaagaaacaatacgagaa

SEQ ID NO: 72006 - DNA, 428 bp, Zea mays
  unsure (1)..(428): unsure at all n locations
tactcctccacgggaaaggccattcatcatcgcctttattntgaaccccgggacatacaatatggccaacgatcaatgcaaggtctaccgcatacgcttggaacatccaacagctacgtcgcttttacccttaaaatgtttcaagtcgttcatgtatctcgctttctttacatgcataaataaagtctaaccatcaatgaaggatcaaccttgcctcggcaaagcccgaccctccctctgggactagaaggggggaaccccctctgcatcaaaattttcctcggaaaagtcttttgccagaacgtatttcgtgcttttcgactgcgttgataatagaatcctaaagacgagtgagagagaccttgaacggcaatgccgaccgagccgagggactcctacgcctctgggatacggatacctcactcatc

SEQ ID NO: 72007 - DNA, 417 bp, Zea mays
  unsure (1)..(417): unsure at all n locations
ctatcanatggacgtgaagagtgtcttcctcaatttaccaatcaaggaagaggtctatgttgagcaacctcccggctttgaagatagtgagtaccctaaccatgtttataaactctctaaagcgctttatgggctcaagcaagccccaagagcatggtatgaatgccttagaaatttccttatagataatggcttcaaagtcggaaaggccgatcctacactctttaccaaaacacttgaaaatgatttgtttgtatgccaaatttatgttgatgatattatatttgggtctactaacgaatctacatgtgaagagtttagtaggatcatgacacaaaaaatcgagatgtctatgatgggggagttgaagtatttcttaagatttcaagtgaagcaactccaagaaggcaccttcat

SEQ ID NO: 72008 - DNA, 424 bp, Zea mays
taaagccatggtaagtagcataggcaagtaatatgcgaattgattcaagcctagctacgggtgcatatgtttcactgaaatccaaaccttcgacttgggagtatcccttggccacaagtcgagctttgttccttgtcaccacaccatgctcatcttgcttgttgcggaagacccacttggttcctacaacattttgattaggacgtggaactaaatgtcatacctcattcctcgtgaagttgttgagttcctcttgcattgccaacacccaatccgaatctcttaatgcatcttccaccctgtatggctcaatacaagacacaaaagagtaatgttcaaaaaaatgagcgacacgagatcgagtggttacccccttatgaatatccccaaggatggagttcacggggtgatctcgttgtatcgc

SEQ ID NO: 72009 - DNA, 426 bp, Zea mays
tcatgaatttcatgaactggcctctagtttcgattttttatatgctataactcgtggagctggatctgtttgagtgaaagaagttggaatgaagttgaaatttttgaagtgaaggtatcccaaacaaggtctaaaacatcagtttcaacggtcgtcctgcgttaataattttttaaaaaatcctacatttctatagaatcaattcgcgctcctataatttcttctctactactccatccgttcataaatatatgacattgttgactttttaaaaaactttgaccactcgtcttattaaaaaataatgagttatcatttatttttttgatttgttttatcacttaaggtagtgtgtgcttgacttaaaattatacgcgaactccgtgttgagtgacccgccatactggaacctccgatagcgtgcct

SEQ ID NO: 72010 - DNA, 425 bp, Zea mays
  unsure (1)..(425): unsure at all n locations
tgacacttatatactatgcctgtgccgtggagaaacaaaaatccttganatcttggctgtcaaactgcttgccgttgtcaactgttatctcggacggtactccgaagcggcaaacaatggtttgccagaagaatttttgggcagtctttgatgttattgtagaaacaaccctcgctttgatccatttggtgaagtattcgacggctacaaaagcgaacttgatgttcccctgatcggtgggcaagggcccgacgatgtccatgccccagcgctggataggccatgtatgggcaatcatctttgtatactgcgaggggttgcctaaccgaggagaaaacttctggcacgcttcgcatgaccttgtgacccgatttgcggcgcatatcattgcgagccagttaaacccttggcggatcaccttggca

SEQ ID NO: 72011 - DNA, 416 bp, Zea mays
ttaggtattatctaagtgtctaacggtacagtatatacacacaacaacattactactgaactgaaggtagcaaaagtttaccatggcttttctttgcttagtgtgtttgattagtagactatttgtggagcataccatgcatcactatattacctagttcagggaacattcaatatttttgctagttctagcagtcaaataaacaagcactgaacaaacaaataagaataacatacatcagaatatcagataaacaagagaagacaagatacctgattacgtttttgttcatccaagtttggaggagctgcacttgtcctatcatgaaattgttgtacaaatttttatatttaatatatgtcatgtaagtagaaagcaaaaggtaatttcttctatatagcttcatgccccaagct

SEQ ID NO: 72012 - DNA, 418 bp, Zea mays
  unsure (1)..(418): unsure at all n locations
ntatatgggcgacggtgtcgaactccgctaaattggtctgaacctggagaaaggcacttctttaggcctgatatagtgaaggaggccgaggaaaaggttcagaaaattattcataatatgaagaaagcacaagctcgtcagaagggttatgcagacaaacggcgaatgcccttgtattttcatgaaggggactatgtctacctgaaggtttcaccaatgaagggggtatcgtgtttcggggttaaagggaagcttgcacccaggtacattggtccattcccggtacttgagcaatgtggaccagtggcgtatcgactgcagctccccgaaattttgtctgctatacataatgtgttccatgtgtcgcaattgaagaagtgtcttcnggttcccgatcgaaccattgaagtaatatatg

SEQ ID NO: 72013 - DNA, 395 bp, Zea mays
ctcgactatgtcggtgacagggcctcatggactgttgaaagtacgcgtaagcggcaaggccgaccgatccgatggattcccacgcctctgggatacggatacctcactcgtcccttccgcgaaaagcaactctcgctcacacaaacatccctgttaccgacagagtccagatgctcgaaacaggaggaaaaaagacgcatcttctcaagcgcggcgagggcgttttcttctggcctcggcggccgtataaagcacacgctacaagatgatctgatcctgcaggctcgggtcttcacgccgaagggagccgtatcaccctcggcatcgacgacgtcttcagcaaagcccgacccatcctctggcggcgccgcggtccatgggctcctccgggaatc

SEQ ID NO: 72014 - DNA, 420 bp, Zea mays
tgaagccatggtaagtagcataggctaataatatgcgaattgactcaagcctagctatgggtgcataggtttcaccaaaatccaaaccttcgacttgggagtatgccttggccacaagtcgggctttgttccttgtcaccacaccatgctcatcttgtttgttgcggaagacccatttggttcctacaacattttggttaggacgtggaactaaatgccatacctcgttcctagtgaagttgttgagctcctcttgcattgccatcacccaatccgaatcttggagtgcttcctctaccctgtgtggctcaatagaggaaacaaaagagtaatgctcacagaaatgtgcaacacgagatctagtggttacccccttatgaatgtcgccgaggatggtgtcgacggggtgatctcgttgga

SEQ ID NO: 72015 - DNA, 432 bp, Zea mays
  unsure (1)..(432): unsure at all n locations
tntagatgataagacctnttgaggctgcgtagtgagctaaatgtcctatattcgcggaacttggattgatttatagcatacatgtatttatgcctttgatcatgttccttatgcattttgttgcttactatggtgctcaagttgtacaatcactccccggacctcacaagtccttgtgcaagtgatgcacatatttagggggagttgtgctacaacttgaccctttgagactaaccgtttgcttgagtttgcttgatttagtctcaaaggagttttgaaagggaaaaggtggacttggaccatgaaagacttccactgcactccgatgagagggtaactaattccaagttcatctcacgtcctcttattgcctttgtattcttattgaagattttggtgaggcaatagggttaaaggcccaagattgattcc

SEQ ID NO: 72016 - DNA, 433 bp, Zea mays
tgtgtgccaagtgctgagtataagatggttgtattgtttgaccttgagcctgaacaatttgatttgtatgtagaatgtaccacagtaattatcccgtagttcatagccagttgctttattgtttagaatgctatggttgatctagtgctggtatttgtaagagaagaaatgaacgaatggatgcacatttagtttttgagtacaagtgagacctacttgactaactccaatcatgctttcttctgaaatgtttgggcacaggagtagagttgaagactaatattttaaccctcttttgttggataatctcctcccttcatgtttagtggctattattggaaaccctaaccctagaatagggttgggctgagtattaataggtcacatagctgggccaggcccattacaatggatgggtagctaacaccccccg

SEQ ID NO: 72017 - DNA, 429 bp, Zea mays
tatcatctctttctttatttgtttaacacaaaggtgcctataaaagttacttaactgcgctaacgctttccacacatcattttttttacaaaactacgaaacataacaaggagtctttccattattatgtggtagtcatgactcttcaacacggaaaacttggtcgtcttcaaattcagagaccttttaaagcccgcggcgtaaccatctagaaactcttaaatgtttcaaccatttcattaattggttcttccctttaggtttaagactgaaaggagcacgtggcttcttctcgttctctcctaactccatagttggtcgactacaaattaatgccaagtcttttctagccttaaggttgtcttttgttgtggtttgtccataggtaaagatatgtcctaaactcactcatgagtgattgacacaaca

SEQ ID NO: 72018 - DNA, 418 bp, Zea mays
tcttccctgcctccggccgccagctcttctcggtctaattgagagccaccgctctcggagtctataaattgagccccccctcggctctgccatgtactctactagctatcgcacccgcttgcatcccaaacctcccaccagagagcttgaatttggaattccccccaaatccgatccccgccaccgtgataccaagtccaccgtggccagccgattctggtaacgctttgtccgattcaaaccttgttttagtatttgaatgtagatacctccaatcatcgggaacacgctcatccgtccgcaatgctctcggtcaccgtggccagagctctgtagtcggtcgttcgtgcaattaggttatgggaaatactccttaagggtttaatcctgtgtatgtcgctcgggagcgccggtcact

SEQ ID NO: 72019 - DNA, 420 bp, Zea mays
  unsure (1)..(420): unsure at all n locations
tggacggtattctgcgatggttcttgtggaaccttctgagcatgagcagctgcagttttagtcgcaccttcaaatgtcaaaacatgtttcgcagtcaaactggatttcagttgcacaaatagtattgctgagtacgaagcacttttattggggcttcgaaaactaagggcaatgggaataagaagggccatcttaaagactgattctcaagtcatagctggccatgtggataaaagcagcagggcacgagatccgaagcttgaaaaatatctggatgcagtccgaaggttggaagcttccttcgaagggttttccgtcaaaagtattccaagaggtgaaaatgagcatgcggatttgctagccaaatcagcggctcatgggctccccttaccctccgaagtatnttttgaaacaataaaa

SEQ ID NO: 72020 - DNA, 416 bp, Zea mays
  unsure (1)..(416): unsure at all n locations
tgcatatctgtcatagtgttcgccatctattacatcatctgtatatgagctgcaaccactagatcagtcccagccggtggaggattcagagaattcatctctgcttgctgttgtctaagcaccctcctgttgtgtgggttggcaggtagatcaattccgcctcccttcctggtattgaccatctgagttagaaacacatggtaagaaagaattgtagacaagacgaggactacgagacatgctcttttgggggttttattagctaagtagattagtgtgtcacctactaaagctaatacattaccttatggtggtacatgctagaatgcccttctatgctatttcaatcaatcaaagaagaanatcaggcatttatcatcagaacaatcatccaatcattttaaatagaaaaaata

SEQ ID NO: 72021 - DNA, 421 bp, Zea mays
tgtgctggagatgcatatgcaattaatcaatattttcttcgtatgcagtccaaaaacccaaactttttctatgtcatggatgttggaccagactacaggctaagaaatgtgtagtgggttgatgctagaagttgggctacatatgaatccttctcaaatgttgtgacatttgatactacatacttgacaaataaataccatgtgccatttgctccttttgttggcataaatcatcatggagaatctattctgttaggatgtggtttgctttcaaatgaagatacaaatacccttgtatggttgttcaaggcatgactatcttgtatgtcaaatacagcatgaaatgccataattactgaccaatgcaaagcaatgccaaatgctatttaagtagtattccctaatactatgcatagatgat

SEQ ID NO: 72022 - DNA, 419 bp, Zea mays
  unsure (1)..(419): unsure at all n locations
taaacatttatgagggatcgtcctacttataacatcgcacgcaaggacatatatgcaatataaacaagtagaacaataagaatggcattcacacaacagttgtgattcggtatggcttgctgtcacatggtgatccccatctccaataatctgtccatcacgatgatctccatctccatgatataggtatgccatctccaggttatgagtccttcaagacctatctaacgtatgctggtaaacaaattacatatacgctttggatcatcacatgttgacacgcaggtcattacattaaatttggacaatacatgtggctccagccatattgccctggtcacgacacgcatgtcatgaataatttattaacatgcatcacatacacataatagccataccgatcacatgtnctgcaaaac

SEQ ID NO: 72023 - DNA, 416 bp, Zea mays
tgtcagataagctatgcagataaacgacggatgcccttatactttctggttggagattatgtttacctgaaagtttcaccaataaagggtgtaacacgtttcggagtcaaagggaagcttgcaccacgatatattggtccttttcctatccttgaaagatacggaccagtggcataccgacttcagttacccgaaaccttgtccgccgtacataatgtgttccatgtgtcacaattgaagaagtgtcttcgggttccagatcgaaccattgaagtgacagatgttgtcctagaaccagacttgacatattcagagcatcccattcgagtcttggatcaaaaggacaggattacccgaagaaaaactctcaagttttacaagatacagtggaaccaacattctgaagatgaagctac

SEQ ID NO: 72024 - DNA, 416 bp, Zea mays
  unsure (1)..(416): unsure at all n locations
tgaagccgaagctcanagaaactcggaactgaatgaatctttgaaaaattttcagaataagtgtttggagttcagcacccgatgcattcatcagttaaagcgagtgttccattttgttggagccagtagtgaagagtttactccttcggctgaagacctgcctggtgccttcgagcacattgaaggtgaaattaatgatcttgacgaagttatagctgggcatagcgacttctgtgccctggcagcttatcggggcacaactgttgcctttttgaagtctggctgtgaacacggcaagattgttaatagacccaacttcagcctgtcaccagcagacctagataatgttcccaatctagcttggagtattgcaaatagatttataaagttagtatggacaaagggtggtcggagca

SEQ ID NO: 72025 - DNA, 434 bp, Zea mays
  unsure (1)..(434): unsure at all n locations
tgagcggtgactggcttcgtttgaaaccctnggaaactggtgatcagcatatccttcagcttctgccatgatgtgattgttcctggacgaagggaggagtaccgggtttgtgcaacattcttgacggccatgacgaaagactttgccataactgcagtgttgccgccatatgaagatattgttgcttcgtagctcattaaaaactgcttcggatctgaatgtccgtcgtacatggggagttgaggtggcttgtaagacggaggccaaggtgtagcctgcagttctgctgacagaggagaagcatcatcaaaagcaaaatttccatgatggaaatcctcataccagtcatcctcgttgacaaagccctcttgatgaagctctctgtgctgaggccttcggctctgctcatcttgagcaagatggcgaacttcttc

SEQ ID NO: 72026 - DNA, 435 bp, Zea mays
taaaggatattattcaaccaaagtaagatgaagttgttaagatgccaaggtatgaaaacttcctctccttcagttgttttagtattctatccttagtgggatgtaccatagtataggttaaattccttgcgatataaaatgttcaatagtgcatataacttcaacatcaactatatgtgtgcactaatttaaaggaatttagtctatccttttgggtttcaagaatgatgattcatttgccatccacatataaggataatcatttgtgaaaccctcctttgtgtttttaatgctctcttttctaagtgtttcagtaaggtccttccaagtgctttcaagatggattcaaaatctacggatataagagtcttggttctttcaatcattgagtttcgattggtctaatatcaagtatgatcgaatcaagcaaagatg

SEQ ID NO: 72027 - DNA, 406 bp, Zea mays
tcagctccatctatgttatggattgcttttgagtcattccaatttccttctgcccttcttgcagcttcctgacttccatggatagcgatgggtccttgatccgaaggtatcttcatgcaaagataggcaggatgaaggattgcttcgaaggcattgagggtaccacgaccaataattgcattgtaagggtattccatgtcaacaatgtcaaacacaacttgctcagttctagtgttgttgatgaacccgaaggtcactgacatggtgatcttgcccagtgctacaatctgtcttcctccgaagccatatagaggatgtgtagcgtcatgaatcttatcttctggctcttgcatttgtctgaaggccttaacaaatatgatgtcagctgcactgcctgtgtcaacca

SEQ ID NO: 72028 - DNA, 415 bp, Zea mays
  unsure (1)..(415): unsure at all n locations
tgagtcaatcattttgcanaggataattgatgctcaaaaagataatctgggtatgaagtacatacgagagaagataagggctggagtagccaaatgtttcaaggaagacgatcaaggtgtgatatggtttaaaaaccgcatagtagtgccaaagaacgaagaactccgccagcaaattcttgatgaagcacatcttagtcgttattctattcatcccggaagcactaagatgtaccaagacttaaagcaacattactggtggacaaagatgaagatcgaaattgcacgctatgtggctaagtgtgacacttgcagacgtgtcaaggccatacacatgaaaaatgctggtccattacagtcgctaccaataccaacatggaaatgggaagacattagtatggactttattatggga

SEQ ID NO: 72029 - DNA, 283 bp, Zea mays
tactccagcttaccacatttgaagcatgagcgcttcccctttgtcttggtcttgcttggttgccccttgcggccttgtagtgccgtcttgaatctcttgatgatgagagccatctcttcatcattaagtccggccgcctcaatttgtgtcaccttgctaggtagcatttccttgcttcttgttgccttgagagcaagaggttgaggctcattgattggaccgtttagagcgtcgtcgacgtatctcgcctacttgatcatcatccgcccgcttacgaattttc

SEQ ID NO: 72030 - DNA, 431 bp, Zea mays
tgcaaccagctgggagatcagatatctcctaagttccgttcgagacgattgaatccatctcgctacggacagcctccctccagtactctgcatcgggagatgtatatgcctctatgagggagcgtggttcttcatccactagataaataatataatcatcacccaatgacttttcagtcctttgtctcttactcctccttaactccaattctggagtctggtcatggacactcgaaggtagagaatatgtccgatatggaccatctggggctactacttccttatcccgcatagggaagatgctctcaaagaatgtcacatcccgagattccattattacgtttacagcgacttcgctcgtctcggaatggaccactagaaatctatatgctgcattgttatgtgaataacccatgaagacacaatctact

SEQ ID NO: 72031 - DNA, 413 bp, Zea mays
  unsure (1)..(413): unsure at all n locations
tgtaaaggttcttcatccacacatgtgctagactgcgatgccacagccagcccatgctagtcttagcgattaagcatgcatctagatcggcctcctccttcgaaaaatcaactaaatagagtttgtcgtctagtacacccttaaatgctaatgaaccatcactccttctaaagacagacatatctacgtttgtaaataagcagttgtaccccatattacataattgactaacggacaacaagttatatccgagcgattctactaaaaacacattagaaatagaatgctcaaaagaaatagctatttttcctagtcctttaaccttgccttgattcccgtcaccgaatatgattgagtcttgggaatctttgttcttgacgtaggaggtgaacatcttcttcntcctcgtcatg

SEQ ID NO: 72032 - DNA, 411 bp, Zea mays
  unsure (1)..(411): unsure at all n locations
tcggcgaccaagtgatctagctcttcgagttcctctaagttgaagaccctgagcatctgtttggtgaaggcaagtgtcctctgacccattatgtcctatttactttataattcactgccccgcatactatgaacaacctaaggatttactagctttctatttaccttgtccttgatttaccttttgggttactatggttagcttcatgctagcgctttactttaatcaatgaacatgatgagatacaatgatgatactatgattttactctggatatgatgatatacttgtggcatttangggactcgagcggtttctcgagtgcctctccgtaaggacctgttcgttgagagaccacccgggataacagtgcaaccatgagggtgaaatgggcgcccttagctaattaat

SEQ ID NO: 72033 - DNA, 422 bp, Zea mays
tgagatatgcattgatgtttgcatgtcttgtgcatcttctttgattctgtaatctgattgagtgttttaatctatcttatagttggttctggttgcagtggtaccagaaaatgcatcataagctattttttggtcttatatccttagtttcgtgtgctctgttcatagattcgacgattgagaatacatcaaagaataaaaatgtggaactcgtattttcagatgaagagcgtgaccaagaacttcctgatttttcatcatttattccattcttacctcctctggtatgtatgtgtgcctttcagcactcaaatactaagatgcttgattgttactaaagtataaacttctaccttatgtgaacagagtgcagctaatctaaaggtctactatgccacacgtttcaccatcatagttgggat

SEQ ID NO: 72034 - DNA, 245 bp, Zea mays
tgacaatgaggaaatggcgctcgtcatcaagagctttcgccaaatcctcaagcaaaggagggggaaggattacaagtcccgctccaagaaagtttgctacaagtgtggtaagcccggtcattttattgctaaatgtcctatatctagtgacagtgaccgatgcgacgacaagaaagggagaagaaaggagaagaagatgtattacaagaagaatggcggcgatgcccatggttgtcgcgaatggg

SEQ ID NO: 72035 - DNA, 416 bp, Zea mays
  unsure (1)..(416): unsure at all n locations
tctaaagggagaacacgtgataggtttgactaatgtgcatttcgaaaaagatagaccttgtgcagcttgtcaagcaggtaaacaagtgggaggagcgcatcacggcaagaacgtgatgactacttcaagacccctggagctgctgcatatggacctcttcggacctgtcgcctatctgagcataggagggagtaagtatggtttagttattgttgatgacttttcccgcttcacttgggtattctttttgcaggataagtctgaaacccaagggaccctcaagcgcttcctcaggagagctcaaaatgagtttgagctcaaggtgaagaagataaggagcgacaacgggtccgaattcaagaaccttcaagtggaggaatttcttgaggatgaanggatcaagcacgagttctccg

SEQ ID NO: 72036 - DNA, 419 bp, Zea mays
acttgattgataaaacaaatgccctatcttatacctttgctttgagtccatatgtttttttatctttcttgtttttttaagaactgagcatttgaccatcacatttggccacctctcatcatctccatgagtcgccatcttgcaaaactttggtgtggacttaacctatttcaatcacaacactgtagtagaggttactccaacagatgtctcaattactcaaacaaaatatatggttttaggaagcataaagatcactattataaaaccttataacataaactaattttctcctttatgatagtgcatacatacgtaaatacatgcatgtgtatgtggaaggcaaaatcatatgcactcttggtcaattaagtccaaacaatggagtttaaactatattgtggagagtagctcacaag

SEQ ID NO: 72037 - DNA, 401 bp, Zea mays
tgaaccgaggaccagccccaccggagcagtgagatcgcgctcgccggagttcgtgaacccgcggagcacgtggaccgggtaattcactgaaccatttctcgattccttgcgcgcatcgcctctacatcaccccgtggagctcctcgtgcactttgattgaaccctaccgccgtggtttggccggagcaagagccgtcgacgacctctgccgcctgcgctcgcggtcagagcagctccagccacccccgacgccgacccgcacaccgacgtgaccgccgtgacctccccgacgtcactgaccaccccaccggagctctactgccgctggtaagcctcgccgccgtgatctttgtcccggttactgttccagtcagccaaggatcacgggttagttttgggat

SEQ ID NO: 72038 - DNA, 437 bp, Zea mays
  unsure (1)..(437): unsure at all n locations
tgaagccatggtaagtagcataggcaagtaatatacgaattgactcaagcctagctacgggtgcatatgtttcaccaaaatccaaaccttcgacttgtgaatatcctttggccacaagtcgtgccttgttcctagttaccacaccatgctcatcttgtttgttgcggaagacccacttggttcctacaacattttggttaggacgtggaactaaatgccatacctcattccttgtaaagttgttgagctcctcttgcatcgccaacacccaatccgaatcttgaagtgcttcctctaccctgtgtggctcaatagaggaaacaaaagagtaatgttcacaaaaatgagcaacacaagatcgagtggttaccccttatgaatatctcctangatggtattcacggggtgatctcgttgtattgcttggttgactcttg

SEQ ID NO: 72039 - DNA, 433 bp, Zea mays
  unsure (1)..(433): unsure at all n locations
tctaaagggagaacacattntatgactaacaaatgttcattntgtgaaagacaggatttgtagcgcatgccaagcaggaaagcaagttggcactcatcatccacaaaagaacataatgacgaccgacaggccactagagctcctacacatggatctattcggcccgattgcttacataagcatcggcgggagtaagtactgtcttgttattgtggatgattattctcgcttcacttgggtattctttttacaggaaaaatctcaaacccaagagaccttaaaaggattcttgagacgggctcaaaatgagttcggcttaaggatcaagaaaataagaagcgacaacgggacggagttcaagaactctcaaattgaaggctttcttgaggaggagggcatcaagcatgagttctcttctccctacactccacaa

SEQ ID NO: 72040 - DNA, 431 bp, Zea mays
  unsure (1)..(431): unsure at all n locations
tctaaagggagaacacgtgataggtttgactaacgtgcaattctaaaaagatagaccttgtgcagcttgtcaagcatgtaaacaagtgggaggagcacatcacagcaagaatgtgatgactacatcaaggcccctggagctgctacatatggacctcttcggacccgtcgcctatctaagcataggaggaagtaagtatggtttagttattgttgatgacttttcccgcttcacttgggtgttctttttgcaggataagtctgaaacccaagggaccctcaagcgcttcctaaggagagcacaaaatgagtttgagctcaaagtgaagaagataagaagcgacaacgggtccgagttcaagaaccttcaagtggaggagttccttgaggangaanggatcaagcacgagttctccgctccctacacaccac

SEQ ID NO: 72041 - DNA, 392 bp, Zea mays
tgacacttataaactcaagcttcatgttgtgcttgaacattccaatccgagccttcttctgaccgtggtgtccgtcacaagttggtgtgcttctgcagcccgaatccagcatgttcaaatccttttccctttcggtcttctccctgattcctaatcaaaacaagagtgcacgggtctccatggtctaaatatgatggacatgaactcaagagtgtaatcacctgatggttgagttgacgagcacgagcgcgagtaatgggaccagaaatcggtacttgtattggtatagatgcatcaatagtgtggatgtcttcatcatataccttgctgtgtatacgagccgtcacaatctctggtttaaagactactaacgaccaagtgtggtcatgatg

SEQ ID NO: 72042 - DNA, 415 bp, Zea mays
tgaagccatggtcagtagcataggcatgtaatattcaaattgactcaagcctagctacgggtgcataagtttcatcgaaatccaaaccttcgacttgtgaatatccttttgccacaagtcgggctttgtttcttgtcaccacaccatgctcatcttgcttgttgcggaatactcgtttggtacctacaacattttgattatgacgtggaaccaaatggcatacctcattccttgtgaagttgttgagctcctcttgcgtagccactacccaatctggatatcttagtgcatcctctaccctgtatggctcaatagaggaaacaaaagagtaatgttcacagaaatgagcaactcgagatctagtggttacccccttatgaatgtcaccaagaatggagttgacggggtgatctcg

SEQ ID NO: 72043 - DNA, 427 bp, Zea mays
tctaaagggagaacacgtgataggtttgactaacgttcaattcgaaaaagatagaccttgtgcagcttgtcaagcagggaaacaggtgggaggagcacatcacagcaagaatgtgatgaccacttcaagacccctggagctgctgcatatggacctcttcggacccgtcgcctatctaagcatagggggaagtaagtatggtttagttattgttgatgatttttcccgcttcacttgggtgttctttttgcaggataagtctgaaacccaagggaccctcaagcgcttcctcaggagagctcaaaatgagtttgagctcaaagtgaaaaagataaggagcgacaacgggtccgagttcaagaactctcaagtggaggagttccttgaagaggaagggatcaagcacgagttctacgctccctacaca

SEQ ID NO: 72044 - DNA, 374 bp, Zea mays
tctaaagggagaacatgtgataggtctaaccaatgttcatttcgaaaaagatagaccttgtgcagcttgtcaagcaaggaaacaggtgggacgagcgcatcacagcaagaatgtgatgaccacttcaagacccctggagctgctgcatatggatctcttcggacccgtcgcctatctaagcatagggggaagtaagtatggtctagttattgttgatgacttttcccgcttcacttgggtgttctttttgcaagataagtctgaaacccaaaggaccctcaagcgcttcctcaggaaggctcaaaatgaatttgagctcaaagtgaagaagataaggagcgacaacgggtccgaattcaagaaccttcaagtgg

SEQ ID NO: 72045 - DNA, 418 bp, Zea mays
taaatattaaaacataacatttaatcgcatttataccttcgtcttgacagaaggcaatgatccaagtgtcgtgtgcaagtgattacaagattgcgtgaacagtatgggggtactgttcatctatttataggcacagggcgcagcctgtgtgaatttacatttatgccctttacaatcgattacagtcatgacacaaactatcatgggtttattggtcatttcatctttaagtcggttcactccttcgtcttgagacatgttactatgccgaagctttataagtgatagcttcagcactgcttttgagaggatctgctgaaggtgtttctttcttcaggatcttcgactacgaagcatacccccaacagtagccccttcgcggtgctagatcgtttttcgtaacaagcttgatccgtga

SEQ ID NO: 72046 - DNA, 398 bp, Zea mays
  unsure (1)..(398): unsure at all n locations
tgtgaagattcttcattccaacatgtgctagtcggcgatgcttgagccagcccatgttagtcttagcaattaagcaagtgttgagttcagctctatcaaaatctactaagtatagctgaccctctaacactcccttaaatgctactgaatcatcacttcttctaaagacagtaacacctgtgttgggggccttcggcttccgaaggtcctcaaaaacataatttgacaatgttttccaagtatgtgagcaggtattttcagaatcaggttgcggatatacaaaagcatggtcaagacgaagcttgactgatatagaagacgatcgtgacgaaggatgaaacgatcacaaagctatgtgcagaanagcttcggtataacagcagataaggggaaccgac

SEQ ID NO: 72047 - DNA, 414 bp, Zea mays
  unsure (1)..(414): unsure at all n locations
tgtgaaggttcttcatccncacatgtgctaagcgttgatgccacagccagcccatgcaagtcttagccattaagcatgcatctagaccggcctcttcttttgcaaaatcaactaaataaagtttgccgtctaatacacccttaaaagctagtgaaccatcacttcttctaaagacagacacatctatatttgtaaacagacagttatatcccatattgcacaattgactaacagatagtaaattatatcctagtgactctactaaaaacacattagagatagagtgctcattagaaattgcaattttacctaacccttttaccttgccttgattcccatcaccgaatatgattgaatcttgggaatccttattcttgacgtaggaggtgaacatcttcttctcccccgtcatat

SEQ ID NO: 72048 - DNA, 404 bp, Zea mays
tagtgcaagcgtgtggaatggaaagacaacgaatctaaggtgtatgtatggcttgagtgaagggcaaggtggaacggagggaaaacgggatgaggcgcgcggcgactggcggcatggctgttcggccttgcgtctgggctgaaaacgatgtgttcgccatggcgcacgggccgaaaacggaggctcgggcacgaactcgaaaataagctaagttcaagcatgtggaaagacaccgaacatacagtgtatgtctttggtgaagggcacagtggaacggatggaaaacgacactgatgcacgcggcgacgggcggcatggctgttcggccttgcgtttgggctgaaaacgatgcgttcgccatgtcgcgcgggccgaaaacaacggttcggccacggcctcaaaat

SEQ ID NO: 72049 - DNA, 421 bp, Zea mays
gaaatgtcgacacccacgactcggacatgccaacgtctcacatgcggaggcgaatgaggaagctctgctcctatcacacgcaagcatcgagctacctccagcggcaccggccgcagcggcactccaccttgatgagtcgaaagcacgtgctttcctcggcgacagctccatcaacgacatgatcgaatgatggtgcctcgacaccggcgccactcatcacatgaccggccaacgagagttcttccccgagctcgactctagtgtccgaggctccgtcaagttttgggacacctccggcgtagagatcaatggtgccggctcagttgtcttcaccgtcgcgtctggtgagcacaagttgctcactggagtctactacatccctgcgttgaggaactctatcaccagcttgggacagctggat

SEQ ID NO: 72050 - DNA, 434 bp, Zea mays
  unsure (1)..(434): unsure at all n locations
tactcctccctangaatggccgttcatcatcgccattattttgtttcccgtaacatacaagctggccaacgatcaaggtgaggtctacagcaacgcttggaacatccaacaactatgttgcttctacccttaagatgtttcaagtcgttcatattcctcattttgtttacatacataaataaagtctaaccgtcaaggaaggatcagtcttgcctcggctaatcccgaccctccctcgggggctagaaagggggaaccccctctgcgtcaaaattttcctcggaaaagtcttttgccagaacgtctttcgcgcttttcgactgcttcgatagcggngtcctaataacgacaagagtacacgtatgcggcaatgccgaccgaaccgatggactcctatgcctccgggatacggatacctcactcatcaacttccg

SEQ ID NO: 72051 - DNA, 396 bp, Zea mays
tcttctgaacaagtgccgcacttaccgctgagtgctaagctgcctcatataataacaaaggagcccctggcgttggtggaattaatgttgttaaatctatcaaatattgcttcagttcctcgaaagctttttgttggcttggtccccattgaaagacttcggctgatttcagcacttcgaagaatggtaaatttctttctgctgatctggatataaatctattaagagatgccagcctccctgtcaatctttgggcccccttttttgtatttggtggctccattcgaagtataacttcaattttacttggattatcttcaatttcctttgttgaaaccaatcatccaagaaatttccccttctttactccgaagacacatttttctggattcaaat

SEQ ID NO: 72052 - DNA, 375 bp, Zea mays
tgctctcagcctccccgatatagccaagtttcctcttcataaccttgtcatcctctgttacagtagatttcccaaactcaatgtggctaggctttgttgggctcacaataatgttatcttcttcactttcattgtcgctttcgcctccaactacaatctgttcagcttcggtattggaggcaccttctgcagcaacttcatctgacacaactagacccgaccacttcatcacttctgaaattggtgttgtttcggcgatttcggtctcctctccttcatgagatatcctatcagtggatcttatcctggccatttgtgtgttcaggttctttgagccgaagccgatctcaagtgacgaagtgcttgcttgaaaat

SEQ ID NO: 72053 - DNA, 428 bp, Zea mays
  unsure (1)..(428): unsure at all n locations
cttaaagggtgccatctngatgctgtcttgatagctattattattttaaaattccgctaacggcaaacattcatcccatttttgtggaaattccataacacacgcccgtagcatatcttcgagtacctggctcactctctcagtctgtccacaggtttgaagatgatatgccgaactgtggagcagtttagtacccagggatctatgaagttcttcccagaatttggatacgaattgaggtccacgatccgacactatattcttcagaacaccatgcatactgagaatactggcaatgtacaattccacataggtaagtaccgggtaatatgtcttgaccggcagaaagtgagcatatttcttatgccgatcaacattaactcagatggaatcatacccttttgtggtcctgggtaatcccacaatga

SEQ ID NO: 72054 - DNA, 384 bp, Zea mays
  unsure (1)..(384): unsure at all n locations
ntatatggaaggaagtgtagaacccttttgtattgtgaccagactggtgacagacaaaaagcggctgcagggtcgccacgaacgatgtcaacgagaattccaccggcacgcgagaacctcggcgggtttttgttccgcgcaagttcgtgccaaaatctgtcgggcccaggggcgttgcgatgccggtggctcggctgaccgaggccccgctctcgacacgatgaactctgttgtccatgttttccactcgggcatggactcggatcactcggcgaagagaagcgagcaccactgggtctggagcgaccccaaatgtaccgtcgacaaccctcctgaccactccaccctcataggagaaggatggagtgtgtagcatgacaccct

SEQ ID NO: 72055 - DNA, 416 bp, Zea mays
  unsure (1)..(416): unsure at all n locations
tcggtgttatagcgtatccgaagatgaaggatcgttccgacttataggtggaatgaccttntagtccataagggtctaagtcattgttgtaaacttttataaggggtatgattgtaattccttacaggctgtgtcctgtgcctataaatagtgaacagtattcctttactgttcatgcaatcctgtaatggcaagcgcattgctcgggaattattattttctaccaaggcgaaggtataaatgcacctaaacattatgttttgatatttaggttcatataataaaatatgtgaataatgttatctatttttggtacatctttctttaatgtttcatgttttatattttatttcatattattttgtaagtctgatcacgaaagtgtgaccttcgntatattctactcatggtcttcg

SEQ ID NO: 72056 - DNA, 415 bp, Zea mays
ggacacttagatactaagctatgtggatgacgtgtgatcaagtttataactcttaaattcattgaagatgatagatggtcttcaacggtctgcggcgatatcgatggaagcttaatcctgaaaagtgtgtctttggagtaccagcaggaaaattgctcgggtttattgtcagccaccggggaattgaggctaatccagaaaagattgaggctatcatgagaatggaggcaccgcaatcacagaagaaagtacaaagacttactggatgcatggcagctctaagcaggttcatatcaaggttgggagaaaaagacctaccgttctacaagttgctcaagaaggtagacaagttccagtggacttcaaaggctcaagaagctctagatgcactgaagaaattcctgacaacaccacc

SEQ ID NO: 72057 - DNA, 428 bp, Zea mays
  unsure (1)..(428): unsure at all n locations
ngacaacgaggaaatgacgctcatcattaagagctttcgcctaatcctcaagcaaaggaggggaaggattataaaccccgctccaagaaagtgtgctacaagtgtggtaagcccgatcattttattgctaaatgtccattatctagtgatagtgacaggggcgacgacaagaagggaaagaggaaggaaaagaaaatatactacaagaagaatggcagcgatgcccatgtatgccgggaatgggactccgatgagagctccaccgacgaggacgtcgccaacatcactgtcaacaatggcctgctcttccccaacgtcggccacaagtgcctcatggcaaaagacggcaaaaagaagaaggaaaaatctagaacctccactatatatacaacatctaatgatgagggtaggtctagtgaagatgatga

SEQ ID NO: 72058 - DNA, 399 bp, Zea mays
tgagaaaaatatattttccttgtggatatcaacgtttgtattcatatgaaacctaaacaatatcctttattatagaaaacaaaactggatagaaaagattgctattagggtaggatatttgtcaatagatgtgctttgattctggcacggtgctgttgactgtacgagcttcggactgctctcggaagtccctttggtgtggagcatactggctcccttctggctgctgtccttgctgtaatggaggtggaggcggaggttgttgccaaaaagcttgagattgactcgccgaatcaacggatactgcagggtggttgcccacatactctggaatgtatggcgagtgatacgaagctgtatgcatgacctgcttcggctgagctttgtgtgctgcggctt

SEQ ID NO: 72059 - DNA, 422 bp, Zea mays
tgtgaagattcttcatcccaacatgtgctagtcttctatgccagagccagcccatgttagtcttagcaattaagcatgtgtcgagttcagctctatcaaaatctactaagtatagctgaccctctaacacacccttaaatgctattgaatcatcacttcttctaaagacagtgacacctacatcagtgaatagacagttgtaacccatttgacataattgagatatggaaagcaaattgtaatctaatgaatctacaagaaaaacattggaaatagaatggtcaggagatatagctattttaccaagacctttgaccaaaccttgatttccatccccgaatgtgatagctcgttggggatcttggtttttctcgtaggaggataacatcttcttctcccctgtcatgtgatttgtgcacccg

SEQ ID NO: 72060 - DNA, 379 bp, Zea mays
gcgcctgttccatcctcataatctcgcattatagcgtcacatcactattcactgcacgacatcttacatcatattgaatgagagacaccgtgggtgacccgacctaatatactatgaattaataacaatgttccacactagtttaaatgctaataggcctcggtcctttcgagcattatatcacttgggacatatagatggtaatcgaaggtgatgaaggacataccctcacacatctgtgcgagtgataacaaccgcataggtgacgacatataagatacagcttgatgcaccttatacattactaacccattcaagtataaaccattgaacgaacgaatagtattgaattcaaaataccttcggttgatagaagaaa

SEQ ID NO: 72061 - DNA, 408 bp, Zea mays
aagtgttggtacgcaatgtctaaaataattgggcaagcaaaagcagatggcaagggagtgtgtcaaatgaatccgcgatgtgctcttatttatatgtcgagtacgtcgaaaactgaagggtcccgcttgtcaatggctgttgctattctaacaaaggaaaggtgtttttttggaccttcaactcggggccttcgtccatatcgcaatctgaatttatcattctaacaaattaatattgcgaggggctactgttgggggccttcggcttccgaaggtcatcaaaaacatgatttaacaatgtttctagagtacaatgtgtgaacaggtatcttctgacctgagttaaaaccataacgtgaagaatcacagaatgggtacgaatgatggcgcgaagccgaagctgtgtgt

SEQ ID NO: 72062 - DNA, 449 bp, Zea mays
  unsure (1)..(449): unsure at all n locations
gacactataaaactaagcttctaagggagaacatgtgataggtttaactaacgtgcaattcttataagatagaccttgtgcagcttgtcaagcatgtaaacaagtgggaggagcgcatcacagcaagaatgtgatgaccacttcaagacccctggagctgctgcatatggacctcttcggacccgtcgcctatctaagcataggaggaagtaagtatggtttagttattgttgatgacttttcccgcttcacttgggtgttctttttgcaggataagtctgaaacccaatgaaccctcaagcgcttcctcaggagagctcaaaatgagtttgagctcaaggtgaagaagataaggagcgacaacgggtccgagttcaagaaccttcaagtagaggagttccttgaggaggaanggatcaagcacgagttctccgctccctacacacccc

SEQ ID NO: 72063 - DNA, 450 bp, Zea mays
  unsure (1)..(450): unsure at all n locations
acactacaaaactaagctntataatctttnntgttgcttatttagtatacttcaatgtttatatttggcctaagccatgattntatatttttcatagccttttgccccttttcttcaattctacttaaagagctcaattagggttggtattaaggtttcaacattttgctcttttgaaaaatattatttgtttgaaacatgatcctttagatatacacttagtagatcttttattcttaagttaatttgatgctcatgctcaatttggttcacatgaaatgttaattcttgggttggcactgagagaaaccctatgtgacactatggtgtcacagccttccccccttaaaggattctcgtcccgagattcgggtcagagtcctccccgggtgaagcgaatggtgagacttacaggaagtgggtgctctattattatggcaaactgctctt

SEQ ID NO: 72064 - DNA, 392 bp, Zea mays
tcttcaaagctgggcttcggtttctgatgagtaagtttgtagtttaagtattgaatacctaccaagttttccttcaccagctgacccccgaagctatattgaggatgggaatcttcgtctgggcaacaagaagccaatggatagaaccaagtgctaagtgcttctgtagcatgcacgaacttttgtatgagacaaatgccatggggaaagaacagtatcataacaacttcggttgttatgggtttatcgcccgtcccaatgccagtcaccctgtgccgacatttctgaagagacggcctggaaattggatggaagaatggttttatgtgaaaaacgacttgtcagcgagggaggacattaaaggtgttatcatgcgccccatatggtcccgc

SEQ ID NO: 72065 - DNA, 414 bp, Zea mays
tgtgaaggttcttcatccctacatgtgctaagcggttatgccactaccagcccatgctagtcttagctattaagcatgcatctagaccggcctcctcttttgcaaaatcaactaaataaagtttgccgtctaatacacccttaaaagctaatgaaccatcacttcttctaaagacagacacatctatatttgtaaatagacaattatatcccatattgcataattgactaacagatagcagattatatccaagggactcaactaaaaatacattagagatagagtgctcatctgaaattgcaatcttgcctaaacctttcaccttgccttgattcccatcaccgaatataattgaatcttgggaatcactgttcttgacgtatgatgtgaaacatttcttctcccctgtcatat

SEQ ID NO: 72066 - DNA, 429 bp, Zea mays
tgttgaaacaaagagacataaggtgttttatatattttatttgcttctcaaattggtattgcttttgcctgtggcgacaacaagtgttgaaagggcattttctgcaatgagtttggtgaagactaaattgagaaacaagatgtgtgatagtcttttggatgattgtcttgttacatacatcgagagggatattttcttcgaagtgaatgaagaagatataattgaaacttttatggcgttgaggaagcgcagaccagataagtaatattattgtaatctttatgtttaatgtatgcaattttcatgcttatttgttgagtgtcaaactttatatctatatatatcaaattgtttaccaaatttatatgtacattagatagaattctacatgaaaattttgttacggcacaccctatataataattctat

SEQ ID NO: 72067 - DNA, 426 bp, Zea mays
tcatgagcaggagtggcaaccttttcatgcaaaatttgctcattggccttttcttctgttgccttttcttcaatttccgcaggcttttctcagcatgctctgagggcccagcttcggtaccagtttgaattactgcagtttcaattttggcctgctctgtttcaactttagtttgcgctttcgaagcttcgacaattttccttgaaggagtcgagttcaaagtctttactgtttctagcacatctagtacatttgccatacttctcctcttgggagttgcggcagaacttttttgtgccttatgtgctgttacctctgatgaagggcttaaaatttctaacacttttgtttctccaatatttgactcttcagctttacccttatcagtcttcgtcccgtctagctcagctaagggtagcttcggca

SEQ ID NO: 72068 - DNA, 392 bp, Zea mays
tcggtttcatctatgttatgaatagccttcgaatttgtccaacttccttcggctctcctagcagtttcttaactcccatgcacagcaatgggtccttgttccgatggtatcttcatgcaaaagtatgctgggtggagtatagcttcaaaggcattgagcgtccctcgaccaatgattgcattgtatggatactccatatcaacaatatcaaagacaacctgcgcagtccttgtgttgtgaacgtatccgaatgtgaccggcattgttatcttgccaagtgtcacaatctgttatcctccgaacccatagagagggtgtgttgaatcatgtatcttgtcatctggctcttgcatttgcctaaaagcctttgcaaagatgatatctgctgcact

SEQ ID NO: 72069 - DNA, 252 bp, Zea mays
tgaagccatggtaagtagcataggctaataatatacgaattgactcaagcctagctacgggtgcatatgtttcaccgaaatccaaaccttcgacttgtgagtatcctttggccacaaatcgagctttgttccttgtcaccacaccatgctcatctttgcttgttgcggaacaaccatttggttcctacacattttgattatgacgggggaaccaaatgccatacctcgttcctagtgaagttgttgagctcc

SEQ ID NO: 72070 - DNA, 367 bp, Zea mays
  unsure (1)..(367): unsure at all n locations
tcggtgttatagcatgtccgaagacgatagatctttccgacttatagatagaatgacctcttagcccataagggtctgagtcattgttgtaaacttttataaggggcatgattgtaattccttatangctgtgtcctgtgtctataaataatgaacaatattccttactggtcacgccttccttatatttgcaatgcattgcgtcggaattattatctggcaaagcgaaaaaataaatgttccttaacactatggtctgacaccttatattcatataataaaatatgtgaatgatgttaattatttctaatacatctatctttaatggttcgggttttatatattatctcatattattttgaaagtt

SEQ ID NO: 72071 - DNA, 412 bp, Zea mays
tctatagggagagcacattttatgactatccaatgttcattgtgagatagacaggatttgtagcgcatgccatgcagggaagcaagttggcactcatcatccacataagaacataatgacgaccgacaggccactggagctcctacacatggatctattcggcccgatcgcttacataagcataagcgggagtaagtactgtctgattatagtggatgattatactagatgcacttgggtattctttttacaggagaaatctcatacccatgagaccttaaatggattcttgagacgggctcaaaatgagttcggcttaaggatcaagaaaatgagaatcgacaacggaacggatttcatgaactctcaaatcgaacgcatccttgaggatgagggtatcaagcatgatttc

SEQ ID NO: 72072 - DNA, 419 bp, Zea mays
  unsure (1)..(419): unsure at all n locations
tcggcgatggttaaaaattttggcaggaaaacagtgcaaatagcaatgaatgctgtagtaacttcacacctactcgtctgtttatatagtgttgcaggtaagaaggcgaagcaccagagtttttacaccatgcgtacacccgcttgcgctcgctgcgcggtggaccgcatagacaaacagtaaactctgcaaggtgggaccgctgcgtgctgggaaattaaatcgtttctcggcaacgagctcagggaaggtgttttttggaccttcggctccccgaagcttaagagacttttttcacagatcaagctcgttacgaaaaacgatctatcaccgcgaaaggagctactgttgggtctatgcttcgtcgccgaaggtcttcaagggagaagcggcttanaatgtgtgagcaggtatcttcg

SEQ ID NO: 72073 - DNA, 280 bp, Zea mays
tgtgaaggtgcttcatccacacatgtgctaagcggtgatgccactttcagcccatgctagtcttagcaattaagcatgcatctagaccggcctcctcttttgcaaaatcaactaagtaaagtttaccgtctaatacacccttaaaagctaatgaaccatcacttcttctaaagacagacacatctacatttgtgaatagacaattatatcccatattgcataattgactaacagataacaaattatatccaagagattcaactaaaaacacattagatat

SEQ ID NO: 72074 - DNA, 436 bp, Zea mays
  unsure (1)..(436): unsure at all n locations
tcatcccatntgaactctntgcctttctccagtatataagtaagtggttttactaacttggaaaaaccttcaataaatcttctatagtatcccgccaatccaagaaaacttctgatcttggacgcatcctttggttgcttccaatctagtatctcacttatctttcctgggtccactttaattccaccatcggtaacaatatgccctaagaaagcaacttccttcaaccaaaaatcacacttagagaactttgcgtacagttggtgtcacgaagtttttgtaggactagccttagatgatcttcgtgtgtttcttcattcggagaatatatcagtatgtcgtcaataaatacaaccacaaactgatccagatattccatgaatactttattcatcaagttcataaagtatgctggtgcattattcagtccaaatga

SEQ ID NO: 72075 - DNA, 388 bp, Zea mays
  unsure (1)..(388): unsure at all n locations
tactcaagcttctatacccaaactccacatacagaactaacgtttttttgacatgtctagccaattngcaagggagcatagagcctatggcctagatgcaatggagcaaacagcagtaaaacatttggaaataaaaatagtaatcctctctctagtacttagtacttaccatattgatccttcaacatattcttatgataatcgttaaggtacactgtttgatcataaataggatatttaacctacatcaaaagtatatgtaacatgaaacagtacctttgagaatttatttaagactaatttgacatagggaagaaatgagtcattacagaagacactggttgacatctagctgcacattctttccgatgaacaactagatattcat

SEQ ID NO: 72076 - DNA, 381 bp, Zea mays
tggaaaaatctggaatgaatcggcggtaataaccatccagtcttatgaaacttcggacttgatgtacagtggttaggggtttccactccaaaatatccttgactttgctgggatccatcacaatccccttggcagataatacatgtcccaaaaattggatctcctccaaccagaacgcgcacttactgaacttagcatataattggtgttcccttaagcgcgttaatatgatccgcaaatgtcgagcatgctcctcttcattcttagaatatatcaagatatcatcaatgaataccaccacgaatttatccaactcgggcatgaataccgagttcataagatatgtgaagtgggcaggagcatttgttagtccgaaagaca

SEQ ID NO: 72077 - DNA, 78 bp, Zea mays
cattgggaattctgaatttcagaattctgaaattcagaccttgagccaaagatcaaggatgttcaacttgatccctta

SEQ ID NO: 72078 - DNA, 475 bp, Zea mays
  unsure (1)..(475): unsure at all n locations
aaaaaaaaaaattgatactttgatacgtggacttcaggacactataaatctcagcttggagcaatacaagttcaaaggttaaactgtgtctttgacagctgaagcaatgctcttgtggatgacatagcagagcagaaggtgctgttgggatctcaactgtccgaagaacaggagaaaaccttgataaggtttttgttcaacaataaagatgtttttgcttggtcagctaatgatctttgcggagttaacagggatgttattgagcactcgctcaatgttgatccatccttcagacccaaaaagcagaggcttcggaagatgtctgatgacaaggccgaaggtgctcggaatgaagtgaaaagactcctcagtgccggagttattagagaggtaaaatacccagaatggctggctaacactgttatggtaaagaaggccaatggtaaatggaggatgtatattgattntactgatc

SEQ ID NO: 72079 - DNA, 415 bp, Zea mays
  unsure (1)..(415): unsure at all n locations
ntatgtaagacaatgctaagtcttctcattattaatctggaccaaggtatcttcgttccatttatcatcatttgatcattatggatttgtttccatgtagtgcctccaagcaatgtaccataaggatttgaatctaagatgtctattcgacgacgttcaaagttgattgcataaagggtccagtggcttcggcgtagcatatgaaccaggatctgttaaatatatatgtaaatttatgaatgatttatactatgcatatgaaaaattaaaactaatacaacataaaacttatgaccaaaagaacattataacattgttacaaatgaaactgattaaagctcaccaatttaatctggttcagaacttcatctgaaggaagggtcggttcaagttgttctttaagaagtgatgttga

SEQ ID NO: 72080 - DNA, 426 bp, Zea mays
  unsure (1)..(426): unsure at all n locations
tgagttattntattacagaccagatcttaaaggctgttgtagagaaagaatattatacaaaccataggaggcacaaacttcttccgattagttattaacaaaagatcctatgtggaagaccgaatcctcccgcacttcaatcttgtttttcttcatttggtaccaccttggagcaaaaacaacaaaaatttgtcgctttctcacctataaacaacaaaaggatgaaccctgagtatggaattactcatcaagtctttaccgaccaaagaaaagactctcaacggtatgctggataaataagagtcaaagagaggctgtgaaaaaataaacttatacttttgcagaaatagcttactaacgtgagtgcttactttcaatctttttacgccatattaagtattaatagactctatttgcatctagtct

SEQ ID NO: 72081 - DNA, 236 bp, Zea mays
  unsure (1)..(236): unsure at all n locations
tatgcccgagacacactacggaggggtgtaaaactttatgttatgtgaccnacacccaattggttcttacagaagaattagctacttgcactaatgtatacgtgaccacttttattagattaacattgattaagaaagacgatatactttcaaattaacttacgtaaccaatttccaaattgggactcctatcttattaatataaacaatgtgattagcgcatatagtgatacggg

SEQ ID NO: 72082 - DNA, 408 bp, Zea mays
tgcagcataagaaaagagtatagaattctccacttctctgaacagatgagcatcttcactgatctccaacacagaccacacagcttctcagataaagaggaaaggagaataatgggtttcccaactatacaactaactttattgacatagtatgtaaaccaaaatgcatgggatacccacactctggtgacaatcattacaaagatccaaaccaaaacatagttcatcatgacaaacatagatgcacaggatatagcaaactaccctgtctaactaaaactaactaagaccgagactaacgctaagactgaagcttctatgtatatatttatttcgtattaattacaagatccaactctaacgatctatggttctagatttatcttggtcttgcaggccggattgcat

SEQ ID NO: 72083 - DNA, 420 bp, Zea mays
tcggcttcatctatgttatggatagccttcgaatccgtccaattcccttcggctctcctgatagcttcttgactcccgtgcaccgcaatgggcccttgttccgaaggtatcttcatgcattgatatgctggatgaagtattgcttcgaaggcattgagcgtccctcaaccaatgattgcattgtatggatactccatatcaacaatgtcaaagacaacctgttctgttcttgtgttatgggcatagccgaaggtaactaacattgttatcttgccaagtaccacaatatgtcttcctccaaagccacaaagagggtgtgttgcatcatgtatcttatcctctggctcttgcatttgcttgaaagactttgcaaagatgatgtccgctgcactgcctatgtcaaccaggacattgtggacc

SEQ ID NO: 72084 - DNA, 404 bp, Zea mays
tcttgctacctgtgctcttgtcgtcaaccttcttttcgccttcggtggccttgctgggagcagattttgagcctgaagcagagtcaggctcggcttcctcaacgacctgtacaggacgcttgcgaccgcgatgcatgtggcgttcgcagtacttctcgtttggaatagtgtttctccaacatcgccattttttgccatccgttcgccggcacctccctggttctggttcaaggttcttcccgaagtccaagcagagtgttgctaagcccaacactgtataatcaggttagcaagaacggttagaatgtctccacacttggtaacatgcgcatcatattgcactgaacattggtttggtagaattataactaactaaacctatagaagaagggcagtttcagatg

SEQ ID NO: 72085 - DNA, 434 bp, Zea mays
  unsure (1)..(434): unsure at all n locations
tctaaagggagtgcacattttatgactaaccaatgttcattntgttaaagacaagatttgtagcgcatgtcaagcaagaaagcaagttggagtccatcatccacacaagaatataatgacgactaacaggccgctcgagctactccacatggatctattcggcccgatcgcttatataagcatcggcatgagtaagtattgtctagttattgtggatgattattctcgcttcacttgggtattctttttgcaggaaaaatctcaaacccaagatactttaaaaagattcttaagacgggctcaaaatgagttcggattgaggatcaaaaagataagaagcgataatgggacggagttcaagaactcacaaatcgaaggatttcttgaggaggagggcatcaagcatgagttctcttctccctacacacctcaac

SEQ ID NO: 72086 - DNA, 393 bp, Zea mays
  unsure (1)..(393): unsure at all n locations
taacatgcttgtttcaagtgcattcttttcatttgcaagattatctatagaggttntcatattaattacttctttatctttattctctatagttatcttgactaaagatacttccttagtcaagacatctagcatttcatctttattgtgaagcaattcttgaagctctaggtttctttccttttcaaggataagcaagtcttcttgagcatcaagagttgcttttcttttatctagcttctccattaatttggtgataacattgtatccattcaagccaaattctttaatcattttatttttcatggcaatttgttcatcatcatcatcatttggaaaatcattactaaataaagttaccttatctccttttgccatgaggcaagttggagt

SEQ ID NO: 72087 - DNA, 418 bp, Zea mays
  unsure (1)..(418): unsure at all n locations
tgagtcaaccattntgcaaaagataattgatgctcttatggattatctgggcatgaagcacatacgatagaaaataatggctggaacagccaaatgtttcaaggaaagatgatcaaaggtgtggttatggttttaacaaccgcttattattgccaaaggatgaataactccgccagcaaatcttatatgaagcgcatcttagtcgctattctattcatccgggaagcactaagatgtaccaagatttaaagcaacattactgtggaacaaaaagaaaattgaaattggaccccatgtggcttaatgtgacacttgcagacgtgtcaaatccatacacatgaaaactgctggtccattgcaatctttgccaatcccaacatggaaatgggaagacataagcatggacttcattgtggga

SEQ ID NO: 72088 - DNA, 421 bp, Zea mays
tctttatcatccattgaaaacatcgaatcttaacatatccaaacttctatgtcattctacagaacattactccagaaaggttaacataaagaaaactttgttagataccaccaacaattttctatcctacagctgttccccaacttcttcatgctcctgaattcctgatagagcaggccaaggataatgcaacctatgcaaatttcacttgagacatactccaaaaattttctatcttcagcttttgcccaacttatccatactcctgaatccctactatgtcatgccaaggataatgctgcccgcagtcacgtacttgaaaaagaaccgtaaagaataccgtatgctatagagttcgaatggtgctgcagcgagtgactggaaagatagctgtaaaatacagtcggctgagaaaactcta

SEQ ID NO: 72089 - DNA, 416 bp, Zea mays
  unsure (1)..(416): unsure at all n locations
tgacaacaccatttgacatttcacataaaatttctgagatcaagaatatttagttcattcctcaacatgcaaaagcaggtcttatcaagtggcttagtgaaaatatccgctaattgatcttccgacctcactccttctaaaaagatatctcctttagcaacatgatctctaaggaagtgatgacggatatcaatgtgcttggtgcgagagtgttgtacaggattattagcaattttaacaacactctcattatcacacaacaaaggtaccttttctagaactacgccatagtctagaagagtttgtttcatatataanatctgtgtgcaacaagcacctgcggcaatgtattccgcttcggcagttgacaatgcaacactattttgcttttggatgtccatgatactagtgatcta

SEQ ID NO: 72090 - DNA, 428 bp, Zea mays
  unsure (1)..(428): unsure at all n locations
tgtcgattgatccacgaaacatggctgtagagacttatgcggngatgctcctccgatccagaagttgtgattcagccatcgacggagagggcgcaaagcatataatcatggacacgctgttaccatagctggatgaagcagatgcgtttgcaagaagatgagcaaccagcgcaggggagataaatacacagaacagcggcaggattttatcgcatgctaaagcggcgtagggataacaccggcgagctggaggaacgcgcggcataacgatcgcgcaatggatctgggtgagcggtctgcacgggcaatatctggagccagggcgttgttgtatcttgtgcggccaggcttcataaaaatcaacgagaagataaggccattgacccatcacagtggtgtgagcggatgccatgaatatccatcgaaaa

SEQ ID NO: 72091 - DNA, 426 bp, Zea mays
tgtcaattgtgtgaacttgagttgatccctgtcttacctgagtatatatatatattttgttgcttgagaacgagtatgtacaatagaggcttgacaattgtgtgaacttgagttgaacatgaattttgataatcacaactcaccatccctttcaatatgcttagaatatagcttttataatttttcaccctacaatacaaaattattctatgaaggccatggtacatcatcatatcttgtattatcaacctaggatttgcctatttcgattaataatggcattgagtcaaattttggttgttttaaatgatagacttcaacatttgttatggtttatgagttgattcttgatagcattactaaaaaatgatctatgtatacataagtgtcttccgttgcaacgcacgggcatatacctagtaacaa

SEQ ID NO: 72092 - DNA, 428 bp, Zea mays
  unsure (1)..(428): unsure at all n locations
ntgaaccaagagccttaagagatcaaccaccattctcttaagtttgtggcctataagaagcatttgtttcttgaaggcctaattgtagttggaggtcgtgggcgagatgttttcaaatatccaaccattcatgcattttcatatgcaccacaacatactaatgatagtttccagtctccatttgttatttagttgttgcttcacccacaggatggccgactgcatgttggaggtgtttgggggggggataataccaactaaactctagcaacttttcacaaagttgcattcgaggaagagatgggctggagtttcatctctttggaggacgcaattctcacacgtgtaagattcaagctccatgcgtcattttctctagcattgaccttgtgtttaacttcccttgcagaggaggcagaagaaaattt

SEQ ID NO: 72093 - DNA, 421 bp, Zea mays
tgtaacatacccagcgctcctgtagaccgtggaatattctgcgtaaccacctacgactcaccagccgagcaccacccggccagaattcctcggacccagttatataaataccgaccctctaacagcgcatcccatcctgttgcgccgtccaggcggcaaggccgtggccttactgccagcttgcctcgccaaaccgctagggtcctataggcagcgggacttttcggtgtgtcccagcgccggagcgaacagtgggatcgtcgtgcgatggaggtagtcagatggattgttcaccagagctcacctctcgttgggggcttcactatgccagcgaccagccttgttctcgcctctgctaatggtgagacctcccatggttcttctttgtttttttttactttgcttaacctcttatcgaagt

SEQ ID NO: 72094 - DNA, 423 bp, Zea mays
tggatgaggtgtcatcatcatcatcatccgagctatcatccgagtcccattcaactaagtaggctgtgccatctttcttcttgttatagtatttctttttcttcttgtcactttcatctttgcccttcttcttcttgcttggacaattcatggcaatgtgaccgggttccccacactcaaaacattttctatcattgaaagcatttcttctagatgtttgacctcttctatgttgacctcttttcatcttcatgaatatattgaatttccttacaaataaagccatgtcaccatcactctcgctttcattttcttcatcattgctatcttccctttcaattgcctctgaagccttggctctgagagcaatagattcatttttcaccttctttgccaaacttatagcatcggcttgtgacttct

SEQ ID NO: 72095 - DNA, 413 bp, Zea mays
tcaacagtaatgggctggtttcagcccatacggtccattccagaggggaaagagcccgcgcgcgcccgcgccctgtcagctttgcagaaagggcccctgttttcttgaatatcccgacaaagcccaaggcactatttaacacagtcgctgacaattgcaaagacaccctcgcacttctatctattctcggtttgaagtccccgacgacggtgaacgcggccgcgctccggtgagcaactgtaccggccgaagggggccatgaccggcgctcccgagcgacagacaccaaattagacctgccccgagcatttcccctaagtcaattgcatgattggtgacctatttcgttctgcccacgaggacagcgaaagccatggacattagttcgtgttcccagtgattggtgggctcct

SEQ ID NO: 72096 - DNA, 424 bp, Zea mays
taaagagggttcaacccgaacttggaagcttaatctaatctatttggttaagtcacatattgagctgcacatgaggatgacttatgaagaagataccaatgcaaatgaatatcaaaaccttcaagtggcatcaatatctacagagaaatgtccaagcaatattattccttcaaatggtattcactaagtggtgtctagatcaatcatacaattgatatcctttgagtggtacaagacttcaagtgatccacaaccttaagtgatcatcaactcaagagagcaactctctcctaaaataagttcatgcaagtgatgtcaaggattttatcatgcatatggtgtccatcaaaaacttattgagtactttcaagttggtataatattcacaagtacattttcccagagccttagaacaacccttttt

SEQ ID NO: 72097 - DNA, 315 bp, Zea mays
tgctatcaatgtggacgcgaaggtcattactttcgtaactgtcctgagaagagttcactacagatcaccaccgagatgaagctatctcaatcttcagacatggaatatgaacaaaaatgcacagaaacttctaccaacgcagtaaaacaactccaccatgtaacttatcaagtcgtgcttgctttggttgtggtattaccggccatcttgttaatggttgtcctaagaaagatgtggagatcaataaggtccaaaagaaaagacaacaccctcaaacccatgcatcaacaaagaataaacaacggaaagagacca

SEQ ID NO: 72098 - DNA, 312 bp, Zea mays
tctaaagggagaacacgtgataggtctaacttatgtaactttcgaaaaagatagaccttgtgcagcttgtcaagcaggtaaacaggtgggaagctctcatcatgccaaaaatgtgatgacaacatcaagacccctggagttacttatatggacctcttcggacccgtcgcctatctaagtataggaggaagtaagtatggtcttgttatagttgatgatttttcccgcttcacttgggtattctttttgcaggataaatctgaaacccaagggaccctcaagcgcttcctaaggagagctcaaaatgagttt

SEQ ID NO: 72099 - DNA, 314 bp, Zea mays
tgaagccatggtaagtagcaaggcaagtaatatgcgaattgattcaagcctagctacgggtgcataagtttcatctaaatccaaaccttcgacttgtgagtaacctttggccacaagtcgggctttgttccttgtcaccacaccatgctcatctttcttgttgcagaatacccacttggtacctacaacagtttggttaggacgtggaactaaatgtcatacctcattccttgtgaagttgttaagctcctcttgcattgccaccacccaatccggatcccttagtgcatcctctatcctgtatgtctcaatag

SEQ ID NO: 72100 - DNA, 312 bp, Zea mays
ttatcaaatggacgtgaagagtgctttcctcaatggttcaatcaaggaagaagtctatgttgagcaacctcccggctttgaagatagtgagtaccctaaccatgtctataggctctctaaggcgctttatgggctcaagcaagcccaagagcatggtatgaatgccttagagatttccttattgctaatggtttcaaagtcggcaaggccgatcctactttgttcactaaaactcttgacaatgatttgtttgtatgccaaatttatgttgatgatatcatatttgggtctactaatgaatctacttgtgaa

SEQ ID NO: 72101 - DNA, 289 bp, Zea mays
tgtggaggaccagatctttcaagcattttattttctggatgagaagtggtcacccaagttttgttgatgaagcaccagaagaccaatctaggaaggaatccatgtgggagtttgcaagagaaaggtttgcgtgttggcatcgtgcttcctcaataagctaagcgaaacctatatgcctgaagatgatctttgagtagccagaatcagcgtttgcaatcagcaaccggatgctcctgaaaggccagatttcgttgaagctccatctcctcgaaaagtctgcaaagtgaag

SEQ ID NO: 72102 - DNA, 312 bp, Zea mays
tctaaagggagaacatgtgataggtctaaccaatgttcatttcgaaaaagatagaccttgtgcagcttgtcaagcagggaaacaggtgggaggagcgcatcacagcaagaatgtgatgaccacttcaagacccctggagctgctgcatatggatctcttcggacccgtcgcctatctaagcatagggggaagtaagtatggtctagttattgttgatgacttttcccgcttcacttgggtgttctttttgcaggataagtctgaaacccaagggaccctcaagcgcttcctcaggagggctcaaaatgagtt

SEQ ID NO: 72103 - DNA, 309 bp, Zea mays
tgtgaaggttcttcatccccacatgtgctatacggcgatgccacagccagcacatgttagtcttagcaattaagcatgcatctagactggcctcctcttttgcaaaatcaactaaataaagtttgtcgtctagtatacccttaaagctaatgaaccatcacttcttctaaagacagacacatctacatttgtgaataaacagttatatcccatattacacagttggctcacagacaacaagttatatccaagcgactcaactaagaacacattagaaatagagtgctcggatgaaatagcaatttttcc

SEQ ID NO: 72104 - DNA, 308 bp, Zea mays
tgacactgtatgcttgcgggtagcctgtgctgtgctatatgcctcggcttacacttctatacaggaaacatctatcaaatttaaaattttcattttctaagtcatgctcattaatcttatcactaagttgagctatgtgatatttttgttgtttaattatagctaggtgatcatgaatagcatcaacattaatatctctacatctagtgcaaatagtaacatgctcaatggtagatgtagagggtttgcaaacatttaattcatcaatcttagcatgtaaaatagcattctcattcttaagattgaaa

SEQ ID NO: 72105 - DNA, 308 bp, Zea mays
ttacttttggggcttcgaaagttaaaggctttttgaataagaagggcagtccttaaaacagactctcaagttatttctggtcatgttgacaagagttgcaaggcaagagatcgaagcttgagaaatatctggacacagttcaaagcttgaagcttctttcgaaggattttatgttaagaatattccaagaggggaaaatgaacatgctgatctgctagccaagtcaacggcacaggggcttcctctaccttcggaagtattttttagacaataagagcacattcggttgaactcctcgaaagagcagt

SEQ ID NO: 72106 - DNA, 306 bp, Zea mays
tcggagcgccgaaggtctaaaaaacacctttcctgagctcgttgtcgagaaacgattcaatctcccagcgtgtaacggccccaccttgcagagttactgttcggtctctgcggtccaccatgcagcgagtgcgagcgggtgccgcctggtgtaaaaattctggcgcttcgccttcttacctgcagcactatataaacagacgagtaggtgtgaagttaccacagcattcattgctatttgtactgttttgctgccaaaatttttaaccatcgccgaagcttgtccgtcggaatcgaacgaagctcc

SEQ ID NO: 72107 - DNA, 307 bp, Zea mays
tttatgatctgtataaatgtggcagatatttcctagcagataatgacgccaaatcttcagggcatgaaccacaacagctagctctagatcatgagtagaataatgctcctcatgtcgacgtaactgccttgaagcatacgcgattactcagccttcttgcattaacacgcagccgagcccactgcctgatgcatcacaatacacatcaaaagggcttagtgatgtccggttgagccaataccagagcagtggttaataatgtcttcaattgttcaaaagcttcattacacttggaagaccaattgaa

SEQ ID NO: 72108 - DNA, 316 bp, Zea mays
tttgaagaaattttaagtgatcgcggggatgtctgcgcgttctccggtgcaagatgaatttcagccatcttggagaaggcgggttgtgatcatgtcaaaaccctggcccaggccgaagctgccttctccgtggatgacacaaaggatccctcagccgaagcaagcttaatgggcggaaaattttacactgacatctgggcaaatggtggccgagaaatggctcacgaaataatgaagaaaagtgaaaaagatattcatgacgctcgagaagcagcgaaaaaagctaagaaagctgcagaacgcgagagacggatat

SEQ ID NO: 72109 - DNA, 315 bp, Zea mays
tggacagtgttctgcgatggctcttggggaatcttctaggcaggtgcagctgccgttttaattgcaccttccaaagtcagaacatgctatgcagtgaaacttgatttcagttgcacaaataatattgctgaatacgaagctttgctttagggcttcggaagttgaaggcaatggggataagaagggcggttctcaaaactgattcccaagttatttcttgtcatgttgacaaaagttgcaaagcaagagatccgaagcttgagaaatatttggatacagttcgaaggcttgaagcttccttcgaagggttttctg

SEQ ID NO: 72110 - DNA, 313 bp, Zea mays
ttacaccattcaaactattgtttggtgacgaatcaataagtccggaagaagccaaagcaggatcaataagaatagtagcttcggcagaagacgaagctgaagctgattactctgtggaaaaagatgctatagaggggatcaggcttaaactgtggaaaacatcaacaaataccaagctgaaacaataaaatggcgtgatagaaaggttaggctaaagaacattgaaccaggacatttggtgcttcgaagagtagccaacccagagagagtagtcaaattacagctgaagtgggaaggaccttttctggtagta

SEQ ID NO: 72111 - DNA, 308 bp, Zea mays
ttagcttaaaatagccatttaactcatcgattcttggttttaatacagtacctctgcatgatgtaaaggaatggtttgaatatgttttaaggttcagcgtcattttttaaaattaatacctctgcatgatgttagtcatcaaacaaaagaagtgtacatttgatacttggtaaaatctaaaatgggagctgcacataccagagccaaaaaaagtatgcttcttccctttctccataggtgcataagtaccatattcttttgcaatacagttacttgtcaacttgaaaaactagcacgcatggtagcaa

SEQ ID NO: 72112 - DNA, 312 bp, Zea mays
ctgtgaaggttcttcatccccacatgttcttttctgcgatgccacagccagcccatgctagtcttagctattaagcatgcatctagaccggcctcttcttttgccaaatcaactaagtaaagcttgccgtctaatacacccttaaagctagtgaaccatcacttcttctaaagacagacacatctacatttgtaaatagacagttatatcccatatgacataattgactaacagataacaaattatatccaagagactctactaaaaacacattagagatagagtgctcattagaaattgcaattttaccta

SEQ ID NO: 72113 - DNA, 309 bp, Zea mays
tttatgttatatcattcattagcatactttctcattcttttattatatttatatttccaggaccagcattctgatggtgttgcagatgatcatcccaacgattccttattctctccaacataccatcatcacaaggttcgtgatttgaataaataacctaacgaaaggtataaagataataaaattgtctgatttgttgccctgtatatttgttgcccacatcgtaattaaattgtttacctttgttgaaattagttcttctaggcagcgatttttgtatagccttgatcttgtgagatattgtatgag

SEQ ID NO: 72114 - DNA, 309 bp, Zea mays
tctaaagggagaacacgtgataggtttgacttacgtgcaattcgaaaaagatagaccttgtgcagcttgtcaagcaggtaaacaagcgggaggagcgcatcacagcaagaatgtgatgaccacttcaagacccctggagctgtgcatatggaccttttcggacctgtcgcctatctgagcataggagggagtaagtatggtctagttattgttgatgacttttcccgcttcacttgggtgttctttttgcaggataagtctgaaacccaagggaccctcaagcgcttcctcaggagagctcaaaatgag

SEQ ID NO: 72115 - DNA, 304 bp, Zea mays
tcaactctatgtctcttagctttgggatcttttttatgtgacattttaagaatattccaaatgtcacgggcatcttctcttccttgaactttccgggattcttccggacaaagacttcctttaattatgctcactgcttgagcattgcgatgaacctcttgcatcatttccggagttatctcttctccttgggcgggcttatacatacctacattaacaatctcccaaagactaggatgcacaccgattaaatgcgacttcattcttgccgcccactcgtcatagttcaactcactaagagttg

SEQ ID NO: 72116 - DNA, 272 bp, Zea mays
gctgagatgaaaaaggcaggggacatcacaagtgaaggagaacatttataaagtgagaaaatcattaaagagaccctatgcgcccaattggagaacacaagtgccgcaagcaagtccgcacattacgggagcagaaatcactctcaccctctcttgagtatatatctaatttgcgtagaggtgaacttatgagcctttagacagaggaagttgtgctatggcaacatccaaacctcttgcgcgggtgtcaccgatacttgaacactgtaaaa

SEQ ID NO: 72117 - DNA, 306 bp, Zea mays
agaccatgtctctagcagtggtttgtcttttttacttaacaaatttaggattatgggcattactaatgtactcttgaaatgcatcagactctacaaaccatagaggcaggtcctctttagctatcaaccgacagagttcagtatgtgcaacagaaggagaatactcccaatgtttcaaggaaccatcagaattatacttaagcacggattgaactataccagcaccgatgatgatctctcttacctaaccaattatgacgaagcaagtgaccagttccagaactagatataccacttaaagtaacc

SEQ ID NO: 72118 - DNA, 315 bp, Zea mays
  unsure (1)..(315): unsure at all n locations
tgtaaagttcaacacaagtattcaagagtgattgtccaaaggctgagttgattatggttggggacatcacaagtgaaggagaacattatttaagtgagaaaattataaaagagaccctaggcgcccatttggagaacacaagtgcagaagcaagtccgtacatcaagtgatcagattttctctctccctctcttgtgtatctatctagtttgtgtagaggtgaacttatgagcctttanagagaggaagtgttgctatagcaagatcaagatcttgagcaaggtgttaccataccagagcactgtcaagaagact

SEQ ID NO: 72119 - DNA, 314 bp, Zea mays
tggggtttcaagttactcgagcttagtctctctcttcaagtggcttatggagcgtttaagctcgcttaacttgagctgctccttgccgcgtgcactgggatttgagcgtcttctatctggggagaagcgtggggatttatggatgcccctgtagatgccgcacgctttgttcctgtcttcccccgtttttttcaatgactttcttgctttcacagctccttcgaactttgagctcttagtgtctcgtctagtggacgcggcagtgcaaaccgcttcctctctgtttcttctgcatcttgaaagtcttcggcagc

SEQ ID NO: 72120 - DNA, 311 bp, Zea mays
ttcacatgccctccatttcgaatagcaaggggattcattcctatgtatcccctcgcgataccttaatcaccaaatcaatcctaaatgtaatagacagtgaatcaatcctgtgatttattgcagagacaataaaaagcggtggcggttgatgatgtttgatataaatgtaaatgcgactatgtctcacccgccgacccacaataatctaagtgaagggtggctctgccttacaattccgtctcgcccgatccaagagccacaagggtacgagggaaaagcgagttgtcctcaagtcgctacatcgctcgact

SEQ ID NO: 72121 - DNA, 309 bp, Zea mays
taaggacatgctggtgaccgtttccaggctttttacgaagccagtcacatctcaagccatgttccaatgcatgcaacaccatgaggaatacctccagacatatgtctgaaggttcttgcgattgaaggcacaagcacccataggcccaatgaaattgtcattgaagccatgattaagggccttcggccaggacctatggctcagtacttcgccaggaagcccccacaaactttggagaagctgcttcagaagatggatgagtacatccgagctcacaacgactttcgccaaagaagggaggaagcttac

SEQ ID NO: 72122 - DNA, 313 bp, Zea mays
tcaggccggactatcgaaccatgcatggccgtcatactcctgccggaccgcgcgtgcatgtggaggcatgtggccatatgcggtagagactagagagaaatacggattaggtgtatccgctggcctggccggaccgtagcgttagtagggttacataacatgcatgcgtatgggtttcccgtctttcgcgtggcgtgtgcatgcgtggtgccgtagaaacaaacggtagaacgtgacgcaaacgaacagtggacgtgcgcttaggattggatggcggagcacgggcgatagagcaccgtgccgggctgcgtgc

SEQ ID NO: 72123 - DNA, 309 bp, Zea mays
tatcaatctcgatctcatgattggtttctcatatttaatatcgtatcaatctttggctgataatccccgtgatgatcataaaatagttctctgagttaaagaaaattctcatgtgatgctcttttgtcagcaatctttgcttaactctagtcacattcttgttttctgagccatactctcatgggctccatctatttatgctatgtgaaattctcgttggttatgtttggtaatggtgttatgactaacgaccgatggtgccgcgacgaaaccgagagcctactatggtgcacacatggttgagctgct

SEQ ID NO: 72124 - DNA, 310 bp, Zea mays
tgacattgcttccctattagaaaccaatgccatccttaatgtcagggcgtctcccattatagagcatgattctagcaaatttaaacttttcattttcaagttcatactcattaattttagcaatcaatttagctatgtggtcttttgttgtttaatcatggcaatgtgatcattaatagcttcaacattaatatctttacatctagtgcaaatggaaacatgctcaacagtagatgtagagagtttgcaagcatttaattcttctatcttagcatttaaaatagcattttcatctctaagacaggagata

SEQ ID NO: 72125 - DNA, 308 bp, Zea mays
tctaaggcatatactgaaagggaaatgtgcttttgggccatttctataacgttttggtgattaagtgcccaacacggttgattaagttcttatgtgccaaataaagtgagaagtacaaatcaaggcacaaggtatgtttctagacttagtacattgttttgtctaataatgtgtttgtctaagtgcaagaaacattgacaaaagaacaagaaaagaaaaggaaaaagacttggctctgtgcagccaaacttcagctcggtctggcacaccggactgtccggtggtgcaccggacagtgtccggtgcgc

SEQ ID NO: 72126 - DNA, 310 bp, Zea mays
tccactcaactctgttggtatcatttatacttttcccttactcatcaaactctcagttggtatgacccttcactcatatttcttttaccaataagggagaaagtaaaagtgctctcaagattctccgtttttggtgattaatggcaaagggggagaaaggattaagcccaaagcaaaaggaccgcaccaccatatattaaaaatcttcatttggtatcttatttggtttcaaaatttcaagttagtataaaaaattcaattggtataatttcatttgatatctgtttcaaaaaggaaatcatttaaaaaa

SEQ ID NO: 72127 - DNA, 308 bp, Zea mays
tgtggagtaccagatcatcgaagcttatatttttctggatgagaagtggtcacccaagttttgttgatgaagcaccagaagaccaatcaaggaaggaatccatgtgggagttcgcaagagaagggtttgtgtgttggcatcatgctccttcaataagcaagctgccaagcaaaagctagaagcctgaagatgattcttgagtagccagaactagcgtttgcaatcaacaaccggatgcccctcaaaggccagattttgttgaagttccatctcctcgaagagtctgcaaagtgaagatatgtagctga

SEQ ID NO: 72128 - DNA, 237 bp, Zea mays
tgggattggccacctaggggctaaccttggttttctttgagaaagggcggatcccattatagagcccgagcctggcagcacatagctgttcattttccacgccatacccatttgacttatgaatcgatttaacaacgaggcccattgatgtataaacatcgcaatgtgaccattactacctccgacattaataccgtctcatctatggcgaagaggaacctgcctcacattggatgt

SEQ ID NO: 72129 - DNA, 306 bp, Zea mays
ttataatgataatacattgaccatagttgtttttcaatttccagccaagatatgaggtttgacctttaataaaaattgtagaacctgtgttatacaacaaattttatatttaaacaaagccttgattcaatctctaagtatctcaaacagtgccatcaagacagaataaaaatctgattttaggattcgaattcttttaagtctgaaatcaggatcgttcgagttgacgtctcgggttcccaagtttttgttgaacaactccagttttcccaaatataaaaattgttaataattaatagaggcaca

SEQ ID NO: 72130 - DNA, 314 bp, Zea mays
tctaaagggagagcacattttgggactaaccaatgttcattttgggaaagacaggatttgtagtgcatgccaagcagggaagcaaattggtgttcatcatccacacaagaacatcatgacgactgataggccactagagctactcccatggatttattcggcccgatagcttacataagcatcgacaggagtaagtactgtctagttattgtggatgattattctcgcttcacttgggtattctttttgcaggaaaaatcacaaacccaagagactttgaaaggattcttgagatgggctcaaaatgagttcgg

SEQ ID NO: 72131 - DNA, 329 bp, Zea mays
acactgtaaaattctcaagctatgtcagatcaggtctgatgagagggtgccttttgctgatgacagagaacaagcacttaggaggaaagcgtgctaactaagagcaagccgctacataggattatgtgccccactaacagctcctagcggcctcgccatccatgttattgtgcaaacgtttgtgactcttactcaggcaattcaagccatcggtctgactttgaccgtcatatattactcttggagggagcacattcggcaccaccctaggcttatatgtctcagatgcctatagatatacgtgctgaatttatgacaggtcatccccc

SEQ ID NO: 72132 - DNA, 313 bp, Zea mays
tagagaaatctggtatgaatctgcgataatatccagctagtccaagaaaactccggacttggtgaacagttgttgggggtttccactccagaatatctttgaccttgctaggatctaccgcaattcctttagccgataacacgtgccccaaaaattgaatttcttccagccagaacgcgcacttgctgaacttggcaaatagctgatgttccctgaggcgcgtcaatacaatccgtagatgctgagcatggtcttcttcattcttagaatatatcaagatatcatcgatgaagactaccacgaatttgtccaa

SEQ ID NO: 72133 - DNA, 282 bp, Zea mays
tcaccacttcaccacggacatgacacaccatccctcttcacctatcgcgccccatggcctcaccggcgacctcaccactgcgggagcctgccacctcaccatggaccgaccgtcctgagcccccaccggccaaattaaaacccaccgcatgaccccctaccctcgcccatgctatgccaccaccccaaccacccagaactggatcaacggcgaagaaccaccgtcgagaccaccgacggccggttcctccccaccgccggcgaaccgccggtttcccccccc

SEQ ID NO: 72134 - DNA, 311 bp, Zea mays
tctaaagggagaacatgtgataggtctaactaatgtaactttcgaaaaagatagaccttgtgcagcttgtcaagcaggtaaataggtgggaagctctcatcatgccaaaaatgtgatgacaacatcaagacccctggagctacttatatggacctctttggacccgtcgcctatctaagcataggaggaagtaagtatggtcttgttatagttgatgatttttcccgcttcacttgggtattctttttgcaggataaatttgaaacccaagggaccctcaagcgcttcctaaggagagcccaaaacgagtt

SEQ ID NO: 72135 - DNA, 308 bp, Zea mays
tgttgaggaccagatcatcaaagcatattagttcctggatgagaagtggtcacccaagttttgttgatgaagcaccagaagaccaatcaagtaagggatccatgtgggagtttgcaagagaaaggtttgtgtgttggcatcatgcttcttcaataagctagttgccaagcgaaagccacaagcctgaagatgatcttgagtagccagaatcagtgtttgccatcagcaaccggatgctcctcaaaggccggattttgttgaagttccatctcctcgaagagttgcaaagtgaagatatgtagctgaag

SEQ ID NO: 72136 - DNA, 309 bp, Zea mays
tgtctgcgttcacacgcttgcgttaccgggtgacaatgggtacccaaaacttaaatagccgtttgtttctttttattttaaggaattagaatcttactaatagaatagactattttttagaatgtgacattccaccactttcaaagttatcatataagcctatctcaaattcatgaggtaagagatgaaaatcgattctatagatttacataatatttttctgatgtataatttatagcaaactcttctacttgcttcgctataacataaatatagtatataattatctctctcatatgattcaggata

SEQ ID NO: 72137 - DNA, 309 bp, Zea mays
ttgcagagtgtaaaactggtgttggggaccttttgcttccgaaggtcctcaaaaatgtgatttgacaatgttttctaagtatgcgagtaggtatcttcggaatcaggaatcaggttgcgggtatacagaagcatggtcaagacgaagcttgactaggatggtgatcacgacgaaggataagatgatcacgaagctatatgcagaagagcttcggcatcacggcgggaaggggaaaccgacttaaagatgaaaagctaaactagacctcgaagaattactatagagttattgataaatgtaaagggcatt

SEQ ID NO: 72138 - DNA, 248 bp, Zea mays
attttacatgttcccgaaccttaacttctccaagatagctggaaagtcctcgtccgccacaaaaggagcggacgtatttccggccgcttaatttttgactcgtcggcattaccttcgctggcgaaacatacaattgggcccttaagatcgcctcttaagaaccggttcaccgctggaatattctctcgcggctggaattgtaaccctaaggtacctcacccgctttctggagagatcgtcaaatcttt

SEQ ID NO: 72139 - DNA, 308 bp, Zea mays
tctccttgtcgtcatcaaccttgacatataaccactccgacttccagcctgctgcccatttgcttcggtagctgattacaggaaactttgtggttttccgataagcaaaattatagcaaccaaaattgtcatgcaatccatcttttctagccttcgtctgatagtgcagttcgtgaactcgacaaaagctgttcgcaaacggctccaccgcttggcttcggagggcccagatataaacactaagcctaacaatagcgttaggagtcaactgatgaaaatagataccaaacctcttcaatacctctgca

SEQ ID NO: 72140 - DNA, 306 bp, Zea mays
ttcgctatcatcagaatcttcagacaaatcttctagcatttcgtttgtaatcttctctgtgtttgttttctccatagcctcgtaaaaactagctagtgcaggatcaacaaccttcttctcgtcagccatttgatgggcacttgaacaaatgccgaagctcacaaaacaagcgaaatgtgacaacaataaaattaaaacttgaaaaaatagcacaagcaattgagatggcacaacaaatgttgtcgctgcgggttcctatttatatgcccaagcgcattgcaacttggcgggccctacatatcattg

SEQ ID NO: 72141 - DNA, 312 bp, Zea mays
tctaaagggagagcacattttaggattaacatatgttcattttgagaaagacaggatttgtagcgcatgccaggcggggaagcaagttggagtccatcatccacacaagaacatcatgacgaccgacaggccgcttgagctactcacatggatctattcggcccgattgcttacataagcatcggcgggagtaagtattgtcttgtaatagtggatgattattctcgcttcacttgggtattctttttacaggaaaaatctcaaacccaagagactttaaagggattcttgagacgggctcaaaatgagttc

SEQ ID NO: 72142 - DNA, 311 bp, Zea mays
tgggaagggtcatgatccccacatgtgctacgcggtttttccacaaccagcccatgctagtcttaactattaaacatgcatctaaaccggcctctttttttgcgaaatcaactaaataaagtttgccgtcttatacacccttaaaactagtgaaccatgacttcttttaaagacagacacatttacatttgtaaaaagacaattatatcccatagtgcataattgacttactgacgataaataatgttccaaagcctctgctaaaaacacattggaaattgcgagctctttagagattgcaactctaccta

SEQ ID NO: 72143 - DNA, 312 bp, Zea mays
tcgactttctgaaaattcatcttgattcatttattgttcttaatgttttggcctaatgtggaacaacagattattcctaggaacatatcttgtaagtaacaggagtttgtgcaattgtcatatgctttgtgagttgaaaacattggtatcctaagtaaaaagaatctctgagccgaacatgtagattcagtttatggtaagaggcagtaaaaggagactcgaaaggatggaatatatccaaagaattagctttgaataggaggagtgcatgaaaaacagctatccatatgactaaactttgacttgttgttt

SEQ ID NO: 72144 - DNA, 313 bp, Zea mays
tctaaagggagaacacgtgataggtctaactaatgttttcttcgaaaaagatagaccttgtgcatcttgtcaagcagggaaacaggtgggaagctctcatcatgccaaaaatgtgatgacaacatcaagacccctggagttacttatatggacctcttcggacccgtcgcctatctgagcataggaggaagtaagtatggtcttgttatagttgatgatttttcccgcttcacttgggtattctttttgcaggataaatctgaaacccaagggaccctcaagcgcttcctaaggagagctcaaaacgagtttg

SEQ ID NO: 72145 - DNA, 307 bp, Zea mays
tagaggcgtcgattgggagcctattttgtgtttactcttcttttcttccattgccttaaatgcaatgggttgcacctcacgtgtggaggtggcgccttactccaagttgacaatgtgtatggagtctttgatcataagttcaagctcacaaacttgccaatcactttctcgggagacatctgtttatatctaggatctccacgaattaattgtacttgagtagggttatgaaagacaagagatcttagaataaccttgaccatttcatggtaatgccacttggtgctcccaaggttgcggacttggt

SEQ ID NO: 72146 - DNA, 309 bp, Zea mays
  unsure (1)..(309): unsure at all n locations
taccaaattgcaaagactcggntttgcagaaaagcttactaatagaggattcttatgccaaaattttacttcacaagttaggtttcttcctgaatctatattttcctaatctagatcattcacttttcttacactaacttcattttagcatctttagtttcacttattatctacgatgagggtcgaagatccagtcttcatatccgagaagttcggcgatccgaatcgattaatacttagctggggatctccatccacacgacatatgtagcacttaaccattgcatatgtcaactcgcccacgggttt

SEQ ID NO: 72147 - DNA, 308 bp, Zea mays
tgtaaaatggcaaacctttttctcccagcctggatataaatctgctcagagctgccatacatccagtaagtcgctgaaccttcttttgtgatcgaggagcttccatcttcatgatagcttcaattttatccggattagcctaattccccggtggctgacgataaacccgagtaactttccagctggtaccccgaaaacacatttttcaggattaagcttccatctataccgtctcagactgttgaaaaccagctgtaagtcttcgatgaagtcttccgaattctccgttttgattaccacatcatcta

SEQ ID NO: 72148 - DNA, 308 bp, Zea mays
tgccaatacctgtcaaagcaacagcacatgccttcacagcagctacagaccataccagtaacttggcctttcgcatgctggggattggatatgattggacctttcaagaaagctcaaggaggatacacccatgtattggtgcaattgacaaattcactaaatggatagagttccagcccattgcctctttaacctttgctaaagccgtggaattcatacaaagcataatattcagattcgggataccaaacagtatcatcactgacttgggatccaacttcaccagttcagaattctttgacttctgc

SEQ ID NO: 72149 - DNA, 310 bp, Zea mays
tgccgtctagaatacccttaaaagctagtgaaccatcacatcttctaaagacagacacatctatatttgtaaacaaacagttatatcccatattgcataattgactaacagatagcaaattatatccaagagactctactaaaaacacattagagatagagtgctcatttgagattgcaattttacctaacccttttaccttgccttgattcccatcaccgaatattattgaatcttgggaatccttattcttgacgtaggaggtgaacatcttcttctcccctgtcatatggtttgtgcatccgctgtc

SEQ ID NO: 72150 - DNA, 308 bp, Zea mays
tcggagcgccgaaggtctaaaaaacacctttcctgagctcgttgtcgagaaacgattcaatttctcagcgtgtagcggccccacctttcagagttactgttcggtctctgcggtccaccacgcagcgagtgcgagcgggtgtccgcctggtgtaaaaatcctggcgcttcgccttcttacctgcagcactatataaacagacgagtaggtgtgaagttaccacaacattcattgctatttgcactgttttgctgccaaaatttttaaccgtcgccgaagcttgtctgtcggaatcgaacgaagctcct

SEQ ID NO: 72151 - DNA, 307 bp, Zea mays
tgaaccgagggcccgcgtcaccggagaagctaaaccgcgctcaccggagttcaagaactcgccggcgcacgtggaccgggtaaaccccttcaccatttcccgattcgttgcgcgcacggcctctgtgtcaccctgtgaagctcctcgtgcaccctaattgacctatgccgccgtggtttggccggagcaggcaccgccgtcgatccccgccgcctgtgttcgtggccaggggagctccgaccacctctgacgccgacccgcacatcgacgtgaccgtcgcgacctcctgaacctcaccgaccacctc

SEQ ID NO: 72152 - DNA, 312 bp, Zea mays
tcatggggtgctaaggatgctaccagtgcattgaatcttagaaaggctcaccgtggagctcggtctacgtgcgcagtcggttgggtgaagtccgacgacgtcgatccggtgtctccggtgtggtagagttcaatcctcggctctggagcttcaccgaggtccgtagaggctatcccgagggtgggatgggacagggaatggctaggttggccggtctacggtggctgtggcttgtgcggtcgctggcaccttgctcacggggcgaactccagtgaactcgagcttgggctgggtcagtggcgcgcgggggtg

SEQ ID NO: 72153 - DNA, 312 bp, Zea mays
tattgtatttgcagatgtatagtgctcaaatgggatctccaatgggaccccagttcacccgtccgtcacaatctggacagaccccaaacaccaacgaaacacaggtatagttttgtagtatatttactttcatttacaattataatcatgcatcgttttatttggttatagggttctgagaccggacaaggaaacccacagatggacattcagtggtcgatgcctcctagaggacagattcttcctcctccacaaccaggtatgggatattggccaccaccaccatggggatatcctacacatccaatgggg

SEQ ID NO: 72154 - DNA, 313 bp, Zea mays
ttatcaaatggatgggaagagtgccttcctaaatggactcgatcaaagaagaagtctatgttgagcaacctgccggctttgaagatagtgagtaccctaaccatgtttacaaactctctaaggcgctttatgggctcaaacaaggcccaaaagcatggtatgaatgcctaagagattttcttatcactaatggcttcaaagtcggaaaggccgatcctactttatttactaaaactcttgacaatgatttgtttgtatgccaaatttatgttgatgatatcatatttgggtctactaacgaatctacatgtga

SEQ ID NO: 72155 - DNA, 274 bp, Zea mays
  unsure (1)..(274): unsure at all n locations
aatcctcaagcttgcaaatagggtttatttaaccctttttttttttttttnaaaagaagcccaccctcttgcaaaaaggcaccactattaattaaagtgctctctagacaaccatggctacttgggcctatcccgcttccttcaatcgttcttcgacgcataacacaacccagagctcggcgacagggtgcactcctttctgcctgctgtgtggatccgatgccttaagcccccccgagatgaaccataggtttgcacgatcaaaaaatttaac

SEQ ID NO: 72156 - DNA, 314 bp, Zea mays
tctggtagagtctataaagccattgtacaggtgatttttaacattccggtagtatgtgagtttccagatgtatttccggaagatttgcctggactgccccctgaaagagatgtagaattcgtaattgagctaaagcccggtacggctcccatctcccgaagatcgtaccgcatgccccctaatgagttagtggaactgaagattcaattacaagatctactgaataagggatttatccggccaagctcgtccccgtggggttgtcccgccatttttgttaagaagaaggatcaaaccttgagaatgtgcgtgga

SEQ ID NO: 72157 - DNA, 308 bp, Zea mays
tgaagccatggtaagtagcataagcttataatatgcgaattgactcaagcctagctacgggtgcataggtttcaccaaaatccaaaccttcgacttgtgaatatcccttggccacgagtcgggctttgttcctagtcaccacaccatgctcatcttgcttgttgcagaagacccacttggttcctacaacattttggttaggacgtggaactaaatgccatacctcgttcctagtgaagttgttgagctcctcttgcatcgccatcacccaatccgaatcttggagtgcttcctctaccctatgtggc

SEQ ID NO: 72158 - DNA, 310 bp, Zea mays
tgtcatcgaccaagtcatgaagaactcccactgccgtgatcggaggatggaagcctactgcgacgaagtccggcgcctggaaaacaagttctacaggctggagctcaaccacatcgcccgacggtacaacgagactgcggacgagctggcaaaaatagcctcggggcgaacgacggttcccccggacgtcttctccagagacctacatcaactatccgtcaagatcaacgacacgcccgagcctgaggaagcctcggcccagcccgagataccctcggccgagcacgaggtacccttggtcgcacccgag

SEQ ID NO: 72159 - DNA, 309 bp, Zea mays
tgagaaaggggcaaccgtagcatgcacaaaatcccttcaaaagaataccaagctttccaagaagggcatgagaaaaattcatggtaagaaaattaattctcatactatttgctctaacaatgtacctatgtgcttcaacaaagaaagatcaaagagaagcgatagaaggtgctatggatgcaaggagaagggtcatgaaattgattcatgcccccacatgatgaaccaaaaccttgcacgatcaagaaatatgaccatcaaaaaggatgaaagcaaaaggcaaatgcattgcaaggacaagcaccgcat

SEQ ID NO: 72160 - DNA, 304 bp, Zea mays
  unsure (1)..(304): unsure at all n locations
tgccttcccttatatatcacccacaatccatgttgtcgnggagcgcgccaacggtaaaattttcacgactatcaagaaaatgctcctcgacaacaagggcaaatgggccgacctgctacctgaagcagtctaagcgctaacacgaccgagtgccgggcgactgggttcactcctttctgcctgctatatggatcggaggccatgaccccgcaagaaataaaacatgggtcaccacgtacaagcacttcagccgtccccgacgtagacgaactaactttgaaggacctcatcgacggagaccatg

SEQ ID NO: 72161 - DNA, 308 bp, Zea mays
tgtgaaggttcttcatccccacatgtgctattctgtgatgccacagccagcccatgctagtcttagcaattaagcatgcatctagaccggcctcttcttttgcaaaatcaactaagtaaagcttgccgtctaatacaccctaaaggctagtgaaccatcacttcttctaaagacagacacatctacatttgtaaaaagacaattatatcccatattgcatagttgactaacagatagcaaattataaccaagagactcaactaaaaacacattggagatagagtgctcattagaaattgcaattttac

SEQ ID NO: 72162 - DNA, 308 bp, Zea mays
tctaaagggagaacacgtgataagtctaaccaatgttcaattcgaaaaagatagaccttgtgcagcttgtcaagcagggaaacaagtgggaggctctcatcacaccaaaaatgtgatgacaacatcaagacccctggagctgctacatatggacctcttcggacccgtcgcctatctgagcataggaggaagtaagtatggtctagttattgttgatgacttttcccgcttcacttgggtgttctttttgaaggataagtctgaaacccaagggaccctcaagcgcttcctcaggagagctcaaaatg

SEQ ID NO: 72163 - DNA, 313 bp, Zea mays
tattgtatttgcagatgtatagtgctcaaatgggatctccaatgggaccccagttcacccgtccgtcacaatctggacagaccccaaacaccaacgaaacacaggtatagttttgtagtatatttactttcatttacaattataatatgcatcgttttatttggttatagggttctgagaccggacaaggaaacccacagatggacattcagtggtcgatgcctcctagaggacagattcttcctcctccacaaccaggtatgggatattggccaccaccaccatggggatatcctacacatccaatggggcc

SEQ ID NO: 72164 - DNA, 312 bp, Zea mays
tggtagatggaaagcaacgccaaagccggccatgcatgcaagaagaacatgcggacaaacgacgagagttgaagcgcaaaaaaatcttctaaaggctactttggatactttctcatctcatatgcggttccatgtttatcgaccatatgactagttgactaccattctggtggattgccattaaaagagtagttccattttttatgtaaatttcgtatcattcaaattaccattttttatatagaaggtcgttgttcatgattcctgaaaatccgtccagttctaacaagcatgctatataatgcgtttgtg

SEQ ID NO: 72165 - DNA, 311 bp, Zea mays
tcgcacctctgcactaactcggctgcatcgctttttgtgtttggccaatagaatcctgacctgaagaccttcccaactagcatcttggatgctgcgtgtattccacattgcccagcgtggacctcatctagaagttgcttcccagagatgagagaatgcacttcatgaggacgcctgacgcgccccgtctgtataatggcttcccaatgagtgtgtagtgggctgactgtctggcgatgcgctcggctacatttttgtcatctggttcctcttcattctttatatatctgatgatcagccttctccagtca

SEQ ID NO: 72166 - DNA, 313 bp, Zea mays
tggacggtattttgtgatggctcctggggaaccttctgtgcaggggcagctactgtcctagtagcaccatctaaagtcaggacatgttttgcaacaaagttagattttagatgtacaaataacattgcagagtatgaagctcttctttggggctttggaagctaaaggcaatgggaataagaagggttgtcacacccggttttggaaggtaaaccgaatgcgaaccatgtatgtgccaggatcagaactcacgtacacaacgattacataattcgacatcatcacacaatgctcaaaatagatagcggaaagg

SEQ ID NO: 72167 - DNA, 312 bp, Zea mays
tccactgtctcggtgggagcctcgatcagaataccttttgtcggcttagccaagaggtcggtgaactcctggaacggggtcttggcatacttggtctcggcccagaactcaggagtgaggaagccgtaggtcttcatcagacaataaaggttgcctgcaattcgcaagggtgtgacatgtgctatttagtttcccacactaacaaaatgaaagacagtctacgttgtactgaagctatactcaaatagggatcaggtgattagctataccagtacatttaggcatcaaatgatatgctattccacctcaaag

SEQ ID NO: 72168 - DNA, 299 bp, Zea mays
  unsure (1)..(299): unsure at all n locations
ttgtgtggagttgggagaaaatttgatctcttgggtgtgtcttgaaatgaatgctagagctcttgtaaggtgtagaagtgtagaaacttggatgccattgaatgtggggtgggcntattcactcccatttaccattattatatacctcgctctatactattcttaggttttctcacctccaaatgaaacccactcatggtctttctttggtcccatgcctctctataaaacataattttttcttcttctacaacatcaattgggatatttttctccccccccctccggattttctacca

SEQ ID NO: 72169 - DNA, 310 bp, Zea mays
tctaaagggagagcacattttaggattaacaaatgttcattttgagaaagacaggatttgtagcgcatgccaggcggggaagcaagttggagtccatcatccacacaagaacatcatgacgaccgacaggccgcttgagctactccacatggatctattcggaccgattgcttacataagcatcggcgggagtaagtattgtcttgtaatagtggatgattattctcgcttcacttgggtattctttttacaggaaaaatctcaaacccaagagaccttaaagggattcttgagacgggctcaaaatgag

SEQ ID NO: 72170 - DNA, 308 bp, Zea mays
tattgcgcccaaataatgcaaggccttttgtttttgacgataaaaactagtgaacaaagagttctgaaactaggtgcgaaaggagaaaagaagaagactcgaaagtgccaaaaatgtggcattgctgatggacacaacagtcaacctgcttgtctatagaggaaaatagggtaaaattggctagccttgctgatagaaaaagaggacgaccgcctgggtctagaaacaaaaattcaacaatggccccgcagtggaatgagacatccacatcaaaaaaacataaacataccgattgtgaagaacatggt

SEQ ID NO: 72171 - DNA, 309 bp, Zea mays
tagattagcgctcatatcccaactcgcaagctgtaagctatattatccgggagacacatgttgatataaataagcatccacatgcagaaaggttcacttgcagctctcgtgcacaagtcttcactcctgatagaacatgtaatcctcaccggttgagcatccgcaacatagtcctgagaaccaaaaccaaaccaaacagagttggggagtgggggaaaaggaacagcaagaacatgaaacgttccttttcaagataccaggcctgcaaaagctaaaacatcagctgaagtctactcccagatgcaattt

SEQ ID NO: 72172 - DNA, 306 bp, Zea mays
tgctttggctgaggggtcctttgtatcttttatagataagggagcttcggtttgcgccaaagattttacatgttcgcaacctatcttctccaagatagctgcaactcccctcgcgccagagaaggagcagacgtctccacggccacttaaaatttcctcgaaggcatcagcttcgctgtcgatccattcaattgggccctcaagatcgcctcttacgaagttgtcctcgctggattatgcgccaacgctggcgaagctagtcttattttttctcacacattctatggatttttcgtaacatctttc

SEQ ID NO: 72173 - DNA, 307 bp, Zea mays
tgaaatcgaacacacatgcatacactaaacataacatcgggcctagatgcgggaatataaagcaaactaccaattattgaacgataaagtttttgatcaactatagtacctccttcatctaagtctagatgaccatttgtgccattggagtcttgataggcttagcattttctaaaccaaacttcttgagcatgtccttcaaatatttcgattgacttataaaaattccatctttcaattgtttgatttgaaggccaagaaagaagctcaattctcctatcatagacatttcaaattcttttgacat

SEQ ID NO: 72174 - DNA, 302 bp, Zea mays
taaggtacgtaaaacattaaaatctatgtctatggaaaaaaataaaaaatgtgacggcaaaaacacgagatgctacgagcattaatgcattgttgagagcacctagaggggggtgaataggtgatcctgtaaaaacttgaacttaagccacaaaaacttggttaagtgttagcacgataattgccaagtgactagagaggagtcaaaacacaataaccacaagaaatcaatcacagagatggcacggtggttatcccgtggttcggccaataccaactgttgcctactccacgttgtggcgt

SEQ ID NO: 72175 - DNA, 309 bp, Zea mays
tggtgccgatggagaaacaaaaatccttgaaatcttggctgtcaaactgcttgtcgttgtcaactgttagctcggacggtactccgaagcggcaaacgatgttctgccagaagaatttttgggcagtctttgatgtgattgtggaacagccctcgcttcaatccatttggtgaagtattcgacggctacgaaggcgaacttaaggttcccctgagcggtgggcaggggcccgacaatgtccaggccccagcgctggagaggccatgtatgggcaatcagctttgtatattgcgaggggttgcctgaccg

SEQ ID NO: 72176 - DNA, 312 bp, Zea mays
tcatctaaatgaaattttcccctttcatgaaactctcacgggctctctccttagtaaatcattgtcacgtcatcatatttatttatgtggtggaacatttaatgaaagggaaaatgaaactaaaataaaatcatcgcgagaaatagcctaatacgtatgtattgttacttgtttaagatgacttgttcggttattccaattccatgtggattgtagtgtattggaatgaattgagatggattttaactttctataaatttaaaccgacttaatatcatccaatccacttggattaacgctgaaacgaacatg

SEQ ID NO: 72177 - DNA, 313 bp, Zea mays
tgatgaattcttggttggtatgcaggtttatgaaaagatacaatttcttatttgatgaagactttcctgctgaaaaagaagtgagctcagtgttcatattcaaatgcattgattagaagatgtttctattcgatgaaaataattcatccatattttttttgtagagactgcaaaaaatgattaagaaatctaaggacccagatgccattggagaaatgaagagtcgcgtcacgtggattgtaagtatacttaacatgttggctgttaccatgaaaattatctttttttcataaaaggttgatgcttatcttgg

SEQ ID NO: 72178 - DNA, 313 bp, Zea mays
ttgttccagtgcacgcaagaccacgaagaataccaccaggcgtatgtccgaaggttcttgcgtctgagagcataagcgcccacagtgcccaatgaaattgtcattgaggccatgatcaaagggcttcgaccagggcctatggctcatactttgccaggaaaccccctcagaccctaaagaagcttcttcagaagatggatgagtacatccgggctgataatgatttccgccagagaagggaagaagcttataggttttctgagatgactaggggctttggaggaagaatccatcctaggcatgtcagatcaat

SEQ ID NO: 72179 - DNA, 303 bp, Zea mays
ggaagcggctattggttgatgacttggtgtatactcctccttcttttcctccggcggcttgaatgcaacgggttgagcttcggatgtgtcaccaagctcggtgattttcctcgagccttctatcatgcactcaaaactacaaaaagcccgataacttcctcgggggtcattttagtgtatgtaggattaccacgaatcaattgaacttgagtgggatttagaaaaatgagagatcttaaaataacatttaccacttcgtggtcggccacttcttgctcccgaggttgcgcacttggttcacca

SEQ ID NO: 72180 - DNA, 308 bp, Zea mays
tgggctaccaccatgcaaccggagcgtggagaagatcctgcgtgaacatccatggaagtacaagagggagacctcgctcggacaccctcgggggctgggctatagtttgcgctacccacttgagccggatcatctccgacagaccctcgggggctgggcagtggctcgcgtctcccacccgagccgagtcatccccggcaacatcctcgggggctgggcaagtgtcagcaccatccttgaggaccaagttcccttcggtagccgcctctaaggctgagggtccctcaattacttccatgggagcaaaa

SEQ ID NO: 72181 - DNA, 306 bp, Zea mays
tttaggttttctcaatttgggtcatgttttaccctttaatccctatttagggttaagttccctatccagggttctatttgcaaaatgctataacaatacaacttgtttgaaatttttacctagtgaatgcactctaagtgtgcaaacatatgaaatgccaatgtttatgatgccatgctcaagttgtagtagcagtaacaccaggggtgttacaaccgtcctctcgctctgtgcagaggctcgggggctgctctcgcaaacccggctccgaccaaaccgttgacagcgtcaacataccagcccgag

SEQ ID NO: 72182 - DNA, 308 bp, Zea mays
tctccagaagatagatgaatacatcacagccgacaatgatttttggcaaagaagggaagaagcttacagatactctgaaattgtgagactggccatgaatggcggatcgtctgctcgaattactgagactgaccaggcactctgttattcaaggttgtcaggttccggaccgtccggccatggtgggcggaccgtccgaccttgacttttctgacagctctgacaggtttcaaacggtcgatatagccgttactagtacggcagaccgtccccgtgtgcgcaaaaactgtgctagttgcacataacgg

SEQ ID NO: 72183 - DNA, 308 bp, Zea mays
tgtgccttaaaacaagaggatacaagaagttggagtgcttttatgaaggcttttgcgaatcacttgaagcgttagtacttttgtgaatgattttgtaaagtgtttgcaaatatgtgcaaaacataataacatgtgtaggtttgtgaatgattttgttgtggtgcttgttgatggtttatgtgatgtggatctatcattatgcaatactaattaaatttgtatatctatgtgattatgtgtataaaaattggtgatttgtgatgcttttgtatatgtaacagttgttgaatgctcattaatggtatatt

SEQ ID NO: 72184 - DNA, 304 bp, Zea mays
ttcatgtcaacatctaggccactgtaactattttatatggatggatttggacctacaaattatgtcagtgccggtggcaacctctactgtctagtgattgttgatgacttctcaagatacacttgggtgttctttctcctgacaaatctgaagttgcatctatattcaagaagtttgcctagaaagcacaaaatgaatttgattgcaagattaagaaaattagaagtgacaatggcaaagaatttgacaacaccaacattcatgagtactgtgatgaaattgggatcaagcatgaagtatctgc

SEQ ID NO: 72185 - DNA, 305 bp, Zea mays
tgtgcgtctcaaggtacctggcctttgcctcatggaggacttcgttgacgtagtagactggcttctggatggttcggacccctacggttggtcccgagccctcaagctcttgaccttccattaccatcgtggtggtcggccaccaccttctcctaggggaactttttgactcccctacggatgttgtgtcgtcctttcgacgaccagcaccatgctcaccgcctctgcaaccactgcaatgtataagtacaacggctcccctggctctggagctaccaatattggtagggacacaaagtgctgct

SEQ ID NO: 72186 - DNA, 307 bp, Zea mays
tagtttagggttaagtaccctacactatggttttacccatgacatgtcacatcaatacaacttgtttgaaatttttgcctagtgaatgcactctagtgtaacaaacacatgatatgccaatgcttatgatgttatgctcagttttagtgacagtaacaccaggggtgttacatacagtcttatcttctgccattgcgacaatgatcacaacaaaagacgaagctcaaaaagaacagttgcgctcacaaaaggcaagagctaaaatgataatcacagcacaaaaagctagatggcacgaaaaattttc

SEQ ID NO: 72187 - DNA, 440 bp, Zea mays
ttcctccaccaatcttcgaaacaactatcacctctcttagactccacattattgagtctaagtgaagaaaggatagcatgccaaaactgccttgcaaaaacacaattggttaagatatgctagatcgtttccttctcttggtcacaaagaacacaactctggggataatcaagacctattttctgaagtctgtctgccgtccaacatttattattaatggctagccaaataaatgttttacatttgggggctgcccaggctttacaaattttcttccaaggttcaaaggagattgcaccactgaagaaaattctataggcagactttgagataaaaccccatcactagagaatctccaaacatgtgtatcattgttttccagggcatcccacagctgcaagtattgcataatgcccgcaagagataggttccctgtatat

SEQ ID NO: 72188 - DNA, 438 bp, Zea mays
tcacggcctcacaaggaagctatctgaaggcttggatcgatcggaggaggacgggaaaggggctggctacggtggttgctctcgggcggctctagcgggtcgcggggaggtcgccggagctaagggcgggctcggggaagtcaggcgtggtacggaggatgcaacggggaaagcaaccgagcactgggacgggctttatagccgtggcgtgggcgtggtcacgggcgaccgcgggcgcgtgggggttcgcgcacgggcgtgctctgagcgcgcccacgggtgtcagcccgcgttgaacacgcgggagctcgcttctgccatggttcaatggcagatttgagcaccttatcgtgcgtatcttggcaaagtcactgtgtacggtcccttccctgctccatatcctacctctttgctgagagatccaagccaagatatggg

SEQ ID NO: 72189 - DNA, 399 bp, Zea mays
taaagacatgctgatcgcttactgctcacgggatcacgagtaacctcttactgctcaggtctagggccattgcactcgagagcatgaggagtaccttcacgcatatgatcaaaggttcttgcgcctgaaagcacaatcgcccacgacgttcaatgaaatacttaatgaggacatgatcaaaagtcttcggccaaggcctatggatcaatacttcgccaggaaaccaccccatactctggagaagctgctgtagaaaatagatgagtacatatgggctgataatgacttctgccggagaagagacgaatctgacagatttatctgagatgactacgtgcttcagagaatgaatgcaccatagacatgtcggatcaatccacagctccagtcacaacgatg

SEQ ID NO: 72190 - DNA, 430 bp, Zea mays
acaatactcaagctctaagctctttgacataaaattacttcacctagtttcattttagatgcattaatgcaggaatgaaatcttaagagattaaactaggtatgaagtaaggataatgcatggacatgctttctcttccttttatacaatatatgataagaatgtatatacaaggaagatttatgtacatgcataaatgagatgaagtagctttacccttttgtaccttcacgtaaagatgctctcttcattgtgctttgtccttagtcttagatgcttaagacctatactcaagacaatatatggaaatattttgcacaagagagagatctacaactagtgatccttttctaagtcattgtcaacatatattaaatggatcacaaattgcataaatgtatcatgaatccttcttttaacttagtgcaca

SEQ ID NO: 72191 - DNA, 352 bp, Zea mays
tcgggtggagcggagttctccgtcttactttacttacaccgagtccgagcccagcgacggttggagcggcgaatcacgtcttccatgacctagccgatactagccctgcggcaggcagtccggaggtcgcccacttccggggtgtaacaccaaatcaagccctacgtaaggcggagaggagttcacccacttacggggcttaccccccctcttaggcctgtgtcgtgccgagaggaaaacgccatggtacggggcgtaacccgagtccaagcaccgtggtctgcagcacaggacattgccgcgtaccgggagctatctcggattcaaggactgggccaggctgagctaacta

SEQ ID NO: 72192 - DNA, 432 bp, Zea mays
  unsure (1)..(432): unsure at all n locations
tcaagtaaacctagtaaccaaccgcaaatttctgctcagacctgagtttatcggcctgacgctgcatgcgaagctgagctcggaccatgtgttggtggacaagatcctgcatattanaacattcctataaccattgtgacagctgaccaggcacattctggtatggagatacgcccacagaatgtggtttacggccatataggacttcaaacggagatgaacccaaagccgaatgaaaagtagtgttataccagcattctgaagtgggtaaccaagaggaccatttcttggggcaagcagttacaaaacagcgcagaaatgtctctagacactgattcacccgttctgtctgaccatccgtttgggggtggtaggaagaactcattcgcagctcagacccgaccaacttgaacagatgttgccaaaagtggt

SEQ ID NO: 72193 - DNA, 357 bp, Zea mays
acggcgacatcgatggagactccatcccccatgatgtcttacgagttccgacagggatattgctcgggtttattgtcagacaccggtgaattgacgcgcatccagaaaagatcgaagctatcatgagaatggaagcgccactgatcacatatgaaagtacaaagacttaccggacgcagtggcggctctaagaagattcatatcgaggctgggatagagaggcttaccgctctataatgtgctcatgaatgtagacacattccagcggactttcgaagcacatgaagctgtagatgcgttgaagaaattattgacaacaccgacagcgctcaaatcacctcgctgagccacgccgat

SEQ ID NO: 72194 - DNA, 459 bp, Zea mays
  unsure (1)..(459): unsure at all n locations
accatatannaaactcaagcttcaacaacacacattgatgcagagctattttaagtttaagctgccaagagccaggccgagaccgaagctgggccttcagagcccgccaaggagaaattctcggaaatcggagaagaagaaacgaaaaaagaatgttgcaaacaaattctgtctgataaaactaccattcctattcccgaagcatcttccgaagctctcgattatattgtacgacatgcttcgggaaaaaggttgtctgcagaagaaaagctagaagctcaatgttatgcccagagactgaaatatccaaaaggggcgttgatattcaacggcagcggagaagaagacttcttgtattgtctcccaaacagcaaggagatttctgtctgtcgtgagatgagcaaaagcttcgggttcccgacactagaggacaggctttccgtgctatcaaaagatgaa

SEQ ID NO: 72195 - DNA, 435 bp, Zea mays
  unsure (1)..(435): unsure at all n locations
tatgaagattcttcattccaacatgtgctagatgtgttgtgctagagccaacccatattagtcttagctattaaacatgcatctagatcgacattttctttagtgaaatcaactaaatagagcttgccgtctaatatacctttaaaagctaatgaaccatcacttcttctaaagacagatacatcaatatttgtaaataaaattatagctcatatgacataattgacttatagaaagtaaattgtaaccaagtgattctactaagaacacattagaaattgaatgctcggtagtgatggctattttacccaaacctttgaccttgccttgattcccatctccaaatataatcgtgtcgtgggaaaccttgttctcgatgtangaagtgaacatcttctcccccatcatgtggtttgtgcatccgctatcagtaat

SEQ ID NO: 72196 - DNA, 406 bp, Zea mays
tctactgaagcttcggctcaacaagctgatgctgtagctgggccttcagagcccttcaaagaacatccttttgaagccgaagcagtaaaaattccggaaccaatattagttgaagaaacggacaccgtcatccccgaagcacctgccggcatgcatgattacatcatacgacatgcttcggggaaaaagctatctgaggaagaaactcatgaggccaaccattatgcaaaggagctgaaatatccgaagggggcagtaatattcaatgggacaaatgaagatgacttcttatactgcctgcctgataacaaagagctatccgtctgccgagagatggcgagaagcataggctttccgaagcttgaagctgggttaagcgccatgacgaaagaggatctcgcagaca

SEQ ID NO: 72197 - DNA, 417 bp, Zea mays
  unsure (1)..(417): unsure at all n locations
ntatcaaatggacgtgaagagtgtctttctcaatggaccaatcaaggaagaggtctatgttgaacaacctcctggctgtgaagatagtgagtgccctgacgatgtntacagacgcttataggcgctttatgggctcaagcaagccccaagagcatggtatgaatgcctgcgagattttcttatcactaatgcttcaaagtcagaaaagtcgatcctactatctttactaacactgttgcaaaagacttgcttgtatgccaaatttatgttgatgatattatatttgggtctactaacaagtcaacttgtgaagagtttagtaggatcatgattcaaaaattcgagatgtcaatgataggggagttgaactatttcctaggatttcaaatcaagcaactctaagagggcaccttcatc

SEQ ID NO: 72198 - DNA, 426 bp, Zea mays
  unsure (1)..(426): unsure at all n locations
tggacagcgttctgagatggcttctggtgtaccttcggagcaagagcagctgctgttttggattcaccgtccaaggttaaaacttgctatgcagcaagactggacttcaactgcacaaacaatattgctgagtacgaagccttgctcctgggccttcggaaactaaaggcgatggggatcaggagggcgatccttaaaactgattctcagattgtttcgggtcatattgacaaaagttgcaaggctaaagacccgaagcttgaaaaatacctagacacagtccgaaggatcgaagcttccttcgaaggattttctgttaagaatatccctcgagggcaaaatgaacatgctganttgttagccaggtctgcagcacaggggctgccgctaccttcagatgtattcttcgaaacaataaaggcacct

SEQ ID NO: 72199 - DNA, 437 bp, Zea mays
  unsure (1)..(437): unsure at all n locations
ntaccaaatggacgtgaagagtgccttcctcaatgttccaatcaaggaggaggtctatgttgagcaacctcccggctttgaagatagtgagtaccctaaccatgtttataggctctctaaggcgctttatgggctcaagcaagccccaagagcatggtatgaatgccttagagatttccttattgctaatggcttcaaagtcggcaaggccgatcctactttattcactaaaactcttgacaatgatttgtttgtatgccaaatttatgttgatgatatcatatttgggtctactaacgaatctacatgtgaagaatttagtaggatcatgacaaagaaattcgagatgtcgatgatgggggagttgaagtattttctaggattccaagtcaagcaactccaagagggcaccttcattagccaaacgaagtatactc

SEQ ID NO: 72200 - DNA, 271 bp, Zea mays
  unsure (1)..(271): unsure at all n locations
tcggcactatnttcaagcttacaacataattgtctttcttacaacctctgaaggatattatgaggaatcgagacgctactggaagaattggaaaatgggccgcagagctcaatgaattttgtattgaatatgttcatagatcttcgattcagtcccagactttggcagacttcattgttgactggacgccaggggctcaggaggaagaaacaaataaagacgacgaagcatggacagtgttttgggatggatcttagggaaccttcggagc

SEQ ID NO: 72201 - DNA, 422 bp, Zea mays
tatattatcttgcaccgcggtgctcgtagtagggtttacttgcgtcacgagagagagagagggggagaggattcggtcctgaggtgatgtgtctgagttagcctccaccgcgtctctcctactctgcatgcctctcttcgctcgccccgtccgtctttcgcgtgccccttaagatggccctggacatccccttttatagatacaaggagatggcccagctgtacaatggtggcgtagctatgtgctaacgtggctggcggagaagtgccttgagccctgtacatgcgctaacgtggccgtcggagaagtgcttgagccctgtagaagcatagctggcggtgcggcacggatcctgctgacgtttccttgctttcgaacggggttgagagcaactgacgtcatgggcgcacgtggcgaaccat

SEQ ID NO: 72202 - DNA, 434 bp, Zea mays
tagagaaatctggtatgaatctgcgataatacccatctagtccaagaaaactccggacttggtgaacggttgttggaggtttccattccacaatatctttgaccttgctaggatctaccgcaattcctttagctgataatacgtgccccaaaaattgaatttcttccaaccagaacgcgcacttgctgaacttggcatatagctggtgttcccttaggcgcgtcaatacaatccgtaaatgctgagcatggtcttcttcattcttggaatatatcaagatatcatcaatgaagactaccacgaacttgtccaattcaggcatgaataccgagttcattatataagtgaaatgggcaggagcatttgtgagcccgaaagacattaccaagtattcaaacaatccatatcgcgtagtaaacgcggtcttcggtata

SEQ ID NO: 72203 - DNA, 447 bp, Zea mays
taacagtaacatttttttgtcagtgccatctttcattatatgttgatctgccaactaaacactctaagatgggagttctccattaataagaagtcatatatgacctagaaatgcagaaaaagcttggctcgcaatggccaaacaacataatctggccatgcattacccaatccatacatagcaatgaagaacagaacatatcgcgagcgctaattatcttggtctagattatatatgaccttcagtgcagtttggtttggttcaaacaagcactacgggatacgggtgccctaagagagaaatcatgaatgtgagtgctacttggatgtcaacatgctaagtacacctttagtatttgcatccatcctaataaatattcgaagtgatatccaatcttaccttttatacctatcacaacatggtttggggacctggtggcgctgctct

SEQ ID NO: 72204 - DNA, 433 bp, Zea mays
  unsure (1)..(433): unsure at all n locations
tatcaaatcggccctaatggccgggtatgtggattctctgatatttctccaagcaacatcatagagccgactagggaaaccttgccggctgacgagcagctccagttcgaggagcacaaggagcggatgatccaggaggcgaaagcaaagttcttggccaacttcaaagtggacaggaacaacaaggtcgtccgacatcgggcgacggatccggcttcgctccaacccacgctagatatccccaatgtaagtaataccaacaatctgcaatctcttagaaattatgtagaagatcagcgtgaacaaatgcagaacatcatagggggtatgcaaagcgatcttaagagactagtacgtgcatttgataaatctagtatcacaaattntccttcgcacgaagttgagttatgagggaacacgcgtaacacatcgg

SEQ ID NO: 72205 - DNA, 411 bp, Zea mays
  unsure (1)..(411): unsure at all n locations
tcagntcgtcattctgtagtttcatcatcctgtacatattacaacggaatgagacaagagcagagttcaatgagaatgcaacaagtaacgagtataagtctcttactggctgaaggtgactccgagcttcgtcaccagccatttttcgcccgccatttatccaaatctgcgtcataaacctgtttcctatgcttcgagctaggctggagatgtcaattaaatctgctggagacagactgaaatttggtctgttaacaatttttccatgtgtgcagccagctttcaggaaagcagaagtcgtgcctcgagaagctaacagggcgcagaaatcgttatgcccggagatatctttatcaagtgcatcaacttcgccctcaatatatacacaagtgctcggcaagttntcggctg

SEQ ID NO: 72206 - DNA, 404 bp, Zea mays
tagatagaattgtttccatcagaacgactcaccccctccctcgcgagtcgtcagacgcgcctactccccctacgtgcgcacttcttctctatactgctggctttggctggaagccggcccagcctcgcaagtcgcaaagcacggagcggaccaataaatacaagcaactgctgcaaccaggcaaataggcattcgcgcgcctcaacgacacccgtagggcgtcagccacgggccacctaccgacgctccctcactggatgtgcccgcactcccgccctctactgcaggtcaacacccagcaggagggaaagggcgactcgccgactccgaagcccaagaccttaacctacagcaacgcgccagcgccggttctgccgcccatgggcatcctatcccaatctctc

SEQ ID NO: 72207 - DNA, 430 bp, Zea mays
tgccaagccctcggacccggccggacttcaccggatgcccgagatcgacctcaccggacttgggacttccgacgccgcgcgtggaccaagctatccaatgagtctccgcccaattccttgcgctcatatcttacttggcatcccgtggacctgtctgacccatccaattgaactatctcgccatgaccaggccggactcctcgccgccgacgagcatcctcgcctgcgcgcgtggaccgaccgactccggccatattcgacggtgacccgcacaccgttgagatccccgagacctccccttcatcctcgaccacttcaccggagcaatctcgccgccggtaagcccctccgccctttcttgcgacgcgggtactgtttaaggcagaagaaggaccttgggttacgatttgtataacccgagggcgtttct

SEQ ID NO: 72208 - DNA, 420 bp, Zea mays
  unsure (1)..(420): unsure at all n locations
tcggtatgacggcagataagaggaaccgacttanttatgaaaagccaaattagacctcgaagaattattatagagttattgataaatgtaaaaggcattaatgtaattctacacgggctgcgtccctcgcctataaatagatgaacagtactctcatactatncacgctgacttggcattcgctttttgcatcacgcctgtacctttacttttcatcagtctgaaggtacatttataatttgttttcatgaatntgatagtaaaaataagttgatgataaaatctgtattattatttngatttcatatatgtgttcttcttcatcatctatcgaacttacgaaagttttttttcttgtaacctttcgtcagaattcattatatccgaagggacataattgttggcgtcgtgcttcggtat

SEQ ID NO: 72209 - DNA, 325 bp, Zea mays
agtcgtggaccaccgcccgatcttgtggcttccgttgagattctgccgcgcttgctgcctcggtgagctatgccccatcactcgcgacctgtgacaaacctcgattcggtcacttcccctctatttctctcggtccacgctcatcggtctttattcagcaccgtcacagctacgccggtcgtgacccgtgacctcgttgtgccccagacgccgctcgagaggccctgagccttctcttaaggtaactgatctaacctgcccttaatatcccctagtctgcccttggttatgtgcgattgctcgccagagtatactccggtacacc

SEQ ID NO: 72210 - DNA, 433 bp, Zea mays
cgtgaagactcttcattccaacgtgggctactcggcgacgccagagccaacccatgttagtcttagcaattaaccaagtgccgagttcagctctattaaaatcaactaagtatagctgaccctctaacactcccttaaatgctactgaatcatcacttcttctgaagacagtaacacctatatccgtaaaaagacaggtgtaacccattctgcataattgataaacagaaagcaaattgtaatcttaagaatctacaagaaaaacattggaaatagaatggttaggagatatagctattttaccaagtcttttgaccaaaccttgatttccatccccgaatgtgatagctctatggggatcttggtttttctcataggaggagaacatccttttcttcccagacatgtggctcgtgcacctactgtcaattat

SEQ ID NO: 72211 - DNA, 439 bp, Zea mays
tcagctccatctatattatggattgccttggaatctgtccttcttccttcggcccttctggcagcttcctgactcccatgaatagcaataggcccttggtccgaaggtatcttcatgcagagataagctgggtgaagaattgcttcaaaagcatttagagtaccacgaccaatgatggcgttgtaggggtattccatgtcaacaatatcaaacacaatttgctcagtccttgtgttattaacaaatccgaaggttaccggcatggtaatcttcccgagtgccacaatctgccgccctccgaagccacaaagagggtgcgtagcatcatgaatcttgtcttcaggctcttgcatctgtctgaaggctttggcaaatataatgtcagctgcactgcctgtgtcaactagaacattgtgaaccagaaaccctttgatcacac

SEQ ID NO: 72212 - DNA, 436 bp, Zea mays
tgtaacccctactacgagcaccctagtgcaagatattatatgcctcatcccccctctcgtgtttcatcttgcatcaacccatctgggcagggacacgcagcgtcaaattcactggtcggttgagggtcctcgcgggtccaaaacgccgacaccaggctagtttgaagatgtccccgtttgaatctttatatggcagaaagtgcagaactcctctgtattgggatcaaactggtgaaagacagttctttgggccagaaattatacaggaggcagaagaataaaaccagttgataagggagaacttgagaactgcgcagtcaaggcagaaaagctatgtagatacccggagaaggcagttagagtttaaggagggtgatcacgtgtatctaaaggtgtcaccgatctggggtatgaggaggtttaaagctaaagggaa

SEQ ID NO: 72213 - DNA, 431 bp, Zea mays
  unsure (1)..(431): unsure at all n locations
tgcttgcttgcctgcctgcctctgatagtgattatttatggttccattcttccaaggcatgagaatccgtctgtttcgtttcgctcgctacatctttgtgtgtactgtgtaagtatagctgctgctgctactctagtcgtagctagcagcatcccgtctctcccgtcccatgcatctcttcttttcttgcatctcagctgtacagtactagattagagacagatcagacgtgcattgggaaatggtgccatggctgacctgttcttcttcacctgtctcaactgtagtactcctactcctactgccatcgcgctggngtgcagcagcacaggcgtctcagtgtgtgtgtgtgagagagagataagcgccgttcgtgttttcggggggtgctgtcgcccgctttgatctgacgtgcagcggtgcactactac

SEQ ID NO: 72214 - DNA, 434 bp, Zea mays
  unsure (1)..(434): unsure at all n locations
tcggatccttagctgtagcaacttgtgtctttatgtatctgaaaccacctgggaatcagntctaagaattgcccttctgattcccattgcctttaatttccgaaggcccaaaagcagggcttcgtactcagcaatattgctcgtgcagctgaaatcaagtcttgctgcgtaacaagttttgacattggatggtgaaaccaacacagcagctgcacctgctccgaagattccccaagagccatcacaaaacactgtgcacacttcggcatctttatttgcttcttcatcctgagcccctggtgtccagtcggcaatgaaatctgccaatgcttgagactggatcgaagatctatgcacataatccatgtaaaattcgttgagctctgcaggccatatcccaatccgtccaggagcttctctatttctcattatat

SEQ ID NO: 72215 - DNA, 440 bp, Zea mays
ttggctatcttatgcggctagcaaatctatatctatttcctaaatctaacttggtcaagaagtctaagtgccatatgtgtgttgaatcaaaacaatcccacaagcctcacaaggctgttgaggcgaggattttggcacctctagaacttgttcattctgatctatgcgagatgaatggaattctgaccaaatgtggtaaaagatactttctcacttttatagatgactccactagattttgctatgtgtatctcttaaaaacaaaagatgaagcattcaattattttaagacctataaagcggaagttgagaaccaacttgagagaaaataaaacggttaaggtccgatcgaggtggagaatatttctctaatgtgttcgatgagttctgcgtggaacatggtattattcatgagaggacaccgccattctcaccacaat

SEQ ID NO: 72216 - DNA, 341 bp, Zea mays
gatggcctccaggaaacttctacattatgtccaagcatatcatataattgttccttcatgacaacctctgaaggacattatgacgaatagagaagctactggaaggatcggaaaacgggttgccgagctcaatgaattgactattgattatgtacatagatactcgattcagtcccaggcgttaacagatttcattgtcgacagaacgccatgggcttatggacaagaagtaacaaaagacactgaatcctggacagtcttctatgatgattcttggggaacctatggcacaagagcggcttgtggtctaataccgccctctaaagcagaacatgctatgc

SEQ ID NO: 72217 - DNA, 430 bp, Zea mays
tatgaagattcttcataccaacatgtgctatactgtggtgctagagtcagcccatattagtcttagatattaaacatgcatctagatcagcattctcttttgagaaatcaactaaatagagtttgttgtctaatacacctttaaaagctaatgaaccatcacttcttctaaatacagatacatcaatatttgtaaataaacaattatatcccatatgacataattgacttacagaaacgagcgattctactagaaacatattagaaattgaatgctcgatagtgatggctattttacccaaacatttaaccttgtcatggttcccatctccaaagatgatcgtatcttgggaatccttgttcttggcataggaggtgaacattttcttctcccccgtcatgtggttggtgcatcctctatcaatgatcca

SEQ ID NO: 72218 - DNA, 313 bp, Zea mays
  unsure (1)..(313): unsure at all n locations
tcggctcattgatcctcagcatcttcattctgtacatattaaaacgatatgagagaagtgcagagttcaaggagaaggtaaagtaacacgcacacatttnttaccggcttaaggtggcttcgagcttcgtcgccagccattttttgcccgccttttaccccaatctgagttatgaatctatttcctatactccgagctaggctggggatatcaattaaatttgccggcgataagctaaaatttggtttgttgacaatttttccatgtgtacagccagatttcataaaggcaacagttgtgccccgagaagcta

SEQ ID NO: 72219 - DNA, 419 bp, Zea mays
acctccagcatttttgagcccctcaggtcttctgaatggagcaataggtaccactaagagttatgaagcatgtctttggctcatcctctttcttcatccacatttggtgataacaccgacatcattccgattagctcatgaattctgaagaacttgctgcatctacgagggaatctattcttggctaagggaactcatccttgagacatgccttgttgagatctgtgaaatcaatgcaaagtctccatttcccattagctttttcaccattgcggtgctagccacccactctggatatgagacttctctaataacaccggcactgacaaggctctttactctcattgcgtgcgccttcggctttatcatcggacaatttgcgatgcctctgctttcttggtctaaatgatgggtccaca

SEQ ID NO: 72220 - DNA, 435 bp, Zea mays
  unsure (1)..(435): unsure at all n locations
aagctcaccttgaacgaggataagctgccttggntccataagttgatggtccttaagcctctttgaaatccttaagggtaaatgcttgagatattcataacatgcttccataagtgcataaactgtcatgagcatcacacctatactatgacacaatgcacttcacattctctatgaaataaatatgatctcattaacctaattatgtgcacttggaatttaagaccaaaattttgtattcctctcaaagcacatatttagggggagcaatctatattatatagagttgtttaagcttaattgacatatccttttaatcatgtctctttactttggtacatctgcatatttcttatctctatatgagccaaggctaagactaaatatgttgtatgagcatctcatgtatttaggcctagattgaaaaggaaatgg

SEQ ID NO: 72221 - DNA, 386 bp, Zea mays
cgccaagcccatcgacccggccggacttcaccggatgccctatatctacctcaccggacttcggtcttgcgccggcgcgcgtggaccaagctatccagtgagtctccgacctattcctggcacccatgtcttctctggcaccccatgaacctctctgacccatccaatggctctatctcgacgcgaccaggccggactgcatcgccgtcgacgagcatccccgcctgcgcacgtggaccgaccgactccggccatctgcgacggtgacccgcacaccgatgggagccccgagacctcccctacgacctcgaccactctatcggagcaatatcgtcggaggaaagcccattcagacttgcttccgccgcggatactgtgtaagatag

SEQ ID NO: 72222 - DNA, 441 bp, Zea mays
  unsure (1)..(441): unsure at all n locations
tccncactgtatcagggttggccacccttcgaagtttcatatgacctggcttgatgttttttcaatctcacttttctatcatgccatttgactgttttagcctggtatttcttaatgtgttctatggcttgaagcctggttccttctatggtatcatttgttacttggcagtcaccttcatcctctgtcgaagttaaagttcttattgaacccgttcttgcttcttccggtgtaattgcttcgtcaccaaatagaagtttgaacggagtaaatcctgtcgaccttgatacagcagtgttgtggttccagaccacttttattaattcatctggccactttcccttgngctgattgaagattgacttcattattcctgttattataattccatttgccctttctaccaatccatttgctccagatgccttactgatgcaaagt

SEQ ID NO: 72223 - DNA, 441 bp, Zea mays
tagtgcaatggttggcaacaagggaagagttgaatggtgtattgctgaagaatttaaatataaagagatatcagccttcacgagtgtatactttgcagaagaacacaatgtaaatgcacctacattaaggtataatgttgatcaagctggtccatgcagtaaactcaaaattttgtcattcgagggaaagacagttggagcatcaactgaatatcacattggacgtgaagaaaagttggatgcattactctacatgtatgaaaacatggaagagatgactccatacttcaagtaagcatagatcttcaaaattgaagagcaacatgtgctcattactcctcgtaactcttttatttactttttttcaacagagagtacgaacgacagaataagggtaaactgtcgacgaggctgtatgaaatcatgcttcgcgcacgaaaa

SEQ ID NO: 72224 - DNA, 412 bp, Zea mays
  unsure (1)..(412): unsure at all n locations
aactcagcttacagcccaaaagattgtctaattgtgttatttctggctcccatggctcaagataatgagggctatattntatatcatgctaattatcctaagcacaaaattaggagaattcatgctaggcaacctcatattgtttcacattatgcttttatgtataagaatgaggcatctagctctaagcattcaacccatgttaaattacctaaaaagaaaactcctactgcatcaaatgagcctaacctttcatttaagaattttgatgcatcttatgttttaactaacaaattaggcaaaatagttgccaaatatgttgggggcaaacacaacggctccaagacttgtgtttgggtacccaaggtgcttgtttctaacatcaaaggacccaagactatttgggtaagaa

SEQ ID NO: 72225 - DNA, 432 bp, Zea mays
  unsure (1)..(432): unsure at all n locations
ntatcacatggacgtgaagagtgccttcctcagtgtgaccaatcacggaagaggtctatgttgagcaacctcccggctttgaagatagtgagtaccctaaccatgtctataaactctctaaggcgctttatgggctcaagcaagccccgagagcatggtatgaatgccttacagattttcttatcactaatggattcaaagtcggaaaggccaatcccacactctttaccaaaacacttgaaaatgattcgtttgtatgccaaatttatgttgatgatattatatttgggtctactaacgaatctacatgtgaagagtttagcacgatcatgacacagaaattctagatgtctatgatgggggagctgaagtatttcttgggatttcaagtaaaacaactccaagagggcaccttcctgagccaaacgaagt

SEQ ID NO: 72226 - DNA, 440 bp, Zea mays
  unsure (1)..(440): unsure at all n locations
ntanattgatattnttcattggtatctatttcatttcaatatatcaattgatatccttatcttgagaaagcaaaatctcaagtggtattgttttaaacttcaattggtatcttgtaatgataatctcttcaattagttcatgtaaagataaattttcaaaaactggtatctattaaaaccctcttgaaaactaagaggagaatttcattcagggggagttttgtttagtcaaaggaaaagcatttgaaacagggggagaaatttcaaatcttgaaaatgcttcttttgcaattttattcgcatacctttgactatttgcaaaagactttgaaaagattttccgaagagatctgcaaaaacaaaacaagtggtgcaaatgtggtccagaatgttaaattatagacagcaatccattcatatctagtgaaatatcaattggt

SEQ ID NO: 72227 - DNA, 443 bp, Zea mays
  unsure (1)..(443): unsure at all n locations
ggaccaaaaactagccgaacanggactcctggcaacttcttttgatcccacgggcaccatccgcattgagtccacactaacatctcctacaaacacaaatacttatgtccctcagtttttgaaaccacgacaggcggcgcactacgaggcgaacgttgcatgccaagtgacatctttcactctgatggctcagtccttagcgttcatctccgatgaaacctttgcaccatgcatccgcatcatgccaagctccctcgactatcctcggcaccgccactagcgatctctgtctcgctggcccccacatgcttttcattacaggcacatgatccccattttctgtcaccgctaggagccaggcggacaaatgatgcctcacaaggcttgtcgccgcccttaatcagtgtcttaacatgcttgcacaagccaacaagcaaaaggca

SEQ ID NO: 72228 - DNA, 441 bp, Zea mays
  unsure (1)..(441): unsure at all n locations
tccctaatctttattggtgcttattaaatatactttaatgtttatatttggcccaagccatgattctatatttttcataatcttttgcccattttcttcaattttacttaaagagctcaattaaggttggtattatggtttcaacattttgttcttttgaaagctcatttgttttatcatgatgcttttaagtataaacttagtggatcctttattcttaagtcaatttgatgctcatgctcaatgtggttcacatgaaatgttgatttcttgggttagcactgatagaaaccctgngtgacactggggtgtcacagccttccccccttaaaggaatctcgtcccgagattcgggtcagagtcctcccggggtgaagcgaaaggtgagacctacatgaagtgggtgcttattattanggcaaactgttcttcgaatgtcat

SEQ ID NO: 72229 - DNA, 429 bp, Zea mays
ttcatctttcttcttcacaaacaaggatgtacacctccaaggcgaagtacttgggcggataaaacctttgtccaacaattcttgcaactgcttcttcaattctgccaactcagcgggtcgcatccggtaaggcctcttggaaataggtgtcgttcctggttgcaactcgatgtcaaattcgatatcccggtctgggggcaatcctagtaattcatcaggaaaacatctgcatattcacagaccactggaatgttcttcaaaggtaactctatcatagcaaaagcacatgatcgagtagaatcttggctgggtagacacaacacatggtcttcgaatgtaggagaacggatctccatagctctggcagctacatccaacaccactcggtgttgattcatctagtcggctccgagaatgatgtccatacct

SEQ ID NO: 72230 - DNA, 429 bp, Zea mays
tcggcccaacaacaaagatcttttctgtcgccagcgccaaggggcagaggcgccaggggcttcgggggaaggtttggagaccagccgagaaaaatatattgcctattctgtggtgaagacaagggccatactaccaggatgtgccatgttaccatccagaagcagaatgaaatagcggaagcagcagcgcaacaaggtcagccgaagcaggtcatgcatactgctttgtatcactcaccttatattccagaatatgtaggcaaccaccctgcagcttctgttgcttcggcgagccaaccccaagcatcttggcagcaacctccaccgtcacctgcgacccatcgaggacaacagccagaatggagtcagcacaatcatgttcagagggatttcagagaggagtccgaagctcgcacagtcaacagcact

SEQ ID NO: 72231 - DNA, 366 bp, Zea mays
cacgctaagcacatcgtcgtgcgcaagagcttaaacttgtttggtgtgaaccgcgggctgagagcgtgtgcaatgcgtacgcgggatggccctatttatacgcgctgcgcgtttaatatcgacagaccccgcttgatacggaatagtgtctttctaacaagaggaatgcgggttgtcagaccttgggcgcatagacttcctgcacatcgcactctacatttattatttcgagcaaactattattgctaggcgctactgtgggggaccttccgcatgcaaatgtactataacacaagatctaatactggttctggagtatctggtgagacccagcatattgtgactcaatgcaggcataactgtcta

SEQ ID NO: 72232 - DNA, 434 bp, Zea mays
  unsure (1)..(434): unsure at all n locations
tcgaatntaactctaatattttagcctcagcttatttctttagccttcggtcgattggagctcgaagtctttcttttcaatgatggcagattgctcttttattttgctttccaagttttcaattatagcttcatgctttttgtcctccaagtcttgttgcatcttcagagctttgctcagtagcatgctctgaacagaaacaacttatgttaagtaattgttaacggcaataaaaaacagagaaaaaggttgtttaccttgaagttagaataaaacaagctgccgacgatatgttgtcgtcggtagcggctgatgtctgtctctagcttcggaaaaccgatactcttcgatagagtaccgattaccttagctccagtctggtctcgaatacagcctagtttttcatcatctacacccccaaataggagggcacc

SEQ ID NO: 72233 - DNA, 422 bp, Zea mays
actaagccttaaggaattctgtgaacaaatcggcacagagatttattttgtatctgccagacattctgagtcaaatggacttgttgaaagagctaatggcattctaatgacaggaataatgaagtttatcttgaatcaccccacatgaaagcggccagatgaatggatcaaagtggtgtggagccgcaacacatcaatatcaaggtcaacacggtttacacctttcagactattgttcggtgacgaagcaataaccctatacgaagcttaggctggatcaatattaacagtggcttgtgcataagacgaaactgattattctgtggctaaagatgctatataagagatcacgcttcacgtcgtggagaatatcaataaataccaagccgaaacaataagatggcgtgaccgacaagttcggc

SEQ ID NO: 72234 - DNA, 454 bp, Zea mays
  unsure (1)..(454): unsure at all n locations
tataatactaagcttactcgatctaagtgaccgtntgagagagggaaatgtgtgttagagacccggtctttgtgaccacctcaacggggagtaggtttgcaagaaccgaacgttggtaaaacaaatcatcatgtctcactctttagtcgctcacgacttgtttttcgccctctctcggattcgttcttatttctaacgctaacccggcttgtagttgtgcttaaatttataaatttcagattcgccctattcaccccctctaggcgactttcaattggtatcagagcccggtgcttcattagagcctaatcgctcaaagtgatgtcgggagcatccgccaagagggatctcgggaccggcgacaagtccgcaagctcgggaagaacacactcaagggagtccggccacaagcacaaggaggaatcctcttcctccatcaagtctcatcgaatgg

SEQ ID NO: 72235 - DNA, 405 bp, Zea mays
tgtatgatttacaagggtgtaatgttgcagtagctttcgattcagatggatgggagttcacactccaaggtttggatggtctgggtggttttacacttgagaaatttgcagtttgagcagagaactgcacagaaaatacttgggtattacttaatcaaatgcagaagcaaatatactaagcatactcaaggagagaaatatttaataagcaaacctgctaaaatcaaaatgtggtgttattgggacaaggttcaggaggggctgaacttcgctctgtacatttgctttatgttgatcgatctcttttcttgatgagaattctatatgctcactatcttagatcatctcttcacggagattagtctcagatgatgcagcaaatgcgaacgaaacaattataatcag

SEQ ID NO: 72236 - DNA, 332 bp, Zea mays
cgcatgttgtattatactcaccgacggctaacttatttacacccagagcttacaaaatgtatagtggtgagatatcgcaacgggtgctccagcatcagatggaacgtggagtctctgaccttagcacgtcgacatgccttacatcatatttattattaatacaggagacaagcaccttgcatgggctatcgctgggcacatatgatttccagtccgcaaaacaagcgttattaggtcgggtacgacgcgaaccttatcctggactcagtctaggattctgttaaacaatttacacgcttgaaagccccattgacatattgacacgcctatgc

SEQ ID NO: 72237 - DNA, 348 bp, Zea mays
gccagcacctttctttaacctttcgaggccagcctgctgcccatttgcttctcgcgctcactacatgaaacttagccatatctcgcaacgcgaatagttaacaaccaacactgtcgtgcaatccacccttgatagaccttgatagataatgcaactagtgaggctggcagaagatgcacctaaatgtgtccactgctcggctgtagatggccccaaacaaaaccggaggcctaacaaaaatgatgagggcccattgtggcaaataaatactgtatctatgctcggcctacgacccactcccacgtttgggaaccagacatccaccctttataacgctttagctaaaac

SEQ ID NO: 72238 - DNA, 443 bp, Zea mays
  unsure (1)..(443): unsure at all n locations
actcagcttggaaggttcttcatccctacatgtgcttatctgtgatgccacagccagcccatgctagtcttagctattaagcatgcatctagaccggcctcttcttttgcaaaatcaactaaataaagtttgccgtctaatacacccttaaaagctagtgaaccatcacttcttctaaagacagacacatctacatttgtaaatagacagntatatcccatatgacataattgactaacagatagcaaattatatccaagactctccactaaaaatacattagagatagaatgctcattagaaattgcaattttacctaacccttttaccttgccttgattcccatcaccgaatataattgaatcttgggaatccttattcttgacgtatgaggtgaacatcttcttctctcccgtcatatggttagtgcatccgctgtcgat

SEQ ID NO: 72239 - DNA, 413 bp, Zea mays
gttacttgtcgttatcaaccttgtcatataacctttcagatttccagcctgctgcccatttgcttcggaagataattacaggaaactctcgtgttttccgataggcgaaggtataacaaccaatattgccgtgcaatccatcctttctagccttcgtttgataatgcaactcgagaacccggaaaaagctgtccgcaaatggttccactgcttggcttcggagtgcccagatataaacaataagtctaacgatagcgttaggggtcagctggtgaaaatagatactgaacctattcagtacctatgctataatgccatgtacgggaaccttaatccagcctttaaaaagcttttgaaaataacaattcatatttctgcggctttgaggtaacatgttctccccgaagcgcaat

SEQ ID NO: 72240 - DNA, 428 bp, Zea mays
tcatgatcggaatgaataacaaactcttttggcttttttagagctgccatgtttcaagcgctcggaccaaagcatacaattctttgtcatacacagaataatttaattgagcacctcccaatttttcactaaaatatgctataggttttccttgttgcattaaaactcctcctatcccaatcccactagcatcacattcaacttcaaatgttttagtgaaatcaggaagaataagtacaggtgcttcagtcaaacgtttcttcaattcttgaaaagcatcttcttttgagtttcctaatttaaattcaacacctttctttgtcaattcatttaaaggggaagcgatggtactgaaatatcgcacaaatcttctataaaaaccagcaagaccatgaaaacttcttacttgacttacattcgttggagct

SEQ ID NO: 72241 - DNA, 398 bp, Zea mays
  unsure (1)..(398): unsure at all n locations
ntaccaaatggatgtgaagagtgccttcctcaatttaccaatcaaggaagaggtctatgttgagcaacctcccggctttgaagatagtgagtaccctaaccatgtgtataaactctctaaggcgctttatgggctcaagcaagccccaagagcatggtatgaatgccttagggatttccttatcactaatggattcaaagtcggaaaggccgatcctactttattcactaaaactcttgaaaatgacttgtttgtatgccaaatttatgttgatgatattatatttgggtctactaacgagtctacatgtgaagaatttagtaggatcatgacacaaaagttcgagatgtctatgatgggggagttgaagtatttcttatgatttcaagtaaagcaac

SEQ ID NO: 72242 - DNA, 439 bp, Zea mays
  unsure (1)..(439): unsure at all n locations
tgtgaaggttcttcatccncacatgtgctaagcgtttatgtctcagccagcccatgctagtcttagctattaagcatgcatctagaccggcctcttcttttgcaaaatcaactaaataaagtttgccgtctaatacacccttaaaagctagtgaaccatcacttcttctaaagacagacacatctacatttgtaaatagacagttatatcccatattgcataattgactcacagatagcagattatatccaagagactcaactaaaaacacattagatatggagtgctcattagaaattgcaattttacctaaaccttntaccttgccttgattcccatcaccgaatataattgaatcttgggaatatttattcttgacgtatgaagagaacatcttcttctcccccatcatatgtgttgtgcatccgctgtcgataat

SEQ ID NO: 72243 - DNA, 427 bp, Zea mays
  unsure (1)..(427): unsure at all n locations
actcgagcttcatactcgacatggccaagagaaagcnacccacttctgatttcagcagtgccggcctgcggcatgctctagacacatagatactgctgatgagctcacacccatcaaggcactggcgcgcctcccgaattggccctaatagatgccataagctgaatgtgccgcaagaaacatacacattacagctatgacgatgctcgatattgactgtccatgacgaagcggagctgntacaaatcagtactcgtgctttgcctgtgtcagtaattgaaaagcgagtgtagggcgaatcggacgatactgagttcagataatacaacgcattcggtcgcgtcaccctcgttgatacatgatggctgaagattcattgatctgctggatcatagcaccggcgactgccatatcattaaccacggct

SEQ ID NO: 72244 - DNA, 441 bp, Zea mays
  unsure (1)..(441): unsure at all n locations
tgtcagtacttatcaaaacagcagcatctaccagcacagttttctgtaaccatacctgtaacctggtcgttcgcgtgctggggactggatatgattggacctttcaagaaagctcaaggaggatacactcacgtactggttgctatcgacaaattcactaagtggatagagttcanacccattgcttctctaacttcagctaaggcagtggaattcatataggacataatattcaagttcgggataccgaatagcatcataaccgacctcggatccaatttcacaagctcagagttcttcgatttctgtgaacataaaagcattcagatcaaatatgcctcggtagcgcacccaagagccaacgggcaagtagaaagagccaacgggatgatattggaggcgctcagaaagaaagtcttcgacaagaatgaaaagttcaca

SEQ ID NO: 72245 - DNA, 431 bp, Zea mays
  unsure (1)..(431): unsure at all n locations
gaccttaaaactaactgaacctggaagacaagcaaaatatctatttcttagctactacggggctagggtcaccaatccaaccctcgaactgtgaataccccctggccaccaatcgaaccttgttccttgtcaccacaccatgcttattttggttgtggcggaaaacccacttggttcctacaacatttttgattatgacatggaactaaacgccatacctcatttcttgtgaaaatgtggagactctcttggatctgccttaaccagaacccatatctgaatgctgtctctatcctgtgtgtgtccaaatagaagaaacaagacgattgtgctcacaaaaatcgcaccccgagattgaatagttacccccttatgaatgtcgccgaggatggtgtcaacngggtgatctcgatagattgcttggtggactc

SEQ ID NO: 72246 - DNA, 339 bp, Zea mays
gtgacactatctaatgctcgagcttatgaatattctactgcctacacgagctttatctgtggactagaggcaacccgtgttagtcttagccgcgtaaccatgacattggaccggctttctctgtggagaaatcaactaaggagagctaggggctcaagccacctttaaaagctagtgaaccatgacttatgtatagacagatacatcatggtttgtaaatagacaattgtctacctacgacataactgactcactaagagcaagatgtgactgagcgaatctactaggagcacattatatattgagtgctacgaactgatggacatgttacccaaacct

SEQ ID NO: 72247 - DNA, 431 bp, Zea mays
  unsure (1)..(431): unsure at all n locations
cgacaatgaggaaatggcgctcgtcatcttaagctttcgccaaattctcaagcaaaggagggggaaagattacaagcctcgctccaagaaggtttgctacaagtgtggtaagcccggtcactttatagctaaatgtcctatatctagtgacagtgacaggggtgacgacaagaaggggagaagaaaggagaagaagaaatactacaagaagaggggcggcgatgcccatgtttgtcgggagtgggactccgacgaaagctctagcgactcctctgacgacgaggacgccgccaacatcgctgtcaccaagggactcctcttccccaacgtcggccacaagtgcctcatggcaaaggacggcaaaaagaagaaggttaaatctaaatcctccactagatatgagtcctctagtgatgaanatgctagtgatg

SEQ ID NO: 72248 - DNA, 431 bp, Zea mays
tcatactagacatggccatgaaatagctcctcactccgtatttcagctcttcctttctccggcatcctctagagaaatttagactgttgaggagctcaaacccatcagggcactggcatgtcgtcggtagtggccccatttggtcacagtagctgaatggaccacaagaagcatagagatcacagctatgaggatgctcgataatgactgtccatgacgatgtggtgctgttccagctcagtaatctccctttgcctgtgtagtcaagtgaaaagcgtgtgtagggtgaaccggacgagactgtgtacgtataatacaacgcatcccctgcgttcaccctcgtttcatacatgatggcggcgttttcattgctctgctggtacatagcaccggcgactgccatatcattaacaacagggaaacggtagtat

SEQ ID NO: 72249 - DNA, 442 bp, Zea mays
tgttagacatgccattatcctaataccaatttggttttactatgaaagcaacaatgacaaacacaaaaggtacttaagtaaatgcacaataaattgcattttacaaggctatgcatactgttgttttttagaccaaaactgccctgtttttctttgacataataaatgtacttttattgtccgaaccttgctgcccaatttttttcagatttgacaaatattcacggaaggttgcctctgaaaagcaagggagctccaatgacagaggtaattattgaataattgtcttgtcatcgagattgagtacaagttgataattaaaacctaaaatatgatctgcactgtcaatgcatggcgaaagtgtggtgctcctctctacagccctaaggttagtacttccctccccttaaatacatgcttccccatcctgcatttcaatcta

SEQ ID NO: 72250 - DNA, 440 bp, Zea mays
  unsure (1)..(440): unsure at all n locations
aactcagcttttaacgctcataacttggatttatctttgggaattaaacacttaataaggttgaatagtgatacatgacaattttatttaaatttgaacagattcagacttgcgacttcaaaaatttataactagagactcaagcattcaatcaattgatcctagactntctgganagctaatcaaacgttctataaattatttataaacatctcaggttgattaaagtgtatcaaaagtaaaagacactagaaggctttgttgtctagatttagacagattcatactttacacttcaaatatccataactaaatcttcagatcaccaaaaagagtgatccaagaacttttggaaagcttagcaaaagtaatacataacttctataatcaccaaaaaacgattctatgtttaaccaagtcaaacatttcagttntcgaca

SEQ ID NO: 72251 - DNA, 424 bp, Zea mays
acatgataggtgccgcaaccttcaattgttggttatcatcgagaatgtgcggagggactagacatggctctacttcaatgaattttggcatggtgcatgtgtagactacgatgtgaacccacatgatctttatcatacacgcactgtctatccgaacactctctaagcacacgtagctgaccacatgatgtttatcctgtggatgaacgctctctctattattggaggttagacttacaatatacatacgcataacggagtatctggactcgcttacgatctcgatctcatcgatagagttgtaatcttcgtacgcaagatatagatctattactatatagaacgcgtcaagatagaacataatggatgcttaaatcacatggtataagaatgcctcttctggcgctagccttctaaaggcaag

SEQ ID NO: 72252 - DNA, 302 bp, Zea mays
ccatgtctgggccacacttcgggctgtcatgacgatggacttcaccatgactgctgcattgctccccttccaagatgtagtttctaccaaaactgacctaaactgctttgacatatgagtgcccactataacatggcgaacctcatgttgcctcgttgattggggccatggcgtagactgcggatctctgactcaggaaaaccatgatctacgcagacattaccatgatggagaatcgtataccagtcatcatcattgaaagaattgtgctgatgaaaactctctatgtgaggtcttctgtc

SEQ ID NO: 72253 - DNA, 431 bp, Zea mays
tctatagggagaacacatgataggtacgactaatgttcatttcgaataagatagaccttgtgcagctggtcaagcaggtaaacaagtgggaggagcacatcacagcaagaatgtgatgactacttcaagacctctggagctgctgcatatggacctcttcggacccgacggctatctgagcataggaggaagtaagtatggtctagttattgttgatgacttttcccgcttcacttgggtgttctttttgcaggataagtctgaaacccaggggaccctcaagcgcttcctcaggagagctcaaaatgagtttaagctcaacgtgaagaagataaggagcgacaaccggtctgaattcaagaatcttcaagtggaggagttccttgaggaggatgggatcatgcacgagttctccgctccctacacacctt

SEQ ID NO: 72254 - DNA, 408 bp, Zea mays
  unsure (1)..(408): unsure at all n locations
ngagtgatgctcttaggtcattaacaatcttgattttcattggtctccaaggttcttatgttctccttaagtttctatcacatgtgaacacaatccttagtaccaaggtgtgctctagccatggtaacacctgaggtgttacatgaacggccattttaaataataccgaaggctaacaccaacagatctttcacgaagaaatggtctccaccagaaattcaagatgtatggcaatgaaaaatatgtcgggtgaggtgtacgagcatctggttgatgatcaacggtcacacaaaccgcatttttgtggaaaatatcatgaacaaccattttaaataataccgaaggctaacacctatagattttttaccaagaaatggtcaccactgaaaatccaagaatgtgatctat

SEQ ID NO: 72255 - DNA, 340 bp, Zea mays
aaagaaaaattatacacagttggagaaggtactgtatgctgtcttgatggactccacgaaccttcggctctattctcaagcttacaacataattgtgccttcctcacaccctctgaaggatattatgaggaaccgagaaactactggaaagactgtaaaatgggctgcaaatctcaatgaatcttgtattgaatatgttcatacatcttcgattcaatcccaggcgttgtcagactttattgctgactggacgccacgggctcatgaggaagattcagatgacgacgccgaaacatggtcagtgttttgcgatgggtcttggggaacctttggagcaaga

SEQ ID NO: 72256 - DNA, 446 bp, Zea mays
  unsure (1)..(446): unsure at all n locations
tctaaagggagaacgncatttgggactaacaaatgttcattttgagaaagacagggtttgtagcgcatgtcaagcagggaagcaagttggtgttcatcatccacacaagaacatcatgacgaccaacaggccgcttgagctactccacatggacctattcggcccgatagcttacataagcatcggtgggagtaagtattgtcttgtaattgtggatgactattctcgcttcacttgggtgttctttttgcaggataaatctcaaacccaagagaccttaaagggattcttgagacggtctcaaaatgagttcggcttaaggttcaaaaagattataagcggcaatgggaaggagttcaagaactcacaaatagaaggctntcttgaggaggagggcatcaatcatgagttctcttctccctacacaccacaacaaaatggtgtag

SEQ ID NO: 72257 - DNA, 441 bp, Zea mays
tgccagtacttgtcaaagcaacaacatctaccagcttagctactgcaggccataccagtaacttggcctttcgcatgctggggactggatatgattggacctttcaagaaagctcaaggaggatacactcatgtactggtagcaatcgacaaattcactaaatggatagagttcaaacccattgcttctttaacctcagctaaggccgtggaatttatacaagacataatattcagattcgggataccgaacagtatcataactgacctaggatccaacttcacaagttcagagttcttcgatttctgcgagcaaaaaagcattcagatcaagtatgctttggtagcacacccaagagccaacaggcaggttgaacgagctaacgggatgatattggaagcactcaggaaaaaggtcttcgataaaaatgaatagttcaca

SEQ ID NO: 72258 - DNA, 443 bp, Zea mays
ctattaaactcagcttactatcttaattgcttatatgtgggtctattttgtcaagacatccccagacctcacaagtccctatgcgaatgacgcacatgcttatggggaggatgtgctacaacttgactcctttgaaactatcttgtttgtttgagtgcacttgaagtagtctcaaaggaatattgaaagggaaacgtgaacttggacatatagagagcttccactgcatttcggtaaatgtatcttggcctaagttctttgttatactctcattgcctttatgctattatttgacattttggtgaggcaatggggttaaaggtccaaaagctgtcccattttggtgcttcatgccaaagggggagatattatggccaaagcaaatggatcagccaaccacttgtgaatttcaaaaatttagagttagaatatgatttcgttca

SEQ ID NO: 72259 - DNA, 434 bp, Zea mays
  unsure (1)..(434): unsure at all n locations
ntatcaaatggacgtgaagagtgccttctttaatttaccaatcaaggaagaggtctatgttgagcaacctcccggctttgaaaatagtgagtaccctaaccatgtttataaactctctaaggcactttacgggctcaagcaagccccgagagcatggtatgaatgccttatagattaccttttagataatgtcttcaaagtcggaaaggccgatcctactttatttactaaaactcttgagaatgacttgtttgtatgccaaatttatgttgatgatattatatttgggtctactaacgagtctacatgtgaagaatttagtaggatcatgacacaaaaattcgagatgtctatgatgggggagttgaagtatttcttaggatttcaagtgaagcaactccaagagggcaccttccttagccaaacgaagtata

SEQ ID NO: 72260 - DNA, 389 bp, Zea mays
  unsure (1)..(389): unsure at all n locations
gaatgccagagagccttcggcgttatctgttcttttattggaacaagagatttggtacaagaacatattgccttcagggtatggccgcttgcggagaaatgggaaatgccgcaagaaaccataaaagaggccgacgaaggtggacttatcaagctgaagtacacttttaagttccgagataaattcgttgagccagatgatgactggttaaaaagcattgaaaatttaagtgatgaactgcttggggcttattcaaaggccgaagatactgcactgtcagcagccttcggaggccgaaaaaagaagaggctgaatcgggtgttngatgcaatcgggtttgtctaccctgactatcgttatcccatttgagggcagaaaagaataaacac

SEQ ID NO: 72261 - DNA, 410 bp, Zea mays
  unsure (1)..(410): unsure at all n locations
ttactaagaattaagccctaataacaaaatgatatgtgtgagaacataanaacagtaagaaaactgacaaacataacttattttacaagcaaaagtgtatataccttcaagctattataaacaaggatgtctgcaagttcatccttcgacatcgtagataagccaagctctagcttcgggaatcccatattctttgtcatttctcgacaaacagatatttccttgttgtccgggaggcaatatagaaagtcgtcttcgtcagtgtcggtgtataccaaggatcctgggggatacttcaaatacttggtatattgcttagcttcagcaatttgctcctccgatagatttgtccctgcagcgtaatgcactacaaattctaattccttattagatgctgtaggagcaaggta

SEQ ID NO: 72262 - DNA, 441 bp, Zea mays
  unsure (1)..(441): unsure at all n locations
tgcttgttagcgaggcaagagacaccaattatgtggttgtccttgcgaggtctaagtgactcgtgaggttaaggaagaagcctcactcggtctatgtgacagtttgagagagggaaagggttgaaagagacctggtctttgtgaccacctcaacggggactaggttctttagaaccgaacctcagtaaaacaaatcaccgtgttcatgcgctttattttcttggttgatttggtttcccctctctcccggactcgaaatttattctaacgctaaccccgacttgtagtgtgtttaaagttgtaaattttangttccgcctatccacccccctctaggtgactttcaattggtatcagagctcagtatttcattaaagtctaaccactcgaagtgatgtcaggaggatcctgcaagatggagatggaaacggccacaagcca

SEQ ID NO: 72263 - DNA, 381 bp, Zea mays
tggcatctgtggactaactcttttgattgtctcttcgccgacggccaatagaaccctgacctgaagagcttccctactagtgctcaggaggccgcatgtattacactatgccctgcattgctctgtctcaaagatgcttcccaagcgatgggagaatacactacatgataactcctgaagcaccccttctgtgtaataaaggcccatcgaacgtgatttgatacaactgtctagacacgcgctgtgctgagccattgtcagatggctgatcttagacttttatgtactcacagatctgcctgctacaaacatcacaggatgactacggatgaactccaaaatggcactcttttgtgggtgctatagacatatgatgtcgtg

SEQ ID NO: 72264 - DNA, 129 bp, Zea mays
acaaagacaggatttgtagcgcttgtttagtctggaagcaagatggtgtttatcatccgcacatgaacatcatgaggactgacaagcctctccatctccttcacatggacctattcgacacgattgctt

SEQ ID NO: 72265 - DNA, 398 bp, Zea mays
  unsure (1)..(398): unsure at all n locations
ntactccaggaaaaattgccaaggcttcgaatattttgattgaaacctagacaaagctgaccgaagccgaagctatactgagccaggctgacgccgaagctgggccttcagtgcccgccaaggagaaatgctcggaaactggagaaaaggcagcaaaagaagagggtatagcacagattttgcctgagaaagctgccgctcctgctcccgaagcatcttccaaagcccttgattatattattcgacacgcttcaggaaaaagattatctgaagaagaaatttttgaagctaaacactatgcccgagaactgaaatacccaaaggggccttagtgtctaatggcacagacgaagatgacttcttatattgcctcccagacaacaaagaattatctgtct

SEQ ID NO: 72266 - DNA, 438 bp, Zea mays
cgtcctcctcgttgtagacctcctcttgaactacttgcacttacctatggggggactttatatattgcaagagtgagctcacaaaaggtcatagctcaacaagttgtggggaataatgtgcatgaactcaccaaaggtgggagttcaagtgtagtgtaaggctaatcagcaagtaatagttaaagctgagcattgcttttaataagttggtaaaattttattagtagctactacatgtaagtgtataccaacccaaagtaatagtagatcaaaaattaataataaaccacaatgcgatgcacataagatattaaatttactttcataaattaatcatgtgagtgtctgagctgctcatgatagtgagcacaactgatataccagttttacactctgcataggttgcacatctttacccacaagccatgctacccattt

SEQ ID NO: 72267 - DNA, 263 bp, Zea mays
actcaagctttggctggattggttgcggagagagacaaaagaatctcttcttggttatagctcaacctgacggatctgagttcactgttgaggattgccttgtgttgggttaaccaattcatacccaaaattacatctatgtcctggcctttcagaacaatcatgttatcaagaaagttccgtccggccattgttactggcactccataggccacttccctagtataaatgtgtcccccaggtgaatgaattttaaatccctc

SEQ ID NO: 72268 - DNA, 447 bp, Zea mays
  unsure (1)..(447): unsure at all n locations
ntaccctgtagtctggactataagttggttacggtatgtgtgccttatgcagtttgaccatttccagcatttgtgtaatgaggactctagggagaagcctcgtagtgagaccctggccgttcacctcggaagtgaatacgggtctagctaacccgggcaagaagggaatcgcgactcatgggtaaagatgcgccacctctgcagagtgtaaaactgattgttgggggccttcggcttccgaaggtcctcaaaaacatgatttaacaatgtttctggagtataatgtgtgaacaggtatcttcggacttgaatcagaaagggagaagctcaaaagatacgaaggttgacacagtgccgaagctgtgaagcaggaaagcttcggcatgttcgcagaanagggaaccgacttaaagatgaaaaggccatttagacctcgatagaatgcta

SEQ ID NO: 72269 - DNA, 440 bp, Zea mays
tgaaatgtgtgttcctccatcattgtttgatatgcaagtacacctaatcatacatctcgtggatcagataaaaatattagggccactatatttacatcatatgtttcagttggagcgatacctgggagtattaaaaggttatgtacgaaatcgtgctcacccagagggttcaatcatggagggatacactacagaagaagtgattgagagttgtatagattacatcagagacaggtgtgcctatacctaaacatgagggtaaactatgtgggagagggagaatgggcaagaaaacttttcacgttgatgattacaagctagtacattatgctcatggtagtgtactacaacatctcgcgatagcagagccttacatagaggaacacctggatcagcttcgtaaagaaaatcaaaaccgcacagaggactggatcatgacg

SEQ ID NO: 72270 - DNA, 434 bp, Zea mays
ctttaaagctgggctacgattccctttattcatgtttgtggtagaagttctgaaaatataccaggtttatcttcatcaacttacccctgaagcaataataagaatgggagtcttcgtctgggccgtgaagagccagagcctggaaccaagtgcgaaaagcttttgcaatatacatgagttaatatatgagacaaagccctggggtaaggagcaatatcataacaactttggttgttacagcttcggtgctcgctctggatcaagctgtctcgtgccaacctttcggaagagatggcccggggaatggatgaaagaatggttctatgtaaaaaatgatttgaaggttcgagaagatattaaagatatcatcatgtgccctatctggcagcgcttcggactccggaaaccgaaggtagaaatggatgaagtagccg

SEQ ID NO: 72271 - DNA, 368 bp, Zea mays
tctggtcctgacatagggaccccgccgttggagatgagcttgccgatgatggcggcaccatctctctcccgcgacaccgttcttgctagacgacgatgctcgctcggattgctgatattctcaactaaaggatatggtttgggggccaacgaatcgcctaagctagcatatatactccctggagtgagactcggggaagaaacaatccgcgtgattggatacctgcatcgtctcgtcccgcgtcaccacggttgactttatttaagtttgtgtttgattggctgcacatgtgaagcgtatgctacatgaacagacgtaaaataagttatgttgggtgcatccacacgtacgtctaaaacggatgtacg

SEQ ID NO: 72272 - DNA, 423 bp, Zea mays
ctgctcagcagcatactctgcacataatcttatttttttagaaaacatcttcgctattaaaaacaataaaagttagagaaaagttgtttaccttgaaattggaatagaataaactaccgacgatgtgctgtcgtcggtagcggctaatgtccgtctcgagcttcgggaaactgatactctttgatagagtactaataaccttcgcaccggtctgatcccggacacagcccaacctttcgtcatcgatgccaccgaagagaagtgctcccggccgatatccgcaagatatagcatattcttttagctcttctttttcagtctttgtcagctcttgaccaactaagttttgaaagttaaaaatttcatcttccgaagtgtcttcagctatttctttcttcttcttgggctctggggccatagtct

SEQ ID NO: 72273 - DNA, 349 bp, Zea mays
cctattcagggtcctatttgcaaaacactaaaacaatacaacttggttgaaattcttgcctacggaatgcactctatgtgtcgtcaacatatgcaatgccaatgctcatgatgccatgctcaagttttagttatagtaacaccaagggtgttacatccttccccccataaaagaatctcgtcccgaaattaaaatcctatggtaggtcatggtaaaggaaacacatcacgtttttatttaccaaattctggtacaaggcacgggtgatgttggggttcattcctttattacacagctatacagactctacaatctacaagaagctacaaagcctgggaaattcctattc

SEQ ID NO: 72274 - DNA, 210 bp, Zea mays
  unsure (1)..(210): unsure at all n locations
actataaaactcagcctgagccatggtaagagcatatgccattaatatatgaatngactcaagcctagctacgggtgcataggtttcaccgaaatccaaaccttcgacttgggagtattctttggccacaagtcgggctttgttccttgtcaccacaccatgctcgtttggctggtggcggaaaacccatttggttcctacaacattttg

SEQ ID NO: 72275 - DNA, 410 bp, Zea mays
gacacttaaaactcagcttgttctgtgccgcagatccgattttactcttacgcgtatggtcgaaggctcttgcgtttgagggcacaagcgccaacagtgcccaatgagattgtcatcgaggccatgatcaaggggcttcggctaggaccttcggcccaatacttcgccaggaaaccccctcagaccttggaaaaattgcttcagaagatggatgaatacatctgcgctgatcatgactttcgtcaaagaagggatgaagcttataggttcttaaaaataaccaggggcttctgagggagagttcaccctacgcatgtcacatcagttcattccactcagaatgatgacaggggaagtcagcatcagacgccgcaatattcttcccaggcttcggggcagcaattaggcta

SEQ ID NO: 72276 - DNA, 437 bp, Zea mays
tgtctctgactcagcctgcttcttcatctctaattttatgataacccgagtagccatccagtaaactcataagttctaaagaagctgctgcatctacaagggaatctattcttagtagcgggaattcatcctttggacatgccttgctgagatatgtgaaatcaatgcacattcctcattttccattagctttgttcaccatgacagtgtaggccagccacattgggtatgttacttctctgataacaccggcacttagaagtctcttcactttatttcatgcacctttggctttatcatcggacatttttcgaagcctctgctttcttggtctgaaggacgggtccacattgagtgaatgctcaatgacgcctctattgacaccacagagatcattagctgtccaagaaaagtcatatttgctgttgaacaatgat

SEQ ID NO: 72277 - DNA, 411 bp, Zea mays
  unsure (1)..(411): unsure at all n locations
tgatgatcatatatatcgtattatcgttcagatcaaccctagcagtacctgatatcgacaatatgcgtttcaccttaaccncgcaccatgaattcgtaatatgagagtactagtagtacgtaccttgcttaaagcatgtatgcgttcttgcttccggagaggccanggagatctgaagaagtgaaagatgtggacaggggaacaatgcaattttataaccaccgcgcgcgacgttcaaatctctcgtcccaagtagtatgtatctgatacgacacggatgtctcttcttccgtgcattatttaaagcgggcgacgtctcccattcacaatangcatgttaattatctaaggctattaagagtccaaagtattatattctaatatccaataagacgaagagtatgatacact

SEQ ID NO: 72278 - DNA, 340 bp, Zea mays
  unsure (1)..(340): unsure at all n locations
gatatgctngcttcaacccatatatggatgtctgaagttngcatatctttccagcattgatcggatcgacaaaaccctcgagctgtatcatatacacgtcctcatctaggtttccattaatgaaagctgttttgacatccatctgccaaatctcataatcgaaatatgcggcaatagctagaatgatccgaatagatntaagcatcgctactggcgagaatgtctcgtcatagtcaactccttgaacttgtcgaanaccctgtgcaacaagtcgagcactatatatgtgaacatgttcatccatgtctttcttcttcttatagatccatgtgcattctat

SEQ ID NO: 72279 - DNA, 375 bp, Zea mays
  unsure (1)..(375): unsure at all n locations
tatgcttctatgtgaagatatagcagaacanaaggtactactggggtctcagttatctgatgagcaagagaagacnttgctaagaattttattcaacaacaaagatgtatttgcttggtcagtcaatgatctctgtggtgtcaacagagatgttattgaacattcactcaatgtggatccatctttcaggccaagaaaacaaaggcttcagaagatgtctgaagacaaagctgaatgtgctcggaacgaagtgaatagacttcttagtgccggtgtcatcagagaggtgaaatacccagaatggctaccaacactgttatggtgaagaaggccaatggtaaatggagaatgtgcattgatttcacagatctcaac

SEQ ID NO: 72280 - DNA, 436 bp, Zea mays
  unsure (1)..(436): unsure at all n locations
tgccctcacgtctaatctcacacaagcaccactgctgcaacttcctgattttgacaagacattctagctcgagtgtgatgcgagcggcattgtgatnggatgagtgctcattcaaggangtaaacatgttgctntctntaatgataaattgcatggtccaactctgaattattctacatatgacaaagaattatatgctgtagtacgagtgttacaaacttggcaacattatctatggtctaaagaaattgtcatacattcggatcatgaatctttgaagtatcttaagggacaatctaatctaaacaaacgacatgctaaatggatcgaattcatagaatcatttccttacattattaagcataataaaggaaaggataatgtgatngatgatgctntatctagacgttatactatgatgtcccaacttaatcat

SEQ ID NO: 72281 - DNA, 289 bp, Zea mays
  unsure (1)..(289): unsure at all n locations
cttcgtattcagcaatattatntgtgcagctgatatcaagctttgctgcatagcatgttctgactntataaggtgcaactaagacagcagccgcacctgccccgaatgttccctatgaaccgtcacagaacactgtccaagcttcagcatctntatttgcttcttcttcctgagcctctggcgtacaatcatcgatgaagtctgctaatgcctgtgactgaattgaggatctatgcacataatcaatgctgcatttcgtgagttccgcagcccactttccaattcttct

SEQ ID NO: 72282 - DNA, 145 bp, Zea mays
  unsure (1)..(145): unsure at all n locations
cacatgtgatcctctcacaagtcctaatgcactagaattgaattggagactttgatcagatcggtggctntgatttgtgtcttgtagtgtngcactntgctcttgtattgaatggagagtgttgaatgcttgtggttgtggagtg

SEQ ID NO: 72283 - DNA, 188 bp, Zea mays
tcacaacggagataatggcagatttatctgaagattctgatgacagtgatgactctgatgtggaaactggagatgaagattctgaggaccggccgtggcgaccaagccataccattcttcgaatatcgactattaagcaaagccatgttgattctatgaggggaagatacttccgtgacatgtctatt

SEQ ID NO: 72284 - DNA, 285 bp, Zea mays
  unsure (1)..(285): unsure at all n locations
tctgcatccccttatgaatgactttggaggctnggagcttcttcaccttttacttangtggtattntaactctgcatccccgtagaaacgactttggagccttttcacctttgctgntacactcgatggtgtaaccacagatntattacaacatgtcgaatggtgcaccttctcaaaaatgttctgatgcaagaacatganacgagaganatgaanattacaataggtgtatatgaaagttttagcccaaccactctgtagcttcagtaaatgtgcctcgactct

SEQ ID NO: 72285 - DNA, 361 bp, Zea mays
  unsure (1)..(361): unsure at all n locations
atgcaagtcttatccattattcatgcatctagaccggcctcttcttttgcaaaatcaactaaataaagtgtgccgtctaatacacccttataagctagtgaaccatcacttcttctaaagacagacacatctacattngtaaataaacaattatatcccatgtgacataattgactgacagatagcatattatatccaagactctgcactaagaatacattngatatagaatgctcattagaaaatggcaatttacctagcccttgtaccttgccttgattcccatcaccgaatataatngaatcttgggaatccttatntntgacgtangaggtgaacatcttcttctcacccgtcatat

SEQ ID NO: 72286 - DNA, 317 bp, Zea mays
  unsure (1)..(317): unsure at all n locations
ctgagttaccatactagtaaaaaagtttgctctccacagttaaagagcatgttggataataatacncaacagctggaccatgttactccacgtacacatttgtacatggacgacacaagcttgcttattcgggaatcaatcaagctgcacatgcgttggcactgacagtgtcggtgtgtgcgcaacggtctgagtggtgtgtggcacgtcgagcgagacatgtcgatgcgtgggcacgacaccatgcatctttgtgctcaattctgtgattcatcatcgccaccattggcattgacggggtcctgtgagtgatgacc

SEQ ID NO: 72287 - DNA, 311 bp, Zea mays
  unsure (1)..(311): unsure at all n locations
catccatatatatgcatcatattggagttctaattgtctgtgcatgttataatcaaataataataatataataattgagtttaaaatttgaagttgacgcagaagtacagnttagaaatattgtgatttagcgctacgattaatatttggattggaaaatatgataaagagatatattcttatttcaaatacacatatgttatattcatactatgttaaaccggcatttatgtgaaataaatgtgcccataaaattgattggaataaagcttgaatgggaattaaaactgatagaaatgaatagagaaaaa

SEQ ID NO: 72288 - DNA, 232 bp, Zea mays
tcaacataataatgagctacggaagcacgcgttggacggatcacgacgtcgtccgcctaatgctcatgtcatttaccgttcttgatcctcatctcgtgaacaatattcgtgagaatcccatgtacacgatgatgacgcccgaagaagtacttggaaaattcgttagcgggcggatgatgatcaatgaggcaagatacgtcgatgacgcgttgaacggtccaatccacgagcc

SEQ ID NO: 72289 - DNA, 319 bp, Zea mays
  unsure (1)..(319): unsure at all n locations
attctgcttattctgtgaagagaataagggtcacacaacaagaacctgccaagtcacaatccataagcagaagatattgctgaagccgaatcaagacagaatcaaccgaagcaggttcttcatactgcttcatattattctccgtacatcccagagtatgtcgacaaccaacagtcaatcgcagaacctttatctntagttgctttattaagccattcttcngccagaatgggtcctgccccaaccacctatgacagcaccaacttcgtcatacaatcagcaacatccagtgaaatttcatgaccaatcacaatgtgat

SEQ ID NO: 72290 - DNA, 373 bp, Zea mays
  unsure (1)..(373): unsure at all n locations
tcgaatgtttctctgtcaaanatattcctcgtggagaaaatgaatatgctgatctatnggccaagtcagcatnccatgggctgcctataccttcggaagtatttntagaaacaataaaagcaccttcggtcgagcttcttgaaagagcaatccttaacatatccactgtttatagtgaagaatggagaactgagatcatctctttccttcagggtnattttctttcagacgatgaagctataacaggagaatagaagcaagagctcgaccatatgtcataatagaaggggagttatacaagcgtggtgtctgttccccattgctcaagtgtgtatccagatccgaaggtatagaataatgaaggaaatacatg

SEQ ID NO: 72291 - DNA, 264 bp, Zea mays
  unsure (1)..(264): unsure at all n locations
tgaaacacttgataccgttgagacgaccnctattgctgatgtgatgatggcatcatgtaccactgagctgaatgtcaataacgaaggggatgctctatangggagtggtttgacgctgaatctatcatcgatgaagaagatcatagcatacttcgtccaaacaatgctagccacattgatgttggtgagtccaccatgaatcctgaagatcttgatgtcctaacaaggcttggatatatnggtgagaaggangatgatatgatc

SEQ ID NO: 72292 - DNA, 272 bp, Zea mays
  unsure (1)..(272): unsure at all n locations
ataatgaaggactatatttatatcctgctaattatcctgagcacaagattatgagaattcatgctaagaaatctcattctgtttctcaccatgcttttatgtataagaatgaggcttctagatctaggcaatcaacccatgttaaatngcctaataagaaaactcttactgcatcaaataagcctaacatttcatttaagacttttgatgcttcttatgtgcttactaacanatcangcaaagtacttgccaaatatgttgtgggcaaacac

SEQ ID NO: 72293 - DNA, 351 bp, Zea mays
  unsure (1)..(351): unsure at all n locations
cgtgtcagtgatatatgtgtggatgtcagccattgtgttgtcagttntatttgcanggtttggatacactcccgtgcaagggatgtgtngccgataatttttattgacaagacttgttatttttttgcatatgtcttcctatccgttgcgggtctgnctgcaccgcgtctagtcgccacttgaccaacccgctatccttgactcactgtcaccctatgtataacctcaatttccgcatcatggtcgtagatcacgtaacccagttagtcgtcttcacgttgatagagatacggtgtagatatgcagatcnttgcatatctacaaatgtatctgttttgaattgtccatgtt

SEQ ID NO: 72294 - DNA, 284 bp, Zea mays
atgcatctagaccggcctgactctttgcataatcaactaaataaagtgtgccgtctagtacacccttataagctaatgaaccatcacttcttctaaagacagacacatctacattggtgaataaacagttatatcccatattgcaaagttgactcacagacaacaagttatatccaagcgattcaactaagaacacattagaaatagagtgctcggaagaaaatagcaattttcctaaccctttcaccttgccttgggtcccatcaccgagtataattgaatct

SEQ ID NO: 72295 - DNA, 275 bp, Zea mays
  unsure (1)..(275): unsure at all n locations
tgaataagtatgtgtagactgtagtggcagattactaagagagtcagattactcccttgttccatctggtcttggttcanagtctggtaatcgtggctatacgtttatatttgccttgtacccaatgcatactatgcatggttgcacgcacaaacacatatatgtgataactctttgccttgcgcggtgcttacataatgcgttcaacccanaagatataaaaaactaatacgtnttgtgatcatgacaaaccacattatgtgatttccaggatg

SEQ ID NO: 72296 - DNA, 187 bp, Zea mays
ctacgctacagaactttgagctgtcgacgagagacaaagtgtgccgggtgttcggcgactcgtccggagcgcgactagatgtcggatagcagtcgagagcacggaagcagcgacactaggcgcttatacctggccggctgtacggcgcatgtcccggggtccgcacgcgtctctacgcccccccccc

SEQ ID NO: 72297 - DNA, 333 bp, Zea mays
  unsure (1)..(333): unsure at all n locations
acaatctattcgcgtcgcacagcgaatacatacaggcacatacaagcaaacatatatatgcataagatcattacaccattcatagaataacataataaaacatgcaaatataaatagagcatgttactactgtcacgcgatgaataagatacgcgatagtcgaagctacggtcgagaagatatcgtgtntacgctaaataaatattaactaaaacatgtaattcgacattatcaaatataaataatatctaccatgtagtttcgattaatctgttatactaatcagctgtcagttagaccagtaatttaattaaagcgagatattctaagcga

SEQ ID NO: 72298 - DNA, 345 bp, Zea mays
  unsure (1)..(345): unsure at all n locations
gcctgctcgataatgtatactgtacaagtatatgcacctactcttcagtataagaatagagaaatattggtctcattntgctaacttcttttctatataacagtatcttcatttgtctagctatcaagtgacaatggctnattttctcgttgcagttgataaagaagattagctccgcctattcctgttcttactcgatatatataggagctcggaatcaacgcttttgtaccataagatgtccaagaagttagaacatgtgatgagaggaaagctagcgaaattactcatcttacaatgccaaagctttgtgctcgtcttaacagtctatatgtgagtctctta

SEQ ID NO: 72299 - DNA, 319 bp, Zea mays
  unsure (1)..(319): unsure at all n locations
actctgtcaggtcngctgatgatcttcgccatggtacagtgacataagatctgatgtgccgtgcatctcaccgtctgtgactcgccgtcgcgatttgtgtcgacaccgttccaatttgggctcggtaatgaacagataacgccggagttagataacgcatacgtggcaccatttcccgagtccagccggagacctcaccggcggtcaccgtgacccagttgacttgncgcggtgtcacccttgccgcgatctccctcactgtgtcttctaccgacgtggtaagcatgcgctagcaaagctatccatggtcggagatcgt

SEQ ID NO: 72300 - DNA, 281 bp, Zea mays
  unsure (1)..(281): unsure at all n locations
cgcttgcgacgttctgaatattataccggtcgttgcataatacatggatgcaangcatctccatctgatgtacttacaccangatgctgctgcaatgtatgagagtaagcatcaagagccaaatatatcttttgaaggaagcttaagtgcgcagcgatcttgtcgcccaatatcacaacctgatcacatgaaaatatttcagaagttttgcatgatgaacttgtgtgattacacttcacgtgttctcgtagtcaaacagaagttcagttctagatatacct

SEQ ID NO: 72301 - DNA, 199 bp, Zea mays
gcatgccacgcgggaaagcaagttggagcccatcatccacacaagaacatcatgacgaccgacatgccgcttgagctactccacatggatctattctgcccgattgcttacataagcatcggcgggagtaagtattgtcttgtaataatggatgattattctcgcttcacttgggtattctttttacaggaaaaatctc

SEQ ID NO: 72302 - DNA, 271 bp, Zea mays
  unsure (1)..(271): unsure at all n locations
gtgagttcaccggaggtgggcgccaatgttggtgacttgttctcaacttcgccttggcggatagcaataattcaagcgtgacgtgtcaatgattacaggatcgcgtgaacagtgccgggatactgttcacctatttatatgcacatgatacaaccggcgcataattacatttatgtcctttacaatcgactacaataatggcacanaacatcatgggtctttaagtcaattcatctnttaagtggttcgacccttcatcttgagaattgtc

SEQ ID NO: 72303 - DNA, 223 bp, Zea mays
  unsure (1)..(223): unsure at all n locations
agaacacgtgatatgtctaaccaatggtcatttcataatagatagaccttgtgcagcttgtcaagcatgttaacaagtgggatgagcacatcacatcaagaatgtaatgaccacgtcaagacctctggatgctgtgcatatggacctcttctgacccgtcgcctatctgagcatangaggaagtaagtatggtctagttatgggtgatgacttttcccgcttc

SEQ ID NO: 72304 - DNA, 319 bp, Zea mays
  unsure (1)..(319): unsure at all n locations
aaaaatcttcacaactgtcataaagatgctgcctcgacgaaaaagggcangtggaccgatttattacccgatgcggtctgggcgctaaacacgactgagtgcatggcgaccgggttcactcctttccgcctnctatatggatcggaggccatgaacccacaagatatataacatgggtccccgcgaacagttccgtcagccgtccccgacgtggataagcccacttcgaatgatctcatcgacggagaccgagtcttcgccttacatgccctatataaataccaagcccagtcaaaagcatggcgcgaccacgtagtca

SEQ ID NO: 72305 - DNA, 359 bp, Zea mays
  unsure (1)..(359): unsure at all n locations
tcttcatagcatgcactatcgcagctagttccaaatcatgcgtaggataattcttctcatgcttnctcaactgtcttgaagcatatgctattacttttccttctagcattagcacacatccaagtccaaagtgtgatgcgtcgcaatacacatcanatcccttgtgaatgtctggcattaccaatattggtgcagtggttaaccttttcttgagttcatcataacaattctggcatgcttcatcccacttgaactatntacctttctncagtagagaggtaagaaggttcactaacatggaaaaaccttcaataaatcttctgtagtatcccgccaatccaagaatacttttgatcttg

SEQ ID NO: 72306 - DNA, 187 bp, Zea mays
  unsure (1)..(187): unsure at all n locations
gactacgtgcattcgaaaatatagaccttgttcatcttgtcaagcatgtaaacaagtgggatgagcacatcacagcatgaatgtgatgaccacttcaatgccactggaactgctgcatatggatctcttcggacccgtcgcctatctgagtatangaagaagtaagtatggtctagttattggtgat

SEQ ID NO: 72307 - DNA, 244 bp, Zea mays
  unsure (1)..(244): unsure at all n locations
tgtgtgagttcgcaagaaaaagggttgtgtgttggcatctatgctccttcaataagcangctgncaagcgaaagctagaagcctgaagatgatctttgagtagccagaatcagtggtttcaatcatcaaccagatgttcctcataggcgagactntgttgaagttcatctnctcgaagaagtgcanagtgaagatatgtagctgaagtaaagctatacccataacccttctataccgaatctcg

SEQ ID NO: 72308 - DNA, 322 bp, Zea mays
  unsure (1)..(322): unsure at all n locations
cgtcgttggtctgcataattcttttgccgagcttgagctctcttcaaattatatattattntcttgaacttgtcttcagtttttttcaccaggtcaggcttgaagaagtacctttcacctggttcagaccaatttatcggagtacgacatcgtcgtccatataaagcttcaaagggtgccatcttattgctttcttgatagctattattatatgaaaattccgctaagggaaaacattcatccatttctgtgggaagtccagaacacatgcaccgagcatatcttctagtatctgattaccctctcagtctgccactggttg

SEQ ID NO: 72309 - DNA, 221 bp, Zea mays
  unsure (1)..(221): unsure at all n locations
ataaacaaatgatacaacacactctgtgtttaaatataattaccttgcccctctacttctncacttggctctcgaactcacgctcaccgtgtttgactatgtagttcttcatgccagacatgaactgccgcatgtttctcatgactacctgnggtcgcgtctcatgcgactccttggtgcangtgatgaatgtgtccacattctgcgcgaacgtaatgctc

SEQ ID NO: 72310 - DNA, 338 bp, Zea mays
  unsure (1)..(338): unsure at all n locations
tctctattgtagcntatgtagtatatntcaatgtgtatatttgtcctaagccatgantntatatttntcatggtattntaccaactttcttcatttctacttaattagctcaattanggttggtattanggtttcaacacttttccctttttgaaaaatcttatttgtttggaacatgattctttagatatacacttagtagatcttttcttcttcaagttaattgatgcgtcatgcttaatttggctcacataaaatggtaattcttgggttagcactgagagaaaccctatgtgacactggggtgtcacatcctttccacccttataggaatctcg

SEQ ID NO: 72311 - DNA, 444 bp, Zea mays
  unsure (1)..(444): unsure at all n locations
acttgtgcgtaatgacttgtgatcttgcgaacttgggacttgtggacttagagatggcaacgggtacaaacccgcctgtgtttgctatcccaaacacgtacccgtgatatatatgtacacccattaataaagccgtacccatgactggtttgaaatgttgcccaaacccgtatccatcgggtttgcgggtacccacgggttaccacgcgggttgttatctccaatatgcttattctttgtataatcataagcatcgtaatgattaatgagatcatggtccannaattatgtaatgatcaacgagttcataatttggtataaaaatattagtagagagaataaatacaaataataagttgataatcaagtaccttgcactagtatacatcaccacatattaacgctttcaagcagcaacactatacaactactatcattactatt

SEQ ID NO: 72312 - DNA, 338 bp, Zea mays
  unsure (1)..(338): unsure at all n locations
actacacatgtcactgctctcctcatggacatcacgctgatgtgtgctgtcaatagacatacnctngcgctntctgcgattgaatgtgntattgtattgtctggcaccttcagcttgtatggaagctccacaagatgcctttgtatgctcttctttgttcanggagctgccaactgaaatatcatatttctctaaagcttgcacaggagtcgaagcatcagccttatgtgaagccaaactgcagcttccatactcatttacttctttcaagcttgtagtattattaattggtgttatcagctcctgctggtccaccaccaagttacctggcatcatgt

SEQ ID NO: 72313 - DNA, 331 bp, Zea mays
  unsure (1)..(331): unsure at all n locations
tggatttctgaagtttgcatatctttccagcattgatcggatcgagataaccactcggctgtatcatatacacgtactcatctaggtttccattaatgaaagactgtttgacatccatctaccanatctcataatcgaaatatgcggcaatagctagaatgatccgaatagatttaagcatcgctactggcgagaatgtcttgtcatagtcaactccttgaacttgtcgaanaccacttgcaacaagtcgagccttatagatgtgaacattngcatncatgtctttcttcttcttatatantacatngcattctatgggtctaacaccatc

SEQ ID NO: 72314 - DNA, 388 bp, Zea mays
ctctggactaactcggctgcgtcactctttgccgttggccagtatataccatacctgatgaccttcccaaccagagtcttggatgctacgtgtatcccgcattggccagcgtggatctcatctatcagttgcttcccagtatccgaaagaatgcatttcatgatgactcttgtcgcgccccttctgtataatgtttccccaatgagagtgtattgagctgactgccttgcgatgcgttctgctgcatttttgtcatacgactactcttcattctttatatatctgatgaatggctctctccagtcatcagaatctgaccctggttggttcataacactgtactcttctgcccgatctaaagaaatactcatgtgtggtacctcttgga

SEQ ID NO: 72315 - DNA, 332 bp, Zea mays
  unsure (1)..(332): unsure at all n locations
cacatgtgctaagcggcgatgccacaaccatcacatgcaagtcttatccattaatcatgcatctagaccggcctcttcttttgcanaatcaactaaataaagtttgccgtctagtacacccttattagctagtgaaccatcacatcttctaaagacagacacatctacatttgtaaatagacaattatatcccatattacataattgactgacagagagtaaattatatccaagagactcaactaataacacattagagatagagtgctcattagatattgcaatcttgcctaaacctttcaccttgccttggttcccatcaccgaatatga

SEQ ID NO: 72316 - DNA, 338 bp, Zea mays
  unsure (1)..(338): unsure at all n locations
cttcttccttgagctctntattntcttgtgtgatagaaatatcactaatttctgaaatntctagctcaatggaagatnggctntcttgagagcaacatttgttagcacatgataatatagtttctatttgagtacatgtgcataagtgaggttgctatgatntcaaaattattaacacaacctcatgagccatttttaacatgatatgtgaatccataattgtgttatgagagcatacacaagcatatcatggttttcttgcanagctaaattntcaatatntagactttctattgtgttcttgncatagcattttattttctaattgccaatatatg

SEQ ID NO: 72317 - DNA, 239 bp, Zea mays
acacttaaatgggaataacccgtcaatccctcggatctagtccgacacggccactgacaggatcaagtaccacaatctcactcgatggtgagtcacagagcatatacaataaagcataaaaccatacatgtcagagtattaaattattacatcatcatcatcatcggaggtgttgcaaaagtaaccatcattgttcgaagtgcagcggatataaactaacggtaaataaatagagagat

SEQ ID NO: 72318 - DNA, 137 bp, Zea mays
  unsure (1)..(137): unsure at all n locations
aggaatctaanatggcgagctctggtgagctatnggaggcacggcttggtggattgtgtgcttgactaccttacggacccgaaggcacgctcaatttatatgctccgggagcggtggcgcatgaatttggaatgacg

SEQ ID NO: 72319 - DNA, 226 bp, Zea mays
  unsure (1)..(226): unsure at all n locations
ctaagctggtcttagtcttctcataaacaattctgtgtcttcagatctgtattcacttggtcgatggcatactgtgacagatnggtgaacttattgagatactgcattacaatatctcacccttgctntaaccggatganatcttcttggttcatatggagcactccctcatgaacataatgctcccggaatgctttgcttgaattcctccatgtgatctgatgtc

SEQ ID NO: 72320 - DNA, 336 bp, Zea mays
  unsure (1)..(336): unsure at all n locations
gatactatatgaatattatcaagtgtaaagggcatgaatgtaattatgtantgggtgtgtcccgtgcctatatatatgataacatgtaccccgtactgttcatgctgactnggcattcgctttttgcgtcacgctngtactatcatctccttccagttgaaggtacatctgtaattcaaagatgtttatgtctatgtctggatagtaatatataataattatgttatctcttatattctctacattgtatccttcgtcactgtataatgaaattatgaaggcgcgctcttcattaccttcgtncgaataatcattatatcctaagggaaataatgc

SEQ ID NO: 72321 - DNA, 312 bp, Zea mays
  unsure (1)..(312): unsure at all n locations
tgtcttgtattacaccagaaataatactgaatggaaaagactattatcaatgtatgatatttgtcaataaatgtgcttcgactctggcacagtgctatngactgtgcgagcttcatactgttctctgaagtccctttgttgttgatgcatattggccccttctggctgctggcctttgtgcatcagtggtggatgcggaggcctgtgccaagaaactttgatgttgactcgccgaatcaacagaaactgcangtgtggtgcctacatattctgtgatataatgcgaatgatacgaagcagtgtgcatgatct

SEQ ID NO: 72322 - DNA, 308 bp, Zea mays
  unsure (1)..(308): unsure at all n locations
tcttaacatgctcacaacctatctnttccaatatagctgcaattcccctctcaccagataaggcacagacgtccccacggtcactcaagaattcctcataagcttcngcttcgctgctgatccactcaattgggccctcatgatcgcctcttatgaaagtatcttccgtcgagtaggcgcccacgtttgcgaagctattcttttatttctcacgcactccatggattgttcgaaacatctctctttggatgcgcgaagtacatcnactggtttttgaagtagttcttccatattcactaatatctcgg

SEQ ID NO: 72323 - DNA, 262 bp, Zea mays
  unsure (1)..(262): unsure at all n locations
agtatcccttggccacaagtcgagctttattccttgtcaccacaccatgctcatctttcttgttgcggaagacccatttggttcctacatacattttattatgacgtggaactaaatgccatacctcattcctcgtgannagtgtgagctcctcttgcattcgcatcacccaatccgaatcttgtagtgcttcctctaccctgtgtggctcaatagaggaaacaaaagagtaatgcttacaaaaatgtgcaacacgagatct

SEQ ID NO: 72324 - DNA, 117 bp, Zea mays
cctggctccttgtgtatacacctgacgtacaacacatcgcatgtttttctccgtgttaaacaagtggggatgatttttctccttttaagtccacatttatgtggatgaacaaaaaat

SEQ ID NO: 72325 - DNA, 370 bp, Zea mays
  unsure (1)..(370): unsure at all n locations
gcttgtcaagcatgtnaacatgtatgaggagcacatcacagcaagaatgtgatgactacatcaatgcccctggagctgctacatatggacctcttctgacccgtcgcttatctaagcatanggggaagtaagtatgggttagttatttgtgatgaactttcccgcttcacttgagtgttctttttgcatgataagtctgaaacccaatgtaacctcatgcgcttnctaaagagagctcataatgagtttgagctcaaagtgaagaagataaggagcgacaatgggtccgaagtcaataaccttcaagtggaggatgttcttgaagaagaatggatcaagcacgagttcttcgcttcctacacaccacaac

SEQ ID NO: 72326 - DNA, 333 bp, Zea mays
  unsure (1)..(333): unsure at all n locations
agcaattaagcaagtatcgagtngagctctattaanatcaactaagtatagttgaccctctgatactctcttatatgctactgaatcatcacttcttctaaaggcagtaacacctatatccataanaagacagttgtaaccacatttgcataatngagaaactganagcaagttgtaatctaaagaatctacaagaaaaacattggaaatggaatggtcaggagaatatagcaatttaccaagtcctttgccataccttgantccatccncgaatgtgatagctcttgggatcttcgtnttctcgaggaagaaacattctttctccctgcatg

SEQ ID NO: 72327 - DNA, 183 bp, Zea mays
gcttcggcattattttcaagcttaccatataattgttccctcgttacagactctgaaggatattatgatgaacagagaagctactggaatggttggaaagtgggccacggagctcaatgaattcaccattgactacgtgcacagatcttcaattcaatcccatgcgctagcatacttcatcgc

SEQ ID NO: 72328 - DNA, 396 bp, Zea mays
  unsure (1)..(396): unsure at all n locations
acctctacatgctcatgccataccatatatgtgcgactcatagccatgttcgaaaacatgatacgatagctccacttttttctaccgaaccaagttctgacattttattcatggtgcacttgctatacgagcatctacatcataatgcgagttgccacaatacatctgcaactctcacccatgcatcatatagcacatgagtgacatntgcgaatccatcgtacatagccctcttcgatcgtactcatattaatgctatagaacaacacatattgacaacatatatacacttatgtacatatgcattatgacagtatacctaacaatataggtatcacagttatgctcactctatgccctctaaatgtatatcaagtcgatactacattgtgctct

SEQ ID NO: 72329 - DNA, 225 bp, Zea mays
  unsure (1)..(225): unsure at all n locations
cgtatactntngctgtgagataaactatgtttgtangttnntcttgttattttacgttctcacatatatattntnntgttttanggattaattctaagtaaagctttaagggctcataaataatcatatgacgagagctgccagatagctcttggaaatcttcgatcagaggctgtcacattaaggaacgaagcttttgaaaaagataagatactatttttcctt

SEQ ID NO: 72330 - DNA, 268 bp, Zea mays
  unsure (1)..(268): unsure at all n locations
tgagaaagacaggatttgtatcgcatgccaagcatggaagcatagtggcactcatcatccgcataataacataataacgaccgacatgccactcgagctgcttcacatggatctattcggnccgatcgcttacataagcatcgacgggagtaagtactgtctagttattgtggatgaatattctcgcttcacttgggtattctttttacaggaaaaatctcatacccaagagaccttatagggattcttaagacnggctcaaaatgag

SEQ ID NO: 72331 - DNA, 413 bp, Zea mays
  unsure (1)..(413): unsure at all n locations
ctgcactactaagctcgcatatgtntctatccgnctataggtgtcgaggtgactgcttaaccctgatgtgtggaagcgacactgaatacnggtgaatgatgcatcgcagatgtagtcccattggcaccatgggctggtcctagctcctcgggagcctcttctacctcgcttacagcttcattggcctacatctacaggtggtgcatgtacaagtggtcattcgcctcttcgagtccctctgacatcgtgatgctggtctccagacataatagtgttgctcgatctcacttgccgtcaagtggaatgcctggctacctctcacctaaaatcttcttacaactcgggtagatgacacaaatctctcactgcgaagtgacttgcagctgacggtgtacaaggatgcatacatcctc

SEQ ID NO: 72332 - DNA, 320 bp, Zea mays
  unsure (1)..(320): unsure at all n locations
ttatgtcattctccatgtattttttggtgaagatcaatgatgctaattactactggacacagcttctctgtcatgtgtcacactcggcaagatccttcactgaatctggtgttggaaagacctctntgtatagtactctctattgngcactcggcaaacgcttaccatacgcccaaaggtattctacacagtaaagtcaccgtaatggcaatgagcgacagtgatggagtctttgtcgagtgtctgctcaaagacactcgacatacgctctactcgtgggccccatgcatagtctttgtgtgttgtgtgtggacacacac

SEQ ID NO: 72333 - DNA, 337 bp, Zea mays
  unsure (1)..(337): unsure at all n locations
gtggtatgttcctacactatgtagacctacatgtatcatttgtggacaattataacatagttttcaatcgttagtagatntaagtcggtggtttgaaattcttcggaaaattcaaatttgaactgcangtcactcgaaacttgganaaccgtgcatgananaatgatattcatgttacttancataacgaccgatttcataagcgtaccggatacttcgagcaacatgctcactanacatggncgtcaacttggcatgcacatgtntaataattgtataaaacacanataaagtcagaatatcatganacttgtccacgtgtcatgatatcatatgt

SEQ ID NO: 72334 - DNA, 152 bp, Zea mays
tgtactattgatgctatgagatgtattgtagtatagtggtgatttaattctgagtgatgagagagcacaaatccgtaacagtgtgatatgatcatggaatcttgtgataactggtctcatgtgttgcatgtctggaaaggtaacataatcag

SEQ ID NO: 72335 - DNA, 185 bp, Zea mays
  unsure (1)..(185): unsure at all n locations
atctctactacttattaagtaagcaatagtagtctgcctgccctcgttctgccattctgncgttctgcctcccatctatctggaccgtccgtttctattacctatgccatctatcatcacgtgccccttccttgtccacgcaagatccagccgtgcccgcccacttcccaccccgcaccataccg

SEQ ID NO: 72336 - DNA, 386 bp, Zea mays
  unsure (1)..(386): unsure at all n locations
gagttctcttcttcctacacgccacaacataacggtgtagtggagaggaagaatcgaactctactggacatggcangaaccatgcttgatgagtacaagacaccggaccggttttgggccgaagcggtcaacaccgcctgctacgccatcaaccggttatatcttcaccgaatcctcaagaagacatcatatgaactcctaaccggtaataagcccaacatttcataatttataagtttgtggtagcaaatgcttcattcttattaaaagaagtagaaaatctaaatgtgctcctataactgtagaaggctgtgtacttggttatgactcanacacaatggcatatatggtctttaacaagtccactggactagttgaagtctctt

SEQ ID NO: 72337 - DNA, 161 bp, Zea mays
  unsure (1)..(161): unsure at all n locations
atatctctagactntctttgtgtgctagtggtgctctaattttggcatctcctaaattctatgcaatattgtcngcgtttcgacctcggtgggtccccggaccgactagtaaattgtcgtcgcgtgtcccatcccatatgggtcggcgcgagacgtatcac

SEQ ID NO: 72338 - DNA, 307 bp, Zea mays
  unsure (1)..(307): unsure at all n locations
catgcatctataccggcctcttcttttgcataatcaactaaataaaagttgccgtctaatacacccttaatagctagtgaaccatcacttcttctatagacagacacatctacatttgtgaacagacaggtatatcccatattgcacaatngactaacagatagtaaattatatcctattgactctactaataacacattagagatagagtgctcattaganatggcaattgtacctaacccttgtaccttggcttgattcccatcaccgaatatgatngaatcttgggaatctttattcttgacgt

SEQ ID NO: 72339 - DNA, 322 bp, Zea mays
  unsure (1)..(322): unsure at all n locations
gacatataaccattctgatttccatcctgtccgccatttgcttctgtagctaattacaggatactttgcggtgttccggtatgcataattgtagcaaccgaagttttcatgaatcccatctcttctggcctgtcgttgataatgcaattcatgaactcgacagaaactgtcagcataatgctccactgcttggcttctgatggcccatatattaacgctaatcctaacgatagcgttaggagttaactgatgaaggtagatgccanacctctntaatatctccgcaacaatctcgtgaacagggaatcttatcccatccttt

SEQ ID NO: 72340 - DNA, 344 bp, Zea mays
  unsure (1)..(344): unsure at all n locations
atacgacatgtattctcaaaaanatatctatggagccaatatcgataccatttctaacggcaataatgtcgaacggttcgacatcttactcaaacaatgatacacatatacattgtataaagtggcattctgtctaaactgggcggaggtcaatttcagaatattgcgcatgggctatagtngggatngataacacatactattgtggagccattcactataccaattcaatgtcctgcatttccaanatatcttatgccatttcatgatgtgtaccaacaaccgcataatacgttcgtatgtaatcacccttgcctctatatggtatataacntaacatctta

SEQ ID NO: 72341 - DNA, 403 bp, Zea mays
ctagctttcttagtttaatttgctcttgacttcgacggcgtatgatggttcctagcttaatctgtataccaagaaagcaaatattccttcttgggttcattcctcattgataactctgacgaagtgctaaggcattggtactttatcttacattttctggccctaaatgtgctcaaattaaccctacaaaagatgggggaagttcacacaaggtatatatacaaataattgtcataatacaactctatccttatacatgtagcgagctgtgtgagcatcttcacatacaaagccactcgacttcaaatctatgtttgcatttccgaataaattcttatatcgaaagcagaatatttatgtgcattcacaagacttcgattttatccgctatgttactacattc

SEQ ID NO: 72342 - DNA, 384 bp, Zea mays
  unsure (1)..(384): unsure at all n locations
tgaagcacactaccaattgctactaattgatagatcatcactgtcatggctccatgatatttatagatnagcatctaggatcaccaactattatagagcacgagcaatctttatatatgcaattactcacaactttatataccaattacttgacttgtggatgtacccaagtcctgaatgctccatttcttgctcatcttctcttttccaccttgagactatataggatcacttaagaaaatagtagtctcaaaagtcacaaattatgtttgctccccctaaagttgtgcatcaagtatttgaatgactcgcaccttgcacattctagtgtcctcagaactagaagtggtcacaatgtaccttggtctangcataatatatcaa

SEQ ID NO: 72343 - DNA, 407 bp, Zea mays
  unsure (1)..(407): unsure at all n locations
ccttgatctcacttcaatgtaagaggcatcttgattgtgtactcagtatgttgttactgggctgttctgttacctgacaaaatgaatggtctgtcactgggggttcatctagtaatggcgaattggtcttcaactatggagacttngtaganggataaaagtcttacttccgcagaatttataattttggtcaatagttgggaatatcgaatttaaagtaaccatactgctgtctaaaacagatcagtcnttatcttgcagatgtttataacttgagatggagaattaattatcatgaatactgagtgagagatgttggtaatactctagatattgttgatatacgtgcttatttaaatacaatacaacacgtgtgtgatgctgtgtaggtggagcttcacggctgg

SEQ ID NO: 72344 - DNA, 162 bp, Zea mays
gattaaactcaaaactgaaaaaggaggttcattacagctgacactgtctccagaatttggatggttttcagaaactttctgattgtggacgttatatcatgcccgtgtactcaaatagctgttagacaagtggctaataaaactggccacattacctggtgc

SEQ ID NO: 72345 - DNA, 202 bp, Zea mays
  unsure (1)..(202): unsure at all n locations
tcatgtgacacccncttcatccctttcatggtgcaccaccagctattacgcggtctggctgtganagggaaatgtgcacttgggccatctctaagtatcttggtgaattagtgtccaacacaagtgcctaagtgtataatggtggacaaagtacaattcatgtataaaggtatgtttctcagacttagtacattgtttttga

SEQ ID NO: 72346 - DNA, 443 bp, Zea mays
cattaccttttcctatattgatgaacattcataaaagcattaattaattgaattcatccataagacatgaatcgaattgatgtgcatgaaaatgaatcaaacctggcgacataagataccttgaagtgagacaactgctgtattaaagaatctttatactagatcaactattataagtccaaatcttgaattccacagcttttcttcaaatccggtctatattacaaaattgaggcaaaaaatcgtatccaaatgagaaagaaaacacatggagatcatatatatgcataaactattgaaatcaatcaataaactcaagaacaaaaccttctccctgtagatctcataaaaatacacgccgtcgcttcagtgctgagaatattctgctagttctggatctggaaccctgggcgcgctagcccttttataatgtacacacatca

SEQ ID NO: 72347 - DNA, 519 bp, Zea mays
ctccacctccgatgcaacaatgttctttttctaaaggagccagtatgctccacaccacatggacttcagagagaagtccgaagctcgtacagtcaatagcactgtgccagagtcaaagcacatctattgacaaatatcctaccttaatagcaatctatttcattcagttctattatctgtaataaaggacattgtttaggcttcatgtaattagtttcgttgattcctacaaggaaaatatattttctacacaggcttatattgataacaaagaggaccttcgaactatcgaaaattcttcgaagcaacaaaaagtcgttctaatgaacgcagagtaagtttgccgaaggcacaaaaagtcgttccaaagggagcgtagtgtaagttatctgctccaaagtcgttccaaagggaatgcagagcatacagcgaatagtcaacgctgataccgcctaagtaaaaggcgaagcgcgaatagtcaacgtgaataccgctgatagtaaatgcgaagaaagctct

SEQ ID NO: 72348 - DNA, 521 bp, Zea mays
ctgcacccggtacattgtcattcctaatactgatcatgggtaccaggggcataccgactccaattacccaaaactttgtctgctgtgcataatgtgttccacgtgtctcaactgaagaagtgtcttccggttccagatcgaaccattgaagtgatagatgttgtccttgaactagacttgacatattctgaacatcccatttgagtcttggatcaaaaggacaggattacctggagaaaaactttcaagttttacaagatacagtggaaccaacattccgaagatgaggcaacatgggaaacccaagactttttagataagaatttcccaggctttttagcctcttgtaatttgtaaagtatacaacattcgtgtaataaaggagtgagccccaaacccacccctgccttgtaccaaaaataaggatatataaatgtgaaacatttcctttttcattacctaccctaggacttttaatctcgggacaggaatcttttatggcggaaggatgaaacacctct

SEQ ID NO: 72349 - DNA, 495 bp, Zea mays
atccttgacatcttggttgtttactgtttgccgttgtcgactgttagctcggacggtactctcaagcggcaaacgatgttctgccagaagaatttttgggcagtctttgatgtgattgtggaaacagccctcgcttcaatccatttagtgaagtattcgacagctacgaaggcgaacttaaggttcccctgagcggtgggcaggggcccgacgatgtccaggccccagcgctggagaggccatgtatgggcaatcagctttgtatattgcgaggggttgcctgaccgaggggagaacttctggcaggcttcgcaggacctcgtgacccgatttgcggcacagatcattgcgggccagtaaaacccttgacggatcaccttggcagccagggcccttggccctgcgtgcgagccgcacgtgccactgtggacttcgcgtaggatctgcatgccttctgtttccgtgacgcacttgagcattggcagactgacccct

SEQ ID NO: 72350 - DNA, 479 bp, Zea mays
  unsure (1)..(479): unsure at all n locations
gacaaatctaccccataaattgcaatacgtatcttagagagcataattaacttanagacatgtatactaactcttaccgggcgcaaaggtaggcctaatggactcagtgcacaattgggagtaggaattattcgctccctgggatgatggaacttgcatacagcaccaaacttacagtctccggtcttcatatagaactgacattcaggttggtcaggtctctctggaaataaattctccctctgtactgcataaagtccaacaggaacagaacctgcttggtaggatgaaaacattccttgatcgcctatactagtaccactttggcgtgagccagtatagtattgagcagcttcaggtgtcccgtgttggtcctccgaggatgaagaaccaatttgcgcctacaaatttganaaaaataataatgattcataaattacatggaaactaataaatggttcaagagcggcagtaacttt

SEQ ID NO: 72351 - DNA, 467 bp, Zea mays
  unsure (1)..(467): unsure at all n locations
gcatactgcgacagatggttgaacttattgagatactgcattacaatatctcccccttgctttaaccggatgaaatcttcttgtttcatatggagcactccctcatgaacataatgctcccggaatgcttgcttgaattcctcccaagtgatctgatgtcgagccggttgaattgctacaaaatttgcccaccaagtactggcagtccctcttagttgatgtgcagcgaacagtgacttctgcgtctccgtgcaacatcatgtgcgcgagtcaccccaccatcatgtgcgcgagtccgtgatggcatctgatgcaaagaaacatttgggaaaatataacatgctagcacataccatcatattacattaccaaaatgtaataattatacagactccagcgtacaacttgacttcagtacttattttacataattataacatctanactatgctattctagtcttcgca

SEQ ID NO: 72352 - DNA, 543 bp, Zea mays
  unsure (1)..(543): unsure at all n locations
agcttgtaaaaatgtgccaagctctagaaaatatctagtgtttcttttaaaaaaatctcaaaacattctaatcgatttccaatttgtttttaaaacttttcacaacagacatgaacacattgaacattaatacgtgttgcattcatgcttgatgcatctcatattgttgagtgaagttcttaaacacgattacatatcaactataatgattattgaattcttcatgtctttctaaatatttccccccattttattagagctaagtataaccattcttattctaatataaatacttaatctctggtgatttatcattctcacgcgactatatatatagtatgacagcttaagacaacgtcattttcttccaaccaagaaatacaatacatgagtcactaccagatgagaatgtaaatggtaaaaaatattatctgtccatattctaatttaatctatctaacaagacactgatccatattcgagtccgagtattcagtattcgatccctatactcanaattgtatgtttaagatgtcgatatct

SEQ ID NO: 72353 - DNA, 543 bp, Zea mays
agcttgtgagcaatacaagttcaagagggaaaaagctgtttctgttgatcagccgaagcccatgctcttatgtgaggacatagcagagcagaaggtgctattgggatctcaactgtccgaagaacaggagaaaaccttgataaggtttttgttcaacaataaaaatgtttttgcttggtcagctaatgatctttgcagagttaacatggatgttattgagcactcgctcaatgttgatccatccttcagacccagaaagcagaggcttctgaagatgtctgatgacaaggccgaaggtgctcggaatgaagtgaatagactcctcagtgccagagttatctgagaggtaaaatacccagaatggttggctaacactgttatggtgaagaaggccaatggtaaatggagaatgtatatcgattttactgatctcaataaggcctgtccgaaggacgagtttccattgccaaggatagattccttagtcgatgcagcagcttcatcagagcatatgagtctgctggattgatattcaggttatca

SEQ ID NO: 72354 - DNA, 465 bp, Zea mays
  unsure (1)..(465): unsure at all n locations
ctcaagcttgacaaacatgtaagactgagtatgataccctntagctcntataactcaagttcaattaaatgttcttattacgtgttgacaaaattttttcgattacattgcccttgcatataataacttgtcctatcagatacctggttcactgtttaaagtagcacgttacaacactaccgaaatccggctctttgccgagtactttctatcgggcacttggcaaagacgtctttgccgagtgccgaacactcggcgaatggcgacgcttggcaaagggccgtcagcagccgtccatagctgacggtcgatacctttgtcaagcgccaagaagatggagagttctctccagaacatgggctagaagggcgatttgagatacacttaaccgaagctatcagaatggacatagatattgaaatggttgtngatgacgatgatgatcatgctcaacaggactattac

SEQ ID NO: 72355 - DNA, 426 bp, Zea mays
  unsure (1)..(426): unsure at all n locations
tcacgcttgagtgggacggaaggcgatcatgacgaaggaaagactanctttatgctangcgcagaaatgcttcggcatgacagcagaaaaggggaaccgacttacagatgaaaagccaaattagacctcgaagaattactatagagttattaataaatgtaaagggcgttaatgtaattctacacgggctgcgtcccgtgcctataaatagatgaacagtactcctgtactgttcacgctgacttggcattcgctattcgcatcacgcctgtacctttacttttcgtcattctgaaggcacatttataaattgtcattatgaatttaataatgcaaataaacataagttgatgataatatttgcgttattattcgcatgtcatacatgtattcttcttattatctatcgaccgcacgaatggcttt

SEQ ID NO: 72356 - DNA, 489 bp, Zea mays
aatactcacgcttctaaagggagagcacattttaggactaacaaatgttcattttgagaaagacagggtttgtagcgcatgccaagcaggaaagcaagttggcactcatcatccacacaagaacatcatgacgaccgacaggccgcttgagctactccacatggatctattcggcccgattgcttacataagcatcggcgagagtaagtattgtcttataatagtggatgactattctcgcttcacttgggtattctttttacaggaaaaatctcaaacccaagaaaccttaaagggattcttgagacgggctcaaaacgagttcggcttaaggaccaagaaaattagaagcgacaacgggacggagttcaagaactctcaaatcgaaggctttcttgaggaggagggcatcaagcatgagttctcttctccctacacgccacaacaaaatggtgtagtggagaggaagaatcgaactctattggacat

SEQ ID NO: 72357 - DNA, 496 bp, Zea mays
  unsure (1)..(496): unsure at all n locations
tctcgctcccgcggcatcgnnnncttttccattttctctctacacacacacatttncctgttcacagaggttgtaagacactaattgtcataccacaccagactcgtccattccagtggacacatactttctgaataggtttgaactctacgcagaggggtacactntacccactagtccggctctgcgatcccatggccaatgagatccgaatctgaatctctttcttccctcgcacgtcctaaccttaacggttataccggaaggagtcaggccaccgccatgtccaaaccagacaaaacattccccctccttatcctcccggtgctccccagccttcataaccctgtggttggaccgtacgagttcagattgagtgactgcccacacagtctcgagtggttgtacttatcatgagtacaggtagtgaaagatgacaaaccggtccgtatatgaagggacaatccttctgctcacgcctaaaccagctgagcct

SEQ ID NO: 72358 - DNA, 536 bp, Zea mays
  unsure (1)..(536): unsure at all n locations
agccgaggcattgacttagtggagaggcggaagttcctcatttgatgaccccgcctactccgctagcttgttacaaactcccagcactcattcctcgctctcgaatatccccacagcccccgaattcctaatttcccccaattcggtcagccgcgccgtcgtgagacacctcaccgtggacagccatccacaggtcggttcgtgcttctctggttcatgttctagcatccttagggtctcctgttgcttgtaaactcgatcaattgcacgctaccacgcttggtcgtcgagaacagctcggccagtcctcggttttcgccgtcgtcgtgggcagaggaattccgggttagattagttcaattaaggcatggactatgctcgtctacgttcggggatgataatctgatactctgcttcggcgataatcgccatttgaagcgaatcccagctatgtggtgggaaaataataatattatgagaccaatttnactgtcagattatgaaatgtgtagaaatagtgaataacgataaatatg

SEQ ID NO: 72359 - DNA, 518 bp, Zea mays
ctcatgtgatgatatgattcaagaatatctttttattctacatgctgaactgtctgaaaaagttgaagttctgactttaaacaaccaaaaattgatgaatcatttgactgatgcaactactataggaaaagttgctattgagaacaatgatttcaacgctgagttggcagtggataatcaaaggcttaagaatgacgtctagaaactaaaaagtgaaaatgaacatcttgcaacatgtgtgcaaaagttcaacaagggtcaatacctccaagatgagctgcttatgaacactgttatgaaaaataacaagagcggtattggatacaatgcttctgtgctaaagatatctatcactcaatacaagccatagcagactcacaagcctatcaaatgctctgagtgtggagatgaatgtcattgtgcccacaactgctaagctaaaccaccaactcccttgtctagcactcaggccatttgctttcatgctactatgatctagaaaggtcgcaatggatgat

SEQ ID NO: 72360 - DNA, 264 bp, Zea mays
  unsure (1)..(264): unsure at all n locations
cccggagcccacaagaaagggtgagagggaggagtttttttttaaaanaccgcgaacacatggagttaactcaacaggtggacagctctcctacggcgaacgacgcgaggagacagttagatccgaaatacgtcatacggacctacgcggacccgacgcaagagtaaactaagacgactaattacggtcttgtaaagctgatacttacaccgcttcatggcggagtcacaacccacggaaatctgcagccgaaggaccccgaag

SEQ ID NO: 72361 - DNA, 432 bp, Zea mays
tcttggggaagctatccgagggctcggatctattctgtttgttcgggaaaggggttggccatggtgcttgccctcgagcggctctggcgggtcgcggagaggccaccggagctgcgggcgagctcgggagggttaagcgtggtgcggtggaggcaacggtgaagaaggccatgcactagggtgggctttatagccgtggcgcggatgcaggcacggggcggccgagggcgcatgggggttcgcgtgcgggcgtgctctggacgcgcccccgagtgtcatcccacgtcgaacacgtgggggtttacttctgccagggttcaacgagccgattggtcgacttagcgtgcagatcttggcagaaccctcatgtacggtctcttctctgcaccatatcctacctcttcgatgtgatgtccaagcaaagatatggtc

SEQ ID NO: 72362 - DNA, 497 bp, Zea mays
  unsure (1)..(497): unsure at all n locations
agctttgctagtgtgttactcatatgcttcctgaagataaatttttttatcttaatgactagggctgccgttgctatgatttaatggccatctattgtgttcattctgaaataagacagtcatgtggataatgacgcatgtggntaatggtactttaagactgatttaaattggtttcttagtttaaatccatatcttactggtgaatactggtacgtcgatcttatctcctcttatcccttcacggtcttacccttaattctatactcgatagagatcttccccttctcattgtcccatacctactcaacattacccttctttattttccggtcatctcctaccttatttctttcgtttttaccgctccatcttttactcgtcctgcccctcctcattactgtctccttttctgtaatctcgtcttaaaatacatacccttctctttaagagcctcactttcttcgcataatcttttacctctcattttcctcctc

SEQ ID NO: 72363 - DNA, 380 bp, Zea mays
  unsure (1)..(380): unsure at all n locations
tcggcagcgcgcgtggacccagcaaaccattctctgttcaattcgctgcacccacgtcttccctagcatcccgtgaagctctctgacccggtcaattgacctatcgcgtcgtgagtacaccggattcctcactgccaacgagcatctccacctgcgcacatggaccggccgactccaaccatccccgacggcgacccgcacatcgccgtgatcctcaagacctcccctacgtcctcgaccacctcaccggagtagcctcaccgccggtaagcccctccgtccctttcttgcttcacggacactgttccattanggaaggatcgagggttcgatttctagaaaccctaaggggttctatgcagagccgtagactcaaataa

SEQ ID NO: 72364 - DNA, 537 bp, Zea mays
  unsure (1)..(537): unsure at all n locations
gcttgatgatccctccacgtccgaagcacaaccggtggctttattgcgacggaggagaagaaggaggagtctacaccaagtagacaaccaatcgacgcttcaaagctcgacaacgaggagatggctntgatcatcaaaagctttcgccaaatcctcaagcaacggaagggaaaggattacaaatcccgttcgaagaaggtttgctacaagtgtggtaagcccggtcactttattgctaaatgtccattatcaagtgacagtgacagggataacgacaagaagggcaagaggagagaaaagaagaggtaccacaagaagaggggcggcgatgcccacgtgtgccgcgaatgggactccaacgagagctccaccgactcctccgacgacgaggacgccgccaacatcgccgtcaccaagggactcctcttccccaacgtcgaccacaagtgcctcatggcaaaggacggcaagaagaagaggttaaatctaaatccttcactaaatatgagtcttctagtgatgataatgctagtgatg

SEQ ID NO: 72365 - DNA, 436 bp, Zea mays
tttaaaaagatataccttgcgcagcttgtctagcagggaaacaagtgggaggtcctcattccaccagatatgttatgactacatctatacccctgtagctgctacatatggacctcttacgacccgtcgtctatctgagcataggatgaaggaagtatggtgctactattgttgatgacttttcccgcttcactatgggtgttctttttgcaggataaggatgacacccgagggaccctcaagcgctttctaaggagagctcataatgagtgtgagctcaaggtgaagaatattaagagcgacaacgggtccggagtctataaccttctagtggaatagttccttgaggaggatgggacaagaatcattacaccgttcctaacacctcatcaaatagcgtggtagaatgaagaacacgaccctcatcatattgcga

SEQ ID NO: 72366 - DNA, 351 bp, Zea mays
  unsure (1)..(351): unsure at all n locations
tcaagcttcggcgcgatggcagaaggtggaaccgactatatangtaattatttgggggcctcgacagatttccataagccgttaacaaatgtaatgggacatggatgtaatttaacgtgggctgcgtccccgccgttataaatagaagaacagtacttcccgtactgttcacgctgactgggcatggtctttgcgtcacgcttgtattttttacctttctcatgaccgaacgacatttgctattcgaaatgatatccattctccatgtgaatataaagaattgtattatgctatgcacctaccggagttcctcaccgccggtagcccctccgcccttctttcttaccgccc

SEQ ID NO: 72367 - DNA, 509 bp, Zea mays
atactcaagcttgggtgcaactccattctttgttgtactcataccaatggcccttcaatgccttcatcttttctctcatacccttgtctgtcatcacctttgacccttgcgatattgaggtcttctacctaaatgcttaccttgaacttatcctttaaaagcctcccctttctttcaacccagtttgagagtgcgagttacctatctctcccttgatttcttttcacttcttgttgccttacaagatttgtgttaattccatcccttgctgtgtttttatttgctatcaccctcaccttgtcgtccatcgatcttgcctagatactcatctttattcctactctgtaaaaaatctcctctcttccacctcaatttgagagtgtcaatttacctatctggcccttgggcgtaccctctccttttcatttgcaggtctgtttaactcatcctataaggacttatatcttgtatatgctattacctctctctacatcttgtcgtaatacttt

SEQ ID NO: 72368 - DNA, 453 bp, Zea mays
  unsure (1)..(453): unsure at all n locations
catgcgatgctcacttatatgacccgacttttttttcatgangtngactaaacattagccgagcctttaactctaatattacagataggtgcatcatcaagatttaaaatgaataacccattcataatggatgcataagccacaaacatgccattcttatagatcaaacaaccattggtttcactcgcaaatgaataaccatccttcatcaaacatgaaggagacataatgtttctactcatactatgaactagataacaattatttaactccaaaataaatcctgatgggaggtggaagtgcatcgtcccgacggtcaacgcagcaactcttgcattattgcctacccagaaatcaacttctcctcttttcacgcttctacttcttatcattcccctgcttgaattgcagatattggccaccgatcctgatcaaatacccagaattatataa

SEQ ID NO: 72369 - DNA, 437 bp, Zea mays
gcttcacaatgcttacaacggtccagcttgtcgtgctgctcttatattatcatgcaactggtgggacacacgtcgatcttctcatatgtcatcccaagaccagccaacatcttctttgcgaagtacgtattctttggcaacttatgattctccgggagaacctcgcccatcagttggatgatgttgctgtaagcactgattgaaatgttgtgcttcgactttatcgccattattcttgtgagagtgccaagaactgacatctgagtgtgctcgtgcagtttctcttcccccgcggcgagtatccggaagaatttctgagcatcgcgtggaagctgtcccggctcctcagcgttcattttaacatggctaccaagatcattgcatcatgtcgtccatcctatcatgatcgacatcgagttccaccttcgcgtcaacgt

SEQ ID NO: 72370 - DNA, 262 bp, Zea mays
ccctaaccagttataagctcttaggagcttctgggctatacgagcgccatacttggtacgaagcctacggatttctatcataaaggactctatgtgaaggccgaactacttatcactaccagatgcaatgaatgctgtagccaatctagtagagattaatatctggctaaccacagctactagaaaaaccatgggataggaccaaatatccatatgcattacgggaatgcctactcctagaatcaaaatgcactcataagcc

SEQ ID NO: 72371 - DNA, 338 bp, Zea mays
ccctagagaggctagaacattccacagaggggcatgaatcaaccttaggcaggctgatcacgtgagagaccttcacgacggaattctgactgatttgggggaaattcaaaattggagcgctctggtggacgatctgaggcacgggcgggtgttctggttttgtgacaacctaatggagctagcggcaccctcaaatatagtgtccgagagcggtggctatgaatttccaatgagaaagctagcggccggagagagggacgagtcaccaaagctgcataacgtggcatttaccggggcagtgtccatgcaatgaacaagctacctaaagcagtctacta

SEQ ID NO: 72372 - DNA, 347 bp, Zea mays
  unsure (1)..(347): unsure at all n locations
gcttatggtgcttgagagagtaactaattttaaaagcttaggtaatcaactttcaaggacctatatccaagattgacccaaagttatttcgaattattatatctaaaactcatatcatctcggggaagatactgatgttgtaggaaataaagaattaatcctatgcccaaaagtcaagacctacaacatggaggaaagccaaaggatggtaacaattatgcttttaagtgcaagtatcttaaattatcatttcttatgtgtcttgcttagtcacatagaacaagaagcacttcaaatgtttataaattatgtcactattctntgaagaacattctctcgtatggtcg

SEQ ID NO: 72373 - DNA, 423 bp, Zea mays
ctatgctgtctcgacttggacagattatgactgacacttttatgtctacaacttgaacgtcagatcatcaaaaagtgtgattcaagactttttgaaaatctcatcagaagcactacacaacttttataattaccaacaagcaattctatctttaaccaagtcaacacaattcagtttcgaaatctgttctgacaggggacataacacagcaaccatcttgtaaaattcataactcttaatcaggcctgtggttatgaaattttaacacaagcaagatcagattagcatctacaactatcttataacgaccatgaacagattgcaacattaaagtgagcagacaatgcagtttctgaaatctgtacagaatatggacatattcagttactgaatttgtgaacagtataactcataagactgaag

SEQ ID NO: 72374 - DNA, 516 bp, Zea mays
  unsure (1)..(516): unsure at all n locations
ctcaagctntatcaaatggacgtgaagagtgccttccttaatggtctcttcaaggaagaggtctatgttgagcaacctcccggctttgaagatagtgagtaccctaaccatgtttataagctctctaaggcgctttatgggctcaagcaagccccaagagcatggtatgaatgccttagggattttcttatcactaatggattcaaagtcggaaaggccgatcctactttattcactaaaactcttgaaaatgacttgtttgtatgccaaatttatgttgatgatattatatttgggtctactaacgagtctacatgtgaagaatttagtaggatcatgacacaaaaattcgagatgtctatgatgggggagttgaagtatttcttaagatttcaagtaaagcaactccaagagggcaccttcttatgccaaacgaagtatactcaagatattctaaccaagtttggaatgaaggatgccaaacccatcaagacacccatgggaaccaatgagcat

SEQ ID NO: 72375 - DNA, 463 bp, Zea mays
  unsure (1)..(463): unsure at all n locations
tcaagcttgctcctggtcctcctcttggacagatccttgctctgtgttcatcacgtactctccgtcggcaagattacaatctaatgaatgcaatgcgtaagatatatgcatgatatgatatgtgcttttagcaattacaacttttgacgttgtatgatcttctcgacttagacaaggttaacttcacttgtgtaagacctttgggtggtatacttggtaaattgggtcaaacttagctaaggtaagtggtaggtttatttttttggggttccactgaattctttttaagccttagtgagaattgttaagtactcaagttagacctattgnggtgagtttatttcttctctcttttcttttattctctttaatgtnttggagtggctttgaactacaagttgctttaataaaattccaaaacttctgcaaaaattacagtggcttggtactggtgtatatttct

SEQ ID NO: 72376 - DNA, 435 bp, Zea mays
ttagcgattaagcatgcatctagaccggcctcctcttttgcataatcaactaaataaagtttgtcgtctagtacacccttaatagctagcgaaccatcacatcttctaaagacagacacatctatattagtgaatagacagttatatcccatattgcacaattgactaacagatagtaaattatatccaagagactcaactaaaaatacattagagatagagtgctcatttgaaattgcaatcttgcctaagcctttcaccttgccttggttccatcaccaaatatgattgaatcttgggaatccttattcttgacgtatgaggtgaacatccttcttctcctcgtcatatgggttgtgcatccgctggtcgatatccagcttgaacccacggatgcatatacctgcaggcaaactaggcgtggacttaggaccc

SEQ ID NO: 72377 - DNA, 537 bp, Zea mays
  unsure (1)..(537): unsure at all n locations
tcaagctttaagctctntgacaataaaagtacttcatcgagttgattctttatgcactaagcacgaatgaattttgggaaattaaactaggtatgaagcanggataatacatggacatgctntctcttcctttcatacaagatatgcatagattgtatagaaaaggaagatttangtacaagtttaaatgaaaggagatagtttacctttttgtacctttacatagagacgctctcttcattgtgctctgtccttagtcttagatgcttaagacctattcttaatgacaatattatggaaatattttgcacaagagagagttctacaactagtgatcttttcaagttattgttagcaaatatcaaatggatcacatgtatcatgaattctgcttttaacttagtgcatatcaagagagatatcgattgaatacgtcactaagaagcatgattggtgattgaagtcattcaattatcaaacanataacagatgtgaatcaaagaacaacatatgcatcagatatcaataagcttagag

SEQ ID NO: 72378 - DNA, 513 bp, Zea mays
  unsure (1)..(513): unsure at all n locations
aatactcaagcttcggctgtgaaaataggtctttatcgtctctgtttatgttgaagataagaacgctgttgctgagatgaagctgagccttgacgaagagaaaaatttggggtttcttatagcgatgtcaaagaccaatacagaaaagattactaaggagattctggaaggtttgtccgaagatactggtgacagtgacagttatgatgtggacagcggcggcgaggactccgaagatcgtccatggcgaccaagtcattcagtttatggtaaatcaactatcaaaaaaaatcatcttgccaacatgagaggaaggtatttccgggatttgtccattgtgagagccgatgaaggtgaaaaaacttgcccacaccctgaagagaatgaagtcgtagtgtaccgaagctntntgaaagctgggttgcgatttcccttgagcagcttcgttgtggaggtactgacaatattcngaagttatctccatcaacttacgcccgaggaattattaaactg

SEQ ID NO: 72379 - DNA, 446 bp, Zea mays
gcttgcatctggtccctagacaatggactacctttttttttctcaagagttgggtacctaagacccaagcctaaatttgccttgcaggtttatgcatccgggggttcaagctagattatcgacagcggatgcacaaaccacatgacgggggagaagaagatgtttacctcctacgtcaagaacaaggatccccaagattcaatcatattcggtgatgggaatcaaggcaaggtgaaaggcttaggcaaaattgcaatatttaatgagcactctatatctaatgtgtttttggttgagtctcttggatataatttgttatatgttagtcaattatgcaatatgggatataattgtctattcacaaatgtagatgtgtctgtctttagaagaagtgatggttcactagcttttaagggtgtattagacggcaaactttacttagttga

SEQ ID NO: 72380 - DNA, 482 bp, Zea mays
gcttatgaagattcttcatcccaacatgggctagtcggcggtgttttatccaacctatgttagtcttagcaattaagcaagtgtcgagttcagctctatcaaaatctaccaagtatagctgaccctccaacactcccttaaatgctattgaatcatcacttcttctaaagacagtgacacctacatcagtgaaaagacagttgtaacccattttgcataattgagatacagaaagcaaattgtgatctaatgaatctacaagaaaaacattggaaatagaatggtcaggagatatagcaattttacccaatcctttgaccaaaccttggtttccatccccgaatgtgattgctcgttggggatcttggtttttctcgtaggaggagaacatcttcttctcccctgtcatgtggtttgtgcacccgctgtcgagtatccaacttgagcccccggatgcataaacctacaaaacaagtttagtt

SEQ ID NO: 72381 - DNA, 445 bp, Zea mays
  unsure (1)..(445): unsure at all n locations
gctctgcattgccttangaatgactttggagcttcttactcttgatttatgtggcatcttagctctgcattcccttatgaacgacttttgagcttcggaacttactctgcgctcccttaggaacgactttggatctttggaacttggttttatcacactcgatggtgtaaccacaagtttattacatcaagttgaaggttaaaccttcctatattgtnttttttgcaacagaaatataaaagcatgaaatagtagaagtggaacacatcagggctttcttttgccaaaacgatgtgtcatcttcagtagatgtgcctggattcaggcatagtgctattaactgtgcgagcttcatactgctcccgaagatcacattgttgtggaggccgaaggtgcccttctagctgctggtcatggtttggggcatgcaccattggtgggggtg

SEQ ID NO: 72382 - DNA, 525 bp, Zea mays
  unsure (1)..(525): unsure at all n locations
agcttcacaatgcagtgactagcaacttccgaaacaagtgncttctgttctaacatgnaccacctaatagaggctataataaagaactccattaacacaactctcaaataatggaaggaaatcgttcttttatggtcattttaaaaacatcagaataatcttgattctatcgcatacaatacagcagggtgttgattagttaatctttaaatggtctcttgaaaaacattaaagtgattctgataaaaaaaactttcattgcatgcaaaacaacagggcctttaatactccatcatttccaaattatacgacattttggcttttctagatgcatcgttctaactatgtatctaaacatagtgtatatctaagtgcatagcaaaatcatgtatctagacaagtcaaaatatcttataatttggaatggtgggactagcaaacatcatcatgtcctaaatggttagatctgatcatctgaagctagtaaactctcttaagcagagtcacctgaagcattgtcatagc

SEQ ID NO: 72383 - DNA, 530 bp, Zea mays
  unsure (1)..(530): unsure at all n locations
agcttgcaagagacacctaattgtgtggcgatccttgctagttcttattgaccatgagaacgagaaaacagcactctaaccaatcttgagtgacttgaaatgacagaacgggaaagggttggaaatataacccgacctttgtgggcccctcaacgaggactaagttctttggaaccgaacctttggaaacaaatacaacgggtcacttgttgatcttcactttatgtgttgcccctctttcctctctatagaagttcccttgctcatatagaattgagtttgctcccaaacgttctccacattgatttatcaactcatagcaaggagaaccatcttccgcactctgaattatttctaacactaaccctgtgcatagcgcatgttcaaangttataattttcaggtttcggctattcaccctcctctagcaactttcacgaatacattgtggcccatggtgcctctttgatcaagcgcctaaataacgcgcttgtgccgatttgagacattactgacttcggtgttatcat

SEQ ID NO: 72384 - DNA, 513 bp, Zea mays
  unsure (1)..(513): unsure at all n locations
gggcacacatctgaatttcagatcagcttatcttgtgcatacaganggccagaccgaaagaaccaatctaattcttgaagacatgttgagagcctgtgcgttgcatgatcagtccggatgggacaagagattgccttatgcatagatttcctataacaacagttatcatgccagcttgaagatgtcaccatttcaggcgctctatggaaggagttgtagaactccgttgcaatgagatcagcctggagaaaagcaagtgtttgggccagacattttgcttgaagctgaagagaacatcatgatggtccgagagaatctgaatatagcgcaatcaaggcagcgaagctatgcagacacaataagaacatagctgagttttgaagcctgagaccttgcctatctgaaagcgtcaccgatcatatgagtcttaatgttccgagtcaaaggccagctagcaccccgcttcattggtgcgtccaaattctctcaggcgtgagaagtgtctattagctc

SEQ ID NO: 72385 - DNA, 356 bp, Zea mays
cataggtttcaccgaaatccaaaccttcgacttgggagtatcctgtgggcacaagtcgagctttgttccttggcaccacaccatgctcgtcttgcttgttgcggaaaacccacttggttcctacaacattttgattatgacgtggaaccaatgccatacctcggtcctagtgaagctgttgagcacctcttgcattgccactacccaatccgaatcttgaagtgctttctctaccttgggtggctcaatagaagaaacaaaagagtaatgctcacaaaaatgtgcaacacgagatctagtggttacccccttatgaatgtcgctgaggatggtgtctacagggtgatctcattgga

SEQ ID NO: 72386 - DNA, 505 bp, Zea mays
  unsure (1)..(505): unsure at all n locations
aatactcaagcttgaaggacaaaatataaagcaagttccagtatattttgtctccgaagtattnagcttatcaaagaataattcacagaattggagaaagtgttgtatgctgtattaatggcctccaggaagcttcgacattattttcaagcttaccatataactgttccctcgtcacagcctctgaagtatattatgaggaacagagaagctactggaagggttggacgcggagctcaatgaactcaccattgactacgtgcacagatcttcaattcaatcccaggcgttagcagacttcatcgctgactagacgccaggggctcacgaagaagggacaaacaaggataccgaagcttggacggtgttctgcgatggttcttggggaaccttcgatgcaggagcagctgcagtcctagtggcaccttcaaaagtcaaaacatgttttgcagtcaaactagatttcagttgcacaaataatattgctgagtacgaagcacttcta

SEQ ID NO: 72387 - DNA, 508 bp, Zea mays
aatactcaagcttgagcagtgaccgacttcgtttgaaatccttggaaactggttatcagcatgtccttcagcttctgccatgaggtgattgtccctggccgaagagaggagtaccaggtttgtgcaacactcttgacagccatgacgaaagactttgccatgactacagtattgccaccatacgaagatatggttgcttcataactcatcaagaattgcttcgggtctgaatgtccgtcgtacattgggagctggggtggcttgtaagaatggggcaaaggtgtagcctgcagttctgttgacagaggagaggtatcatcaaaatcaaaatttccatgatggaaatcttcataccagtcgtcctcgttgtagaagccctcctgatgaagctctctgtgtggaggccttcgattctgctcatcttgagcaagatgacgaactgcttcagaggcttcgtctatctgcctttacaggtcagctagacgagccatctttttccttcttcatt

SEQ ID NO: 72388 - DNA, 429 bp, Zea mays
  unsure (1)..(429): unsure at all n locations
gcttatcttcgatgctttgtccatggctgccctaaacagnngtttctattgctatccctgcaaagtttgggtataatacatgttttcacactgcactgggtcagtcactgtttgaggtttcgtatggccacactccatcccagttaggactgtcaaccattgaacaatgtcaaagtgctgatctgcaaacatatctggcaaccagacagcttatgctccaacaggccaagttacatcttcaaagggctcaagatcgaatgaaaaaacaagctgacaaaggaagatctgaaagggtgtttcaagtgggacaacgtgtatttctgaaactgcagccattttgtcagagttcgatggcgagcaggttgaacgctaaattgtcattgcgctattttggaccgtttctgacacacagcaagtgaactcttggat

SEQ ID NO: 72389 - DNA, 492 bp, Zea mays
  unsure (1)..(492): unsure at all n locations
agcttctcctgtccggaataatctacggtattgcggacagtttattattatagtnngagatgaacctttggcacctgtataacatgtaatctagagcaaactagttagtccaatttatttgtgttgggcgattcaaccaccaaaactatttaggaactaggtgtaagcctaattccctttcaatctccccctttttggtgattgatgccaacacaaaccaaagcaaatataaaggtgcataattgaactagtttgcataatgtaggtgtaaaggttgcttggaatttagctaatataaacacttacaagatatgcatggattgcttcttcatctttaatattttggaccacgcttgcaccatatgtcttgtttttgcaaatacttttgtaaatccttttcaaggttctttttgcatatagtcaaaggtaaataaatgagaatttgcaaaagcattttcaagatttgaaattttctcccnctgtttcaaatgc

SEQ ID NO: 72390 - DNA, 438 bp, Zea mays
agcttctaaagggagaacacatgttgggactaacaaaagttcatgtttttttgactagacaaggaccgcatgttatgcacggaagcaagttggcgttcaccatccacataagaccatcttgaggactgacaggtcactcgagctccgacacatggatctatactgcccgattgcctacataagcatcggcgggagtcagcaccgcctacatattgtggatgactattctcgcttcacttgggtgttctatttgcaggagaaatctcaatcccgagagaccttaaagggattcttgagacgagctcaaaacgagttccgcttatcgataatgaacataagaagcgacaatggcactgagttcaagaactctcaaatcaaaggcttacttgatgtcgagggcatcatgcatgagttctcttcttctacacggacaacaaa

SEQ ID NO: 72391 - DNA, 434 bp, Zea mays
  unsure (1)..(434): unsure at all n locations
aaagtgggagcgctgagagancnctaagcttgtatgnggangacatatcattgattgtgaacgacattcctatgctggagtccgtcaaggcttcactgatcaagagattttctatgaatgacttataggaagcagtatatatttcgggcataaggatctatagagatacgtccaagaggcttatatgattaagtcaagatacgtacattgacaatgttttgaaacaattcaacatggaacatctcaagacagggttcatacctatgtcacatggtaaacaccttagccagatgcattgttctgcaaccgctaatgagcgggagcgcatgagtaacgtaccatacgcctcatcaattgggtcaatcatgtatgccatgactagtacacgcccagatggttatacgctataagcgcacaagtaaatccatgctgat

SEQ ID NO: 72392 - DNA, 515 bp, Zea mays
  unsure (1)..(515): unsure at all n locations
gcttccctttaacccctgtacgcgatacacccttcattggtgaaatcntatgtanacanaaacgcctaccagaaaacttattggttggcgacctcggtctgcataactcttttgccgagtctgagctttctctatattatgaataattttctgaaccttttcttcgacctcttttaccatatcaagcctaaagaagtacctttctccaagttcagaccaatttagcggagttcgacaccgttgcccatacaaagcttcaaaaggtgccatcttgatactttcttgataactgttattgtatgaaaactccgctaatggcaaacattcatcccatttctgtgagaagtccagaacacatgcccgcagcatatcttccagtatttgattgaccctctcagtctgccactggtttgaggatgataagccgaactgtggagtaatttagtacccaaggatttgtgaagttcttcccaagatatggatacgaattgcgatccatgatccgacactatggt

SEQ ID NO: 72393 - DNA, 425 bp, Zea mays
atggcgagtacatacaatagtattataatcataatattcaacgtaccgtattataacgtataattttgtctactgtggggccaaaaggaaacaaatacattggatatgtttgagatacgtgtagcgaggacatacacaagggctgtaatgaataagattcacgagtctttgaaatatgctactgcatacaagatatcacatgatccagatggtggtgtgaatgaatgggtggttcatcatacttcaaggtcaaataagattgtgggggggcaacaccaattcatagtaatggctgatgtaaatgctggaaagtatgaatgtgaatgcaagcattgggagcatacaggtatttcatatcgcgtaattgttgataaaaatgtttaattataatgagtgaacataaacgaaaaacatttttacatgct

SEQ ID NO: 72394 - DNA, 483 bp, Zea mays
  unsure (1)..(483): unsure at all n locations
tcaagcttctccacgagatgatgttgatggaccaacctgattagtgnattctaaacaaatgccaagacaaaggatggtcgccaagtgatcgacgtctaacatacactaacgtattgttttttctaggcaaggccccggcgcatttgccacctccttgctgttttaaaatctttatcaccttatatgatgcattacgcgataggagttgtgtgctaaacaatagatgcatttctctccttggaaaatagaatacccttccttgatacccttttatgataaggagttntatgatgcttatccttgctttagataaataaaatgttttgttttaaaaacaaaaggtgatgcttcacagtggatgggaatntttacaaagaaaagacttatgatggtggatccatcacgaccgatatgggttcaacatctgggaagatgcacctctgccaggtaccaaactttggatttaaataatatagctgaatc

SEQ ID NO: 72395 - DNA, 503 bp, Zea mays
  unsure (1)..(503): unsure at all n locations
aacgaagcctatgctcctatgtgaatatatagcagatcaaagggtactactgggatttcagttatttgatgagcaagaaaaaaccctgataaggtttttattcaacaacaaagatgtcttcgcttggacagccaacgatctttgtggtgtgaacagagatgtcatcgaacactcacttaatgtggatccttctttcaagcctaggaagcaaagacttcggaagatgtctgatgataaagctgaaggtgctcggaacgaagtaaagagacttctcagtgctagtgttatcagagaagtaacatatccagaatggctagctaacactgttatggtgaataaggctaatggcaaatggagaatgtgtattgatttcacagatctcaacaaatcatgcccaaaggacgagttcccattaccaagaatagattcccttgtagatgtaatancttcttctgagctcatgagtctactgaactgctactcacgctatcatcaaatttgag

SEQ ID NO: 72396 - DNA, 462 bp, Zea mays
gctcggctgcatattttttttgtggccatagaatcctgacctgaagaccttcccgactagtgttctggatgttgcatgtattccacattgccctgcatggacttcctccagaagttgtttcccggtggacgggagaacgcacttcatgaggacgcctgacgcgcccctcctgtataattcctccccaatgagtgtatagtgagctgattgtctggcaatgcgctctgccgagttcttgtcatctggttcctcttcattctttatatacttaataattggttgtctccagtcatcagagtctgacttgggttgatctatgatgttgcactcttctgtttgatccattgagatactcggctgcataatttcttgcatgaaaactccatgtgggacgtgatttcgaccggatccgagtttggacagtacatcggctgccgtgttccgatctctttctacatgatg

SEQ ID NO: 72397 - DNA, 472 bp, Zea mays
atactcaagcttctaaagggagaacatgtgttaggactaaatttgtctattttgagaaatacaaaccttgtgcagcatgtcaggcaaggaagcaagtgggaacaaatcaaccaagcaagaacgcgatgacgacatcaagaccaccgtaacttcttcatatggatctcttcggacccattgcttaccttagcatcgggggaagtaagtatggtcttgtaattattgatgatttttctctcttcacttggatattctttttgtaggataagtcagaaaaccaaagtacattaaagcacttactaaggagagcccaaaatgaatttgagcttaaggtacagaagatcaggagcgacaatggatcagaattcaagattcttcaagtagatgagtatcttcaggaggaaggcatcaagcatgagatctccgcccttacacgtcacaacaaatgatgtagtatagaggatgaacatga

SEQ ID NO: 72398 - DNA, 508 bp, Zea mays
aatactcaagctttcagccgggccatacgacgggcgccgttctctacccggttccgaaccccgactaccatcaccaagtactcgggggaaacaaggccataactgtggctcgcggactaccggctggcctgtcagctgggtggaacggatgatgacaacctcatcatccgcaacctccccctgttcctctccgacgccgctcgggcctgactggagcatctgcctcctgcgcagatctccaactgggacgacctggtcaaagccttcgccggcaacttccagggcacatacgtgcgccctgagaactcctgggatctccgaagctgccgccagcagccgggagaatccctgcgggactacatccgacgattttcgaagcagcgcactgagctgcccaacatcaccgactcagatgtcattggcgcgttcctcgctggcaccacttgccgcgacctggtgagcaagctgggtcgcaagactcccacacaggcaagcgagctgatggaca

SEQ ID NO: 72399 - DNA, 367 bp, Zea mays
  unsure (1)..(367): unsure at all n locations
cttaccgcatttgaagcatgatcgcttcccttggctaatcnngttggcggacactgcaaccttgaacaaccgtctggaatctctggataatgagggccatttcttcttcattaaaaccgaccgcctcaatttgcgccaccttgctaggtagcgactccttgctccttgttgcctttagagcaatgggttgagactcgtggagtggactcgtcaacgcgtcgtcgacgtatcttgcctccttgatcatcatccgcccgctcacgaattttccaagtacttcttcgggcgtcatcatcgtgtacctgagattctcacgaatattgttcacgagatgatgatcaagaacggttaatgacctgaccttatg

SEQ ID NO: 72400 - DNA, 428 bp, Zea mays
gcttctaaagggagaacacgtgataggtctaactaatgtttcctctattaaagaagaccttgtgcagctggtcaagcatggaaacatgtgggaagctctcatcatgccaaaaatgtgatgacgacatcaagacccctggagttacttcatatggacatcttcggactcgtcgcctatctaagcataggaggaagtaagtatggtcttgttatagttgatgacttttcccgcttcacttgggtattctttttgcaggataaatctgaaacccaagggaccctcaagcgcttcctaaggagagctcaaaatgagtttaagctcaaggtgaagaagataaggagcgacaatgggtccaagttcaagaaccttcaagtggaggagtatcttgaggaggaaggaatcaagcacgagttcttcgctccctacac

SEQ ID NO: 72401 - DNA, 548 bp, Zea mays
  unsure (1)..(548): unsure at all n locations
agctttctcaatctatcttgttgcttatcaaatatactttatcttatattgttggctcaactcaaaattttaaacttttcattcccttttgcttattttcttgaattttgttcatggggttcacttagagttcttaattagggttgcacattcttatcttttcaaggactcaattgttttgatcatgacacttttaaacatatacttggtgaattctttgtcacttaagttattttgatgctcatgcttactttggttcacaggaagtaatggctcttggtgtggctttttaagagaaaccctangtgacactggggtgtcacactggtgcaagagttcttagcttttagagtgttcccaactttgaaagagtgggacatgccgaagctcaagggagaaaagaanaagaagaacttgntcggctgccctattactataaattcaagaaacatttcaaagtaccttgctaagaatggttagacaccaattgaagtatgtgcaacaatattcttggcaattattctatataagaagatcaactaatgact

SEQ ID NO: 72402 - DNA, 335 bp, Zea mays
gaagcaaggagccagaccatcagccacacaagaacgggaaactaccgcaggccgctcgaacgacgccacaaggagctaacaacccccacggacgcacaagcgacgccaggagcaaacacagcaccgtaacaaggaagaacaagcgagcgcaaatgggcacccgaccacaggaaaagcgaaacccagagaccaaaaggaatccagagacgacccaaggaaaacgccccggggccaaatcgaagaacgacccgccacggaacaagacccaaaaaagcggacgccagagaggagggagaaagcagagaaactacagcgacacgcaacacaaacggaga

SEQ ID NO: 72403 - DNA, 505 bp, Zea mays
ttctaaagggaagaacacatttgggactaacagaatgttctatttttatatagacagggtttgtagcgcatgtcaggcagggaagcaagttggtgttcatcatccacacaagaacatcatgacgactgacaggccactcgagctcctacacatggatctattcggcccgattgcttacataagcattggcgggagtaagtactgtctagttattgtggatgactattctcgcttcacttgggtattctttttgcaggaaaaatcccatacccaagagaccttaaagggattcttgagacagcctcaaaacgagttcggcttaaggatcaagaaaataagaagcgacaacgggatggagttcaagaactcacaaatcgaaggcttacttgaggaggagggcatcaagcatgagttctcttctccctacacgccacaacaaaatggtgtagtggagaggaagaatagaactctattggacatgtgcaggaccatgcctgatgagtac

SEQ ID NO: 72404 - DNA, 426 bp, Zea mays
ctgacctgaagaccttcccgacttgtgtcttggatgctgcgtgaattccacactgcccggcatggacctcattcagaagtcgcttcccagtagatgagagaatgcacttcatgaggacgcctgatgcaccccttctgtataatgtcttcccaatgagtgtgtagtgagccgactgtctggcgatacgctcggctgcatttttgtcatccggctcctcttcattctttatgtacctgatgattggccttctccaatcatcatagtctgactctggttgatacacgatattacactcttctgcttgatctatagagatgctcggctgtagtatttcttgcacaaagactccacgtgggacctgagttcgactggaccctagtttggacaatacatcagttgccgtgttccgatctcttttacatgatg

SEQ ID NO: 72405 - DNA, 491 bp, Zea mays
  unsure (1)..(491): unsure at all n locations
tcaagcttcatcttgtgccgcaatactataactagatctatgtgttgtgtcttancaacaagaaaaggctaggataaatgatcatgcacaagtgtggagaaactcctgagagattaaacctacaagatggaaagtacaccacaacagggtaaaggtacaaaaggaagtgttgatattttgcgtatttgtacctaaattttcctccaatacttgtggtgcatatgtctactgagtaagggggagcaatgtttgtgtgttgtattttacctacttaataacctgctgtcccttgacatcatcctatgctcttgcttgaatgtggttttggtgtttgatgtcaaagggggagaattttgtgcattaaagcttacgtttccttgagttcctaggatcaatgtgttagtatgagctattgatattccttggatattaaagaaagatgtgaaggaagtgatattttgtatgtgtcatcgataattcttatcatatgc

SEQ ID NO: 72406 - DNA, 538 bp, Zea mays
  unsure (1)..(538): unsure at all n locations
aaactaagcttatgggcccattgggcaaaggggtctgttcttttgctagntcgagcaccgatctcgtgggcctcatggaaccacttcggtaactcattgtggccccaagtccaaccatcgggcctccctttcttgagctacagatgttccctcacctgtcttcttcatgcacgaaaacatccacctgccagacttttgtcttcgtgtgcggcaacgacgacaatccacggttctctttcgtcaatctcgtctaccatcctcatgtgcttgtagtcgtgtgccttgtttcattttcctgtttgcctctacttgttgcccatctgttgaggctcctctggcatgtttgttcattgacatgcagaggttccatagaatcaatattgatgcagagatcttggtaattgttcctacactcacactgttgttgatcaaattcatttttctcgaacacgcaggagagtngtgtatcattatattaaaagacgtanaatggggaataccccttagaaaggctacagatcaccacaacacccactac

SEQ ID NO: 72407 - DNA, 537 bp, Zea mays
aatactcaagctttaggggaaaagtcataaaatggccccatgtattttctttattcacctttatacccctaaggtaccaaaaaccctaattggaaccctgaaaaaccctaaatccaaaccctacgggcttatgtgcaaaattagtccacttttggactaaagtgcaaaaaccaagtttaataagtatcttaagtcatttgggtcactcatatgtgaatttacaaacaaaaccctgagttttggacttacttgcaaaagagccacatttgaactcttttgactaagtctaaatttcagtgtattgtgctcaacttttgagccttgtaattttcaaactctagggtgtttgccctatgtcaccacataaaatttgtagaccaatcatgggagaacaactttgcttaatgatgtgagctcagtttgtaagaaaatttaggagatattgaaacccaaaggttgactctcaagcctgatcagactgaatttcagatggacagtgactcggatacaagtttgagagccagcttaatcctgatc

SEQ ID NO: 72408 - DNA, 499 bp, Zea mays
  unsure (1)..(499): unsure at all n locations
agcttatctcggcgtgctgccgcattttggtttatggaagtatcttatcactgccgtcctgggatggccggggggcaacatcagttggtcggaggtgccagtttagagatgcgtcgtgggcggaagaccgagtatctcgagatacccctcaaagatagcattaaaggttggcgtctggagtggtttatagttgataattatggaaattctctcccctcccggtcaggaagacagccagacgttcgtactccgagttggactgagtctcccacggatcaagaagtggccgaggcaggcgtgttgcttactaaagtcggattactgaaagagagaggtctgactgccgaagctgtggtcacagattttgttttcaagaacattcagccgctgaaagacagggcctatccggcatatctgtatcgagggctggccgactcaacccgagttaccaataggagaattccttcntgtgacttggtaagccgacttgagatgatcc

SEQ ID NO: 72409 - DNA, 477 bp, Zea mays
  unsure (1)..(477): unsure at all n locations
agcttccctgcgcacagcttcggctgtgcaccatccttcgttttcttggtatcagcccgtccttcgtctggttcaggcttcgtcctgaccgcacttcatgttcgtaattctgagtccgaaggtacctgttcacataatccacttgaaaaacattgttaaatcatgtttttgaggaccttcggaggacgaaggcccccaacagtcggtgcggcgatttggtcagggttgcttcttggcgaagacagggcctcgggcgagccggaaatatgttcgccgctggaggggggcctcgggcgagacggagatcctccggggtcggctgcccttgtccgaggctatgctcgggcgaagcgtgatcgagtccctcgaatggaatgatccctgacttaatcgcacccatcaggcctttgcagctttatgctgatggnggttaccagctgagaattaggagccttgaaggacccctaatatggtccc

SEQ ID NO: 72410 - DNA, 354 bp, Zea mays
ggccgcctgcgattactgtccacggcaagtaccccagcagccgagcgccccacaagtggactgccataggccgacctccactttcctgctgcatggccgcccagctacagcgcccttcttgcccacacagcgccattggctcttccactcaccaactccaggtctgacagaacagcagatcaccggcgccccatgttcccctgcttggacagcatccatgccgccatgattccttgtgcagcgacgccggtcctaaagacagcaaccccagactccctccgggtcgcttgcatgccacccgcttgacgtattgcgtactcacaatgtcgctacttcattgtcaacatcgcgcaa

SEQ ID NO: 72411 - DNA, 309 bp, Zea mays
  unsure (1)..(309): unsure at all n locations
actaaaagaggacggcgggcgggcttcngttcattttgctgnnctcggaggcgggccggccaatggcgtggacggcacagcacgaggatatatatgctcctcctcctacgcacttgtagagggagtaggcaggaacatggcactgtaggatatatacagtagtacacggcgccattgatcggtgttaatgctactgcgcaacatgacgccacgagtcatgataggcgcctactgcctgtcacgtagccgcgtggcgcgcacagcctagcagtgacacggcctacctgaacagatgaggatgggtggcgc

SEQ ID NO: 72412 - DNA, 483 bp, Zea mays
  unsure (1)..(483): unsure at all n locations
tcaagcttcggcgatggttaaaaattttggcagcgaaacatgatanattgcttgaatgctgtggtaacttcacatctactcgtttgtttatatagtgctgcaggtaagaaggcgaagcgccagaatttttacaccaggcggacacccgctcgcactcgctgcgtggtggaccgcagagaccgaacagtaactctgcaaggtggggccgctatacgttgggaggttgaatcgtttctcgacaacgagctcagggaaggtgtttttcagaccttcggcgctccgaagcttaagagacttttttcacggatcaagctcgttacgaaaaacgatctagcaccgctaaaggggctaatgttgggtttatgcttcgtcgccgaaggtcttataagaagaagtggtcctcggctgaagctgtttgtataagataggcgaaggttcctcttcgtgaagcttcggcattataaaccgacttaaagatagaat

SEQ ID NO: 72413 - DNA, 231 bp, Zea mays
tactaattttatactgtagtagcccaatcatagttatattgacataagcatatatcttactatacctaagaaatttgagtgctatacatacgaatacttatatccagattagtgcatatctatatgtttacctcatagataatacgcagcctattactgtgtccatgttgttatatcaattacattatgcttaaataactactgacaaaatcgggcgatgagctatagcga

SEQ ID NO: 72414 - DNA, 481 bp, Zea mays
  unsure (1)..(481): unsure at all n locations
tcaagctttagtacacggnggcaagttcaggtaggaatggtgtgttatcttgaaagacaagagccttaaggatggagtcgttgatgttaggaggcaaggtgatcgaattatcctaatccgactggtagttggagatgcggctttgaatgtgatcagtgcctatgtcccttatgtaggtcttagtgagagcaccaagaggcagttttgggaagatctggatagcatggttagtactgtgcctatcagtgcgagactcttcataggagacctcaacgactatgtgggtgtgactaatgtaggttgcgagcgagtacacaggggggatcgggtacggtagtacgaaccaagagggggatgagggtttgaacttggcgttagcttatgacctgttgattgcaaatacctactttaggaagagggaatcacatctagtgacctttcacaatggtcaacactcgagccagctcgactttatccttgc

SEQ ID NO: 72415 - DNA, 555 bp, Zea mays
  unsure (1)..(555): unsure at all n locations
tcaagcttaaaacgcgtcagcgagcgacgtgggcagtcgtctattgttctttccccgccccatcaccggcctggtaaggagagggtcgactacgacgaagtggctgcgggagagcgagaactcgggtatcaatcgcccaagggggacctcaaggacgtcttcactggaggttctgactctggagatgacagcgaccgctgcaagacgttgtacgtcatgtatggcgggagctgggagctcacctcccgcaggaacgtcaagtccctgtgccgtgtggccctgtcggcaactccaggggtcccgaaggccgcccctacatcaacgatggagaagccccaccatctcctttgaggcatcctgaaggaaacgggtgacgcctaagagggggggggtgaattatgacttcttaaacttttactaaactaggccacaattaaatccctagagcaaaacctatgcaagaatcaaaactagaatgtgcaaactatggtttgtctaagtgtngctatctctaccgcananggctaagttcaatctacactaaataagtatgac

SEQ ID NO: 72416 - DNA, 355 bp, Zea mays
  unsure (1)..(355): unsure at all n locations
ttataaaggacggaaaaagccgcctttttacctanttggaagaggnctatgatgagcaacctcccggctttgaagatagtgagtaccctaaccatgtctataaactctctaaggcgctttatgggctcaagcaagccccaagagcatggtatgaatgccttagagatcttcttatcactaatggattcagaggcggagaagccgatcctacactcttcactagaactcttgagaatgactcgtttgtatgccaaatttatgttgatgatattatatctgggtctactaacgagtctacatgtgaagaattaataggatcatgacacaataattcgagatgtctatgatgggggag

SEQ ID NO: 72417 - DNA, 527 bp, Zea mays
  unsure (1)..(527): unsure at all n locations
gaatactcaagcttcgtcgtctgaaggaagtaccctgaagttttatatgatctagttctctagtcttcactataaacaggagatatattgaggactgctctttcaagaagctccactgaaggtgcttttattgtttcgaagaacacatccgaaggtaagggcaacccctgtgccgctgacttagctagcaaatcagcatgctcattttctcctcgaggaatatttttgacagaaaatccttcgaaggaggcttcaatcctacggaccgtgtctagatatttttcgagcttcggatctttagccttacaactcttgtcaatatgaccggaaacaacctgngaatcagttttaagaatggcccttctgattcccattgcttttaacttccgaagacccaaaagcagggcttcgtactcagtaatattggttgtgcaactaanatcgagtcttgctgcataacaaagtttaactntggatggtgagaccaacacagcagctgctcctgctctgaaagtccccacgatcca

SEQ ID NO: 72418 - DNA, 450 bp, Zea mays
aatactcaagcttggacttagctaatattggaggtcgtgcctttttctttttttcggcccgtgcgccatggcgaacccctcgttttcagcccatacgcaaggccgaacagccctgccgcccgtcgccgcgtgcctccgtgtcgttttccctccgttccactgtgcccttcaccaaagacatccactttaggttcggtgtgtttccacatgcttggacttagtttattttcgggttcgtgccacagccaccatttccggcctgcgcgccatggcgaaccacctgtttttagcccagacgcatggccgaacagccctgccgcccgtcgccgagggcctccgtgtcgttttccctccgttccaccgtgcccttcacccaagacatacacattagcttctgtgtctttccacatgcttggacttagcttatttccgaggccgtgccccagccgc

SEQ ID NO: 72419 - DNA, 477 bp, Zea mays
cttctatgagtcatgccctcgagcgatgtggataattcattattatctgagcctgcgccctctgcgcgctcgaccgatccacctagcttggttccacgacgtctctttgcctatactgtttggcgcattgttcatttgctattccctaagtgtattgaatgaatgattgtttcgcgtagacaacaagcagtctgagtttctcgagggagttgcaggagaagtccctgagtagtatcttggtgaaggcaagtgtcctctgacctattatgtcctatttagtttaaaattcactttctcacataccatataaacctaaagattgactagctgtctatttatcctgtccttgattacctttttgggttggtctattatgatcaactacatgctagtgctttacttcaatcaacgaacatgatgagaaatacttatgatacgatgattcaccctggttatgattatgaacttatgccactt

SEQ ID NO: 72420 - DNA, 492 bp, Zea mays
  unsure (1)..(492): unsure at all n locations
cttgtgattgtcccccaagtcatcaaccttcacagaagattttttactttntctgcagtattgcgtggatcctttggctgtgacaagggtgatatatctagaagctctaagaatttttgtcttgtgcaggtcctgcaattaataaatgatttgaaccaaagtgttcgagatactgttctcttatattgaggttagttaattccatatttgatactctataggcctactttagttgacatcttgcttttttccacacccataatgactggtgtgatctctatttccattgatcttgtgtattacagccatgctcctacttagagtcattgttctccagtatcttgcttgtgtcaattgtctttctttcgcattaccctgtcggtcacagggttctcgcttagcacaaggaatctgaataattgcttacacttaccccatggtcatggactgatggtagacatgagcgtcggcgtatggtgggcattatgagct

SEQ ID NO: 72421 - DNA, 553 bp, Zea mays
  unsure (1)..(553): unsure at all n locations
cttgaccctaattntgctaagtgtaccacaaaaaccttaagttgttagatttagccctaccttactatattggtcatcccccatcaaattttaattgcaagattgtatatcatgccctgcttatatcttactcattgcattcattagattgcaatcttgctgacgaagagtacgtgctcatccctgagcaaggagctgtccacgaggaagaccaggagcaagctcccgagcctgccaccgaggatctccccgcagccccagctattgaaggcaagcccggttttatgcataaccgtttatatatgctactttactacacttaatgtttgtaggtttgtaatgtgaacttaagtgtaggagttgcttgaaacctttagttgcatgaactcaggattcctttttgagatggatactagtatgctaggtcgagtagctgctatgctaattaggatctcggtagaagtcgagtgaattttctagcaatcgtgcgaggtcaggaattgattgtattcatcttgctaacgggatctatgatggtctatggactcggatc

SEQ ID NO: 72422 - DNA, 415 bp, Zea mays
cctttcgttgcaagcaaccatccgccacaaacgcctgttggcactgcggggaccccagtcatttcaaaaacaactgcccccagttgaaggcaccagggccaacctactccaactcggtgaatggccccaaggttccatcagcacccacccccaaggcgctcccctccaacagccagcagagcaggactcattaccatggcatggcccgggtcaaccacgtcgacgcgcaggaagcccagcatgccccgggagtagtgctccgtgagttcctcgttgaatttactcccgcttctgtgctgtttgattcaagagcatcccactcatttatagccgctaagtttgtggagaaacatggcataccctctacacctctagctatccctttggtcacacgaaccccggagtcagaccttct

SEQ ID NO: 72423 - DNA, 351 bp, Zea mays
  unsure (1)..(351): unsure at all n locations
ttgccttcgcttcagtctatcatccgcagtccaactggagtgntttatcgtgccaaagggaaaagcgtcacagctcataagaagatgctcctcgacgagaaacagggcagatggaccgacttgctaccgtaggcagtctgggcgctgaacacaaccgagagcatggcgaccgggttcacctccttccgccctctatacggatcagaagctatgaccccgcaagaaataaaacatgggttttcgcgcacaggtccgtcagccacccctaacgtggatgagccaaccttcaaagatcttattgacagagaccggtcttcatcctgctggccttatacaaaatccaacccatac

SEQ ID NO: 72424 - DNA, 481 bp, Zea mays
  unsure (1)..(481): unsure at all n locations
ctcgactaagtcggggacaggggcctcatgatctgtgngttagtacgcgtaagcggcaaggccgaccgagccgagggattcccacgcctctgggatacggatacctcactcgtcccttccgcgagaagcaactctcgctcacacaaacatccctgttaccgacagagtccagatgctcgaaacaagaggaaaaaagacgcagcttcgcaagcacggcgagggtgtgttttctggcctcggcggccgcagaaggcacacgctacaagacgatctgatcctgcaggctcgggtcttcacgctgaagggagccgtagcaccctcggcatcgacgacgtcttcagcaaagtccgacccagccttggacggcgacgcggtccatggacccctccgggaatccggcccgagcaggcggctcggccggtacccctggggcctcggcaaccggcctcaagggcgccgcccgacccgggcctcggtgatc

SEQ ID NO: 72425 - DNA, 532 bp, Zea mays
actgcatctataaagcgaacatgaacatcctgcttctcaaaccatacccgtaacgaggccatttgcatgctggggactggacatgattggacccttcaagaaagctcagggaggatacactcacgtgctggttgccattggcaaattcactaaatggatagagtacaaacccatcgcttctctgacttcagctaatgcggtggtaatcatacaagatataatattcaggttcggaataccgaatagcattataactgacttgggatccaatttcactagctcagaattctttgatttctgcgaacaaagaagcatccagatcaaatatgcgtcagtagcacactcgagagccaacggtcaggtggaaagggctaatggaatgatattggaagcactcaggaagaaagtcttcgacaagaatgaaaagtccgcatgaaagtggatcacagagttgccgtatgtggtttggagcctaagaactcatcctagccgagctttgcatggaaacatctccttcttcatggctatggtc

SEQ ID NO: 72426 - DNA, 304 bp, Zea mays
  unsure (1)..(304): unsure at all n locations
tactagctaatcttggccgaatactataactggctctatgnggtggtcntagcaacaagaaaaggngaggataatggatcaggcacatgtgtggagaagctcctgagagattaaacctacaagatggaaagtacaccacaccagggtaaaggtccaaaaggaagtgttgatattttgcggtatttgtacctaaattttcttccattactggtggtgcatatggtctactgagtaagggggaacaatgtttgtgggttgattttacctacttagtaacctgctgtccttgacatattctatgctt

SEQ ID NO: 72427 - DNA, 524 bp, Zea mays
  unsure (1)..(524): unsure at all n locations
atactcaagcttctaaagggagaacacattntaggattagcaatttttttttgagaaacacaggatttgtagcgcattccaagcagggaagcaagttggaacccatcatccacacaagaacatcatgacgactgacaggccactggagctcctacacatggatctattcggcccgatagcttacataagcatcgacgggagtaagtattgtctagttattgtggatgattattctcgcttcacttgggtgttctttttgcaggaaaaatctcatacccaagatatcttaaagggattcttgagacaggctcaaaatgagttcggcttaaggatcaagaaaattagaagcgacaacgggacggagttcaagaactctcatattgaaggcttccttgaggaggagggcatcaagcatgagttctcttctccctacactccacaacaaaatggtgtagtggagaggaagaatagaactctattggacatggcaagaaccatgcttgatgagtacaatacttcggatc

SEQ ID NO: 72428 - DNA, 547 bp, Zea mays
  unsure (1)..(547): unsure at all n locations
ctttgcctcgggcagactaatgccagaatgtgatctctcttttgggagtggagagatggcgagagtagcgtgtaccctccgtggcaagaggctggacggtggtgtatctgtagtctcggtcggcgtaacctgatctggtcttaagaacctcggtggcgagttgacatatgcaagggttaagtgctacatctgtcgtgtgattggagatccctagctgggtattaatcgattcggatcgtcgttgcttcccggacatgaagacttagtcactgacctgcaatctaagtcatggatggaatcttaatgagcaaaaatcatgttggattgattaatgtgatggtgaaattagactagatgcaaacaaggtctattaatacttaatatagcattaaaatgttgaaagtaaggactcactctagtaagctatctctgcanaagtctctaangtgattctttggctaaagcctttccttgattcctatntaaccagcatatccttgagagtcttttctttagtcgggtaagtcttgctgagtacttgcgtact

SEQ ID NO: 72429 - DNA, 269 bp, Zea mays
  unsure (1)..(269): unsure at all n locations
tgacttcatgaatagtgataggtccttgatccgaaggtatcttcatgcaaagataggcaggatgaagaattgcttcgaaagcattgagtgtgccacgaccaataattgcattgtaagggtattccatgtcaacaatgtcaaacacaacttgctcagttctagntgtgttgatgaacccggaaggtactgacatggtgatcttgcccagtgccacaatctgtcttcctcctgagccacagagaggatgtgtagcatcatgaatcttatct

SEQ ID NO: 72430 - DNA, 520 bp, Zea mays
  unsure (1)..(520): unsure at all n locations
acctgattgacctgcagattgtgaaggccatcatggattgcatatgctcgctggagtcctgacagtcgtcatatattaactacatctgatgttcaactccgtctctaccgtgtggctctcgtaaatacagcatgcgtacatgtccagtggccaaaacatggatctaacggtgtttcttttaccaaagatgggaagcttgctgcaatctgtaccacacgtgaatgcaaggattacatcaatntactatcatgtcactcttgngaaatatgactgtctttgtattgcacgganacttactggtgtgaatggcacctatgataggctatgtgttggatcactcttgattacgggctcattctcttacaatcatattgactgcacattatcattcttctatatactggtttatatcttttacggtctgaaaatttcttatatcatatctccaccatttattgacaattctcataccatttatcgatactaatgagtcgtgttactactgtgttatcagactcat

SEQ ID NO: 72431 - DNA, 451 bp, Zea mays
  unsure (1)..(451): unsure at all n locations
ttggtttggcttcgaatattttaagcctattggactaaatatatactattttttaatagataaatttaggacctacaaattggatagtacttttagcattttctacaatttctatgaattcttaccctgtaganaggaaaaggaaaacatgaatgtactcgccgaactggccaatcaaccatacccagcgaaacatacgccctgnttgcaacttgcgcaaagacctgtgattaaatactggaagggcgcagactattctgtgttcactacagtacaatacccctgattctattcttacaacgtaagccaaacgtcgacggcgagacgactcgtctcctgacagcggtactcactacgtgtccggcgtgaacgatgacctatacattcctctcatgacactgcttaatacttgcaaaacgacactagatacacgtgtcgacataccgtacta

SEQ ID NO: 72432 - DNA, 342 bp, Zea mays
  unsure (1)..(342): unsure at all n locations
tttacgactcaacgcatctgccaccacattggccttgcctgngtgataatggatctccagttcataatctntaatgagctcaagccatcgtctttgcctcatattttaactctgatgngtgaagatgtactttaaacttttatgatctgtatatataacagatattacccagcagatagtgacgccaaatctttatggcatgaaccacagcagctagctccagatcatgagttggatagtgctcctcatgccngcgcaacttgctttgagcatacgcaatcactcggccctcttgatcagtacacagccgagcccatttgcatatgcatcacaatatacgtc

SEQ ID NO: 72433 - DNA, 380 bp, Zea mays
tctagcttctacttgatagagaacagattgttagtttattaccctttgtagaccatgcttattggatgaactttactagcttttgtcattatacgcactttacatgttgatgatggagatgaatgacaattatggtggtgtgacaagcaaacctcccttgtcacctcttattcgtgccacgagcaaaaccacagtcaccttgctgacactcaacaagctcacggtccctgcactctatcgacgagccctgaccgcatgacagccccgaaatggtcgccaatgaactttgatacgcgacctctttgaattggtgcaggctgggctctctcatgatggctcgcctaacccgcggctgagtataaactgcttatgactgtctg

SEQ ID NO: 72434 - DNA, 404 bp, Zea mays
  unsure (1)..(404): unsure at all n locations
ctaagcttcaagtttntgctggttcctcgctcagcatgatggtgcgaatcatcttgcaccgtgccgaaacttctgaggatgttgtgatggagcaagaattgcatcctccgcgccacgagtgctcgaccgccccgactctgggactgctgccgtgcacgccgtgcagcatcacacgccagcgcatgtgtcccgaactccgtcgagggcagcgcctacagcgctgtctgcggccagagagttgctacgccaccccctatctccacgacatcatcgggggccatgaagcagtggcgcgacgatgtcgaccggctgctcggcatggcacattctacttcgaccaggtcgaggcctctgtcatcccggcgccaacgcgaggcgacgacatctgtgcgctcgccttccgt

SEQ ID NO: 72435 - DNA, 358 bp, Zea mays
  unsure (1)..(358): unsure at all n locations
atgctagtcntagctattaagcatgcatctagaccggcctcttctttntgcaaatcaactaaataatgtttggcgtctaatacacccttataagctaatgaaccatcgcttcttctatagacagacacatctacatttgtacatagacagttataccccatatgacataattgactaacagatagcagattatatgcaagactctctactaagactcattagagatagaatgctcattagaaatggcaatgttacctaaacctttaccttgccttgatcccatcaccgaatacaattgaatcttgtgaatccttatattngacgtaggaggtgaatatcttcttctctcccgtcatat

SEQ ID NO: 72436 - DNA, 196 bp, Zea mays
gattgctagcttagtgagcagcacacgtgctacccttaccttatgatgtgctcttcgaaacaataaaagcaccttcagtggaacctgttgaaagagcaagcctcaatatatcattctgttatagtgaagactggagaactgagatcatctcttacctttcacggaacgttctgtcatatgacgaaacttataacag

SEQ ID NO: 72437 - DNA, 345 bp, Zea mays
catttgtctgataatgctgttgtgttctttttctgacgcattcatgctctttgtgttgagaaattgatttgccatgtccgaagtcgaaaccactattaaataggattcattcttttcttctctgtttagagtctcttttcgctgtgtctctgtggcagacgtcattcttctttttcttcttttctgagtactctctgtgacaacgagttaaatatttggctgttataatagcaccacacattatgacccatttagtttctgtctgagagtatcatgttcagctactgtgcaggagaactgtcacatatgaacaaacatctgtctacggtatataaagtatgattc

SEQ ID NO: 72438 - DNA, 456 bp, Zea mays
  unsure (1)..(456): unsure at all n locations
gcttcttgacttccgtgaacagcaatgggctcttgttccgaaggtatcttcatacataagtacgttgtgtgaagtatggattcgaaggcattaagcgtccctcgaccaatgtgtgcattgtatggatattccatgtcaacgatgtcaaagacaactctgtcataccttgtgttgtggacatataccgaaggtaactgacattgtcatttttgccaagtgcacaatctgtctccctccgaaccataaagaaggtgtgttgatcatgcatcttgtcttctggttcttgcatctgtctgaaagcctttgcaaatacgaatgtcgctgcactgcctatgtcaaccagaacattgtggaccagaaattcntgatacacaagattaacatgcatcatgtaggatagcttaactaaaacatctggagaaggatggattgaacactgactatgaaggctgccca

SEQ ID NO: 72439 - DNA, 356 bp, Zea mays
  unsure (1)..(356): unsure at all n locations
atgatgtggccaaagacatttgcatgctctatggcttggatactganaaagtaatcatgtttgtngagaacaggcccttcaatgaccagaggtacttcttggatgatcagaagcttaatagactgggatgggcagagcgcacaccatgggaagatggcttgtagaaaacaatctagtggtcaccacccatcctgatatctgggagatgtactggtgctttgctcctacccaagatgttgtgatcctgagttgaaggataactggctgagatataatctctgattttcacactgaactacacaacagtctcaccagtgcaaaggacatgtgtcctaaaccttgtcagtctaattatg

SEQ ID NO: 72440 - DNA, 381 bp, Zea mays
  unsure (1)..(381): unsure at all n locations
gagcttatactgaaatgctaggtaaacaaggagcttctccaagctcaaacaactntaaaggagacatcagagtgctttgaacaggagaagaatgaactgcaagtgaaatataaagccgaagctgatacaaacacgaagctgcaggaatctctgagggatcttcagaacaaatgctnggaatttgctagccgcagcgtgcaacgggtaanaggagtcttcagatcggttggggccagttctaaagaaattgccccttcggctaaagatatatcanataccttcaagcacatcgaagatgaagttgatgcactcgatgaagtaataactgggcatggtgacttctgtgctctgttagcttctcgcggcacgactgctacattc

SEQ ID NO: 72441 - DNA, 286 bp, Zea mays
  unsure (1)..(286): unsure at all n locations
catgcaaagcgggtcttatcaagtggcttagtgaanatatacgctaattgatcttccgacctcactccttctaaaatgatatcacctttagcaacatgatctctaaggaagtgatgacggatatcaatgtgcttggtgcgagagtagtgtacaggattattatgcaatttaacagcactctcattatcacagcacaaaggtaccttttctagaactacgccatagtctagaaaggtttggttcatatataanatctgtgtgcaacaagcacccgcgacaatgtatt

SEQ ID NO: 72442 - DNA, 476 bp, Zea mays
  unsure (1)..(476): unsure at all n locations
tccgagcccgcatctgatcgtggtgaccgtcacaagttggagttcttctgcagtccgaatacagcatgttcaaatccttctctctttcagtctntctcctgattgctaagcanaacaagagtgcacgggtctccatggtctacatatgatggacatgaactcaagagtgtaatcacctgatggttgagttgacgagcacgagcgcgagtaatgggaccagaaattggtactcgtatttgtatagatgcatcagtagtgtggatgtcttcatcaccgctaacctagagtagaatggtcgctctaaggattatagacctctgtccctgccttgactatggtatccacttcacaagtggtcatatcgaccaaaacctatgttctactgtatattataccttgctgagacatgngtttattctaatcttcattgattatggggtcatacttgcggtcatactagatctgtctcactcttt

SEQ ID NO: 72443 - DNA, 381 bp, Zea mays
  unsure (1)..(381): unsure at all n locations
gactggtgatagcacgacagctactgaagctgcaccttctgaagcagaagatattcattttagaaagcatggtgttgatatagataagatattattaaacatggccgcggaagaagctgccgcagccaccgaagagactgcggccccaaggcccgagaaggagaaagagatggccgaatacacttcggaagatgaagcttttaactntcaaaacttagttggtcaagagctgacgaaggctganaaagaagagctaaaggaatatgctatatcttgcggatatcggccgggagcacttctcttcggtggcatcgatgacgaaagggtgggctgcgtncgggatcagactggtgcganagtatcggtcgctatcaagagatc

SEQ ID NO: 72444 - DNA, 320 bp, Zea mays
  unsure (1)..(320): unsure at all n locations
tggtctccatatggacattaaagcctcttgaagctcctaaactaagaactagagcttcaagttactatcttagcatgtntatgactactgacccactatacataaatacatatgcaatacatcatcttcatatttatatacaccaaacaaagcatatcattgcttctgatgagcacaacttcatagcttcgtaaaataacgaagtcatgagagatgctctatgtagcaaataactcgaatgccaagattacttagaagcatttaagtgctacataatanggaagctatagcctngacttaccagtgagcatggtctatct

SEQ ID NO: 72445 - DNA, 254 bp, Zea mays
  unsure (1)..(254): unsure at all n locations
aatcattcaccatccaaggttaagtgctagctttcaatcataccatgcatgtatcttactcattgcattcattagattgcaatctggctgacggagagtatgtgctcatccccgagcaaggagttgtccacgaggaagaccaggagcaagctttcgagactaccatataggatcctcccacagccccatctattgaaagcaagctccagttntatgcattaccgtatctatatatgctacttactacacttaat

SEQ ID NO: 72446 - DNA, 398 bp, Zea mays
  unsure (1)..(398): unsure at all n locations
ctcagctgccatacctgtanagcacagcacatgccggcacagcagctacagaccataccagtaacttggcctttcgcatgctggggattggatatgaatggacccttcaagaaagctcaaggaggatacacccatgtattggtagcaattgacaaattcactaaatggatagagttctagcccattgcctctctaacctctgctaaagccgtggaattcatacaaagcataatattcagattcnggataccgaacagtatcatcactgactngngatccaacttcaccagttcagaattcttngacttctgcgagcaaaagagcattcagatcaagtacgcatctgtagcccatccgagagccaacgggcanggtgagcgagccaacggaatgacatt

SEQ ID NO: 72447 - DNA, 297 bp, Zea mays
caccactgctggagtgaacaagcctgtggatggcgaaactgagatctgtatgctatgccacaaggaaggccacaagtcttaccagtgcaatgcgaagaccgaggatagctcaagcaaaagccaacaagagcaatctccaacacctacatcgacaaggtggataaaaaggctgctacaccatatctatatcaaaagaaaaagaatggaaaggtgatagcaataaatgccaacaagcaagccaacaaaggaaaggtggtcaaacgcatctggatgccaaaggaaactattacaaccatg

SEQ ID NO: 72448 - DNA, 144 bp, Zea mays
tcctgacttccatgaatagcaatgggtccttggtccgaaggtatcttcatgcaaagatatgctggatgaatgaatgcttcgaaggcattgagagtaccacgaccaatgattgcattgtaacggtattctatgtcaacaatatcg

SEQ ID NO: 72449 - DNA, 236 bp, Zea mays
  unsure (1)..(236): unsure at all n locations
gaaacaggtgggaggctctcatcacaccagaaatgtgatgacaacatcaagacccctggagctgctacatatggacctcttcggacccgtcgcctatctgagcatangaggaagtaagtatggtctaggtattggtgatgactattcccgcttcacttggggtgtctttntgcaagataagtctgatacccaaggaccctcaagcgcttcctaaggagagctcanaatgagtttga

SEQ ID NO: 72450 - DNA, 138 bp, Zea mays
  unsure (1)..(138): unsure at all n locations
tgatcctctcacaagtcctaatgcgctagangtgaattggggactntgagcggatcgatcacttgaattgtgtctttggagtggagtctattgctcttgtaatgaatgcaatgtgttgaatgcttggatggntggagt

SEQ ID NO: 72451 - DNA, 293 bp, Zea mays
ggagattctctgggagtcatcagccagattaacaaggaatgggattgctcaagtgattcaatgggaaaatactgcgcttgcgtccgaaagctggaagataaattctacggtctggagtttcatcatatataaagagatcggaacacggcggccgatgtactgtccaagctcggatccagtcggactcacgtcctcgcccgagtcttcgtgcaagaaatctctatccgagtatctaatggatcaaacagaagagtgcaacatcatagatcaacccgagtcagactctgatgact

SEQ ID NO: 72452 - DNA, 242 bp, Zea mays
  unsure (1)..(242): unsure at all n locations
ttcttttcacacttcataaagaagaatcccttttttgccgaagcagcattatcaaactcgaaggtcttgacatatgtccgtcggancaaccggtgaagttgcagcatcctttcgtaattctttgtcatagagacgctcaacgtcgtatggtattcattatcgacgaaagaagcatttcccttttttcaactgtctgaatgatgcaagatgatgaatgatgcaggatgatgtgatgatatgat

SEQ ID NO: 72453 - DNA, 319 bp, Zea mays
aggccttactgccggagcggacgggactgtgagatggcgtggtgacatcgctctaattgtatgcgtctccagcccaagagactcatatggctggctcggagctatcttctgacccgggatttccccacccgactggtattaattcgcaaatctagcatggctgtgacagaagtttggattgaacatctactgctcttgtttatcaatggttttaatacctgagcaattttgagatactttggcccaggcctgggaccactatatttaatactcagcttttctttgaacttttgcactagaattttgttgtaagattttg

SEQ ID NO: 72454 - DNA, 168 bp, Zea mays
gaccttgtgcagcttggtcagcacggtaacaagtgggaggagcacatcacagcaagaatgttatgaccacttcaagacccctggagctgctgcatatggacctcttctgacccatcgcctatctgagcatatgagggagtaagtatggtctagttattgttgatgact

SEQ ID NO: 72455 - DNA, 402 bp, Zea mays
  unsure (1)..(402): unsure at all n locations
atgtgggagttcgcaagagaaagggtatgcgtgtggcatcgatgcttcttcaataagctagntgccaagcgaaagctagaagctcgaagatgatctttgagtagccagaatcagctnttgcaatcagcagccggatgctcctcaaaagccagatttggttgaagttcatctcctcgaagaagtganagtgaagatatgagctgaagtnagctatcccataacccttcaagccgaatctcgggacgagatcatttaagtggggtagattgagcatccananattcaatcttgaatttctcaacttgccctaatcaaatgaattcaagttcattcaaatgttggttgcagtgaatcacaatcaaatagggcttatatctcaaatctctcnatatctcaaattcc

SEQ ID NO: 72456 - DNA, 139 bp, Zea mays
acacaagaacatcatgacgactgacaggccactcgagctcctacacatggatctattcagcccgattgcttacataagcatcggcgggaagaagtactggctagttattgcggatgattattctcgcttcacttgggta

SEQ ID NO: 72457 - DNA, 120 bp, Zea mays
catggatgtaactttacacgggctgcgttctgtgcctattaatagatgaacaatagcaccgtactattcaagctgacatgtattcactcgcacgtcacacttggatatttacctttcatc

SEQ ID NO: 72458 - DNA, 368 bp, Zea mays
  unsure (1)..(368): unsure at all n locations
gaagatagtgagtatcctaaccatgtgtataaactctgtaatgcgctntatgggctcaagcaagccccaagagcttggtatgaatgcctaagagaattccttatcactaatggcttcaaagtcggaaaggtcgatcctactttatttactataactcttgacaatgattagttcgtatgccaaattatgttgatgatattatattcgggtctactaacgaatctacatgtgaggaatttagtatgatcatgacacacccaatcgagatgtcgatgatgtgggaagtgaagtacttcttacgaattcaagtgaagcaactgcaagaaggcaccttcattagctcaacanagtatattcaagatattcta

SEQ ID NO: 72459 - DNA, 170 bp, Zea mays
  unsure (1)..(170): unsure at all n locations
gcatgtcaagcangaaaggaaagtggcacccaccatccacacaagaacataatgacgacggatatgccactcgaactactccacatggatctattcggcccgatagcttatataagcatcgacaggagtaagtactgtctagtaattgtggatgattattctcgcttcac

SEQ ID NO: 72460 - DNA, 303 bp, Zea mays
  unsure (1)..(303): unsure at all n locations
cggtaatgatcttctcatatccattttatctatggtcgctagaatgccgaagctcataatccaatcaatatcgatgaagcaaggaaggttaatatggcaaacacaatgcaagcaactcatatagcacgaaataatactcacaacatcggcttctatctatatgcttagagcaccacagaatggtgggtcccacaagttagtgtgattcgctattctagcgaagggaaggtgtnttcngaccttcgactatatgccttcattcacgtcgcagtctaaatttgttacatagaaacaacttaatac

SEQ ID NO: 72461 - DNA, 357 bp, Zea mays
  unsure (1)..(357): unsure at all n locations
ctcagcttacacctctgactaactcngctgcatcgttcttcgccgtcagccaatataatcctgactctaaaacctttccgactagtgttctggatgctgcatgaattccacattgtcctgcatgaacctcctccagaagntgcttcccagtggacgggagaacgcacttcatgaagatgcctgatgcgcctcttctgtacaattcctccccaatgagtgtatagtgagctgattgcctggcaatgcgctttgctgagtcttggcatctgggtctttctcatttcttatatacttaataatcggccgtctccagtcatcagagtctgactcgggttgatctattgatgtgcactcttc

SEQ ID NO: 72462 - DNA, 364 bp, Zea mays
  unsure (1)..(364): unsure at all n locations
atgctagtcttagcaattaagcatgcatctagaccggcctcttctttttgcaaatcaactaactaaagctggccgtctaatacacctttaatagctaatgaaccatcacttcttctaataacagacacatctnatgttgtgaataaacagttatatcccatattgcacaattgactaacagatagtaaattatattccagagactcaactaagaacacattagagatagagtggtcatttgagaatgcaatttacctaaccctttaccttgcttgattccataccgaaattattgatctgggaatccttggtgacgangagtgacatcttcttctcccgctatggttgtgcatcgtgcgatatc

SEQ ID NO: 72463 - DNA, 218 bp, Zea mays
gcctcgtctggcacacacaaaccacataattctatttttgccaacaagctgatagttattgacctgtttcccggggcactcatgtccaataaatcaaaatctgttaactcggtacaacatattaactaccatttgacattattataacggatgactgctaagtaactgacaatactactcttgataatcatatccggtaacagagacgtgaaagtatt

SEQ ID NO: 72464 - DNA, 392 bp, Zea mays
  unsure (1)..(392): unsure at all n locations
gcatgcatctagaccgacctcctctntngctatatcaactaaataaagtctgccgtctaatacacccttaaaggctaatgaaccatcacttcttttaaagacagacacatctacattagtgaatagacagntataacccatattgcacaattgacttacagatagtatattgatccaagagactcaactaatacacattgagaatattatgaatatattgaaatagaaagtgatcaataactcactaaaaccatagtgctcatggaatgaatttactacctttactgcctggtccatacaaatatgaactggaatttgtttactagaggacattcttcccgctatgtggctcgtgcatatcactgacccgtctaactgagaaatagtggcta

SEQ ID NO: 72465 - DNA, 445 bp, Zea mays
  unsure (1)..(445): unsure at all n locations
acacgatttgaagatatagattgtccgatcagatcgtggggggaatactatgggtgccatactgagtatgggcatgtaccaggacctttcgcgagggtnctaagagaanatagtattgttgctcagtattcaacacctggcgaaccacaacagaatggtggtgccgaaagaagtacagaacgctatggatatggaanggagattgctagtactctaactgcattgggctatggtggagcttaaaacagtatgctatctcacagagtcctagtaatcagggtaaactccttgagtgggctacaaaaccccctcactcttcattatgtgtgtcacagaactgatattatctgacaggaactnatgaaaacatactgcattattgtactgcagatcaagtcaatctatgctgcaacaccagtctaaacaatgcttttaacatactaca

SEQ ID NO: 72466 - DNA, 152 bp, Zea mays
  unsure (1)..(152): unsure at all n locations
acaagtgggaggagcgcatcacagcaagaacgtgatgaccacttcaagacccctagagctgctgcatatggacctcttcggacccgtcgcctatctgagcatangatggagtaagtatggtctaattattgntgatgaactttcccgcttca

SEQ ID NO: 72467 - DNA, 410 bp, Zea mays
  unsure (1)..(410): unsure at all n locations
gtctcgtcctcttgagaagatcacgtccacataaatgtctgtctctagtcttatcccaatatacaagagtcctacacttcgtgtcatacagagtctcatacggtaacatcttcacattgtgctgcgaactattattatatgagaactcagcataaagtagactcttgtcccaactactaccatgctgaatggcacaagctctcaacacatcatccaatacttgattagtcctttcagtctggtcatcagtctgatggtgataagccgtactanaattcaactatgtactcatatactcatgagagcttctncaatatactgaggtatactgtgaacctcgataagacacgatcttctttggtactccatgcaaacacacaatcagagccatatataactctgctagctga

SEQ ID NO: 72468 - DNA, 483 bp, Zea mays
  unsure (1)..(483): unsure at all n locations
gactatagatgaatgcctattgcccgcgtagcttgattatgatttaagcatctgtaaggccatgaatgtaatttctcacaggctgcgttctgtgcctattaataagtgaacagtacccncgtactgttcacggaatcttgttatcgcttgcacgcgacactcggatagttgcctctgtcaagatgaaggtattattgtgatcaaatgttatgttataatattcaaattggatgatacnaatatgaataacttatgcggcttgtatattattctttcatgcttatatttatattcatcttcattattataactctagccaaatgatgacttctgactttgtctgacttgtcaagtatttacctgggaatatgtcacaacaaggctacattacattatggctatctattcaacttgaacatcccacttgcccactcgtgatattcatttactatgtgtcacacagtgatgttgtcaattgactca

SEQ ID NO: 72469 - DNA, 345 bp, Zea mays
  unsure (1)..(345): unsure at all n locations
gctgcttctgtcgatcagtctatacccatgctcttatgcgatgacatagcagagcagaaggtgctattgngatctcaactgtccgaagaacangagaanaccttgataagggttctgttcaacaataaagatgtttttgcatggtcagctaatgatctttgcggagacaacagggatgttattgaacactcgctcaatgttgatccatcctttagacccacaaagcagaagcttctgaagatgtctgatngacatgccgaaggtgctcggaatgaagtaaaaagactccttatcgctggagtcatcacagaggtaanatacccagaatggctagccaacactatt

SEQ ID NO: 72470 - DNA, 274 bp, Zea mays
  unsure (1)..(274): unsure at all n locations
tcaatagtagttcctttcaagtggcatactctcaattagtaataatctattttatgaaaagaaatgtcaatatgaagttaaattccttctggattaaatttgtaaattggtgcagtattgtaattcactcatacatgtgcatngacttannaggaatttaatntatgcctctatgccntcataatgatgattattntgacatcatatataaatatcatcattcattanatacttcattgtactactaatacctnctttcaaaagtgctttttac

SEQ ID NO: 72471 - DNA, 554 bp, Zea mays
  unsure (1)..(554): unsure at all n locations
caattatagacttaanagcggtattagtatcaaggacttagattatagagtaacctccccccgatagtgtgcacacagagtttgaatactcgtatgagacatgcattctgatatgatatcaagaggagcaaagtatctataatccgagctttggcacatataagctaaatgataccaatagaagcattataccactcgtaggtattaanaaatatcacattgatgtatccattacttcggaatgttagataagctatgtgtcgtgcctttcattttaaaccatgtaggntcgcttaagagtatgaatcganagtgagcaatcctaccatatgatntacctagtatgcatgcagttataagtcatagtaaataccaattgtaatactagggatgaaaggacaactagatatacgagactaatatgcatatctataataggaatacaataatcaagtacctagtcatggtgggaatgggtcanatatcactaccacttgcatagtgaccatatatgatcctgaatcatctaattgcagcttaataccatgctcgat

SEQ ID NO: 72472 - DNA, 269 bp, Zea mays
  unsure (1)..(269): unsure at all n locations
ttcttatccccacatgggctagtcagcgatgccagagcctacccatattagtcttagcaattaaccaagtgtcgagttcagctctattgaaatcaactaagtatagctgaccctctaacactcccttaaatgctattgaatcatcacttcttctaaagacagtaacacctacatcagtaaatagacaggtgtagcccatattgcataattgagaaacgganagcanattgtaatctaaagaatctacaagaaaaacattggaaatagaa

SEQ ID NO: 72473 - DNA, 279 bp, Zea mays
gtgcatatcggaataattaggcgtcccgagaatgtgaagagaggtagaggtcgaccaaccttgacgtggacagaagctgtgaagagggacctgaaggagtggaatatcgataaagagctcgtcgtggataggaaggggtggaagtgtgcaattcacgtgccagaacctttgatgtatagttcgcttttcctcttttaatcgttggacctttcttgtgccccattagatcttgctggctcttagtgggtttatctctcttatgtgtttccccgtttcgtc

SEQ ID NO: 72474 - DNA, 90 bp, Zea mays
gcaagttgggactcatcattcacacaataacattatgacaagttacaggccactggagcctcttcacattgatctattctgcccgattgc

SEQ ID NO: 72475 - DNA, 380 bp, Zea mays
  unsure (1)..(380): unsure at all n locations
aagcttctggcagcagcnnctcgctcaccaccgctgcaacgggccaacagtcagaagggagccaatatggtccacaccanacggacttcagagaacagtccgaagctcgcacagtcaacagcactgtgccagagtcgaagcacatctattgacaaatatcctaccttgatagcagtctttttcattcagttntaatttccgtgtaataaaggacattnttcanatctcatggtaatagttcgttctttgccacaaggaanatatattttcttcacaggcttaagtcgttgaagcatanagatttgcgataacaaggatgaccttcgaattaccanacaatccttcgaagcaacananagtcgttctatggaatgcagagt

SEQ ID NO: 72476 - DNA, 506 bp, Zea mays
  unsure (1)..(506): unsure at all n locations
gtctgggtgatagttaatctctaattcataatccttgatcagntcgagccatctcttttgtctcatgttaagctctgactgggtaaagatgtactttaagctcttatgatctgtataaatgtgacagatattntccaatagataatgacgccatatntttggggctcgaaccaccgcagctaactccaggtcatgaagtgaataatgttcctcatgccagcgcaactgccttgagcataagctatcactcggccttcttgcttaaacacagccgatcctttgctgatcgcacaatacacatanagctttcatgtcggtgaccatccggacatggcataactttagctgtcaagttattactttgagactaatgattggatcatctaataactgtgatggttacaagctaaaaattgatgatcgcgagtccagcatcaagaactcgctgtgcagggtgggttcactcaaatctgattgtggacatgacccttgaatatctgtcaaat

SEQ ID NO: 72477 - DNA, 357 bp, Zea mays
  unsure (1)..(357): unsure at all n locations
ccatgttagtcttaatcaataaacaagtgtctagtttagctggattatcattaanatcaactaagtatagctgaccatctatacactcctctaaagctattgaatcatcacttcttctaaagacagtaacgcctatatcagtaaaaagacagttgtagcccattttgcataattgagaaacagaaagcaacatgtaatctaaagaatctacaagaaaaacattggatatagaatggcangagaataactatttacccaatcttgaccaacctgattccatcncgaatggatggctcttgggataccatnttctataaaggagaacatctttctcctgcatgtggtggcactcgtatc

SEQ ID NO: 72478 - DNA, 462 bp, Zea mays
  unsure (1)..(462): unsure at all n locations
atgctcctatgtgtcatcgtctctgagcgaggcatcgaggccaaccctgagaagatcgcggccatcaccagcatggtgcccatcaaggacttaanaggggtacaganggtcatgggatgcctcgcggccctgagccgcttcatctcacgcctcggcgaaagaggtctgcccctgtaccgcctcttaatgaaagccgagtgtntcgtttggacccctgatgccgaggatgccctcgcaacctnaggcgctcttacnaggcgtagtctgggccgcggggcggaaaacctttggctactcccgaaccactangggtagcgcgcgatgggtcaaggctgagaaggctcatgccgtcagagcggtacttatcacaaggtgtcggataatcgtacacagtaaactgtgtgtgatctgcagcgactacactactatcatcggacgggatctcctgggaatcagcaagct

SEQ ID NO: 72479 - DNA, 324 bp, Zea mays
  unsure (1)..(324): unsure at all n locations
aactactatntatggttaagtccattaactatggttccatttgcaaaaacagtaaaacaatacaacttgtttgaaattntngcctagtgaatgcactctatgtgtgtcaaacatatgcaatgccaatgctcatgatgccatgctcaagttntagttatagtaacaccagngagtgtacctgaagccgccgtcgtcacatggctagcggtgcgccatcattgctatctggcggactagccagatggacaccggtcttgtctctgcggccgagtcggctcgggtanggtgatgatggcgcttcctgtgacgtggcggcctgtccct

SEQ ID NO: 72480 - DNA, 379 bp, Zea mays
  unsure (1)..(379): unsure at all n locations
atgctctcgctacgctgtgtagagaccatcaactcacaataatcatgtgtataacaagctggtatccaatctctacgaatttcatacattctggaaagactgatgttatcatgtagatggaaatcatcaatcagcattgcccaggcagactcanactcagctacagttaaaggatgactgattatcatatggaaccttgctttgaaatcctacttctcaaatctagcgtacaactcgatcaaatacggcatatacctgttctgaacatgccacaaacacanacgatggatngtgtctggaaataccctgcctagtgcaacatgcattgctggatcgtgatctgagatcatatatnttcacaacattatgtcacacatta

SEQ ID NO: 72481 - DNA, 152 bp, Zea mays
caatatgagaaccgagaaaccatgcctgctactaatatggcttcagtaatttcaaacaaaatgagaaatgagaaaccatgtctattatcgatttgtcttcgcttattagattacagagaagctatcgacttgatatctaatgcctaactttg

SEQ ID NO: 72482 - DNA, 379 bp, Zea mays
  unsure (1)..(379): unsure at all n locations
attatcataggtccatgatatttaaggataagcatctaatatcaccaaatactgtagagcatgagcaatctataaatatgcatttactcacgacttaagatactaattacttgacttacggaggtacccaagtcctgaatgctccatttcttgctcatcttctcttttccaccttgagactatacaagattgctcacgaaacaattagtctcaaaagacacaagttacgtgtgtcttcccctaaacttgtgcatcaagtattntgaataacttgcacttgcacattctagctntctcagaactagaggggaatacaacatatcttggtcaaggcatactctcaatttcatcacanagagataccaattgagtaccaaat

SEQ ID NO: 72483 - DNA, 480 bp, Zea mays
  unsure (1)..(480): unsure at all n locations
ctagaatcaagaatattgagctcatgcctaagtcntggtaaagaatgntcatcaagtggcttggtaaagatatcggctaatcgatctttagtattaatgtaagaaatctcgatatccccctcttgttggtgatccctaagaacatgataccgaatggctatgtgcttagtgcggctatgctcgacnggattgtcggccattataattgcactctcattatcacatagcaaagggactntggctaatttgaaccgtagtccgcanggttgcctcatcaaagcaatgccccaacaatgtctgcggcatgactcggttcgcggggaaaacgacgatttgcttttgaacccaacaccagatttccagactggcagcccatggtttctatgtttgcaccgcatcgatcgatacagaataatggatccaggccaagcaactaggatagcaaattcaatcttacgcgtagggatctaggcgatgatc

SEQ ID NO: 72484 - DNA, 393 bp, Zea mays
ctttcgagaagatagaccttgtgcatcttgtcaagcaggttaacaagtgggaggagcgcatcacagcaagaatgtgatgactacatcaagacctctggagctgctacatatggacctcttcggacccgtcgcctatctaagcataggaagaagtaagtatggactagttattggtgatgactgttcccgcttcacttgagtattctttttcgcaggataaatctgagacacaagggaccctcaagcgcttcctaaggagagctcatatcgagtttgagctcaaagtgaagaagataaggagcgacaatgggttcgatgtcaagaatcttcaagtggaggagtgcctcgagggaggaaggatcaagcacgagttcttcgctctctacacaccac

SEQ ID NO: 72485 - DNA, 269 bp, Zea mays
  unsure (1)..(269): unsure at all n locations
gacactgattactgtatacttgaactgcagtttggaaatgctccagctggtagattcagntgacgtcatttcttggtgttngagcctntaacccgtcttcttttcttagatcaattgaaaaagaagtgtaaacttgaattacttattacttcagtgcgaattgattgatagctctttctgtaatgaaacaggtggcttggtggactatactatgttcacgntctgattcttgtactgttctaacactgttgatgtctactatgttcttg

SEQ ID NO: 72486 - DNA, 397 bp, Zea mays
  unsure (1)..(397): unsure at all n locations
tgctgacacacatcattaanactacacagctaagcgtaagaacactctanactaagagcaaccatatacctaccaattgtggcaataggtagttaggtactagctgtcccagaaatttccctctccatagcataacagaataaaananatagcattgcagttgattctatgatgcggcccagttgacaacgggaacataataaaacaagattctggaatagcgaaggaacttgcacatggcaataagaaaatagatgtngcagccatcaagttcagtggaagtactcctgatccttcagtgtctatggaatatttcagttattctttttgtgcacgaataaattntaagtgttcttncagtaacaacagtgaaacgaatgcagagtagttgacaact

SEQ ID NO: 72487 - DNA, 326 bp, Zea mays
gatatgtacgagacttgatgttggatattcacctgtatggtgattaccatcttgtgttttgaacatttggtcaagcacacggtagtggagtcctaagcattggctgcggtatgtttctagaatatatcagcccacagaccatgctttcacgcagcaataaagtgtgcccactactgggagatcaactccatcgttgcattacatggagattatctacgttgtgtccaccaaatttttcatagatctgttggacactgtatgtgaacctataattctcaacatatgacatatgatatatttgcagcatatacaacatcagaaaatgg

SEQ ID NO: 72488 - DNA, 439 bp, Zea mays
  unsure (1)..(439): unsure at all n locations
ctaagcttcgcggccgcgccgagccgtcgncgtcccagtctgctgcatgctccactgtgcgcctctgctggatgaccaggaagaagaggaagcggctgaagcctcgtcgtcgtgctagcgtcngctgcgaggagcgcttangtgctgctctctcgattgatgacgctatcctcgtcgagcttcttcttcaccgtcgncgntgtgtttaattaattacatatatatatctcttcactcttcttcttgatcttgcaagactttnntagttaagattaatctgcacccattatcttccttttccatatggctatacctcttccttccacgtccatcagttctcgtatctcttccgtccccgtctatccctcttgagcttaattggcacgctgcagtagctggctggcgactctacagtccctacgtacgtatcttcgttcgt

SEQ ID NO: 72489 - DNA, 289 bp, Zea mays
agcaagttggtgctcatcatccacacaagaacatcatgacgactgacaggccactggagctcctacacatggatctatttggcccgatagcttacataagcatcggcgagagtaagtattgtctagttattgtggatgattattctcgcttcactagggtattctttctgcaggaaagaatctcataccctaagagacattataaaggattcttgagacgggctcaaaatgagttcggcttaaggatcacaatgattagaagcgacaatgggacggagttcaagaactc

SEQ ID NO: 72490 - DNA, 300 bp, Zea mays
  unsure (1)..(300): unsure at all n locations
actagtgttctggatgctgcatgtatcccacattgccctgcatggacctcctccagaagatagtttccaatggacgggagaacgcacttcatgaagatgcctgacgcgcccctcctatacnatacctccccaatgagtgtatagtgagctgattgcctggcaatgcgctctgtcgcggtacatgcaatctaagtcatctttcattcattatatacataataatcggccgtctccagtcatcagagtctgattcaggtgatctatgatgttgcattgttctggttgatccattgacatact

SEQ ID NO: 72491 - DNA, 236 bp, Zea mays
ggccttaactactcgttgtaattccacccatgaggttgttgttgactccactctgttgtttatgtgagggaaggaacgcagtgccgccgtgaagtccgatcctgacgggacatcgcgtgagaaatgcgacgacgccgcgatggggcactgtgccaccgtttagggcaaccggccgactatccagtggtggacagctaccttataatatggcagacatgtcatttctttatagagtt

SEQ ID NO: 72492 - DNA, 186 bp, Zea mays
tttttataggcccacacaaccagttaagatgtggtgccactacagctagtgaaagctaagacttagatattgaaggcacctataaagcactacacgcatatacattttagggataattcacgtagatataatttcttctcagcgttactacatctacctttatattacatctatacaacacacatt

SEQ ID NO: 72493 - DNA, 401 bp, Zea mays
  unsure (1)..(401): unsure at all n locations
aagcttctccacagtcgatcggagtggcgacaganatagagatgatgattgtggtctactacgagaccgatacttcatcaccttncanatccggctccgacacgccctccataacttctaagcgccatgagcgcaagaaagttagtaagatccccttacgctatcctcgcattcctaaacatacgcctttactttccgtcccattaggcagaccaccaacgttggatggtgaagaatatgctatgtggagtggattaatgcngattcatctaacctcactccacaaaagtatatgggatgtcgttgagtttggtgacaggtaccatcccgangggatgaggattatgatgaggacganngtgcccaagtngagcacttcaactcccaagccacaactatac

SEQ ID NO: 72494 - DNA, 371 bp, Zea mays
  unsure (1)..(371): unsure at all n locations
agatctatcacatattgcttcagctcttcgaacgctctctactgaactggtcccattgaacaacttctgctgacttcagcacttcaaaaaatgggaaatctctctctgctgatctagatatgaatctgttgagagatgccagccttcctgtcaatctttgagcccccttctttgactttgtggtntcattcgaagatagcttcgatttgcttggatagcctcaattcctctgtgaaactatgcaccaagaaattcccctttttcactcaagacacatttttggatcagcttaaccacctgctaaattacaaggctctgcgatcacatggatatttgttccctttacatgaatctacatagtaccatctgct

SEQ ID NO: 72495 - DNA, 470 bp, Zea mays
  unsure (1)..(470): unsure at all n locations
tcgaccctctgaactaactcggctgcatcattctttgctgtgggccaatagaatcctgacctgaagaccttcccaactagtgttctggacgctgcatgtattccacattgcccagcatgaactttcttcagaagttgctttccagtggacgggagaatgcacttcatgaagacgcctgatgcacctcttctgtacaaagtctccccaatgagtgtatagtgagccgactgtctggcaatacgctctgccgagatcttgtcgtctgggtcttcctcattctntatatacctaatgatcgactntctccagtcatcagagtctgactcgcgttgatctataatgttgcattcttctgtctgatccattgagatactcggctacagtatttcttgcacaaagactcccggtgggacctgagttcgattgatcctaacttgatagacatcggctgtgngtccgactcttctacg

SEQ ID NO: 72496 - DNA, 140 bp, Zea mays
  unsure (1)..(140): unsure at all n locations
ctgggagttcggacggtactccgaagtggcatacaatgttttgtcagaagaatttctgtgcagtctttgatgttattgtggaaacagacctcgcctcgatccatntagtaaaatactcgacagcgacgaaagtgaacttg

SEQ ID NO: 72497 - DNA, 506 bp, Zea mays
  unsure (1)..(506): unsure at all n locations
cgctgaccaggacgactcatctctngttcttcagagccagcagtctattgcttataagcatacaatccagtgacttgagagagaaaaatatagctaatataagtctataaatagcatcagtccctacacagataggcagaatttacatgcaaccagaagtgaagtaggattaanggccccgttagtctggngtggctaannattagtgactaaagtgtagtcacttttagtccctaaataagcaaacatggtgactaanatgggatgaatgaactntagttctttagtcaccaaggggtgactaanaggggactaaagtangattttaaccttattgtctctcactntcttcttgancaaacattactaataataggggaatatagtcatattcacaacaataatggtcttagtcgattagtactggaccaatanggacttagcactaacttagcactaagttagttagtgaccaggaaccaagaggctattctgatatagataat

SEQ ID NO: 72498 - DNA, 329 bp, Zea mays
  unsure (1)..(329): unsure at all n locations
cttgatctcgctaccgagctcaaataatctgaccaatctggtagtgctgcggaaatggngccacaactcgtagcatttaaccggtagaactatgttgtactttacctctctttaaatatgacctttcttactgtgttgnttagatatatacatgatgacgatactgaagattgacaatgctgaagtttgacaaaactgaagacgaagccttatctgaagctaacattgcttataatgtgctttcctaccaaatttcttgagaaactcttgtaatatacatatggaataacttatgtaagattgtacatacctcgtaatatatttctgtc

SEQ ID NO: 72499 - DNA, 280 bp, Zea mays
  unsure (1)..(280): unsure at all n locations
atgctgtggactggatatgattggacctttcaagaaagctcaatgaggatacactcatgtactggtagcaattgacaaagtcactaaatggatagagttcagacccattgcttctctaacctcggctaacgccatggagatcatacaagacataatattcagatttggaataccaaacaatatcataactgacttangatccaactttacaagttcagaattctttgtattctgcgagcaaaagagcatgcagatcaagtatgcttctgtagcacacccg

SEQ ID NO: 72500 - DNA, 251 bp, Zea mays
gattggcacaatcaatctatgccggcagtgtcaaattggaactataaggtataatatagtaacacagttcaactttttggaaaaacttgtcttaacgggggttcttaatgaaaactatgacagtgagtttaacagccactttaaagcagaacttggaactttttgactcgacttgttcattgtagagacactcaagggaacacggagaacttgttcgttcaatctagcgacttatgcggtaaaaacttaga

SEQ ID NO: 72501 - DNA, 309 bp, Zea mays
  unsure (1)..(309): unsure at all n locations
tgttgggacttgtctcaatgctatgagtaagaacaatgaacactaaaatgtaaacgctaatgtccttcgtccttcgaagcattagttctcttacgatataatgactttcggacgaaggctatganagacatgccttcatcaacacagcatataataatgaagaaagatcatattcaacataatagattatctaagcacttctagtttataatcaactcatttctattgtattactatnggaaaatagaaatgatatcacattacaagtgtaccttcatcttgaatgacatganaagtacaagcatgatg

SEQ ID NO: 72502 - DNA, 221 bp, Zea mays
  unsure (1)..(221): unsure at all n locations
tcattgtcgagcttagatgcgtcgatgggttgtctacttgatgtagactcttcctttttcttctctgctgacttgaatgcgaccggttgtgcttcnggcgtcgaggggccatctagctcgatgattttctttgagcctttgattatcaactcagagctcacataatttcctattactttctcgggagacattagtgtatatctaggattaccacgaattaa

SEQ ID NO: 72503 - DNA, 318 bp, Zea mays
tcagcatctttatttgcttcttcttcctgagtccctggcgtccagtcagtgatgaagtctgctaacgcctaggactagatcgaggatctatgcacataatcaatgttgaattcgttgagttctgcagcccactttccaatccttccagtagcttctttgttcctcataatatctttcaaaggttgagatgaaggaacaattatatggaatgcttgaaagtagtgccgaagcttcctggaggccattaagacagcatacaacaccttctccaattctgtataatttttctttgataagcttagaacttcagagacaaag

SEQ ID NO: 72504 - DNA, 318 bp, Zea mays
tcacgagagagggtttggccttgaagtgagtcgtctaagtagcgtcctccgcctttttcccctctctctgcgtgtcgtgggaaggccctgggcatccccttttatagatacaaggggatggtccagctgtacatatgggggtgtagctatgtgctaacatggccggcggagaagtgcttgagccctgtagaagcgtagctggcggtgtggccctgggtcctgctgacgtttctttgccttcgtagagagctgagaacaatcaacgtcatggacgcatgcagggaaccatcattacctattgccggagtaatctagatg

SEQ ID NO: 72505 - DNA, 318 bp, Zea mays
tcggcattattttcaagcttataacataattgttccttcttcacaacctctgaaggatattatgaggaaccgagaagctactggaaggattggaaaatgggctgcagagctcaatgagttttgcattgaatatgttcatagatcttcgattcagtcccaggcgttagcagacttcattgctgactggacgccaggcgctcaggaggaagaaacaaataaagacgccgaagcatggacagtgttttgcgatgggtcttggggaaccttcggagcaggagcggctgctgtgttggtttcaccttccaaagttaaaacttg

SEQ ID NO: 72506 - DNA, 312 bp, Zea mays
tgagatccatcgtgggcatctgctggccaaaccaccgtgggcgcgttgtttgcaggcgattggatgcacctgggattattgggtttcgtcgccggggtgtctcgatgatgtccatggcttccccgggcgaagcaattcactagaaccccagtaatcgcttgtcagagattgggactccatcgctgggtcgccttgcgctgcggacgctgtgccggcctactccactaccggtgagatctcctccaccttattcacctcgtccagttctttgggtggcccggtctgcgatgggggttggtacgctggggtatg

SEQ ID NO: 72507 - DNA, 313 bp, Zea mays
tccaagagagtttagcacgattacatcaaattgtcccaaaatgactcaactctatctagcctagtaccccaagggtgcaaaagctaagctagctgcgaggagtccgactatccaacttctaagcctatcctgaacacctagtgagcgaacgaagcaacactcgactcgggggaaggtggtcttcccgagccagcagtgtccacactggaggcaggctcatctcctccctcgatgtcgacgtcctcgttggcctccaggtcctggatctcctggtgatgcatatccaggtgctcgttagcctcagcaagctgct

SEQ ID NO: 72508 - DNA, 313 bp, Zea mays
tctaaagggagaacacgtgataggtctaaccaatgttactttcgaaaaagatagaccttgtgcagcttgtcaagcaggtaaacaagtgggaggagtgcatcacagcaagaatgtgatgaccacatcaagacctctggagctgctacatatggacctcttcggatccatcgcctatctaagcataggaggaagtaagtatggactagttattgttgatgacttttcccgcttcacttgggtattctttttgcaagataaatctgaaacccaagggaccctcaagcgcttcctaaagagagctcaaaatgagttt

SEQ ID NO: 72509 - DNA, 314 bp, Zea mays
tctaaagggagaacatgtgataggtctaaccaatgttcatttcgaaaaagatagaccttgtgcagcttgtcaagcagggaaacaggtgggaggctctcatcacaccaaaaatgtgatgacaacatcaagacctctggagctgctgcatatggacctcttcggacccgtcgcctatctgagcataggagggagtaagtacgatctagttattgttgatgacttttcccgcttcacttgggtgttctttttgcaggataagtctgaaacccaaaggaccctcaagcgcttcctcagcagagctcaaaatgagtttg

SEQ ID NO: 72510 - DNA, 314 bp, Zea mays
tcatgcaactgctgccaaaaatgagaggtaaactgggtgcctctatctgatactatcttcttcggaacactatgcaagcacacaatccgagccatatatagttcggctaacaccgcactgttgtaggtggtcttgactggtatgaaatgggtcgcctttgtcaaacggtccactactacccagatggagtcgtaaccgactcgagtgcggggcagaccgactaagaagtccatcccaatctcatcccatttccattgcggaatctgcaatggctgcaacagacctgcgggtctctgatgttctgccttgatcct

SEQ ID NO: 72511 - DNA, 304 bp, Zea mays
  unsure (1)..(304): unsure at all n locations
ttgggcctcgtcaccagccaaattccaaccacccttcgcccaaatttgtgttataaatctgctccctatgcttcgggcctcgttgggaatatcaaccaaatctgttgaaagtaggctgaaagttggtctattgacaatcttcccgtgcgtacaactggctttcagaaatgctgtanctgtgccgcgagaagctaacagggcacagaagtcaccgtgccccgctattacttcgtcaagcgcctcgactttgccttcaatgtgttcgaaggtgcttgatatgttttctgccgaaagtgtaaacttt

SEQ ID NO: 72512 - DNA, 307 bp, Zea mays
  unsure (1)..(307): unsure at all n locations
ttgcacctgtnaactgtcatcttttcttgaattgtttgggaaagggtccaactattttagtggcaccctttattgtgctacactgctactgttatccttgttccaaaaatctctctgctggatttgttaaacgatttaattgtcatcaccctatatggtgtcatgacctcatgactattccattgtactgcttgagttaaacaaatctgaatgactgaaactgaacgagtacctgtttttagtgaggatcagtcgttttaaacttttagatgcatgtctgcttacaaggaattatagtcaagttttt

SEQ ID NO: 72513 - DNA, 318 bp, Zea mays
  unsure (1)..(318): unsure at all n locations
tgaagcangtctcaagattgaggtcgagaaaaatttaaatttgcaaaaatcattaaaggatctccaagagaaatgtctaaatttcggcagccgatgcgtgcagcggctcaaggacgtatttcactctatcggagccagctctgaaaaattttcaccttcagccgaaaacctgcccagcaccttggaacatattgaaggcgaggttgatgctcttgacgaagttattggtgggcatgtcgatttctgcgccctggtagcttctcgaggcacagctgccgcttttctgaaggccggttgtactcatgggaaaattgtgaa

SEQ ID NO: 72514 - DNA, 320 bp, Zea mays
tctaaagggagagcacattttaggactaaccaatattcattttgagaaagacagggtttgtagcgcatgccaagcagggaagcaagttggaatccaccatccacacaagaacataatgacaacggacatgccgctcgagctactccacatggacctattcgacctgatcgcttacataagcatcggcgggagtaagtattgtctagtaattgtggatgattattctcgcttcacttgggtgttctttttgcaggaaaaatcacaaacccgagagacactaaaaggattcttgagacgagctcaaaatgagtttgaattgg

SEQ ID NO: 72515 - DNA, 321 bp, Zea mays
tgagacgggaacaaccgaggcatgcactaaaacccttaaagaaaatgtcaaggacttgaggattgccaagaggaggaaacaaaagaagaaaatcaatacctcttccaaaagcctcaaccatgcctccatacaaggtaacatccaaggtaacaatcaagtcacatttcatactaagagaagtaggaagtgtagtgaatgctttgaaaagggacactcgattaggtcatgtccctatattaaatatgacttgattagtaccaaggatgataagctttgttttatatgctcaaagaagggacacttagttaagtcttgtcccta

SEQ ID NO: 72516 - DNA, 320 bp, Zea mays
tggatgaggtgtcatcatcatcatcatccgagctatcatccgagtcccattcaactaagtaggctttgccatctttcttcttgttatagtatttctttttcttcttgtcactttcatctttgcccttcttcttcttgcttggacaattcatggcaatgtgaccgggttccccacactcaaaacattttctatcattgaaagcatttcttctagatgtttgacctcttctaggttgacctcttttcatcttcatgaatttattgaatttccttacaaataaagccatgtcaccatcactctcactttcattttcttcatca

SEQ ID NO: 72517 - DNA, 318 bp, Zea mays
taggaatgaactcaatatcctcaattctcggaactttgattgaaatattgcacacatagtgttggggacttgttctcaaatgctatgagttaagaacaaggaaacacaaaatgttaaatgttaatgtccttcgtccttcgaagcattatttcccttaagatataatgatcttcggacgaaggttatgaaagacataccttcatcaacatgatatatgttaataaaataagaaatatatgaaatataagaagcaagataatcaatcacataacattattaattcattgtattatcctagaaagacagaaacaatattga

SEQ ID NO: 72518 - DNA, 294 bp, Zea mays
ttgacaataactttaaaaggacttccttcttaagttgcaaagagaatgacattcgaagagcagttaatttgaacaacttggacaaaaggatctacaacacccaagcacaccttcttggtaccctctaaaggatccctacccaaatctcgggacgaggttcctttaaggggggagggttgtaacaccccaggtgttaccaaggccctgactccctacttacactcatgacatattatctcatgtggttaaatggaagggaaggagcacctaaagctttgggaataatgtattaac

SEQ ID NO: 72519 - DNA, 313 bp, Zea mays
ttatcaaatggacgtgaagagtgccttcctcaatggacctatcaaggaagaggtctatgttgagcaacctcccggctttgaagatagtgagtaccctaaccatgtttataaactctctaaggcgctttatgggctcaagcaagccccaagagcatggtatgaatgccttagagattttcttgtcactaatggattcaaagtcggaaaagccgatcctacactctttaccaaaacacttgaaaatgatttgtttgtatgccaaatttatgttgatgatattatatttgggtctactaacgaatctacatgtgaa

SEQ ID NO: 72520 - DNA, 314 bp, Zea mays
tgtgaaggttcttcatccctacatgtgctaaacggagatgccacagccagcccatgctagtcttagcaattaagcatgcatctagaccagcctcctcttttgcaaaatcaactaaataaagtttgtcgtctagtacacccttaaaagctaatgaaccatcactccttctaaagacagacacatctacatttgtgaataagcaattataccccatattacaaagctgactcacagacaacaggttatatccaagcgactcaactaagaacacattagaaatagagtgctcggatgaaatagcaatttttcctaac

SEQ ID NO: 72521 - DNA, 313 bp, Zea mays
tccctgcccaggcagagctaactgttgtaggttgcagcaaaggattggatgcaaaagggcgctggacacgtgctcgtgtggcccaagtgagcatgctaatcagccccttttggttccttgcacagcttacgtccaatctgtctctaagatacaccactgtcacggtaagtgttactaagaactgaatgatacttccatattttaaagccaaacctggcccagacaccagaggcctccaacagcatcgggggtatccgtttaaggtttaaggtgatcttttgatacagtgcccatataaattaagcatgtatga

SEQ ID NO: 72522 - DNA, 314 bp, Zea mays
tgccgaaatttaagcctctctcggctctatattttcatcattgggcgtatatgttggtaccgatgacacccgaacggagaaacgcggccagctgagtccgtgtttcgcatacttggatttgtggtggtttggctgatgcttagcgaaacgcctggacatccgccgccgatcacctgtcgcataccgctgccatgcgcattcattgggcaaatctttagttgctctctgcaacatccctcgaaggacggctcgtcctgatcatggccgcatgccgcgcagccttgctgacgatcgtctggcttctgatgatcgcg

SEQ ID NO: 72523 - DNA, 277 bp, Zea mays
ttaaatgtgttgtcatcaatcaccaaaaagggggagattgaaagtgcattcatcccttttgtgagttttggtgatttggataacaacacatttaaaggtctaacgagtttgctaagtgttgaacaggaaattcagtatgatgaacatacttgaatagtgtataatgatcagtgaacaaaggttcaacacgaggttaaataaccaatgagacaatgcaaatggatataatatgatctctatattggtttgaatacatggacaagacctgaaaaatcac

SEQ ID NO: 72524 - DNA, 302 bp, Zea mays
tgtaaagggagaacatgtgataggtttgactaacgtgcaattcgaaaaagagcgaccttgtgctgcttgttaagcacgtaaacaggtgggaagggcgcatctcagcaagaatgtgatgaccaccacaagacctctggagctgctgtatatggacctcttcggacccgttgcctatctgaacataagagggagtaagtatggtctaattattgttgaagactttttccgcttcacttgggtgttctttttgcaggataagtctgaaacccaatggacccttaagcgctttctcatgagagctc

SEQ ID NO: 72525 - DNA, 320 bp, Zea mays
tccctgcgcacagcttcggctgtgcaccatccttcgtggagcttggtaatcagcccgtccttcgtctggttcaggcttcgtcctgaccgcacttcatgttcgtaattctgagtccgaaggtacctgttcacataatctacttggaaaacattgttaaatcatgtttttgaggaccttcggaggacgaaggcccccaacagtagcccctcgcaatattaatttgtttgaaataataaattcagattgcgatatgaacgaaggctttatgccgaaggtccgaaaaaacaccttccctttgctagaatagcaacattcaatga

SEQ ID NO: 72526 - DNA, 318 bp, Zea mays
tctaaagggagaacacgtgataggtctaacttatgttcttttcgaaaaagatagaccttgtgcagcttgtcaagcagggaaacaggtgggaggctctcatcacaccaaaaatgtgatgacaacatcaagacccctggagctgctacatatggacctcttcggaccagtcgcctatctaagcataggaggaagtaagtatggtctagttattgttgatgacttttcccgcttcacttgggtgttctttttgcaggataagtctgaaacccaagggaccctcaagcgcttcctaaggagagctcaaaatgagtttgagct

SEQ ID NO: 72527 - DNA, 322 bp, Zea mays
tcgtactcagcaatgttatttgtgcagctattatcaagtcttgctgcgtagcaagttttgactttggagggtgcaactaacacagcggctgctcctgccccgaaggttccccaagaaccatcgcagaatactatccaagcttcggcatctttactcgcttcttcttcctgagcccctggcgtccagtcagcaatgaagtctgctaacgcctgggactgaatcgaagatctatgcacataatcaatgcaaaactcattgagttctgcagcccattttccaacccttccagtagcttctctatttctcataatatccttcaatg

SEQ ID NO: 72528 - DNA, 316 bp, Zea mays
tgccaatacttgtcaaagcaacaacacatgccagcacagcaactgcagaccataccagtaacttggcctttcgcatgctggggactggatatgattggacctttcaagaaagctcaagggggatacactcatgtattggtggcgatcgacaaattcactaaatggatagagttcaagcccattgcttctttaacctctgctaaggccgtggaattcatacaagatataattttcagattcgggataccaaacagcatcataactgacttaagatccaacttcacaagttcagaattcttcgacttctgcgagcaaa

SEQ ID NO: 72529 - DNA, 305 bp, Zea mays
ctatagacaactcaagcttcggcttcatctatgttatggattgcctttgaatcaatccaatttttttctgcctttctggcggcttcctgactcccatgaatagcaataggtccctgaacccaaagtattttcatgcaaagatatgctggatgaaaaattgcttccaaagcattgggtggtccccgaccaatgaaggcattgtaaggatactccctgtcaaacatgtcaaacaccatttgcttagtccttatgttgttgaacaattccaaaggtactggcatgggaatcttaccaagtgctacaat

SEQ ID NO: 72530 - DNA, 311 bp, Zea mays
tcggattcctccctgaattcactttgttgttttgagtgctggtgcccttctagctgctggcttcaggaataagtacgttgcagtattggtggcggtgggagctggggccaagaagcctgtgagtggcttgccgaagcaatacaagctgcaggtttgttgcccacatattctggtatgtaaggagagtggcatgaagcagtatgtaggacttgcttcggctgattctgccgagcttatgcgtcggcaatctctttttgcttcagaatagtgatctggcaaggtcttgtattgtggcctttgtcctcaccaca

SEQ ID NO: 72531 - DNA, 311 bp, Zea mays
tgttaaaagtttgtgcatctagtggcttggtaaagatatcagctaattgttccttagagttaatatatgcaatctcgatatctcccttttgttggtgatccctaaagaaatgataccgaatggctatgtgtttagtgcggctatgctcaacgggattatccgccatgcggattgcactctcattatcacatagaagaggaactttggttaatttgtaaccgtagtacctaagggttagcctcatccaaagtaattgcgcgcaacaatgtcctgcggcaatatactcggcttcggcggtagaaagagctaca

SEQ ID NO: 72532 - DNA, 315 bp, Zea mays
tcactgaaaaagaaaaaggaaatgattaaactgtactgggccggtttcagcccaggcgacccaggtccaggggaaaacgcgcccgcacccgcgcgcgcgatggcagttttgcgaaaagggcctcgggttcttggctaactggagacaggttctttcactgtttcactgtgtcactgacgatttgcagaagagtcctccggtttctattccttcgcagggtgaagtccacgacgacggtgaacgcggccgagctccggtgagctagcagaccgaccgaacggggccatgaccggtgctaccgagcggcggacacga

SEQ ID NO: 72533 - DNA, 314 bp, Zea mays
tgggtgtttatggaaatggtgtccaagtgaaatctcagtgttggactgcagggtttacaaatgcggtgcccagtagactgagtatgtgttctctagttgtatgtgaaccctatatgcttacttaaaagcagagcagcttgtttccacaaaaaacttctctctagcgctagcagctgttggtaggaatgcattcgatgaacaacgctcttgctcggcgagacagccctgaacagcttggtaagcacatgcttagagtggccactgagctagcaattcactagagaaaggggaacctgatggatgtcttttcttgg

SEQ ID NO: 72534 - DNA, 313 bp, Zea mays
tttatgtctttgtttttttaaaggccgaaggttctataacggtaaaggaaatagaccaaagtctatttaaactaaaattttggtgcataacaatcaacataactatttggataaacattatttactagtatatttgatatagttcaaagggctcgcaagtggattttgacttagcaaaaagtgccgatcgggaggatgatcatcacctcaagaaagatattaaaaacatatcgaagatctagaaaaacaaactaaagtctaagaaataaaggtagaacaaagtcgatcatgttgatcatgaagaaacaaagta

SEQ ID NO: 72535 - DNA, 307 bp, Zea mays
tcatactcaatttgattgttagtgcagcagtattcaatcctaattgatgtttcatgtactagaccattcggtgacaccaaaacatagccgattccctgcccttctttgcacatagaaccatcaaaaaataactgccaagggcaagtattaagacatgagatttcctgctctacatcaaccctatgatcagttataaaatcagctataacttgtcctttcatagaagataaagactcataaattagatcgtactctatcaaagcatatgcccactttctgacccgaccactaagaatcggcttctgta

SEQ ID NO: 72536 - DNA, 282 bp, Zea mays
tgtgaggagccatggtttcgctattccatgttcaggcacaccccacgaaaccgaggtgggcatagcccgtaagggaaccgaagaatgcctgttgatgaatgtgggcctggcactcagaggaatgtaaaccgttgttgagcgatgtagaagagcggacggcctccgcctataaacatgctggaaagtgcgtctgctgaagaacagtgtgaatggtgcatcagggacgtgcagatcatgtgctgaaccttgccgttctggtaggaagtatacgcggcaagactc

SEQ ID NO: 72537 - DNA, 319 bp, Zea mays
tcggaagataacaacttcatcatcttcgggagtcggcacagttctttctccggcatctgctctcacaatggacatgtctcaaaagtatctccccttcatgttttcaaggtgactttgcccaatagttgattttccgaagactgaatggcttggtcgccatggccggtcttcggaatcttcacccccgttgtctgcatcgtaactgtcactttcaccagtatcttcagatagaccttctaaaatctcccttgcaatcttctccgtattcgtcttcgctattgactcaagaaaacccagatgcatctcttcagaaaggctc

SEQ ID NO: 72538 - DNA, 317 bp, Zea mays
tggtgaaggtaaacagggacttaccagagactgagatgtctcacggacagctgctcatggcgaagcgcggatccgagatggcgcgtcagctccgacgagcgattcggacacaatcgcccatcatcccgcccgataacttgacgcgcagatcgcccgaatggcgccgaactcctacgcagctgcccccaaccacgcgacgacgtgaatccgggtttgatccgcggtggcgctcctcccttttctctggcggtggtggtggctctcgaaattgcgtgttaacgcgaacccaatgaagcggtggagcggaagaacggcta

SEQ ID NO: 72539 - DNA, 314 bp, Zea mays
tctcctggacaagtgctgcacttaccgctgagtgcgaagctgccacatataataacaaaggagcccctggcgttggtggagttagtgttgttagatctatcaaatattgcttcagttcttcgaaggctctctgctggacaggtccccattgaaaaacttcggctgacttcagcacttcgaaaaatggtaaatttctctctgctgatctagatatgaatctgttgagagatgccagccttcctgtcaatctttgagcccccttctttgtacttggtggttccattcgaagtatagcttcgaatttgcttggatta

SEQ ID NO: 72540 - DNA, 290 bp, Zea mays
tcagcttcatctatattatgaatagccttcgaatccgtccaactcccttcagctctcctggtagcttcttgactcccatttacagcaatgggcccttgtttcgaaggtagcttcatgcaaagatatgctggatgaagtattgcttcgaaggcattaagcatccctcgaccaatgattgcattgtatggatactccatatcaataatgtcaaaggcaacctgttctgttcttgtgttatgaacatagccgaaagtaactggcattgttatcttgccaagtgccacaatctg

SEQ ID NO: 72541 - DNA, 320 bp, Zea mays
tgccttcgcctcagtctatcatccgcagtctttttgagttgtggatcgcgccaatgggaaaatcttcacagctgtcaaaaagatgctcatcgatgaaaaaagggcaaatggaccgatttgttacccgaggcagtctgggcactaaacacgacagagtgcagggcgaccgggtttactcctttccgccttctatacggatcagaggccatgaccccacaagaaataaaacacgggtccccgcgaacagttccatcagccttccccgacgtggacgagccaacttcaaaggatctcattgacggagaccgagtcttcgccct

SEQ ID NO: 72542 - DNA, 306 bp, Zea mays
tggtcggacaactacagtgaagtttatccattcaatccacaatggagttcagtcggtcaatccatagtggggttcagtcggtcaagcagcaactagtctcagttggtcaatcagtactaaagactcaatcagccgcaatagagtgaggtttatctagacaattcgtaagtgggcaaatctcagctagacaaatcctcaatcaactcagaacacaccaaacatagtgatccattgaagaaattttttttgggacctttgaatcaattgcttctcaagtcagtttgaagctcgggggctacaccaatt

SEQ ID NO: 72543 - DNA, 312 bp, Zea mays
tggtcattttattgctaactgtcctgataatgaaagtgaccaggaaaaggggaacaaaagggagaagaagaagcactacaagaaagccaagggcgaggcgcatataggcaaggagtgggattcggattgctcctcctccgactccgacaatgagggactcgctgccaccgccttcaacaaatcggccctcttccccaacgagcgtcacacgtgtctcatggctaaggagaagaaagtaagtactcgaaactctacttatgcttcttctagtgatgatgattctagtgatgatgatgaaatagactattctag

SEQ ID NO: 72544 - DNA, 314 bp, Zea mays
tgaagccatggtaagtagcatatgctaataatatacgaattgactcaagcctagctacgggtgcataggtttcaccgaaatccaaaccttcgacttgggagtatcccttggccacaagtcgggctttgttccttgtcaccacaccatgctcgtcttgcttgttgcagaagacccacttggttcctacaacattttgattaggacgtggaactaaatgccatacctcgttcctagtgaagttgttgagctcctcttgcatcgccaccacccaatccgaatcttgtagtgcttcctctaccctatgtggctcaata

SEQ ID NO: 72545 - DNA, 312 bp, Zea mays
tcggtattacaacatgtccgaagacgaagggtctaaccgacttaaagatagaatgaccttttagtccataaaggtctgagtcaatattgtaaacttttatgaggggcatggttgtaattactcacaggctgtgtcctgtgcctataaatagtgaacaatattcctttactgttcacgcactcctgtaattgcaattgcattactctgagactattctttgccaaggcagaggtataaatgtatttaatatttgattacatcaagttcattcaatatgtaaatgatgtcgtttacttataatttacttgtcta

SEQ ID NO: 72546 - DNA, 314 bp, Zea mays
ttgggtttgaaatgattaagctgagaccgttctagtgacttgcacgagaagaaagtctcggtgtagtgtctccgtctgagtcaattaaggaccttgtcgatgtaggcttgatgatcgaggaccctttaactggtcacatgcctcgtcatgggtaagccttgcctcgggcagactaaggccggaataagacaacacgaaatgggcgtggagcggtggcgagagtagcgtgtaccctccgtggcaagaggctggacggtggtgtagctgtgctctcggtttgcatgaacctgatccggtcttaagaaccccggtgg

SEQ ID NO: 72547 - DNA, 306 bp, Zea mays
tcaagccttcgaactatatccaaatatttctcaagcttcggatctcttgctttacaaatcttgtcaacatgaccagaaataacttgggaatcggttttgagaaccgcccttcttatccccattgcctttaacttccgaagccccaaaagcaaagcttcgtattcaacaatattatttgtgcagctgaaatcaagtttcactgcataacatgttctagctttggaaggtgcaactaaaacagtagctgcacctgcctcgaaggttccccaggaaccgtcgcagaacactgtccaggcttcggcatct

SEQ ID NO: 72548 - DNA, 308 bp, Zea mays
ttgcatgtgacgtacaagtttatatacctctcttttctctatcgaaacctaaaacaatctccccgcagcatgcacacgtgtcactacacccactgatcaccggtgcaccaacgccgggtccacgaagaccagtctccgattcgatacgaccaatgctccgggcacccaccgccatctccaccgtccatccacttaaaccccaccctcagtcctcacccaccaacttccattcccagtcccaccaccacttgtctcaccgccggcatggcgtactccaccgcggcctcgccgctcacctgccaccacct

SEQ ID NO: 72549 - DNA, 319 bp, Zea mays
tagatgaggcaagagcgccaagagatgcgttatgaacgactagaaatgcgtcaagagatgaggcaagaatggctggaaaggtagcaacaaccaccgctacctccaccaccacctgttccaccccagaacaagcaccaagaattcatgagtcataagccacctacattttccagctctcttgatcctttacatgctgatgattgcctgaaatcagtggagaagatgcttaatattgctcagtgtacttatcgagagaaggtgctctatgcgtcgggacgtcttactggccccgctgctgattggtgggactcctacactg

SEQ ID NO: 72550 - DNA, 318 bp, Zea mays
tgaatgctgctttgatttcataccattgatttttattttcatccacttgcccacaattgacccattggtttttatccacagcaagactgacaattacaagcgtcatgaattggaagaactctaacatctaaaacatgaagtgcattaaagtttaccttgtctattttctccgacagcatatatataaaagtccatgactctaagatcaacacctacaggagggccttgaacatatgcagtaactttggatggctgtttttcaagcttgaatgctgctttgatttcataccattgatccccatcatcatccacttgccc

SEQ ID NO: 72551 - DNA, 310 bp, Zea mays
tgtgaagattcttcatcccaacatgggctagtcggcggtgccagagccaacccatgttagtcttagcaattaagcaagtgtcgagttcagctctatcaaaatctaccaagtatagctgaccctctaacactcccttaaatgctatcgaatcatcacttcttctaaagacagtgacaccaacatcagtgaatagacagttgtagcccatttgacataattgagatacagaaagcaagttgtaatctaaggaatcaacaagaaaaacattggaaaagggaagggtcacgaaaatataccatttttaccaaaa

SEQ ID NO: 72552 - DNA, 315 bp, Zea mays
tcggaaagccaacactctttgataaagtgctgacaaccttcgctccagtccagtcctggagacatcccaagctctcttcgtcaacgccaccgaagagcaatgctcctggttgatagctgcatgatattgcataatccctcagctcttccttcttagccttagacagcttttgccctagtatgttttgaaaattaaaatcctttaccttcgaagtatcttcggcaatctccttctctttccccttctctttccggggcactagggctagagtctcttcagcagctgtagcagcttcttccgcaaccatgttcaaag

SEQ ID NO: 72553 - DNA, 316 bp, Zea mays
taatgatgaattggctagtcttaatgttcaacttaagactagcaagaatgatttcgataaactaaaatttgcaagggatgcctacacaattggtagacacccctcaattaaggatggacttggcttcaagagagaagccaagaacttaacaagccataaggctcccattcccgccaaggagaaagggaaggcccctatggctagtagtgtgcaaaagaaccatgcgtttatgtaccatgataagagacaaactagaaatgcttataggagttacaatgcttatgatgattttgattctcatcacatgtttgcttct

SEQ ID NO: 72554 - DNA, 310 bp, Zea mays
tacccatccctccatttattcattattagttttattccgctgcatttcgaacaatgatcactacttttgctaaaactccgatgatgatgcaataaatttgatactccttaatgtatggttttatgctttattgtatttgttatctgcctcaccatcgggtgagtacgtggtacttgatcctgttagtggcctcgttggactagatccgggggactgatgtgttattcctatttaagtgtggtctagcctctaaggcgggacttaggcacttaagttggaataattcgggcggttccgccacaagtatgcc

SEQ ID NO: 72555 - DNA, 312 bp, Zea mays
tatgtacaatgatacaagtggttaccatattattatattgctaatattcctaactgaaagggaaatgtgtccttgggcaatttcaataatgttttggtgattaagtgcccaacacggttaattaagttcttatgtgccaagtaaagtgagaagtgcaaatcaaagaaaaatgtatgtttctagacttagtacattattttgagtactaatgtgttttgtctaagtgctagaaacagtaagaaaagaattggaaaaagagttggctatgtgcagcaaactctagctcggcttggcacaccggactgtccggtg

SEQ ID NO: 72556 - DNA, 305 bp, Zea mays
tcacgggctactggtggagcttttcgaagctttgtgtttgggccggagggtggctggagtgggctggccacggtggccgtacctttaacggcaatggcgggcggaaatgagctcgccggagctaaagaacggtggctggccggtgagggtgagtgcggggcgaatagaggtgctcccggggaggctttataggcgcgggcgggcacggtcgatggcgtgggcccccggtggacttgaccggaccccggggctagcgcccgcgctggttgggcgaactctggcgtgccgaccagggtcgaacacgt

SEQ ID NO: 72557 - DNA, 311 bp, Zea mays
tgcacctcggtacattggtccatttcctatccttgaaagatgcggacccgtggcataccgactccaactacccaaaacattgtctgcagtgcacaatgtgttccatgtatcccaattaaagaagtgtcttcgggttccagatcgaaccattgaagtgatggatgttaccttggaaccagacttaacatactcagaacatcctattcgagtcctggatcaaaaggacagggttacccgaagaagaacgctcaaattttataagatacaatggaaccaacatacggaagatgaagctacatgggaaactcaag

SEQ ID NO: 72558 - DNA, 316 bp, Zea mays
taaggaagaaaaggaaatgccaaaaccctaacaaccttttctttagagcaatggaacactgaaaaggaactcaatgtaaagtccaaggacatcacattatcatgagttggaccaattaacaaagttgtagtacactaaataagctacaaaatatagtaagaaattttagccaaaagagttttgcaaaatcctcaaacaagccactcaagtggggacttcaaataaaaatcaggatttcagaattctgaaatccaaccctctcacaaagatcaaccgcgttcaccttgttccaaaactcaaaaccacatggtccaaa

SEQ ID NO: 72559 - DNA, 306 bp, Zea mays
ttctagacaccaaatcaatattgacatatgcaagtacttcaatgaatgtatatattaatgcaattcatatagtgttcctatagcctaagcaaaacttagctaaacaagagcaacttcaagagagcaacttaatgcttgcatatttctagacaacaacacagcgattaattattttgctcctaactcacaaaatatgcattgaaaattagtaaactaggactttatggaaagcttataaagtccactatacccttggtattatcatcacaacaagatttgacacttaaaaaggtcaaacaatgctaa

SEQ ID NO: 72560 - DNA, 307 bp, Zea mays
tcaaaattgatatcttttatcccgggggagttggcggacatgccaacatgttggagaagaagataccaaaattgcctcgcgaggacacaggaaacaagcaagtgatgaatagactctccttcctggtcacataaggggcaagaactatgatggggaagacccctcttagcaagccggtcagccgtccaacatttattatgtaggaccaaccagaggaaaaactgacacttcggcggcgcccaggtgctccacactctttcaaagcccaccatggaggtagaaccacaaaacattatctcataagaag

SEQ ID NO: 72561 - DNA, 317 bp, Zea mays
tagattttcgtggttggtattcatactttcttttgagtacacttcgtttcctgtatcgaaatctcagtacgcttgttgtcaaccgaccagttaataattgctaatggcaatgctagtgattgaatataagtttgtagcgtaagtcatagcttccacaaatatgtagcatgtgacgaagagtttaggtggcccggcgagcggcgtgggtccacgcccatgtccctgtgtaaggtggcgccgaccacgatctgttggaagcagtgcacctcttggtcattgtccacgtcgctggaagaatagagtggagcttgcccacc

SEQ ID NO: 72562 - DNA, 316 bp, Zea mays
tattgcttccttggtgccgatcggatataaactactatttgcaactaatccccttatcaaagtcctccccattataagtctaagctaggtttgtcactgcttcattctgaggctgggactcaatttgaccatacttttgttactttattctaaagatatctatgttatcatcttataggacctagcgccccttttcgaggcggcggcgctccttttgatacagatgtcccatttggaccaccaggtcctgacatgctcccgacatttgtcaattggagtacctatggagctgtgacaccaatacaccatcagggag

SEQ ID NO: 72563 - DNA, 324 bp, Zea mays
ctcaagcttaccgcatttgaagcatgatcgtttcccctatgttttagtcttgctcggctggccattgcgaccctttagcaccgtcttgaagcgcttaatgatgagagccatttcttcatcattaagcccggccgcctcaatttgcgccaccttgcttggtagtgcctccttgctcctcgatgccttgagagcaatgggttgaggctcgtggattggaccgttcaacgcgtcatcgacgtaccttgcctccttgatcatcatccgcccgcttacaaattttccaagaatttcttcgggcgacattttggtgtacctgggaatctc

SEQ ID NO: 72564 - DNA, 318 bp, Zea mays
tgacaagagtaggctaaatctgctgattagaccaagtttacttgcgcccatgtagtggaatctctttaagagctagatcatctaccaattttcttaatcgacccatcatagcctgattaatatgcgagttgtttttctcctcgacctgcaatatgagattgaaatccccagaaatcatccaaggaccctgacaagctgctctaatttgtctcggctcttgtagaaactggatattggcttcattagattgaggtccataaacacaagtaagccaccaagggtgcccctcctctgaacagaactgcacagacacactat

SEQ ID NO: 72565 - DNA, 317 bp, Zea mays
ttctagttttttagtccacgcccacgagccagttcccataaacatggcgaattgacagaggtggtccaagaccaaaacaccaaaataaaagctgacacaaaatgattggcaaaacggcaatggaaaaaataaatgttaaatcatttcatctttaccacaaaacatacatttttattgccctgccaattccatcttgctaagttatatttagtgagtatcactcctttaaataaataccatacaacgttttttatcttcgaaggcagttttaattttcaaagaattttgggatggaagatttaaccattgttgatcaa

SEQ ID NO: 72566 - DNA, 312 bp, Zea mays
  unsure (1)..(312): unsure at all n locations
tcgccaacgttggcgcatactcttgcgatgtctacttcgnaagaggcgatcctgagggcccaattgaatggatcagcggcgaagccaatgctttcgaggaaattctaaatggtcgtggagacgtctacaccttttctggcgtgaggggagttgcagctatcttggagaagataggttgcgaacacgtaaaatccttggcgcaaaccgaagctgccttatctattgaagatacaaaagacccctcggccgaagcaagtttaattggtggaaagtttttcaccgacatctaggaaaatggcggccgagggatgg

SEQ ID NO: 72567 - DNA, 310 bp, Zea mays
tttgaggaaatcttaagtgatcggggggacgtctgtgcattctctggtgctagaggagtttcagctgtcttggagaaggctggttgcagtcaaattaaaaccttggctcaagacgaagctgccttctctgtggatgacacgaaggatccctcggccgaagcaagttttatgggcagaaaattttttactgacatctgggaaaacgaggccgagaaatggctcacgaaataatgaagaaaactgaaaaagatattcacaaggctcgagaagcggtgaaaaaagctgaagaagctgccgaatacgagagacg

SEQ ID NO: 72568 - DNA, 306 bp, Zea mays
tcagaaatcccatacttttagttatctcccatcaaacggatatttgtttgttgtctgggagacagtacaggaaatcatcttcgttagtgccattgaatagtaaggcccctttcgaatattttagtttttgggcgtagtgtctggcttccaagatttcttcttcggataattttttccccgaagcatgtcgaacaatgtaatcaatatcttcaactaaggctttcgggacaggagattttgctttttctgccatgtcttgccctgctgccatgccagtatctgaagtttgttgattagctttatctt

SEQ ID NO: 72569 - DNA, 313 bp, Zea mays
tttaaagggagaacatgtgataggtttaaccaatgttcatttcgaaaaagatagaccttgtgcagcttgtcaaggagggaaacaagtgggagactctcatcacaccaaaaatgtgatgacaacatcaagacccctggagctgctacatatggacctcttcggacccgtcgcctatctgagcataggaggaagtaagtatggtctagttattgttgatgacttttcccgcttcacttgggtgttctttttgcaggataagtctgaaacccaagggaccctcaagcgcttcctaaggagagctcaaaatgagttt

SEQ ID NO: 72570 - DNA, 314 bp, Zea mays
tggcagctgcacgatttaattaatttatttatttattttgctcgggagtatatatgcacttgagttcaaaataataataaaactaccacagatatatacgagctcaagtgtaggagtacacgtacgtagtaatgttttttcttttgggagacacacaatgtcacatggcgtacgagaagattagatgcctcccataataattacgcaccactttaatttcggccattgaattgccaatcggtcggacagttgagacagctggaaaaaatggtgagacgatggttcaataatttttttttaaaaaaaaaatcgtt

SEQ ID NO: 72571 - DNA, 304 bp, Zea mays
tgcttcgtcgcgcttccgttgatcaaaacctaagtttttctggtaccgaaactcctgtaacacttaataatatgtcaaaaataaatagttagccgtgtatttgagaaccttcggaagacgaaggcacccaagagggacatggctttccaatgaaattgcattccaatgatttttttggtttagtgatttttttatcttatttactgtaaatataaagacccattttagcaaccttctatctaggatgggttcgctcctggtggccgaggcaatcaataatactatcaagtaagtcatggtaaat

SEQ ID NO: 72572 - DNA, 319 bp, Zea mays
taacgcccctaagaaattgtctaactttgttaagggcaaagctcccatggttcagaataacgagggctatattttatatcctgcaggttatcccgaatataagattaggagaattcattctaggaagtctcactctggctctcatcatgcttttatgtataagagtgaggcatctagttctaggcaatccactcatgttaaattgcctaaaaagaaaactcctattgcatcaaatgagcctaatgtttcatttaagacttttgatgcttcttatgttttaactaacaaatcaggcaaagtagttgccaaatatgttggg

SEQ ID NO: 72573 - DNA, 317 bp, Zea mays
  unsure (1)..(317): unsure at all n locations
tgtaagtgccttttttcttcttcatgtattttttgttttcttgngcatattatatattttattgatatttatcctttttcattttttttctaatgttgtgtgttttttctagattcgggtgttcaaagtcctatggttattatattctgattcaaagatgtatcatcattcaaaattttatatcccgcggtaccaaaacaggaaaatacgtaagtttcatttctatctttttttctttttttagtagaatccaaattcagttgctatcttaattttttatatattttatatggtttaaaatctcactcaatatatta

SEQ ID NO: 72574 - DNA, 310 bp, Zea mays
  unsure (1)..(310): unsure at all n locations
tcatgcctccatcgtatccttgtcctcttattctaatgatggatagttttttacaaatattcgagtaccccgaggtagtacatcgcatgcccttctcttggtgcagctntgagtatgcttgaggaatggccatgagtacttccatctgtctcctcacctgtagccatgaccttcaaatgattgctagcctctcctttttttccgggaaggaaatggttcaatgcccaagcttaagctaaatgaacccccccggcccctttggacttttgagaaggagaaaaaaaaccaggcagcaatctttttttttgat

SEQ ID NO: 72575 - DNA, 316 bp, Zea mays
ttgtgttgggtttgttgttttagcttcctgtttttgttattgcggtgcttttggaggcttggttttttgttgcaatcaccaccgagatggccgaagaaaagaaaagcgcggatcccgctctggctggtttctatgaagccatggaaaataccaatgttgagaaaattactgatgagatgatagctggattgtctggagactcaagtgacactgatagcttcgatatcgagagtgacaatgatgatgcctgttggggacttgttctcaaatgctatgaattaagaacaaggcaacacaaaatgtagatgttaacgtc

SEQ ID NO: 72576 - DNA, 321 bp, Zea mays
tcttcagaagatggatgagtacatccgggcttacaacgattttcgtcaaagaagggaggaggcctacaggttttctgagatgactaggggcttcggaggaagacttcacccaggcatgtccgatcaatccacaactccaacaccaacgatgacagggccagcaatgctcaacatagccatcatagttcttagacttcgagcatgcaacagacttccttcagaccaccagctctgagaggtagaggaggaagaagttttagtcgtggaaggtttggcaatcaaccccgaaagttatactccttttttgtggcgaggacaagg

SEQ ID NO: 72577 - DNA, 309 bp, Zea mays
tgccaagatgaatctgttatctattttcatttgaaatgcccagagcctcaatcaagtggatcgccgttgttagaatcccgtttagggttctccccatgtaattactctcacccctgtgtaatgggccaggagcagttaactcaagtctattaatacaacacccatccctaagtcagggttagggttttccacatggtaaagagctaggttcatttttttcacctccctcctagccgcggcccccagtcgtcggatcctctccctcccgccgtcggctccccagtcgccggcgcgctgccgccaccgacc

SEQ ID NO: 72578 - DNA, 313 bp, Zea mays
tggtaaggcatgcaaagacatcgcctagctttattaaccattaagggttctaaaacagacactcgatgaccctataacatcagtcataacacacacaataccaagaggtgtgacaaattcgaaggaacattgtcgatagtgaaggaaacggtgacgcctaagagggggtgaattaggacttctaaaattttctctaaactaggccacaaataaatacctagggcaaaacctatacaaataaacaatccagaatgtgcaaactaggttttgtctaagtgttgctatctctagcgtaatgtctaagtttcaatcc

SEQ ID NO: 72579 - DNA, 314 bp, Zea mays
ttgtttataggtgggatataatcttcgtgggtatatggcctgaactgttgcaaagaaatgctctacggtgggtgttagctagagaaaacaagagcataattatcggaactatgctgcgtcgtaacaagctacacagtaaattatattatccttgaacatctttgttggagtaaacgcaatgaccttctttagtaactaagtctactactataacaataggatgcttgcaaacctcggaccatagcactgttgaattcgatccagatcatcacaccacacaacggttgcagagtgagtgtttcttgcaataattt

SEQ ID NO: 72580 - DNA, 314 bp, Zea mays
tgctctatgttatttggtagaccatggcaatttgataaggacaccgtgcatcatggtaaaacaaatcaatactcttttatgcataatgagaagaagcttgttttgcaccctatgtcccccgatgctatcttgaaagatgaagttgctagagcatgcaaagagaaaaacaaatctgttcataataaaaatctagatgttacaaaggaattggtacaacctaagagtgataattctaaatctgctcatgtaagaaaaatggaatacaactgaaaagtgcttgtttccttgcttccaaatctgatttacttgaatta

SEQ ID NO: 72581 - DNA, 308 bp, Zea mays
tctagatatgtcgaggtgacaaatgatgatggtgaattggtagttacgaaggttgcagctaagcaacttcgtcggttgcccatcattccccggctttcaaggttgttcctcaataaggaaatagctctgcatatgacgtggccaaagaatggtgtatgtcttgtcactgatccagacataatggtccatccgtcggacagtgatgcgtggaaggcatttgacgagtttgatcccgaatttgcaaacgaccctaggagtgtacggcttggtctatcgacggacggattcacacctttcaatagcagtgc

SEQ ID NO: 72582 - DNA, 306 bp, Zea mays
tgcggtttaaccaaaaccttgtttgcgtgttagtggggaacctcgacgaagtaagtaatgaagaataagaagtccctttttgttttccaactaatattaggcaatatatattgtaatgtgttaaatgtggtagagtttattattcatgtgtagtggcgtgcacgagtgtgcgaataggagaaataactaagttatgttgattggacgtgatgtgtaaaatttaaaaagtgtacgtttgtgtgtacggtgtactattgcacatgtatgtcgatgtattataatagtgattgcgttagagtcattgaa

SEQ ID NO: 72583 - DNA, 306 bp, Zea mays
tatctagttggtagattagacactagaaatttaacagatgtatgcgctttgcgcttgacgtacgacggtgaaaacttgtgcattgatatatactagtcggttgcccgtgcgttgcgacgacttacaacaatacccacgtaaactatccatcaaaaaaatttcaagattttttattgattgtctctgatctctgtataatatattttttgatttgactaactgatgttattgtttactccatgcaaatatgtcttggtataacacggccaatgaagtgagcgattataagagagttcagaacgattg

SEQ ID NO: 72584 - DNA, 319 bp, Zea mays
tgacattgtctcccttttggaagccgatgccatccttaatgccagggcgtctcccactatagagcatgcttctagcaaatttaaatttttcattttctaagtcatgctcattaatcttagcactaagttgagctatgtgatcattttgttgtttaatgaaagctaggtgatcatgaatagcatcaacattaatatctctacatctagtgcaaatagagacatgactgatagtagatgtagagggtttgcaagcatttagttcatcaatcttagcatgtaaaatagcattctcatctctaagattggaaatagaaatatt

SEQ ID NO: 72585 - DNA, 319 bp, Zea mays
tgtcacttaatgactatatttgaaaatctattaatttttttggtcctcaaacatgctagctagcaccttttgagtagaaatcttctatttttcaagaacggttggcataagaatccacccatgaaatgtgatctttaaggacagttcttttatgataatcattcctgataatagtggaattttaggagtggtgtaattatgtcaatcgttctagagatggcttaatatatgaaccatctcaataaaatgggaaacgagagagtgccatatacattacatgcactttcgattaaggacatggtggtagaaccacaattgg

SEQ ID NO: 72586 - DNA, 319 bp, Zea mays
gctggtgccgaggagaaacaaaaatccttgatttcttggctgtcgaactgcttgccgttgtcaactgttagctcggacggtactccgaagcggcaaacgatgttctgccagaagaatttttgggcagtctttgatgtgattgtggaaacagccctcgcttcaatccatttggtgaagtattcgacagctacgaaggcgaacttaaggttcccctgagcggtgggcaagggcccgacgatgtccaagccccaacgctggagaggccatgtatgggcaatcagctttgtatattgcgaggggttgcctgacccaggggaga

SEQ ID NO: 72587 - DNA, 319 bp, Zea mays
ttggccccacctataggctcgtatcctcccctgagaatgtcctgagggccactgtcggtaccatggatcaagggtaccccctactactgtgtcaaggcgcagttcccatgcgactacctcttagccacgtggtagtagggctgtatctgtgactaaggcgtgcctcagcccaaccaagggcggttgctcagagcccacaacggtgcccggcctcaccaccagggtaggaccgggaccgccacatatccatcatggtggaatactcctgggcatatgcagtaagtccggacccccattggagtgcgcctaagtttgcggg

SEQ ID NO: 72588 - DNA, 306 bp, Zea mays
tgcttgatatcaaatttttgatgagcgggagttcgatgtgaattgagtgctgtccagatgggtcaggacgaggaacatcaaaagcgttggtcctggtcttatgctgttgtaaattgaaaattattaagtaaatgtataacatataactggatattatgttgaaattctatgacaaacaaatatataaatagaatcatgccttgaattgtgcatgaacgggtggtacatctgtgtagcaggtctctgaggagcttcggaactaaaaaaaatgtgtgagatatggagtaaaactaaaaaaaatgattg

SEQ ID NO: 72589 - DNA, 311 bp, Zea mays
tgtgatttatccaatttaaaactttctctttcttttaacatagattttctatggataaactcaacacaagagatggcattagtagcacaagcactagtttcttatttagcaaccctttatatgtggaaggcaagctagttgctaaaatcagaaaaacctcgtaatatggactaaatttcccttgagcccttaagcacaatatattttgaatgatatggataatatgcatggttattcaataaagtctaaagggctgacttaatccatattatggtgagtgtctaatattgaagaatcaaatcccaattaac

SEQ ID NO: 72590 - DNA, 308 bp, Zea mays
tatctcaacctgagaggaaagcttatcctatggggtgatgtgttagtttgagctttgccagtgtgatattcatatgcttcttacagtattatatgtgttgcatcatatgaactagtgtttccgctgcgatgaattattaattggcttctatagtgtaatagatagtcatgtggttaatggtgctttaagattgctttaaattggtatcttagtttaaattggtatcttaaaggtgaatagtggtaggttgatattcctgtgatatatccactaatttgaatggtgtttaactctgattatgtgcattt

SEQ ID NO: 72591 - DNA, 310 bp, Zea mays
tgccctgtaatcaggaggccactttatttattaaaaccaagaccagataacatcagaacgacacaataaggacggtaattgaacaagggatattcaccatgttagcccggatgagctcctggaacttgaacatgacgcgctgccgcgtcgtgacgggcgtgttccgccagccggggaaggccgtcctggcggcatcgacggcagctttgaactcatcggccgtagtgagcgggatccgggacaccacctcctgtgtcgtctgcgacacccccacacatccaccgttgaccgttccaaatccgatcaaccc

SEQ ID NO: 72592 - DNA, 315 bp, Zea mays
tatagattttctgagatgactaggggcttttgaggaagagtccaccctaggcatgtcagatcaatccacaactccagccagagtgatgatagaggaagccagcttcaaaggccacaacatagctcacaatcctcagggcaacagcaaagctctttcaggccaccagccccaaggggcagaggcagcaggggctacggaggaaggtatggggatcagcccagaaggctctattgtttattctgtggtgaagacaagggccacactacaagaacatgtcaggtcaccattcagaagcagaaggagattgccgaagta

SEQ ID NO: 72593 - DNA, 309 bp, Zea mays
tcataaccccagtgggacttactgctacctttttatgcccaaggggctcaagaatgctggaggaagctttaacaggatgtctgccaaagtcctccactctcaaatcggcaagaatgtgctgacatatgttgatgatatcatagtaaaaagcacaaagcaagaaaatcatattgctgatttgcaagaaacatttgctaatttcagaagggttggcctcaagttgaatccagaaaaatgtgtcttcaatgtgaagaagggaaaacttcttggttgtttggtatcaacaaaggacatcgaagccaatccaag

SEQ ID NO: 72594 - DNA, 307 bp, Zea mays
tctaaagggagaacacgtgataggtctaacttatgttcaattcgaaaaagatagaccttgtgcagcttgtcaagcagggaaacaggtgggaggagcgcatcacagcaagaatgtgatgaccacttcaagacccctggagctgctgcatatggacctcttcggacccgtcgcctatctaagcatagggggaagtaagtatggtctagttattgttgatgacttttcccgcttcacttgggtgttcttcttgcaggataagtctgaaacccaagggaccctcaagcgcttcctcaggagggctcaaaat

SEQ ID NO: 72595 - DNA, 306 bp, Zea mays
  unsure (1)..(306): unsure at all n locations
tttactgggacaccacgagncatttataattttttttcagtcgggccgaagcaaccactttggtacataaatgctatgaatgaatgctgatgtatgcaaatgccacgatgtaatgtaatgcgcaaatgaatgcccgaagcgtatatccaaagccacactcatccatcatttttttaggagcaaaacacacgtcagctctgcattcccttaagaacaactttggagcatctttgccttttacttaagcagtatcagcgttgactattcgctgtaagctctgtatccccctatggacgtttttggagc

SEQ ID NO: 72596 - DNA, 301 bp, Zea mays
ctgaattcccgtttatcagcattagtattctttagccaggggcctcaggctgtcatctcaaatgttaacatcaaaagaaaaatcaacagctctggagtacttaagagttctacaccttatggcatgcactctatcccctttcagatcacaacgcctctttcagcatgaccatgtcaacaacctaatacagactttcttcttgcactagaggcctctgactttatattgcaaaagaccctctaattactttaaagcaaagggcatctctgtacagatctttaaaacattacattttttgttt

SEQ ID NO: 72597 - DNA, 229 bp, Zea mays
ttcaccgctaaatatagaggttctctatccgtccgcgagctacgacgaccttccacatgcgactgggagaaggtgcgacggcggctctgcagcaacggcaactccgtcgccccgagagaagatatgttgtccgctgcttgcaaccacccaccgaccaccgccccaactcgccgatcgctactaccgccgcaccttgcccaggacgagtgctagcagctgcggaggtcgt

SEQ ID NO: 72598 - DNA, 335 bp, Zea mays
  unsure (1)..(335): unsure at all n locations
tatctctgatgttcgctatgacctccagttncgtttgcacatggtagttgtcggattagagcactagagcactatattgggcgctcgctggtaatgtgctgccgtgtggcaggtcggcgccaccctatgtcngctaggtggggaagaacgactccttgtctgtcgatctgaatggacggatgagattagatgccaccgtacccgttcgtgagtggatctgggcctttggattgcaatngggcggatgcctcgcgatccgtgctatctataactgtggtcgttggatcttgatccaatggtctgcgttacatacctgttcggatgatgacatatct

SEQ ID NO: 72599 - DNA, 411 bp, Zea mays
  unsure (1)..(411): unsure at all n locations
ttaccccttattctataatatgcttaaggataagggaaatagaaaaatgtaattaattaatgaaccagagagtacctctgttnttgttaggttacttgttcaatataattcactggagaaatatatcacaccctgctttagtgtaaaataagtaggatcccttttgtttaataaaacacgtaatacttatgaatactctacaaaaataaccccatggtaaatacacccncacccttgtgataactatttgtttattagagagaacttangacanatatgaaatctgctggttgacattcttcacataataatgtagtagaaagagcctttttgacattnaacttaagaaagtcataactatataaccacctcttagttgtctgtgattttatcacagagacctattattac

SEQ ID NO: 72600 - DNA, 399 bp, Zea mays
  unsure (1)..(399): unsure at all n locations
actaactacctaaatatcttaatctccttcttcaaccagttggagtgcgagtacctacctctnccttgatntctcttcacctcttttcgtcttacaagtgtgtgcttaattccatactttgctgcgttntgagtttctatcaccatcaccttgtcatccatcgatcttgccttgatactcatctttattcatacctcaaaaaatctncgctcttccacctcangatgagagtggcagttacctatctggcctttgacgagctnttttatattgcacgtgctgcttaactcaccctctgnagtattatatncgtggtcttataccattacctctcttctacatcttgccattattaccttaaccctcgtgatacatatgcncttgccacatgctttatct

SEQ ID NO: 72601 - DNA, 445 bp, Zea mays
  unsure (1)..(445): unsure at all n locations
ctgtctggtanggcttcgatagcacctactgtcccgtgttcatctcctncgagcgaatntccggctntggttaaaaatccacttcgtgtgcctcgcccgctntcaggttacgtcttgcgcgccactctctggctgtgaccgtgtagagtgcgcagtgacaacccgctagtgtatggggccaggattcagagattttctcgactgagactatatttcagtctcttcttaatataataccgggaggatagtctttgcctcccccgaccgagttttatatggtngctctgtaagatgctccattattatatcanggccaccanagttggttaaatggtttgtgttgtggagcactaatggcatgtacaatcccatttaataggggtctcttgaggagtctttgggagtatattgaaaanatacatgagacgganagagcccgtctcta

SEQ ID NO: 72602 - DNA, 230 bp, Zea mays
ggagacacattagactaccatgtcatgtgagatatacagaattgagcgcatgccatgccgggaagcaagttggcacccatcatccacacaagaacatcatgacgaccgacaggccacttgagctactccacatggatctattctgcccgactgcttacataagcatcggcgggagtaagtataggcgtgtaatagtggatgattatcctcgcttcacttgagtattcttt

SEQ ID NO: 72603 - DNA, 354 bp, Zea mays
  unsure (1)..(354): unsure at all n locations
ctgcagcaagtgttaagctcaacaagaagaatgttcccaacgctatatatgaagaaatcaacatgaacgatgataaaggtatanattcaattagtcatgttgtttgtactaatcatctcttcatgtccttcaagcaccaaaagggaagaggaaaaggatgtgtttcaaatgcaatgagataggccacctcatcgcgtcttgttcgtacaaagaacaaaatgaatggacaaggagttgctttagatgcaacaataaggaccactttatcacttcatgtncggtcatgaagaatcaaagttgtgcatcctccaagatgaccctcttcaaggaaaatgacatacagcaagcgtcatg

SEQ ID NO: 72604 - DNA, 460 bp, Zea mays
  unsure (1)..(460): unsure at all n locations
tcaatctagtcttcatgatgaatttgttgagatacttatagtcatgacactagagaacaagaaattataaaagtacttgactgatggaaccaccaagggataaattgacatagaaagcaatgactctaataatgagtggtaatggacaatgagaggcttatagaataaattaagaaagtcaagctcgagatagaacatcttgttcctagtatgcanaaaattaacaagggtcaatatctctaanatgagctcctcatgaacacagtcttgataaataacaggagtggtatnggatacaattcatttgtcccaaatagcaacataacaagactaagcagaatacanagctcatcaagtgttatgagtatggtaaagaatgacactttgctcacaatnganaagccacatcaccaacttcattgcctagcactaacaccttttgcatatatgccactatgtg

SEQ ID NO: 72605 - DNA, 378 bp, Zea mays
  unsure (1)..(378): unsure at all n locations
gtcacggaagcactatatggctcatattccaaccatcatacaacaaccaattcggatcacccacgtccacgtaattntagggcgactaaatatgcaaatctagcacagttttgaatcgaattngatgttctattcattcttcaatgtccncgataaccatgctaccagttttcgaaaaccggactaacccaatcttggcctaccggccatacaacttangatatttcaatcgattggaggacactcgtcagctacacaagatccatancacttctcagctcggttagcttatgcacnggcaatacccacatcacgcacgcgcanaccacagatccgcgcaaacctacatattgacanacgatctgcacgtgcgtgtgt

SEQ ID NO: 72606 - DNA, 235 bp, Zea mays
  unsure (1)..(235): unsure at all n locations
gtgggaggagcacatcacagcaagaacgtgatgaccacttcaagacccctggagctgctgcatatggacctcttcggacctgtcgcctatctgagcataggaggaagtaagtatgggttagttattgttgatgactnnttccgcttcacttgggtgttctttttgaggaaaagtccgaacacatgggactctcaaacgcttcctcaggagagctcataatgagtntgagctcaaa

SEQ ID NO: 72607 - DNA, 337 bp, Zea mays
  unsure (1)..(337): unsure at all n locations
tcactggctatctgatacagcttgtctagtagtacaagagggatgcttctgtcaactattctatcaccaacttcagctagaagctcatattcgatgttatcacagacataataatagtcctcttgcgaactagcagaanaagtcccataccgcatattngctagtggaatcagtggaaggccatncatgcatttaccgatatcagtattgtaaacatcagtaagacaatattccaataatattaacttatgagacgttcctagcgtagcaagtntagcataatccttgaggaaatgcctcactatagcaggacttactatttngagcatagactgca

SEQ ID NO: 72608 - DNA, 323 bp, Zea mays
  unsure (1)..(323): unsure at all n locations
gagacactaaggacctcagatacanaatatactgggacctgcttcttgattgtccatcanacttctcctgcacaagtgccgcacttactgctgagtgcgaagctgccacatacaacaacagaggagcccctggcattggtggagttaatggtgntagatctatcaggtattgcttgagtcttccatagctgtttggtgagctgggccccattgatagacttcagctgattgtagcacctcgaagaagggtagatatcttccgctgatctggatataaatctgttaagagaagccagtcttgctgtcaatctttgggccccctt

SEQ ID NO: 72609 - DNA, 362 bp, Zea mays
  unsure (1)..(362): unsure at all n locations
cgcacacttagatcgcgccaataaggtaacnnctcaaatatggattgtttcttccaaattccagacaatgctaaattgtgtatcccgaacttatgttcaatgtccttcacactctcataaaccacatgtgcagacctgcgtgatggagccttgtcagtttcaatactcccatcaaatgcatcgacatatcttctgtatggatgatttctgcgtgtccacctacgatgtcccagggatacanaattttctactggtntatagataacgactctttgtattctcttgacaaatatagcacgctntgtatccctgagtggataatcctgcaatggttccaatgcctttatagtcatggatggtac

SEQ ID NO: 72610 - DNA, 367 bp, Zea mays
  unsure (1)..(367): unsure at all n locations
acaccgagacccctgtgctnttcctanaccaagtcttcaacttgtgccctcgcggaactattcatatgagtctctgactgttcagacacccccgacttcttcttctttctccccgagatccctccactcattgatacagtaaccgcggaagtaaacagggcggcgcggcttaccagcggcgagggatgtcatgcgaacggcggtgttagctctcggaagtcctggcggtcacgtcgaggtacgactcgtctatggggatggccggaattggtcgagccacgtgcgaaggcgggcgggctcgtcggcggtgtgtactccggtctgctcacagcggtagagttcaatccaagggcatagggagcttcac

SEQ ID NO: 72611 - DNA, 474 bp, Zea mays
  unsure (1)..(474): unsure at all n locations
ctcagcttgctcggtgactaatctagaaggctacacacaatgtgagtgtatagatggcgagagtagcgtgtacccttcgtggcaagaggctggacagtggtgtatctgtgctctcggttggagtgaacctggtctggtcttaagaaacccaatggtgaagtgacatatgcaagggttaagtgctatatatgtcgtgtggttggagatccctagctgggtatttaatcgattggatcaccgntacttctcggatatgaagacttggtcactgccctacacgtagcaatccagtanagataaagggtgataaaagatgactagtgcangtcaagtgttngaactanggtagaaagaactctagctgcaggtaacgaacttaacttgataagtaaactggatnttaanggatccactgtagtaagcatgtctgcanacagagtctttgattcttgaataacctaccttgaccccctc

SEQ ID NO: 72612 - DNA, 232 bp, Zea mays
  unsure (1)..(232): unsure at all n locations
cactctaggaagtctcactctggctctcatcantgctttatgtatatgagtgaggcatctagttctaggcaatcaacacatgctacattgcctaagaagaacactcctattgcatcacatgatcataacatgttattgtagaccttgatgcatctatgtttaactaacaaacatgcaagtattgccaatatgatgggtcaacacagtggtcaagacttgtgttggtacccaa

SEQ ID NO: 72613 - DNA, 397 bp, Zea mays
  unsure (1)..(397): unsure at all n locations
tatgttgagcaacctcccagctctgaagacagtgagtattctaaccatgtntataggctctctaatgcgctgtatgggctcaagcaagccccaagagcatggtatgaatgccttatgagattccttattgctaatggcttcaaagtcggcaaggccgatcctactctattcactaaaactctngacaatgatttgtttgtatgcccaaattatgttgacgatatttatatttgggtctactaacgaatctacatgtgaagaaattagtaggatcatgacacacaagttcgagatgtctatgatggnggagttgaaaatatttctatgattccaagtcaagcaacttccaagagggcaccttcattngccanacaaagtacactcaagacattctaac

SEQ ID NO: 72614 - DNA, 359 bp, Zea mays
tagctccagaaggctggctgaggagcctcagtacctctccgttcccggaagcctggcgtccttttaatcaaggaggtcactgtcatatgggtgtgcttggctacgggcggggagagtgttgaccctgtaaacgttgtgggggcggcctggtctacgagttttgctttaaagtgaacatactatgcgttgaggacctatactgtgcggatatcaatgtacacggctgtcttgacggcgtctagagtagagtcctgacgacgcagcagcgcagcgacttctagcagtagcgcagttatctcagcagtagcagctggcgcaggaacttcagcagtagcagctggcgcaggatcttgccagta

SEQ ID NO: 72615 - DNA, 308 bp, Zea mays
  unsure (1)..(308): unsure at all n locations
agcgcatgccaagcanggaagcaagtnggtacccatcatccgcataagaacataatgacgaccgacaggccactggagctcctacacatggatctattctgcccgatcgcttacataagcatcggcgggagtaagtactgtctagttattgtggatgattattctcgcttcacttgggtattcttttttgcaagaaaanatctctatacccaagagaccttanagggattcttaagacgggctcacaatgagttcgtgttaatgatcaagaaaataagaagcgacaacgggacggagttcaagaacac

SEQ ID NO: 72616 - DNA, 374 bp, Zea mays
  unsure (1)..(374): unsure at all n locations
tctcttgagcctgtggagtaagacccacacacgccttcgctgcgccactccgattcttgtaggtgatgttgatcggattgtcttcattgggggtagcgactaacccncttaacaggagcattgatacgcacttggtgaagatgttgtcgactctgatcttgacttgattatagagggtgtatgatgccaattcggacatgtgcaagatggaagggtacagatagaaaaggcaagtataggtggattaaagagagaatatggacaacacccaactagctaactctatggtactcagctagtaaacagatgtcattgcagaccaangggcacaacacatcaacactcatcacanagaagcaaatcagtcatcacag

SEQ ID NO: 72617 - DNA, 220 bp, Zea mays
  unsure (1)..(220): unsure at all n locations
accacatactgcatctctttctttaaattcagtttgtttattagttcaaatttgattccagtcaattcaaccagcgtcttganatcactttacagtaatgccaacacaagaaactccacatacgcaagatatattattatattattattgttatagacatctctgatataactcactactgtttgacatatttgttgtagctcataacgacttaattatc

SEQ ID NO: 72618 - DNA, 212 bp, Zea mays
  unsure (1)..(212): unsure at all n locations
gtcttagcaattaagcaagtgttgagttcagctctattaaaatcaactaagtatagctgaccctctaacacntcccttaatgctactgaatcatcacttcttctaaagacagtaacacctatatccgtataaagacagnntgtaacccatttacataantgagaaactgaaagcaagttataatctaaagaatctacaagaaaaaacattgg

SEQ ID NO: 72619 - DNA, 280 bp, Zea mays
  unsure (1)..(280): unsure at all n locations
cgactcaaccggctgaagaattgctggtgtatatctcttgcacgactcacgtggtaagcactgcggtggtagtctagcgagtggaagaatggcatgcctacncggtacaacatcctgtttacttcatcattgaagttctaggtccctcgaagaaatatatgctcagggtcagaagctattatatgcagtacttcttactgcccgcatgctgcgtcactacttngacgaccacaaagtcatagtagatactggttttccaatatgagatattcttcacaac

SEQ ID NO: 72620 - DNA, 370 bp, Zea mays
  unsure (1)..(370): unsure at all n locations
tcatctggtctctcatggcattcaagtgcgtctcccgggcacgggcaggccacccagctagcccttgatgatatggtatatctcgatcgatcgcgctcactaatgatttgttcccctccgcatgagtggattctcgatgccgaagattgttagcgactctctgttcatcatctacacaaccgcagttgggctgagcatgttcgcttcaagtaacgttcgtacgtacgtagtctcactaaagactaaatctggggcacgtacgcgtaaatagcaattaatttggattntcttattaactagacctatatatgctgcatgacgtgtatatatatgcacgtaaggatgaatcattagttttcagggacgttca

SEQ ID NO: 72621 - DNA, 316 bp, Zea mays
  unsure (1)..(316): unsure at all n locations
acattgatatcatgattntccatgggtctttgcanatatanggctaacagacgagctctcttaacagtataacacacatttgtacataagttatcatagtattatatatntccgttgcaacgcataggcacttacctaattaaaacgttaatacgccgatattactgttacctcggatggaaaatgtcagctntactgagcaacgagtccatgctagatacatggaggccattntattggggagatccgattatntatttgctattacacgaatagtcccctgtgttaagggtggaatagacaatgataatttcta

SEQ ID NO: 72622 - DNA, 205 bp, Zea mays
  unsure (1)..(205): unsure at all n locations
ccaccacgacagatgccgagatagagagaaggacaggagataagggaggtgaccgacccgatnacactcgtcaccatgcaccatctgccctaagcgaagggcccacgagcattatttgagctgtgctacacgcccaccagcatcttcaacggtaaacatatcttcgcaccaggcatggtacccttgtctgctccatgcttcgtct

SEQ ID NO: 72623 - DNA, 337 bp, Zea mays
acaatgtttgccaaagaattctggcagcctcgtgtattgtggaacaccctccctcgaccattggtaaaactcacagcgacaaggtgaactgagtccctgaccgggcaggggccgcgatgtcagcccagcctggaaagcatgtgtacgacagtttataatgcaaggctgctgatcgagagaaactgtggagcttccagacttggacccattcgggcgatattgggccagagaacctgcggacacttgcgtaggcttgcctggtagagccagacacgtgactcccatattgaactttgctcgtaccattacatgctgatgccctctgaagtggctaata

SEQ ID NO: 72624 - DNA, 271 bp, Zea mays
  unsure (1)..(271): unsure at all n locations
ttcaattccatcactcatggatgacataatgggagtntttaatatgtctcatcccatcgctagtgaccctccaaacacctagaataactgcttctaggtagtaaacaattctagcactataatcggagaagttagtgctgtcaaaataaggtggtctatgggtactcatacatcttctctataaagtgtcggcccgattaacagttaagctaatatgatccatatgagccaaaccaggctctgataccaaatgataggaacacgaacgctt

SEQ ID NO: 72625 - DNA, 339 bp, Zea mays
  unsure (1)..(339): unsure at all n locations
ctcagctctctttgcgtcatcaacgtgacatagaaccactctgatttccagtctgctgcccattngcttcggtagctgattaccggaaattttgtgggtntccgataggcgaagntatagcaaccaaaattgtcgtgcagcccatcctttctagcctttgtctgataatgtagctcgtgaacccggcaaaagctgtccgcanatggttccaccgctnggcttcngagtgcccagatataaacgctaagcctaacgaataggcgtaggggtcagctggtgaaaatagataccgaacctcttcagtaccttcgcaataatcccatgaagagggaatcttaa

SEQ ID NO: 72626 - DNA, 176 bp, Zea mays
  unsure (1)..(176): unsure at all n locations
atctatgaacccaaaagtcctttgtgttagcgctctggaacctcactacctntctagcacaagtngcagatttaggttgcctagntatatgagaaataattgacaagctatgagtggagttgttaccaatgagacaatccttgcattgatgtccctttttccggcatgtgtagcat

SEQ ID NO: 72627 - DNA, 330 bp, Zea mays
  unsure (1)..(330): unsure at all n locations
gcaccgtctagaatcttntgatgatgagagccatctcttcatcattaagtccggccgcctcaatctgtgccacctttgctaggtagcgccccttgcttcgtgttgccttgagagcaatgggttgcggctcgttgatcggaccattcaatgcgtcgtccacgtacctcgcctccttgatcatcattcgcccgctaacgaatatcccaagaacttcttcgggcgacatcttggtgtacctgggattntcacgtatattgtntaccanatgaggatcaagaatggtaaatgaccttatcattatgcggacgacgtcgtggtccgtccatcgcg

SEQ ID NO: 72628 - DNA, 337 bp, Zea mays
  unsure (1)..(337): unsure at all n locations
tggacagcaatacagcagtcaattgtgtcagtcataactcacaagatatntactcataaatagtaaactangactntctagaaagcttgaaaagtgaactgcaactttggtatttttacctcaacatgaatcaacacttaacatggttaaaacgtgctaatacaacagcgctgtccagattggacagattcagacttgtgactnntaaaattcataactgaagattcagacatccanataaagtgatcttagacgttctagaaagctaattaaatgttctacaaaaatatttataacatctctggctggttaacatgtatangcgtgaaaacactat

SEQ ID NO: 72629 - DNA, 376 bp, Zea mays
  unsure (1)..(376): unsure at all n locations
acatattctggtatgtatggagaatagcacgaagcagtatgtanaacntagcttctgctggttctgccaggcttctgcttcagcaatctctctttgcttctgcatggtaatctgacacgttcttgtaatgtggccctcgtatcaccacagaataagtaatagatgtttctgtgctgatccccatatctttctccgaagcccctgccagttctgccccttagaactggtgtgctgaaggaactatgtatctgttctgaagactgtgagatatgttgagagctctggaactggcgttcttagcatcactctaactggagctatgtgatgatctgacatgcctatggtggattcttactccgaagccctagtcatctca

SEQ ID NO: 72630 - DNA, 407 bp, Zea mays
  unsure (1)..(407): unsure at all n locations
atcatctaagctatactcactacccgcgctggcgttatatcatgatgatccgtctgtatntcatntcatcttggtaagaaagcgctgatgctgttctaactcgtggtgctgcctgtcgtctccagcacacggaatgtccagtgcgggcaaatcatatgattgcctcccggccgggcggtccggcgctagctntctgctttttcgcgggcatcatgaagtgaacagacaagtagttctttccctgtctccgtgttcngtaaatgcgatctctacctacgatcattatgggctgttcggttcgcagggaatggagaggtggaataaatatgactcggattctntcaatatatactataagttntggagatatggaattaatcctggtctgtcccacagaaacgaacaga

SEQ ID NO: 72631 - DNA, 140 bp, Zea mays
  unsure (1)..(140): unsure at all n locations
cacatctgaaaatatagccgcaagcnactattcagaaagagatcatgcattgatggttaacaccgatagtgtgccaaaatgagaatccgcagcaatttagtgaagcgcatttatcctatctatcatcctgaagcctaaat

SEQ ID NO: 72632 - DNA, 124 bp, Zea mays
  unsure (1)..(124): unsure at all n locations
tgtggacagtggtggtgaagactccgaagatcgcccttggcgaccaagtcatgccggttttcggcaaatcaactatcagagaanatcatctttgccacatgaggngaaggtatttccgggatct

SEQ ID NO: 72633 - DNA, 368 bp, Zea mays
  unsure (1)..(368): unsure at all n locations
gcatgtcaagcangtgaagcaagtggtgtccatcatctacacaagaacatcatgacgattgacaggccgcttgaactactccacatggatctattcggcccgatcgcttacataagcatcgacgggagtaagtattgtcttgtaattgtggatgaatattctcgcttcactcgggtggtcttttctcaagaaaaatcacanacccaagagacagtaaagggattcttgagacgagctcacaatgagtttggattgagaatcanaaagattagaagcgataatgggacagagttcaagaactctcanatagaatgctntcttgaggagaagggcataagcatgagttctcttctccaacacaccacaac

SEQ ID NO: 72634 - DNA, 325 bp, Zea mays
  unsure (1)..(325): unsure at all n locations
ggtgttgatgataacacaacctgtgaactaatggtatttccaagtgtttgtgtgtngtagtccacaggatgcaaagtggattggactgaggctctgangatgcaacacctcanagaagacattataataccaatataagacattacaaagtcatattgaagacaatntatatatgctaagagtccaacacatctagaagtataagtgagatacaaagatgcaaaacataagtgaacttgacanagttgagaggaagggctgattgaattggaagtgtntcacanaatcaaatctactcaaactgacatggcttcaactctgggat

SEQ ID NO: 72635 - DNA, 340 bp, Zea mays
  unsure (1)..(340): unsure at all n locations
ctcagcttgctcgctagataccacccgagtccacggagtcgtgtatctctgcatatggcagaatttcacagctatcaagaaaatgctcctcgacgagataaagggcaagtgggccgacttgttacctgaagcggtctgtgcactatacacgactgagtgtatggcgactgggttcacccctttccgccttatatatggatcggaggccatgaccccgcaagaaatataacatgggtccncacggacagtctcgtcagctgcccccgacgtggatgaacccacttcgaaggatctcatcgatggagagcgcgtcttcgccctacatggctctaataaatac

SEQ ID NO: 72636 - DNA, 296 bp, Zea mays
agagcataagaccaccgaagtgtgccctggtctggcgcaccatactgtccggtgtgccaccggacagtgtccggtgcaccatggaaccaaactctgaacttgccaccttcgggaattctgggagccgcttcgctataattcaccggactgtctggtgtagcaccggactgtccggtgtgccagcggagcaacgactacttcgcgccaacagtcgtctgcatagaagcagtaatgcgctacagtgcacgcagaagtcatagcagagccagaatgcgtatcggacagtgaacagtgac

SEQ ID NO: 72637 - DNA, 353 bp, Zea mays
  unsure (1)..(353): unsure at all n locations
gcgcatgccaagccgngaagcaagttggcactcatcatccacacacaaacatcatgacaagtgacaggccactggagctcctacacatggacctattcggcccgatcgcttacataagcatcggcgggagtaagtactgtctagatattgtggatgattattctcgcttcacttgggtattctttttgcnggaaaaatctcatacccaagagaccttaataggattcttgagacgtgctcanaatgagttcggcttatggatcaagaaaaatagaagcgacaacgggacggagttcaagaactcacanatagaanggcttcttgatgagganggcatcaagcatgagttctct

SEQ ID NO: 72638 - DNA, 324 bp, Zea mays
  unsure (1)..(324): unsure at all n locations
tgttcttcaatccgatgcaacatctacttgttcacctaccatacgaagctaaggtaagaggtcctgtgcaatatagatggatgtatcacatctgaaggacactaaagaagctacgtgcaatggttggtaataagagacgagttgaaaggtgcatcgctgaagaattcanatataaagagatagcatcgttcacgggcctgtactttgcagaggaacacaatgtcaatgtccatacgttgcggtatcatgtcgacgagccccctatcagtgatatttgaaattttcaatggagggggcaatactgtggacccagcacaacatact

SEQ ID NO: 72639 - DNA, 159 bp, Zea mays
  unsure (1)..(159): unsure at all n locations
tagcgtcntctgctagaaggcagtccgcaatgatctattcatataagcatatactgccgcgtttacaacctaacggtttactctgcatagcacaatctgctatattttatgctagttatctatagaggagttatctcctggatacatttacatgcagat

SEQ ID NO: 72640 - DNA, 286 bp, Zea mays
  unsure (1)..(286): unsure at all n locations
aaatccaaaccttcgacttgtgaatatacctttggccacaagtcggctntgatccttgtcactacaccatgctcatcttgcttgtagcggaagacccatttggttcctaccaacatttgattaagacgtggaactaaatgtcatacctcacttctagtgaaatagttgagctcctcttgcatcgccatcacccaatccgaatcttggagtgcttcctctaccctgtgtggctcaatagaagagacacaagagtaatgctcacaataatgtgcaacacgagatctag

SEQ ID NO: 72641 - DNA, 224 bp, Zea mays
tgatgtgcatgatagatactattatggaatcacgtgatgctactttgcttgagcatatgtgtccaatgatagacattcatagcaatctctagatactcgtgctgagataatctcctgaacataatacacctatagagagttttgaacagccacatgatattgctctagaggaggacgacactgatgctcctagaaggagcaagagacaaagggttgaagaatcc

SEQ ID NO: 72642 - DNA, 355 bp, Zea mays
acagtggatggtgggttactgcagccaaaatgcgcacttactaaacttagcatataatagcgggtcccttaagcgtgttaatacgatccgcaagtgatgagcatgctcctcttcattcttggagtatattaagatatcatcaatgaatatcaccacacagttggtcagctcgtgcatgagtaccgacgtcatcacatatgtgaagtgagcaggagcatgtgtcagtccgagagacataatcagatctcacataacccataccgcgtggtgaaagcgcgctttggtatatcttcgggtcggatacagatctgatgataacgcgacctgacgtcaatcttggagaatacccaagctc

SEQ ID NO: 72643 - DNA, 163 bp, Zea mays
  unsure (1)..(163): unsure at all n locations
tctatggcgccgagctctgtgccacgtcagcgccacgacgtctggttgtgccagcgcagcacgtacctcngcgccatagtctatggcgccgagctgagtacctcggcccatagctactggccgacaaaggtcaaaatgacttatatttttagggctaacatga

SEQ ID NO: 72644 - DNA, 93 bp, Zea mays
ctatggaactgaacctcggtaaaataaatcaccgcggtcactcgccttgattcttggttgagttatgttcgcctctctttccgacttgaaggt

SEQ ID NO: 72645 - DNA, 385 bp, Zea mays
  unsure (1)..(385): unsure at all n locations
catgtgattggtcatagcggtgagtcaacgtagggagtggtcgcgttggcgtggaggactgatctgggagaaatcagcaatttctcggctacggtggatggcaagccatggttagagttgtgctgtgttcgtgataacggggcggagtaagattagcactcaanttatagaggctggccacngctatcccgaaattgaatgatggtcggatcactgcggtgataagatggtgtactggtgagttcgtcgtggcgctcgtcggcataataactcaatgatagtaactctaggctcgccacggttatgggtacatggtgaaaggaccacgacgtggcgcactgagatcatcggcatccacgacgacatcggcacttggcatgtcgac

SEQ ID NO: 72646 - DNA, 305 bp, Zea mays
cttccttctacttttcattttcctgatttcctctctagccacgtacttccatatgctcctgcggatctctcagatcctggcgatctacgcgccctcctagatcgcgctcctggcgatctgcgtgctcctgagcgcagcgcctgtcacgggcgcgacgctgtctgtcgtatgagcgcccgtacatgacatacatcacccaaccacttgttagggcatggtttccacagtatcaacaagaattctcaatacacgagatgaaagtcatggacctgcagctgaatatgttaacggttaatatcaactat

SEQ ID NO: 72647 - DNA, 249 bp, Zea mays
ctccatcagcagctttcgaaggtatttgatcttctggaccagccagcctctccgatccgaacagagagttgatggaaaatgactgctggtatctgttcgatgaacgagacagagttcgaatgcgatagaaatcggtctgacaagctatactgttcaggtctcactattcatactaaaatcgaaccagcctataatactagattcctaactgagaagtggatctggtggctggggcgttcagctcattct

SEQ ID NO: 72648 - DNA, 449 bp, Zea mays
  unsure (1)..(449): unsure at all n locations
actatcntcttcggcacaccatgaaggcagactatccgtgacatgtataactcatcttacgttgctccggtgtatgtcgtcttcacaggtatgaaatgaggcacctttgttaagcggtccacgaccacccatatggaatcataaccggtctcggtacgaggtttccaactataaattcatccaatctcatccacttcactgaagaatcgcaaggctgcaacatccggntggctctgatgctctgcttggttcttgcagtatacaatgcactatttggactcctttataccaacacaaacctcttttagtctggactctctactcctggtgatgagaagtgctatgacttctgagatagtccaatagttgagcggaccacatcgtcttaccgaactctctatcttcgagcttgctttctctggtagtgcgactgtgagatatatctctgc

SEQ ID NO: 72649 - DNA, 352 bp, Zea mays
  unsure (1)..(352): unsure at all n locations
tatgaagcagagatatatgcanaggacatgctttctcttccttatatatggtagatgcanaggatgcttataagaggaagaattatgtacanagttaaatgaaaggaagtggttntacccttttgtaccttctcatagagacgctctcttcannttgtgcttgtccttaggtcttagtgcttaagacctatactcaatgacaatatatggaaatactttgcacaagagagagttctacaactagtgatcttttcaagttattgtagcatatatcanatggatcacaagttgcataaatgaatcatgaattctnnctttcttcttagtgcatatcaagatagatgtcaattaa

SEQ ID NO: 72650 - DNA, 347 bp, Zea mays
  unsure (1)..(347): unsure at all n locations
cgtgactgataccaatcttttncattactgaaccatccggttccttcaattggccatgtcacagtcacctcctttataatacataccacgtgactgaaccagcaattttcatcacaaggagcagcatcgctgatgcgaagaagggacggactggttcacactcgacgaaccgatgccgaattgtggtgcaagtggatgcatgtcacatactagtctgtttgtttgaaagggtaataacanagtcacattacatactaaagtgtggtcacgataatcatggtggtggtggtgttgtgtggtgggtggagaagaaagngcatgactccactcacatcatactaagcctg

SEQ ID NO: 72651 - DNA, 317 bp, Zea mays
  unsure (1)..(317): unsure at all n locations
gcattgagtgtcccacgaccaatgattgcattgtaaggatactccatatcgacaatatcaaacacaacttgctcagtccttgtatagttgacanatccgaaagtcactggcatcgtgatcttgccagtgctacgatctgccttcctccgaagccacanagagggtgtgtagcatcatgaatcatatcctctagctcttgcatctatctataggccttggcaaatataatatccgttgcactgcctgtatcaaccagaacattgtggaccagagattccttgatgacacaagagatgaccatagcatcattgtgagga

SEQ ID NO: 72652 - DNA, 375 bp, Zea mays
  unsure (1)..(375): unsure at all n locations
cacaccgacatgatactgtcattgttcgngcaccanaatgggcgtgcctgacgactgtgcgccactggcgcgcattgaatgcgcctgcaggtgaccgttggcgcggaagtagctcgtgctccgtggttcaccggacagtccggtgcacaccggacagtccggtgaattatagcggagcggcttgaattatagtccgacgctggcgaggtcctgatgccgacctcccatggcgcaccggacactgtccggtgtacaccggacagtccggtgaattatagcggagtcgcctccggagattcccgaaggtagcgagttngagtctgatgtcccctggcacaccggacattgtcggtggacaccggacagccggtgacc

SEQ ID NO: 72653 - DNA, 278 bp, Zea mays
  unsure (1)..(278): unsure at all n locations
taccacggataataggagatatgggaatgccgaggccgcgaagaacgaaaggagtgtaaaccactgactcatgggtatcttcagttgggacagtggtcccgtggcaagaacaccaagaacagagttcccgtggagggagaaccncgatggaacaaggcggataagctcaacttcagaaatcacagacatatggttacctgcgaaaggtaactgactggtggtgtcgatggcggtgatcactgcagcagacgagttcacggtttcctcttggcgccatc

SEQ ID NO: 72654 - DNA, 291 bp, Zea mays
  unsure (1)..(291): unsure at all n locations
ctaagctacctgctccattcgatgtactgactgtgtcgtggggacgtgtcgtganaagctcaattccgagggtgcctgtagaccgagctctatggcggcgttcgggctcaattagtgatcctcaatggagcgccaagggtagaattatgcgtagattgaagtcgagcacagattattgngtattgtggctggtacaagctcgccggagcagccgctccaccgtccggngtcggggacccggtcttgtgaagaaaatagatagatgtgcctaagtgcacatgtcagtgacac

SEQ ID NO: 72655 - DNA, 311 bp, Zea mays
  unsure (1)..(311): unsure at all n locations
gagactgatggtgtatggagattctctggtagtcatcagtcagaataacaaggaatgagattgntcaagtgattcaatgggaaaatactgcgccgtcgtccggaagctagaagaataattcgagggtctggagtttcatcatatataaagagatcggaacacggcggccgatgtactgtccaagctcggatccggtcggactcatgtcccgcccggaatctttgtgcaaggaattcttcagccgagcatctcgacggatcanatagaagagtgcaacatcatagatcaacctgagtcagactctgatgact

SEQ ID NO: 72656 - DNA, 458 bp, Zea mays
  unsure (1)..(458): unsure at all n locations
ctcagcttggtaggccgcactgagaactctgacggcctattactctttttatcntacacctgtcctttttctggtgtaatgttatgtanctgtntgtaggatgtagcttgctaaggaacaannatagatacanatacacgtgagtcttgctattacacctcacgccagacaacgagattatatgaaataaaatgactgttgattggagactggccagaatgctgacagataagctggtataaatcatgatgattctgangacatatgagatgttgaaacgaaagaagaccgcactgaaacaaatcgttaacttctcatgactaagtatctctgatgctccaaagaatgctcttgaaattatcagaagaagcaggttgtctacaccgtaactatacctgtctcttgtctaccatattcatgcgtaacatctgtgcttctagctttcctcaatgctcata

SEQ ID NO: 72657 - DNA, 474 bp, Zea mays
  unsure (1)..(474): unsure at all n locations
actgtcgcctgccaccgaagaggagatggtctcacacaacatctggcaggtatgcaaacaccatctcaataacgctaccattcgcctcgtggagtatgccagattagaatagaataaaccaccaacccacaccccttgttatatcacttctaagctcatggccaggccacggctgctagaggcactgtacttagtggagattaggcttcggaaaattcacttggtagtacctatggtggtgttaanatataataagaacaaacaatttcacttaccagtgccaactccacggctctagatctgctcttggatntttaagcatctttaagtgantccaaanatccatggatctgatccgagcacaatntttcctttcaggtgctgctgacatagctgggacatanatgtagcgtcacacacttcctactgtcagatcatctcaattatntggtcttttatttagtagcttcgtct

SEQ ID NO: 72658 - DNA, 511 bp, Zea mays
  unsure (1)..(511): unsure at all n locations
gctaaccgagaggtctacaaggntagtatgtctntgaatctatcatcttctcttatgccatcaatataattgtcaagatgcaagtcaagttctaacaagtgagcgctcgacatgtcattacgaataaaatcagcttgcgttcataccttgtgtgcatcanaagaagcaatagatgtggaatgatcctaggctcacatacatagnacagctcatattacctcctcaccgactataagcttatgctattntgacaatgacccaatatatacttctcttctgaagtggcatcgttggttggtatgaacaaacgtgatgatcttcatagggttataattccacccattcangaactcgatatcatgtntgttganaatgaagngattctttgatgaattatcccaccatcaagctgactgttgattctctctttgcacattacaagtaaatcgcttgatatatctgctccttcttgaacacatgataatcattgttattcataatacaacataag

SEQ ID NO: 72659 - DNA, 128 bp, Zea mays
atcaactaagtagagcttgacgtctaatacacccttaacagctaatgaaccatcactccttctaaagacagacacatctacgtttgtgaataagcaattgtatcccatattacaaagttgactcacag

SEQ ID NO: 72660 - DNA, 404 bp, Zea mays
tcaactagctgagagtacacatcatacatggaactgtgttgattctacgccgataccagcatctcaaaggaaattaacattagaatagcatcatcatgttaggatgaagttcctggaatggcctgttgaattacacccatcatgtctatactgtctaccgttaaaacttgtggaggaactatacagtcaatcagatgaaatgcgaataaacactctaaaagattgcaatgactttttgacacaaaaaccacatatactattactctggactattacctacaccgtctatatgtgtcaaaatatctgtgctgaaatccccaggcgatgtactaaaaaaaccatttgtaataaacgaagatgatgataccatcaagacctggctcaatacattaccttctactgcg

SEQ ID NO: 72661 - DNA, 343 bp, Zea mays
  unsure (1)..(343): unsure at all n locations
ctcatcatccacatatgaacaccatgacgactgacatgccactcgagctcctacacatggatctattcagcccgatagcttacataagcatcggcggaagtaagtgatgtctagttattgtggatgactattctcgcttcacttgggtgatctttgtgcaaganaaatctcatacccaagagaccctaatagggattcttgagacgggctcaanatgagttcggcttaatgatcaagatnaatagaagcgacaacgggacggagatcataaactcacagattgaatgcttccttgaggaggaagcatcaagcatgagtctcttctcctaccaccacaacaaat

SEQ ID NO: 72662 - DNA, 363 bp, Zea mays
  unsure (1)..(363): unsure at all n locations
caggtgggaggagcgcatcacagcatgaatgtgatgaccacttcaagaccnctggagctgctgcatatggacctcttctgacccgtcgtctatctgagcatatggggaagtaagtatgggctagttattgttgatgaactttcccgcttcacttgggtgttctctntgcaggataagtctgataacccaaggacccttcaagcgcttctcangagagctcanaatgagtntgagctcaaggtgaagaagataaggagcgacaacgggtccgagttcaagaatcttcaagtggaggaagttctttgaggaggaagggatcaagcacgagttcttcgctctctacacaccacagcanaatggtgt

SEQ ID NO: 72663 - DNA, 333 bp, Zea mays
  unsure (1)..(333): unsure at all n locations
acaagccaatcatattcttgattgacagagaaatcatgtccgtgtgtttagtggaatatttcaaatatgctagcacacacaacaggttaacagtagtcatagataactctacatggtaataagttttcatagacagctacacatgacaatgatgtaagctctagcttnttagttagcagatctagaacctagacataactttagcagatgatcttgggaatgcagaaatttctcaattatacagtaattcgacaggaaacagttcatttttcacaggagaagtgatganacaggaggaattcttcttctgaaggggctaaaatctaaaggata

SEQ ID NO: 72664 - DNA, 414 bp, Zea mays
  unsure (1)..(414): unsure at all n locations
tagcacttggaaacttatacctttctgcacaagttgaatttggattgctagttcatgagaataattgcaagctggagtggaatgtacaatgggacaatcttgattgtgtcctttttcgcatgtgtagcaangcgttttcaagtntgaagtttcttctttctttgtngtgctgctcatggtagaaaaacttttttttaacctatgcttttgtttaatgggacaaatctaacagtgtccttttaagcattaaacaagctatatcttgtatataaccattntatgaggcatactatcaggccctttaacatcataactctatggaaggggtgacatacctgtgtacttgtaagggatgagcttgagagataatcatttgtctcttgcatctaactgatttctaggttatgtgccgtg

SEQ ID NO: 72665 - DNA, 429 bp, Zea mays
  unsure (1)..(429): unsure at all n locations
ctaatacactcttaaaggctagtgaaccatcacttcttctaaagacagacacatctacatttgtataatagacaattatatcccatattgcatagttgactaacagatagcaaatatatccagagactctactaaaacacatatagaagagtgtattcgagatgcagtttacctaccctttaccttgcttgattccataccgaaattattgatcttggaatcttattttgacgangaaggaacatctctctccccgcatatggtgtgatcgctgcataatcacttgaccccgatgctaacctcaggcannatagttggtctagtaccactatgtgtgtctgaggtaggcaaatctatgaccaatgaagttgctcctgcattgcctactctacacatatctatcttcatacaagacattagccaaatgta

SEQ ID NO: 72666 - DNA, 401 bp, Zea mays
  unsure (1)..(401): unsure at all n locations
tgtcaccaatacaatatgttaagatccctntttatttattacactaatgattngaaacaacttgctggtggacgtacctgaattggtttgtatcaagggtaaggacaacctcagcttgctctgtgattctctgatanaggtgagcagggtacatattatctataagtggttatggaggtgtgaaagatgagataactacaagtgatatcatgggcttacgatcagatattttaacaatactatagacggaaatatatgtttttaacaggagaaatattctaaatgcctattaatatgatatgtgtgtgacatataaatcctactatataacatcggactggaaatatgtgtataataggaaaaaaataacaacgaaaatatgtaatcttatatgctaagac

SEQ ID NO: 72667 - DNA, 356 bp, Zea mays
  unsure (1)..(356): unsure at all n locations
ctcagctctctatcacttctcggagacactaggtatatcttggatcaccacatattaatngaaccttagtaggggtaagggaaacgagtgatctaagaataaccttgaccatttcatggtcatcccattnggtgctcccgaaggtgcgcacttggttcaccaaagtcttgagccggntgtcatggcttgggatcctcccttgggaacatgaacgacgactccnctgatcgttccctttgtgatttaggcacctcgactccttcgtgcgcggtctttagcacataccagatctctntggcactcttcaaccctgtgaccttattatactcctctcgacttatagaggcgaggagtat

SEQ ID NO: 72668 - DNA, 443 bp, Zea mays
  unsure (1)..(443): unsure at all n locations
actagctactcagggagtccagagaatacataaacatgaaacctctattaagtcatgagtattacataaaatcggagtgttcaaggagctgatataatntcacaaaataaatagcagcggatatgtcgatatcgtgaaagcgaggaatatggcaaggcctagcccattactcctcctgctcctctcctaccggagtagcatcccactagaccgtccaacccggtggcagggttgtaggccaagttacacaatcaaccatgtcctgaagcgtacctggcaaaattatgccataagcaaggctgagtatactaatactcaactagacttacccggtgtgaggaatctactcctttacctctagaccatgcaactgtttgctgaaggttnggtttgcacaacactagctgatctaaagcaactttagctntgcatttctagatcat

SEQ ID NO: 72669 - DNA, 265 bp, Zea mays
  unsure (1)..(265): unsure at all n locations
tcataagaaaaacataagatgtagaanattggtaagtgcattctttgtcatgagcatcacgtctattntatgacacactgcacccaatgaatagtatgatataagttgtctccatacgttgacctaaatatgtgcttttggcatttgagtacaaaagtgttatcttctgaaatgcacatatttatgggggaggaaactatatcataggatntaaaatcttatntatcanatcttatgtaagctctacatgtgttctcatcaatca

SEQ ID NO: 72670 - DNA, 289 bp, Zea mays
  unsure (1)..(289): unsure at all n locations
agtatcccttggccacaagtcgagctttgttccttatcaccacaccatgctcatcttgcttggtgcggaagacccacttggttcctacaacattntgattangacgtggaaccaaatgccagtacctcgtcctagtgaagnntgtaagctcctcttgcatcgccaccacccaatccgaatcttgtagtgcttcctctaccctgtgtggctcaatagagganacaaacgagtaatgctcgcanaaatgtgcaacccgagatctagtggtacccncttatgaatatcgctg

SEQ ID NO: 72671 - DNA, 272 bp, Zea mays
cactgggtgatgaacctcttcgatgaagctggcatccagcatcttccagacctcctttcggatgaagtcctgccgctcaacggactgtctccgaagcttctgaactcaccagttgaacgtagggtggatcttcagatggcgctcgatcacctccctatggatcccaggcatctgcgacggctcccatgcaaacacgtcggcatttgcctataggaaggcgacgagcgcgagttcctatttttcctccatatcacccgcaatgcgagtggtct

SEQ ID NO: 72672 - DNA, 421 bp, Zea mays
gctgcctcgctcagcatacccgcagctacgggagtgtgaacgcgcctttggtaaatcttcacagctgtcaaaaagatgttcctcgatgaaaatagggcagatggaccgattgttacccgaggcggtctgagcactaaacacgactgagtgcagggcgaccgagttcactcctttccgccttctatacggatcggaggccatgaccccacaagaaatataacatgggtgcccacgaacaagttcgtcagccggtcccgacgtggacgagcaacttcataggatctcattgacggagaccgagtcttcgccctacaggccctaaacaaataccaagcctagacaatagcatggcgcgaccacgttgtcatcccgagggaattcagcgaaagtgacctcgtactcgtccgaacagctctgacag

SEQ ID NO: 72673 - DNA, 291 bp, Zea mays
  unsure (1)..(291): unsure at all n locations
atatacaagctggccaacgatcaagatgatgtctacatcaatggttggaacatgcaacagctatcgtcgctttaccacttaaaaatgttcaagtcgatcatgtatctcgctctctttacatgcataaataaagtctaaccatcaaggaatgatcagccttgccttggcnagcccgacccttcctcgcgggctagaaagagggaaccccctctgcgtcaaattttcctcagaaaagtctttaccagaacgtctntcgtgcttttcgactgcgtcgataacagaatcctaaag

SEQ ID NO: 72674 - DNA, 92 bp, Zea mays
tgttcccattgctcaagtgcttatccagatccgaaggtatagaattaatgaaagacatacatgcacgtctgtgtggatctcacattggatct

SEQ ID NO: 72675 - DNA, 134 bp, Zea mays
  unsure (1)..(134): unsure at all n locations
tactagagatagcaacacttagacaaaatctatgttgcactttattgtntagttatctggataggtgttgtttatgagaattatttgtggcctatattatgcgcgaaaatataagtcctaattcaccccctctt

SEQ ID NO: 72676 - DNA, 430 bp, Zea mays
  unsure (1)..(430): unsure at all n locations
ctcagcttactctcgcaacctttccattcttctacctgggagttatttcgatgtgaatctatgcatatatacttattgtccctngatggtgactggttgttcctaatttgaatggatgaatgtatgtatgctngcaatcgcatagagaacggtccggttgaagagcccgaggaactcgcatgagaagcccctgagcagcagtcggttggtggaggcaagtgtcccttgacctatctctgtcctanntacatcttaattcacctcccgctttacancgttatacttaagggatngactagctttgttatccatatccttgttacctatttgggttggataattatgttagcttatgctattgtcnactctaatcatgaacatgatgagatatctatgatacgctgtttccttctcttatatgatgtgactt

SEQ ID NO: 72677 - DNA, 430 bp, Zea mays
  unsure (1)..(430): unsure at all n locations
catgtagcttagcataagcaggtcagtcacttataaactacaagatagctgacctctaacactccttaatgctactgaatcatcacttcttctaaagacagtgacacctacatcatttaatagacagttgtagcccattcgacataattgtgaaacggaaagcacattgttatctaaagactctacataaaaaacatcgaatggcatgagaatagcaatttacccaatctttgaccaaaccttggttccatcacaatggatagctcgtagggatcttggtnttctcgatgaggaaacatttcttctncctgcatatggttgtgcaccgtgcgagatcaactgagccccgatgataacctcagacaatttagtcttgtttaggacccaatggtttggtctctgcataaccacaacttggtcccaacacagc

SEQ ID NO: 72678 - DNA, 424 bp, Zea mays
  unsure (1)..(424): unsure at all n locations
tctcagctatgaatctctacatcagagttgagccatccagttgagcatatttgcacaccgacagtcggtgtgcactggacattcatatacactgcagttttctcaattctgacttcgatgtgggcataactntagctccgaactcgatttgatgatttggactgtttgaaagcttatataattgatacatntcagagtaaagccatgccagttgagtagattgattgtgtgaacaccttcaattcaggcacgcctatctctcaatttgtcaacttcacttttgtgtgtagctgtgatctcacttctacttcttgtgtgttgactcttacatgtcaaagtgctcaatatactttaatgattatatggtctatatgctcttgagggtcatcttgacctagtccatcactcgatctgtgactacaac

SEQ ID NO: 72679 - DNA, 444 bp, Zea mays
  unsure (1)..(444): unsure at all n locations
gagctacagatgttgtggcatcatcaagttcgatgatcttcctcgatccttcgatcatgcattcaaaactcacaatatttccgataactacctcggnggtcatattggtatatctaggattaccaccgattaactgaacttgtgatgtgtaacgaaaataattatcttagaataacttaacacctcgtgtcattcactttcgctcctaggtaggccttggtcaccaagcttgaccattgtcatgtgtgtggtctccctttgtaactcgaccaaccactccctcatctatacgtagtgacttggactctctcttaactcagctgataatacaaatccttgcgttcacccaaatagtatttctcactaaagctagatagtgtgtgaatgaagtattggcactcactcaagtcatatctgtgtctggacaatcacatatcttgctat

SEQ ID NO: 72680 - DNA, 324 bp, Zea mays
  unsure (1)..(324): unsure at all n locations
cgtctgagcgaacacaagctatcgaaaactgacggggagtgtagtcaacactaacggcgtggaacaatcacacacntcgccatacacattatcgtgccgaaccagtaggcgcgctgcatactatgacactagcatgacacagttcatggcagtcgacatctgtgggacggggcagttacttcataattgccatactcattcatacgtcaagcagaagaagatatgtacctcgcgcagggctatgctaagacgctttccaataaagagaaggcttgtgattaattgtcctcggactagtgtctggtttcttccacaaacacctta

SEQ ID NO: 72681 - DNA, 391 bp, Zea mays
  unsure (1)..(391): unsure at all n locations
ctcttgcatgggtatgatacaactctgcatcattacctgcctatatggaaacgaccgatcaaatgcttatatatacactctatgaaaaatgggcttaccgacgcgattactttactgtatctagactgaggatgatcatttatattaccttttcgcattatttcanggtgcgctgataattagtgactctctgaatcataactcaattgtcaatggtgcgagaggatctggtgcaactgttaaggtgtttcagcataactgtgagatattgtgcttancgcatgcagatcaatatatggctctctgttcatacttacatggcaataaatctacagccctgctcattgaaacgtctgaagacagatactgtggcaacactgacaccaacatg

SEQ ID NO: 72682 - DNA, 284 bp, Zea mays
  unsure (1)..(284): unsure at all n locations
ggtgttcatcatccacacaagaacatcatgacgactgacaggccactggagctacttcacatggatttattcngcccgatagcttatataagcatcggcggaagtaagtattgtctagttattgtggatgattattctcgcttcacttgcgtattctttttacaggatanatctcanacccaagagacttttgaaggattcttgaaacgggctcaaaatgagttcgacttgaggaacaagaaaataagaagcgacaatgggacggagttcaagaactcacaaat

SEQ ID NO: 72683 - DNA, 271 bp, Zea mays
cctgacttacatgtatagcgatgggtccttgatccgaaggtatcttcatgcatagatatgcatgatgaagaattgcttctaaagcattgagggtgccacgaccaataatcgcattgtaagggtattccatatcaacaatgtcaaacacaacttgctcagatctagtgttgttgatgaacccgaagggtactgacatggtgatcttgccaatgctacaatctgtctccctccgaagccacagagaggatgtgtggcatatgaatcttatctt

SEQ ID NO: 72684 - DNA, 170 bp, Zea mays
  unsure (1)..(170): unsure at all n locations
gttgtagcgcatgtcaagaaagggaagcaagtggtgttcatcatccacacaagaacatcatgacgactgataggctgcttgagctactccacatggacctattcngctcgatcgcttacataagcatcggcgggagtaagtattgtcttgtaattgtggatgaatattct

SEQ ID NO: 72685 - DNA, 52 bp, Zea mays
cctcgtaccagacgggttcctcactgtaagaggcggattaattgcaagaagc

SEQ ID NO: 72686 - DNA, 250 bp, Zea mays
  unsure (1)..(250): unsure at all n locations
tgcagcttcaacgagccatcgaaatacatncgccatacttctgtagtctacgggttatctgacactcngtgcttggtccattctgatacgaagtcaactagtcttgagtcttgatggcagtacgaggtcgaaactcaatgaacgtgagctccaactcgcaggctcacttggctattcttccgatggcttctatattgtggagaatatccnctatnggaaatccagtgactactatgactntgtgatagtc

SEQ ID NO: 72687 - DNA, 220 bp, Zea mays
  unsure (1)..(220): unsure at all n locations
gaagatgaacctgaacgtgttgatgatgaattgcctcttgatcaagtggatgatgaggaggagcannatcaaagaccaccattagtgccccattcttgagtccaccataccattcaaagagatcatccagtggacaacattcttgggagtatcanatgaggcgtaacaactagacctcgtatgggcatttttgtgaatatgctcgtttgttctctcttga

SEQ ID NO: 72688 - DNA, 357 bp, Zea mays
  unsure (1)..(357): unsure at all n locations
tatataatctacaattctacttaatgccccatcttcgaaaggtgccttttggaattgcacgaatgccacatcgaacgagaaagatataatactacgatttatattttctctaacgggttnggatcccttcatttcagaggagatagaattcactcaatataataacttaattagtttgggaattaacattccaccacttttcagagnttatatataagtctatctcanattcatggcgtggagaatgagaaataatgttatacattagtagaagttggttctaatccataacttacatgacactcttcgtctcactcatctatattanaaatgtagcacatanatatctccgacatc

SEQ ID NO: 72689 - DNA, 312 bp, Zea mays
  unsure (1)..(312): unsure at all n locations
acgtgcacgctgattctcgatggagaagaaagtctggaacacaatatggcgattctgcttctctgatgaattacgctgagaactataaacacgctgcaccatgatgcttcgaaggttcaccgtagcatcagcaccaagcatggcatcatcattagcagcaatatcactggagtcatcatcgtcaccctcaccgtcngaagcactaatgtagccatcatccgtagcaatntatgtttgctgactcgggcantccttcttcacgtgaccaatcccatgaaagtggtggcaacaatacctgaagaacgaccactg

SEQ ID NO: 72690 - DNA, 432 bp, Zea mays
  unsure (1)..(432): unsure at all n locations
gcgctgacggatggatcagcggtgcacgtgacgagaganatgcggacaacctcaccggggcagcggtcggcggcggcacgtggacaagatgggccatacacctcgtcggctgatgtcgcgatggcaccgacaggatgctgagcacacacggagtcgacgaccctatctctattacattacagcgatacaacccctatagaagaataggaataaagtttaatcattaattgagtgaatccttannatttatagtgcctctaatggtgatccatgactcgcgtcactaggcctgggcattcggttcttcggttcgggtcggatcggntcctcggttcttgtagaaatcagttcttcanaactagaaccgaatagcangataagaaatcagaccgctagtcggtctcggtctccgtcgggtctcgtctaccgact

SEQ ID NO: 72691 - DNA, 424 bp, Zea mays
  unsure (1)..(424): unsure at all n locations
atgtcatcatatagatgcaccanagaaccatataaagccttcaatgtccatactatcttcgtaatggaccacacttgntctttttgaacaatccaaagaacttaaccaattcagatcagaatttaagataagagggacttataatctcaatcccaatgatattcatcaagtatcaatcgtatgggaaaatgaccaatagaantatccataacttttcattttcatccaacaatgggatgaccaattcaatcttacccagcatggtangtatcatcacttganaagtataacatatgcaacactntgtatgggaggatcgtatgtaaatacagtccatatgaaatgttcacagaaacatatgcaatatccatcactatcaccttgtgtttccacatgatagaaatatatggatatctctatatat

SEQ ID NO: 72692 - DNA, 372 bp, Zea mays
cttgatttcttcttctctctcttcttcaattaatcaattaatctaatgtgtgaatctacttagtaatactaatcaaacctatacctataataataatatatatcaaggagattcttttttatctgattcttagactaatcattggataacaatatttcatatatatatattatattccaaagcctaaaaaactacatgagccatatgttggggcatataatatacttgaggtgctacatgtatatacaaccaaactgtgaaactatgttatctactttggataccttatcatattactaacatgtttctaccacgtttcactgcagactctaacaccacatgaacaggtaacctatacatacacatatagct

SEQ ID NO: 72693 - DNA, 311 bp, Zea mays
  unsure (1)..(311): unsure at all n locations
tcgactactcatgatattccctacggttctgatgcccaaaacacgattctgactgcgccattcactttggatgaagtctgcaaggctattttccatattgaatgaaataagttcctcgcccagatggttntctggcanaattctatcaagttntctgggatgtcataaaggatgattactagtctggttgcagaatacacaatgatatcctaaggtctatagcctaaattggcataataatctttacctaagaaaggtatgcgtcnaattcaagatataacctattgctacttatgtaacttaagatatac

SEQ ID NO: 72694 - DNA, 264 bp, Zea mays
  unsure (1)..(264): unsure at all n locations
atgtcaacaatgtcaaacacaacttgctcagttctagtggtgttgatgaaccccaaggtcactgacatggtgatcttgctcagtgctacaatctgtcttcctccgaagccacagagaggatgcgtagcatcatgaatcttatcttctggctcttgcatttccctgaangcctagcaaaatgaatcagctgcactgctgatcaaccaaacatgtggctagaaatccttgatacacagagataccatgcatcgtgtgtggtaatct

SEQ ID NO: 72695 - DNA, 437 bp, Zea mays
  unsure (1)..(437): unsure at all n locations
gctgcactcgatcctcgagctcggaatggatcgaatctattcgctcgctcagcgaatacaaacagacacaaaccaaccaacaaacacatatacatatacatgagaacattacaccattcagataanaacataataaaacatgcaaaatgaaatagaggacgttactacggtcacgcgaggaanatgaaacatcgaactcgaagctacggtcgagaagatatcgcgtntacgctatacanatanntaactataacgtttaattcgacctgattatattaatcgatatttatttaaaatggaaatagagctatctaaccattntaattagctgaccacactaataattcttagttaaataagtaattanataacatcagcgactctaagtgtgaacgaatagcggagcgagacgaaactcgtaacgcatgatacagcac

SEQ ID NO: 72696 - DNA, 444 bp, Zea mays
  unsure (1)..(444): unsure at all n locations
atccacaggtgattatggatttctaattactccaattanggactttacagggatttctgagaanatggcttccanacagccccanatttataccacatactcaaatgactaanataanggtactcanaanattctataatttttggctctgtatttttatttctaaaattcanacagtccttccaaaagcaccttcaattcacttaatattntataatttctctaanaatcctaanaccaactttaccagagatctcatgaattagacatncaacannaatgcttactatntttctantattctgcacaattacaagtctctgtaaagaaagacanacgtgacaatttggcatacncagcagcgtccacaccgacgaccagccgcgtagggaccacgccgcatgtgttgcaaagacccacgctcatgatactgcaccatcacat

SEQ ID NO: 72697 - DNA, 280 bp, Zea mays
  unsure (1)..(280): unsure at all n locations
agtcttagcaattaagcaagtgtcgagttcagctctatcanaatctaccaagtatagctgaccctctaatactcacttaaatgctactgaatcatcacttcttctaaagacagtaacacctaaatctgtaaaaagacagttggtagcccatttgcataattgagaaacagaaagcanattgtaatctaaagaatctacaagaaaaacattggaaatagaatggcaggtgatatagcaatttacccaatcctttgaccaaccttgatttccatccccgaat

SEQ ID NO: 72698 - DNA, 384 bp, Zea mays
  unsure (1)..(384): unsure at all n locations
ctcacaatagacatgtnccgtanataccttcctctcatgttctcaagatgactctgtttgatgcgtgattctccgaagaatgaatgacttgcgctccaaggccgatcctcataatcctcatcctcactttttacatcatagctatcgctgtcactagtatcttcagataaaccttctagtatctctttagtaagtttctctgtgtctggtttgccatcgactcanaaatctagcaatataagggttcacagtcttctcctcanatagcttctcctcttcagtcagctacgtctccgccacaaccttcttttcctgagacatctattcaccagagatggtgagaaccacgtctttatactgaagctcagagagcatgaanatcta

SEQ ID NO: 72699 - DNA, 414 bp, Zea mays
  unsure (1)..(414): unsure at all n locations
ctctgtcaggtgtctgaatgaagaactgatggtcagtaacctgaacatgatcccaggttcagcccccctcgccgccgatgaatctgtgtcatgatcgtcgccgccgttacgattcgcgctcacaagtgaccggataacgcttcggggcaaaagatcttcgcctgtggataactctggtagccggccaccgtacccccatgctttgcgggcagcgcaaattagttcaccggcgttgactgttcgtcaatcggctgccacgtgctanagtgttagaccacgtcgctgtgaatcgcgtctcgcatgcacggtgatcgccggtgtactgcacggtgaaagcactcatctcgagcgctggtgggggcctcgtattncgangggtctcaaaacatgattactggttccgagtgtatatat

SEQ ID NO: 72700 - DNA, 376 bp, Zea mays
tgctctcgatcaacagctcactgagcctgttctctaaaacttcaaaaaagtttaattcccaattcaaataatggcaaggcgtctacgtaggtgacggaggggcaactaagttcgaacgtccattcaagcatcaaaatcgactggacttggaaaatccatgatagcgacagcaacagcatgcgacaaaagagattgagaacgaccgaacatatcgatgctgcagcgccccctgacttaaagtatgtcaagtgcttcaatggaacgctttcatgaataaaacatccttgggaaaataccagcgaagagaatgtttaactttagcgtaatcctcggaatgagcgaagtgttatttctgacacctgtgtagtattgctca

SEQ ID NO: 72701 - DNA, 311 bp, Zea mays
  unsure (1)..(311): unsure at all n locations
ctgaacccacagaagctgtgcgtncatgatccgtcttaccagggaacagcatgaacgagggggagaatggtgatccggccggcgatgctgatgatgtggtcactacttacgaagaccaggatggtgactggatgctggtcggcgacgtnccgtgggagtatgttcatccgtctagcgtgccatcgtctgctttcgtatttactgacncatgattaggactccagtgtcttgtatgtcgccttgctgatattctggtccctgcanngatgttgtcgactcatgcaagcgtctgaggatcatgaagagttctg

SEQ ID NO: 72702 - DNA, 308 bp, Zea mays
ctatcactacttctgtttacagacaccagcctagatgcatttctcgatggcttgaatggagattcaatgctttatgattgtgagatcacttctgtcgctgcctgcactaggcaataccgacaggcctagtcagaccgttagaggcacatggaatattgacaatgaacatctctctccgtactacctatctgcacaaatgtctaaagatagacttactgcctcccttgatgtgatgggactgcggcctatatttttatcactgctattttttatatgacgcgtatcgtgcttagtgttatacggaatct

SEQ ID NO: 72703 - DNA, 412 bp, Zea mays
  unsure (1)..(412): unsure at all n locations
catttctatctctcttccgctcgcatgcgtagccagcgccgtcgcctaatcaaggagcacgcgtcgtcgtcctgcaaccgccaagtctattccggggaccttcagtctcgttccgacgcacagcccgctcccgatcctctatccacgttgaccgggcaactcaccacctgccaagcgacaccgaagccgcccgacgccgctctgagcctctgtcctgtcccgatgcaccggacccgcccgacctgccgcgtcgcttaccngtaatcgttcgaaagtagggatttatatgttacggtatctgatatgcataattgtgtactacatgttagtctgtatgtcgcggttaattaatatgcatcgaataactgttaagtattatagtgcttataataactnttaattcgaggtatat

SEQ ID NO: 72704 - DNA, 210 bp, Zea mays
  unsure (1)..(210): unsure at all n locations
aatctgaatcgctntcctttcttgcacacccttacccttaacgattataccggaaggagacaagccaccaccatgccctaaatcggacaaaacattcccccttcttantcctctcgtgccncagccatcataaccctanggttnggatcgtacaaagtcagaatgagtgactgcccatacagtctcgagtgggtgtacttgtcatgagta

SEQ ID NO: 72705 - DNA, 413 bp, Zea mays
  unsure (1)..(413): unsure at all n locations
ggacttattctcaaatgctatgagttaataacaaggcaacacanaatgttaaggttaatgcccttcgtccttcgaagcattatctcccttaggatataatgatcttcagacgaaggtcttgaaggactagccttcatcatcgtagtatacgttaatgaaaggagaagcatacaaaatataagagaaagcatgaataatcatataacatcattaatatctctttattatatcatcacgaatgaacatgaacaatatngaattacatttataccttcagcttgatataaggtaaaagtccagtcgtgacgcacgagcgagtacaagtcagcgtgaacagtacggtggtactgttcatctatatatatgcacacggcgcagcctgtgtgnaatacattcatgccctcatgttacta

SEQ ID NO: 72706 - DNA, 204 bp, Zea mays
  unsure (1)..(204): unsure at all n locations
taatgagcttcggacgaacgtcatangtaaagtatcacgaaaggttcacgttcatgatctatatttaagacgataatgagaaatgagatatacaacacanaatatattcacatgttctattatatgaatatacaagtattanaacataatatttaggcacatttataccttctgcttgcagaaaacaataatccgagtgtaacg

SEQ ID NO: 72707 - DNA, 348 bp, Zea mays
  unsure (1)..(348): unsure at all n locations
actcttttagaangttgagcatgatcgccttatcttcttggcttatatgagcgtagaagtgcatgaggcttctttcatcctcctcaccctcatttgtgcttccactgtcattntcattagcaacacaacatatgtgggaatcgaaatgggaagacannacctttggagaggtggattcaatcgttggctccaacgttcattntcttcttcttccttcaaggggtagttcacanaggactaaggaagtagaagcataaatgaactaacatgttnggactcatcaannattactttaactctagtacaaatatcatgtgcatcatgaatagggtcatcatatctcattat

SEQ ID NO: 72708 - DNA, 152 bp, Zea mays
  unsure (1)..(152): unsure at all n locations
agctgtgattcagccatcagacggagagggcgcatagcatagaagcaaggacgcgcggctaccagagctggaggaagcagaggcgtttgcangaagatgagcaaccagcgcatggtgagataatacacaaaacagcggcaggattatatcgc

SEQ ID NO: 72709 - DNA, 491 bp, Zea mays
  unsure (1)..(491): unsure at all n locations
cacctatacattaatggttttcaactagcggtagntcaaggtaacaaaaacagcaacggtgaatatatctattggctcttaccatgacttatgtgattttgatgtggtgagtatggatgcatgctctctattactgggacgtccttgggagtatgatactgatgctattcaccatggtagatctaatatatatactctcatgcataagggagagaaagaatgtgttgcttctatgactcncactgatatggtccacctagaacatgagatatagataatgctaagcacaagggtgtttgaactctgaaaatagcaacctataagttaaaactctacttgctagcactaaatcgatctgatgagtacatgctctgttgactatgtatgcctactgtctaaatgttttattcattgtgaatgttatgcttgcaccgtatgctacctttgagagatatgatggttccttagaacactgatacactggtgctcaa

SEQ ID NO: 72710 - DNA, 290 bp, Zea mays
  unsure (1)..(290): unsure at all n locations
gcttcagaaagaggtagttgctgtacatgtaacaatattgtatataccatttagttattcgtatttcacgtgtcactagagtaattatattttagttatcctagacgtaacttaaataattataattatcggtatgtcacatgtcactagagtatacttgaatatttngtattaaattagctctttatttaatgctaattatgttcctctttgttgcaactatatctggtaaatggtgattgacaataattacacggatcttatatanggattctaatgatgtttctact

SEQ ID NO: 72711 - DNA, 368 bp, Zea mays
  unsure (1)..(368): unsure at all n locations
ctcgatcttacactatcttctttcgcacaccatgaaggcagactatccgagacatgtataactcagctaacgctgctccgatgtccgttgtcttcacaggtataaaatgggctaccctttgtaagcggtccacaaccacccagatggaatcatagccggcccgggtacgaagtangccaactataanatccatcccgatctcatcccacttacactgatgaatctgtaatggctgcaacagtccggcgggcctatgatgctctgctatggttctatgacagctatcacagatggcgacatattctgcgaattctcttttcatgccataccaccaaaatctccttnttaaagtctgatacatctttcac

SEQ ID NO: 72712 - DNA, 354 bp, Zea mays
  unsure (1)..(354): unsure at all n locations
catggattcatgcttggcgtgtggttatgaanatgactcacaagtctgatccatggaaaatatattacgaagaannaaatttacacatgcaaaanacggaatttaagtataatgcattattcatacaaaagaaatagcatgcacagctcttctttanataatattaccttcatccaannatataatcaagaatatcggtgatacttatctactactacgtattgtgcaatggtagcaagtgagcttggagagaaatgtagtagatgtgtttcctgcatagacgtagacataaacacatatatgtgggtgcccgtgcgtngcaacgganacatttaatattatgataacttatga

SEQ ID NO: 72713 - DNA, 172 bp, Zea mays
  unsure (1)..(172): unsure at all n locations
tatatctgctcctattctaagcacanaattatgagaattcatgcaaagaaatctcattctgtntctcaccattgctttatatataagaatgaggcttctagctctacgcaatcaaactcatgtatatgcctacaaagaaaagtctactgcatcagatgagcctaacatctca

SEQ ID NO: 72714 - DNA, 177 bp, Zea mays
  unsure (1)..(177): unsure at all n locations
gcttatctgacctactctatatactcgtaatccgattctgaagatctctgttacactattcactnggaaaacattgtcannatcatgtattgaggaccttctgaagccgaacgcccccaacagtagcccttcgcaatattaatttgttgtactggataattcatattgcgatatgga

SEQ ID NO: 72715 - DNA, 227 bp, Zea mays
  unsure (1)..(227): unsure at all n locations
ctgttatgttcaaaactccaaatactcatgtccatagtctgtctattactcttctgttcatactaagtcacatgattcattcgtcactattctcaccaacagtaaacttcattgtgctacaccacatacacacagctataaatacactcagctactctgttcctctncacacacactcaacacgctgaagtaaggcatacaccccacccactcaattactccgctct

SEQ ID NO: 72716 - DNA, 291 bp, Zea mays
  unsure (1)..(291): unsure at all n locations
agtattgaatctaagtctagctctaatgataattcttgcaagcattgtgccaaatatcatgcttcttgttgtctaactaaccatgcaaggaagcaaagcccacatgtgaatgtcaaagaaattntgaaaagatgctctagcaatgatgggttaaagaaaagtgaacccaagtacaagtcccttaagcccaacacgggtagaacgcggcttgtgttcaactcatccagtgaaaccctagcacagtgcataaggggtgatccctcaagtcatagagggaaccactctatatga

SEQ ID NO: 72717 - DNA, 358 bp, Zea mays
  unsure (1)..(358): unsure at all n locations
tgctagtcttagcaattaagcatgcatctagaccggccttctctttngcanaatcaactaaataaagtntgttgtctagtacacccttaaaagctagtgaaccatcacatcttctaaagacagacacatctacatttgtaaatagacaattatatcccatattacataatngactaacanatagtaaattatatccaagagactcaactannaacacattagagatagagtgctcatttgatattgcaatcttacctaaacctttcacctttgccttggtcccatcaccgaatatgattgaatcttgngaatccttattcttgacgtaggaggtgaacatcttcttctccnccgcata

SEQ ID NO: 72718 - DNA, 195 bp, Zea mays
  unsure (1)..(195): unsure at all n locations
agtcttagcaattaaacatgtgtcgagctcagctctatcanaatctactaagtatagctgaccctctaacacacccttaaatgctattgaatcatcacttcttctaaagacagtgacacctatatcagtanaaagacaagtgtagcccatntgacataattgggaaacagaaagcaagttgtaatctaatgaatc

SEQ ID NO: 72719 - DNA, 302 bp, Zea mays
  unsure (1)..(302): unsure at all n locations
tatgtgagcaaccctctagctttgaagatagtgagtaccctaaccatgtntataaactctctaaggcgctntatgggctcangcaagccccaagagcatggtatgaacgcctaagagaatttcttatcactaatggcttcaaagtcggaaaggccgatcctacntttattactanaactcttgacaatgatttgtttgtataccannnattatgtgatgatatcatatntgggtctactaacgaatntacatgtgaggaatntagtaggatcatgacacanaaattcgagatgtcgatgatg

SEQ ID NO: 72720 - DNA, 207 bp, Zea mays
acaaggtatactccgtgagagcccaagggcggatttcaactatctccacacacagcaggattttaatgtcaacggacaattggggccattgatcaaatctcgtaaactggtcaacaaaatgaataggtgccagcaaataataagaagaataacagccaccactaccagactatattataactatgggtttaaaaaaaatttgtttct

SEQ ID NO: 72721 - DNA, 434 bp, Zea mays
actgatgtacagggtggtggttcactccaaatatcctgacctgctggatcaacgcattccttggagacaatacgtgtccaaaattggtctctcaatcaaacgcgcattactgaattagctatagctatctccttagcgcgtaatacaccacaatgccacatgctttttattctggatattaagattctcatgaaactacccaattatcactcggctgatccagtctaaaatgtaagggctgggcattgtatcgaagacaccaattcaatatcatccgatatgatgcgcttggatatttggtcgatcgactgtgtacctactgggcaactgaaaaccactcgtactgaaataattaattggaaggctattgatgactataggtttatcaccacaacgtggctcttgcaatgtgcacccaggtactacgtaccttt

SEQ ID NO: 72722 - DNA, 142 bp, Zea mays
actgtccatggcacagcacgaccatcttgtgccactgtggtggtactgcatccgagggaactcgagattactcatatactcctacatggagaatggcagcctagatgattggcttcacaacacggatgatgatgccagcaca

SEQ ID NO: 72723 - DNA, 222 bp, Zea mays
catctgcatcaacccatctgggcagggacacgcagcatcaacatcactagtcggatgagggtcctcgcggatccaaaacgccgacagatggcgcgccaggtatgggccctgctgcatgatgacaaatactatcctgttgagttcgagatggataatcttcagcagcctcttcagcctgtgacggtgcttcgctttgggagtctcgagttcatgtaccgcgat

SEQ ID NO: 72724 - DNA, 343 bp, Zea mays
  unsure (1)..(343): unsure at all n locations
cgctcatcatncacacaagaacataatgacaactgacatgccaccagaactactccacatggatctattcggcccgatagcttacataagcatcggcgggagtaagtactgcctagtaattatggatgactagtctcgcttcacttgngtggttcttttgcaagaaaaatcacaaacccaagagtccttatagggattctcgagacgggctcaaaatgagttcggataaagatcaagaaaataaatagcgacaatgggacggagttcaagaactctcanatcgaaggttntcttgacgacganggcatcaagcatgagttctcttctccctacacacctcaac

SEQ ID NO: 72725 - DNA, 390 bp, Zea mays
  unsure (1)..(390): unsure at all n locations
ctcagctggtaatcgatatattggcatgcacttacatggttgttcttatatatggagtgaaaaggccttctaacgaccaatcaagaagagtctatgttacaacctccctgcttgaagacagtgagatcctaaccatgtctataagctctctaaagcgctctatggtctcaagcatgccccaagagcatggaatgaatgccttanagaattacttatcgctaatggcttcaaagtctgcaaggccgatcctacactcattactaaaactctagacagtgattatgttgtatgccaaatttatgttgatgataatcatatatgggtctactaacgaatctacttatgaggaacttagtncgatcatgacacagaatatctagatgtctatga

SEQ ID NO: 72726 - DNA, 265 bp, Zea mays
  unsure (1)..(265): unsure at all n locations
gatcaatactagttccttccaagtggcattctttcaattggaataatatattctatggaaaggaatgtcaatatgaaggttaaattccttttggcttanattngtaaattagtgcatattgtgaatacactgctccatgtgcattaacttaaaagggaattaatttatgcctctacgcctcatanatgatgattcgtttgccatcatatatagatatcatcattcattanatacttncttgactactaatacctctnttcaaagt

SEQ ID NO: 72727 - DNA, 446 bp, Zea mays
  unsure (1)..(446): unsure at all n locations
gatcacttcatcaaattgaatgtccaactctgagatgctngcttcaacccataaatggatnntctgaagttgcatatctntccagcattgatcggatcgacaaaaccctcnggctgtatcatatacacgtcctcatctaggtttccattaaggaagagctgtttgacatccatctgccaaatctcataatcgaaatatgcggcaatagctagaatgatccgaatagaattaagcatcgctactggcgagaatgtctcgtcatagtcaattccttgaacttgtcgaanaccctntgcaacaagtcgagccttatagatgtgaaccattccatccatgtctttcttcttcttatagatccatntgcattctataggtctaacaccatcangcggggtcaaccaagtccaaactttgattttctccatggaatctatctcggatctcat

SEQ ID NO: 72728 - DNA, 286 bp, Zea mays
  unsure (1)..(286): unsure at all n locations
ctgaagacactattgaccactgctncggtattagctcaaccggacatcactaaaccttttgatgtatattgtgatgcatctggcagtgggctcggctgtgtactgatgcangagggccgagtgattgcgtatgcttcagggcagttgcgccggcatgacgagcactatccaactcatgatctggagctagctgatgtggttcatgccctanagaaattgcgtcattatctgctgggaaatatctgtcatatctatacagatcatanaagtttgaagtatatcttca

SEQ ID NO: 72729 - DNA, 252 bp, Zea mays
ggtaatcatcaatacgttttccggagatgaactgactcgactatactagcagatgaacattgatataagagtgatgataatgggaatactctacttgttagtaaccctaacggaacactattttatacgatgatagatcacgctaacggaactcattgtgcaagtgagacatagacactctatactcattagtaccctagaactaactgtatctctcttacacacttgttatcactccataagctgaatata

SEQ ID NO: 72730 - DNA, 167 bp, Zea mays
  unsure (1)..(167): unsure at all n locations
atggtctgctcatgtngtgcaaattgnntttgatgaacgctatagctatccgtatgacagtactacttcactgttcaataatattccatgttgaatattatctccacacgcttgtgctgacatcattcgcactacattgggtccagaaccatgctgaaaatgcttct

SEQ ID NO: 72731 - DNA, 216 bp, Zea mays
ctggtgggctcccgctaccatggggataagaactcacagctctaagggaaaacggatagttgactactcaatcgaaaaataacttggcagtgtcagcggtaacggtggagagcgcattctgcggaatggagaccaatccgactctgagctgtacattggactctccgaccgttgctattaacatggagaagaagatggttagtattgtgatgactt

SEQ ID NO: 72732 - DNA, 259 bp, Zea mays
  unsure (1)..(259): unsure at all n locations
catggtcagccaatgatctttgtggagtccacagggatgttattgaacactcgctcaatggtgacccatccgttagacctagaaagcagaggcttcggaagatgtctgatgacagggccgaaggtgctcggaatgaagtaaaaaggctccttagtgccggagttatcagagaggtaaaatacacagaatggctggtaacacttgtatggtaaaaaaatgcanatggaaatggagaatgtcattgatatactgatctaac

SEQ ID NO: 72733 - DNA, 347 bp, Zea mays
agcagcttagcgattaattttatctctattatctctaatttactagttgtgactattgacattgttttatctaacttgtgatatatatctacattaatcttcctctatgaatgaacatgacacaggtgtaaggttgagattattctttttgattacaggctattcttaactgaaggacatgaacataatttaccttcttatttcttcatttagctaatgttctcctaatttacagactcattattaatgcatgtatcacttttttactgaaatcattattagtgatggccgatgcatcttatttctttttctgaactttttacgttgtctaagatctgtcaagcctc

SEQ ID NO: 72734 - DNA, 382 bp, Zea mays
  unsure (1)..(382): unsure at all n locations
tgtctgagtacaaggaccctacatcanatccaaatggtctcatgtgctaatcactcttttctcaagaggaccttcagctcaaggactatcctcacaatgatgccaaggtcatatcttgcgtcatanaaggatttctggtccacaatgttctggtggaaataggcattgcagcagacatcatctttgcaaaggctttcaggcanatgcaagaacaagagaacanaatacatgctgcaacacatcctctatgtggcttcggagggaaatagatagcagcacttggaaagataacaatgccaattaccttnggctacatacacaacaccagaactgagcaaagtgatntgatattgagacatggagtatcctacatgcaatcatg

SEQ ID NO: 72735 - DNA, 240 bp, Zea mays
  unsure (1)..(240): unsure at all n locations
ctgcagcttcagcgagccatcaaaatacattcgccatacttctgcagnttctggattatcanngtacttgctgtctgtccactctgatacgaaatcaaccagtgcttgagttntgatggcagtgcgaggtcggaactcgatgtcatgagatcccagctcgcangcncacttggctattcgaccaatggcttccttggtgtgaagaatgtcctcctattggaaaccagtgactactatgac

SEQ ID NO: 72736 - DNA, 225 bp, Zea mays
  unsure (1)..(225): unsure at all n locations
tgaatgggtcgaggagcaacttgtgtatgtangagtgctganacaagagagtagagggcaagaccggacctgaattgcactgaccacggtgagagcttgttcacggtggcgtaaaatagatatgggaaaccgagcaattcgtgggctctggtgagtaatnggaggcacgagcgggtggatnggatgctggaatacctaacggagccgangggtgtgctcaattat

SEQ ID NO: 72737 - DNA, 398 bp, Zea mays
actctgtgaactttgtccatacctttgaatatattcttacccctccatcaatgtataaagtgcttcgattgaacgaatatgtactttgagccaatgcgacaaacaccttccttctttcgtcacagtgagcataaactgttctttttcttttgtgagcctatttggaccaacatcgcttgctgagatatagagacctagatgctaagaagttataagcaagatgagatggtatgcaagatgtcactcccagccacctgctatcctggaagacagctttgcgtattttgctacgtatttcggatacctacttcctgagctgatcctagatgattgactttccttatcgcgatcgtattccctgattattacgatacgtatttctgacttcatctgacatt

SEQ ID NO: 72738 - DNA, 273 bp, Zea mays
  unsure (1)..(273): unsure at all n locations
tcctagatccaagtccatagaccaacatagatcccgttatcaagatgaatacaatcaattcctgacctcgcgcgagtgctagaanaatcactcgacttctaccgagatcctgattagctagcagctactcgacctagcatactagtattcatctcannaagggaatcctaagtcatgcaactagaggtttcaagcaactcctacactttagtgcacatttcaatcctacangcattaagtgtagtaaaatagcataattaacaggttatgcat

SEQ ID NO: 72739 - DNA, 353 bp, Zea mays
  unsure (1)..(353): unsure at all n locations
gcaagttggtgttcaacatccacataagaacatcatgacaactgacaggccactggaactcctacatatggatctattcggcccgatggcttacataagcatcggcgggagtaagtactgtctagttattgtggatgactattctcgcttcacttgnngtgtctntntgcanganaaatctcatactcaagataccttaaagggattctcgagacgggctcanaacgagttcggcttaanggatctagaaataagaagcgacaacgggacgaagttcaagaactcacanatcanaggctttcttgaggagganggcatcaagcatgagttctcttctccctacacgccacaac

SEQ ID NO: 72740 - DNA, 136 bp, Zea mays
acctgaagggcgaactgaatatgttactgaatgggggttgggattatagccaccccaatagcgttgtgatgctgatgagtatgtgacgacattcgtgttcgtctgtacaatcgtggtacgacctgatctttctttg

SEQ ID NO: 72741 - DNA, 104 bp, Zea mays
  unsure (1)..(104): unsure at all n locations
acatccacacaagaacatcataacgaccgacaggccactngagctactccacatggatctattcgacccgattgcttacataagcatctgtgggagtaagtact

SEQ ID NO: 72742 - DNA, 169 bp, Zea mays
gagctatgcattcaattctatactctccatagagatcaaatcctctccaattccacacaaggctttagtgattagcgagagagatatgtcgtgttcttttgagctcttgcgcttggagtgcttcttttctttctcacttgttcttgtgattaaaactccattgtaatca

SEQ ID NO: 72743 - DNA, 462 bp, Zea mays
  unsure (1)..(462): unsure at all n locations
atgaagtctgctaacttctgggacttaattgaagatccatgcacataagtcaatagcgaattcgtaagctccatagcccattntccaatccttccagtagcttctctggtcctcattatgntcttcanaagctgtgacgaaggaacaattatgtgatatgcttgaaaataatgccgaagctttctggatgccattaacacagcatacaacaccttctctaattctggtataattttctttgacanactttaaacttcagagacgaagtacactagnagcctgctttgacttggcatctncttctctgtcaagcccacactcactgagaggcgtactgcacattaaacaataaccctgcgtagtgagtagtgtgtaataataatatgctcactttcaggctttgtgaccacccatgaaactcgtgactatattaagatgcaatcttctgtgctgaatattgta

SEQ ID NO: 72744 - DNA, 404 bp, Zea mays
  unsure (1)..(404): unsure at all n locations
agcttcgtgacaacctactgtgcgcaaaattcttattgtgtgantttggntgaaggaagttgctttcttatggcatatcgctaccgatggtggaattaaagtgaacccaggatagataagtgagatactagattggaaacaaccaaaggatgcgtccaagatcagaagttttcttggattggcaggatactatagaagatatattgaaggttcttccaagttagtgaaacctcttacctctctactggagaaaggtaaagagttcaagtgggatgaagcttgccagaattgttttgaagaactcaagaagaggttaaccactgcaccaatattggttatgtcagacatccacaagggatttgatgtgtattgcgatgcatcacaccttggacttggatgtgtgc

SEQ ID NO: 72745 - DNA, 389 bp, Zea mays
ctaagctggatgtttgttcagattgctgtgactgtcgattatttttatccctattattctgatcgactaacctataaatacttaagcacttcaaggaatttccaaatgactaatctcttaaattcacaagcaagttgatccatgcttagtcaataatcccaacgccaattgttttaataccatcagtctagctccacacattatcctatcaccacaaagtctggagcaagcgccttggaagcccccacatacaacctcacgtgtcgccagcgccttggaagcccccacatacaaccggttaccatcctcacgcgttccctgctcttggaagcagcaatgcacctgacctgacttctgaattttgtttaaaattctacatgcacgtaatt

SEQ ID NO: 72746 - DNA, 436 bp, Zea mays
  unsure (1)..(436): unsure at all n locations
gatcttagagcacctgctgcatgcatgtcttagtcgtactcccgcgcgcgctctctatctcaccggagcaagagatcaccggcgtttgccctgcagacagcgtgccagcggccgcccgatcccccgccaccgtagaccgacaagcagagccatccccaaccccgtccaacccttggaatagacactacgtgcctcagtgaagctcccagagtgaggaatcgagctctaccgcgccggagacgccggatcagggtcaccggacttcacccgaccgccggcgaacgtagaccgagccccaccgtgagttatttttcgattccttgtatgagtcgactcattagcaccccgtgaagctccccgtgcccttggattgacctgtatcgccatggataggccggagcacccgccgncgacgagctcgcccgcctgcgcacgc

SEQ ID NO: 72747 - DNA, 452 bp, Zea mays
  unsure (1)..(452): unsure at all n locations
ttgcataaaagcttactaataatggatccttaagccaagttttacttcataggttattacctgaatctactaacctgtttctagattttcctaatctagaccattcacttggcctacacttgatttcttttaaccaaaactttgttatacttgttatctacgatgtagagcagtgatttagtcttcatgaccgagaagtaacgacgattcgaatcgattaatacccagttggggatctccaaccacatgacatatgtagcacttaaccctttcatatgtcaatcattcccacagatcctccactacatgaactggtccgctacccgggagcacattaccctaccatccatcctcttgccatgtggataactgctactcccaccatctcccatgcccaatgcacgattgccctntcatgtattgaatatccgggttcatgcttacccatgatg

SEQ ID NO: 72748 - DNA, 469 bp, Zea mays
  unsure (1)..(469): unsure at all n locations
gctgcacatganaactgtgataatgagttcatcaaaaaaaataactcgggtgttttcagcaagtgcacttagtgccatggcatctcatccataagctattggctactgcacatagctcatacgcgttgtcaagataccaaacactgccgatatcaagtgcatatctcagagtgatgttcctgggaagtaaatgagcttgcgcatatgtctactttacaaattcagtgcagcaaaaataatgaggaaaaattatgcacaaaaataaggaatgatcattgcccaatacctttggtggtttgaaaggataatcgggaggaaaatggattgtaactaggaaaactccaccagaatatgggctatcagatggacccattattggtgcctgccagtggaatatatcttcaccaacaggacctgccaaatatgattattgtgtcaccaacaagggacgcaactgaatttctgagtc

SEQ ID NO: 72749 - DNA, 470 bp, Zea mays
  unsure (1)..(470): unsure at all n locations
tgacattgcttccctattggaaaccaatgccatccttaatgccatggcatctcccattatagagcatgcttctagcaaatttaaaattttcattntctatctcatgctcattgattttagtagttaattgagctatatgatcattttgttgtttaattaaagcaaggtgatcatgaatagcatcaatattaacatctctacatctagtacaaatagtaacatgatcaatactagatgtagagggtctgcaagcatttaattcttctatcttagcatgtaatatggcattctcatctctaagacaggaaatagaatcattgcaaacatttaaatctttagccttggaaattaaactagcattctcaattctaaggttagaaatagtgtcatggcaaatgctaagctccttagtcaagttgttatttntctctacttcctgagcataagcattcttcaccttaacatgcctt

SEQ ID NO: 72750 - DNA, 467 bp, Zea mays
  unsure (1)..(467): unsure at all n locations
ctcgtacctgagatccttagagtcacctgttgcatgctatcttcngctcacggaagatgagatgcggctcgaagacaataacgaggacggagggggctgcaatcgccggccgcgccttttatacggatgggcagaccatcctaatctctcgtgcggcctctgcgactgggagtctgccagtctgggtcacacgctcgcgttggnttgcttcttttccttatttttctttccgtcggccatcgctgcgcatgcaccagcttatactgtggcagcatattgtgcatagggcattggtcatgtctaaaagtagttattaaaattagatatttcctatatattaaagccgaacagaaacggcaatgatgaggccatccacgtcgtcaaaatttttntgaaccgtccgatcgtcaatcaccgggtgatgtctcatctcgctcgtaaagctctccgctcaaagctccacggac

SEQ ID NO: 72751 - DNA, 451 bp, Zea mays
tatgaacacatatatagatcaatgaagaagtaacctgagcagaataatatattagggttcatgtctaccttatgaacaagatcactgcttggtacagtctcccatatatcacccaaagttcaactctctttggtgaatcctgctgcttgggcttcatcaaaagatttagaacctttccgaacaccagtctgatatataaacaacagaatcagagatgcaaaggctgcttattgctttagtaacatcgagtcaacaagaaatgaaggaaaatatgataaaaacttttggatgatccatgtaaagtttagctagacatgaacatttggatgattcatgtaatgtgctactaatacatttagtccctataactaaatagggtagggaactaaatttagtcgtctagctaaactgtaatctttgactaaaggaaccagataggatctaagaaatt

SEQ ID NO: 72752 - DNA, 320 bp, Zea mays
aactccaatttgggcacatttgcttgagcatgaacaagaactgtgtaaacggagcttggcgatatattagatgcatttaacagatgcaaaccctctagtaaaatcggcactggtttggtgaattcaaggaaacctttctaagttagatggttcccttctattatgggatattgatcatagtcgtaggtggtgaaagactatgaactccaattttcccccttgtttaatgtgtgaactttataacccatttgatgagattttctgcccggttggcacattgactgggtaaaggcatgctgttcgataacaagcattcactt

SEQ ID NO: 72753 - DNA, 362 bp, Zea mays
taatgcccctcctaaaagattgtctaatgatgctattggcttaactcccatgcctcatgataacgagggttacattttataccctgccggttatcccgagcacaaaattaggagaattcactctatgaagtctcactctggctctcatcatgcttttatgtataagagtgaggcatctatttctaggcaatcagcccatgctaaattgcctaataagaaaactcctattacatcaaatgatcataacgtttcatttaagacttttgatgcttcctatgtgctaactaacaaatcatgcaaaatagttgccaaatatgttgggggcaaacacaaggggtcaaagacttgtgtttgggtaccca

SEQ ID NO: 72754 - DNA, 393 bp, Zea mays
  unsure (1)..(393): unsure at all n locations
agaagccggcgatcacagggaggagcaaagccgaaccaggggctggggcaaggcactggaggagcgagcatggagagcataagagatggatgcgcagggaagaatactgtgcgggcatgataaagacagcgtgcaggcggcacgaaaagatcatggcgcgctggaaaacaaaaatctaagggtaggggcggcggcgcatagagttgggagatattttctttntttaatttttttaaagaatttcgcagatatttctagattgggaattttagcgacgaataaagggtcgaataattatgattgacagcaacaatttgaacaagattngatttggtngaattttcggaaatcagtgagttttcttcccgtatttacatttgaagatttcagtcg

SEQ ID NO: 72755 - DNA, 439 bp, Zea mays
tcgtgtaactgctgccaaaagtgagaactgaattgggtacctctgtcagatattatcttctttggaacgccgtgcaagcatacaatccgagacatatagttctactaacactgcactgttataggtggtcttaactggtatgaaatgggccgcctttgttaaacagcccactactacccagatggagtcataaccggctcgagtgtgatgcagaccgactataaactatatcccaatctcatcccatttccactgaggaatctgcaatggctacaacaagcctacagggctttgatgctctgccttgattctctgacaactatcgcatatggcaacatactctgctatctacactttcataccgtaccaccagaatcttttcttcaagtcttggtacatattcttgctactgctgtgtatggaataagctgtctcatga

SEQ ID NO: 72756 - DNA, 431 bp, Zea mays
  unsure (1)..(431): unsure at all n locations
agcttctagtatcttctaactatgagctgtcatcctaatgatagagaatgataacttatttgattgtgcagaanagatttgatagcacaactaacaaatgaagtatctgaaaacaaactattcattgggctcaccattgtgcgggtaatcatgcgtcccacagaggtcaaacggaagctactcagggagaatcggcttggatccaagggcaagtaccaaggcaagggagaatcttcagcaagatccttatcccaaacaacctgcataatgaagaaagacttacacatctacacacaccagctaagctacgaaaccacatcataccaagaagaatgaaatgacagtagtggatattcccccccccccccccttccccaaggtggactctataagaacatgatcagaanagagaggaaagcatgctatctgtc

SEQ ID NO: 72757 - DNA, 485 bp, Zea mays
  unsure (1)..(485): unsure at all n locations
tactaagcttctaagggagaacacgtgataggtctaaccaatgttcaattcgaaaaaatagaccttgtgcagcttgtcaagcaaggaaacaggtgggatgctctcatcacaccaaaaatgtgatgacgacatcaagacccttggagatgctgcatatggacctttttggacccgtcgcctatctgagcatangaggaagtaagtatggtttagttattgttgatgacttttcccgcttcacttgggtgttctttntgcaggaaaagtccgaaacccaagggactctcaagcgcttcctcatgagagctcaaaatgagtttgagctcaaagtgaagaagataaggagcgacaacggatccgagttcaagaaccttcaagtggaggagttccttgaagaggaagggatcaagcacgagttctccgctccctacacaccacagcataatggtgtggtagagaggaagaacacgacgctcatcgatatg

SEQ ID NO: 72758 - DNA, 419 bp, Zea mays
gcttggcatgttctagaataggaaccttcttatagatgaaaaggccatttatacctcgatagagtgctatagaattatcaccaaatgtaaagggcatgtatgtaattttgtatgggttgtaccccgtgcctataaataagtgaacagtacccccgtactgttcacgttgacttggcgtttgcttttgcgtcacacttgtattttcatctccttccaagccgaaggtacatttataattcgatattgtttctatttctctatgatgatataataaagttaaatggataatgttatatgattattcatgctatcttttatgtttcatatgcttcgtctttcattaatgtatactgtgatgatgaaggttcgtccttcatgaccttcgtccgaagatcgttatatactaaaggaaataatgc

SEQ ID NO: 72759 - DNA, 473 bp, Zea mays
tcggcagaaaaaagaagtagtctcttatgttgtgtacattaaagcaaagcttccgcagaaagaagaagcagtctttaatgcttcgttgtgtacgaaaagaatggaaggtgtttttcgccttctgctcaaaatattgatttcgtccacatcaaagcgtcttaataaaagggtaaggatatattacaaggtatgtacaaagttccttgagaacggtttaattgtatttacaacaagttgttacaaatttcctagcctactactactaatcttcttcatgctcccgcttcggcggcatattctttaatcaccttcagcttcgtcatcctacatgaatccaggtatccagagtaaaaatcaagtatgaatgagaaggtaagtacaaagtatgatttcttactggttcaagatgacttcgagcttcgtctccatccttctcccgccacgcttttgtccatatcattgttataaatcta

SEQ ID NO: 72760 - DNA, 437 bp, Zea mays
  unsure (1)..(437): unsure at all n locations
cttgattgtgtcttggaataaatngctatctctngtattgaatgtagaggattggaatgcttgggtgaagtgaatggaggtagttggggttgtatttacagccaccaaccacttcctagccgttgctccaattctgccgaccgcggacggtccatgcccctggtccggacggtccgtccctgtacatcaacggctgaaatcgcaacggtcagcagtaacggctatatcaacggctataatgcattaaatgtgtcgttagatgtcagataaaggcagtcgcagacggtccggtcgtgcaccccggacggtccgcgaggacgctataattcattntaccgaacccatcaccttcggattntcggttcttcactgaccggacggtccgcgcttggtctcggacggtgcttgcttttncgtcggacggtccgtagtgtata

SEQ ID NO: 72761 - DNA, 471 bp, Zea mays
  unsure (1)..(471): unsure at all n locations
tctatcgaatgatacttgcacctgtaactgtatggcgctctagtgggcgccatatagtctagtatcctctatgactgtcccgtcaaaaacctttttatttggattcattaaagatcttaaatactcattgcaaaattggacgataataaaatgaggatgatgaacattgggtgtttgtttctagagactattttttagtcctgtcattntatttcattttaggttctaaattgctaaatacggaaactaaaacttaattttagtttttatatttaataatttatgactaaaataaaataaaatggagagactaaaaatagtctttagaaatcagacaccccatatatgacttatgttgtgttangggagatatgcgtgatgtgagcccctacggctacgtaagttgttggcttcagattaaagctagttgtttgtactgctgctgcagttataatatacagagaaaaaata

SEQ ID NO: 72762 - DNA, 208 bp, Zea mays
  unsure (1)..(208): unsure at all n locations
attattaattactctctaaaattccagaagcatgggtttntgttattttaaatatcccaaatttccctattagaactgaagatcatgaaactatttttattaaatactatagaaaaatacgagcctagcaaaattggtttgatatttttagcatttttctataattntgtangaattctcttagtccgcccatatggtctgatatttt

SEQ ID NO: 72763 - DNA, 455 bp, Zea mays
taaagaattgcaataacaaggaggaccttcgaattatcaaataattcttcgaagcaacaaaaagtcgttctaaggaacgcatagttagtttgccgaagtcacaaaaagccgttccataaggagcgcagtgtaagttttctgctccaaagtcgttccaaagggaatgcagagcttacagcgaaaagtctacgctgataccgcctaagttaaatgcgaagcgcgaaaagtcaacgcgaataccgctgaaagtaaaaggcgaagaagctcctaagggaggcttatagcaaaaagtcaacgctgattcaaaaagattatgtgatttatcgcaggaatgggtgtgtatctttggaataaacaccatcttacataacataacatcatcgcatcatttcgcatatcataagcatcatacatcatgctgcatatggcacaagaaggggacacaatatcgatct

SEQ ID NO: 72764 - DNA, 441 bp, Zea mays
  unsure (1)..(441): unsure at all n locations
gtgccgtaatgcccaacctcaccacactatattcaactggtgactgtaccctgtcctacaggtctcgtcggggtgctagtggggacaacctgacgaatgtgtggagtctgtggtgtatactgagttggtcgttgccctcctccaggacgagctggtgtattctanggtggaacatagcgaggacggatgctactactccccttcccatgggtgatagccttcctcttcatctcacccagctgaacacgtttgtgttcaacagctatagccttgtccagaagtctctagaaagatgggaagatgtgaaaaaccagctgatactgaagtggcccaataagtccctccatgaaatgctcctacttcctttcatcattagcaacctcatctggagcatacctcgacaactgaataaatntatcacgatattcactgattgacatg

SEQ ID NO: 72765 - DNA, 485 bp, Zea mays
  unsure (1)..(485): unsure at all n locations
atctngaaaccatggtaagtagcataggcatgtaatatacgaattgactcaagcctagctacaagtgcatatgtttcatcgaaatccaaaccttcgacttgtgaatatccctttgccacaagtcaggctttgtttcttgtcaccacaccatgctcgtcttgcttgttgcggaatacccatttggtacctacaacattttggttaggacgtggaactaaatgtcgtacctcattcctcgtgaaattgttgagctcctcttgcattgccaccacccagtccagatctcttagtgcatcctctatcctgtatggctcaatagaggaaacaaaagagtaatgttcacaaaaatgagcaacttgagacctagtggttacccccttatgaatgtcaccaagggtggagttgacgaagtgaatctcgtgaattgtttggtggactcttgngtgtggcggtctttgatcccttatttcttgatcatcttcttg

SEQ ID NO: 72766 - DNA, 345 bp, Zea mays
tctcatcgctgtctggccggaacacttccatccatatgaccattcgccctgtcaccgtggaccggtagattcgcagtcgcaacgatgaaattgaattgcgggaaaggttcggtaggggttcaattgtgtttatgacgctcgggcgcttcatccgtggtggcatccacccggtctatctcgccggatctcggcctcccgtgcggagcgccgtctgggactatctatagtaaaagaatagaacgcaaagggtttttctgcaaaccatcagcgacttagtacaatagtaatcgaactcacttcggattaatcagtaagccgtggaccttgctgcaaatctgccaacgc

SEQ ID NO: 72767 - DNA, 374 bp, Zea mays
  unsure (1)..(374): unsure at all n locations
gctgtgaagattcttcattccacatgtgctagtcggcgatgcctgatccagcccatgttagtcttagcaattaagcaagtgtcgagttcagctctataaaaatctactaagtatagctgaccctctaacacccccttaaatgctattgaatcatcacttcttctaaagacaagaacacctgtatctgtaaaaagacagttgtaacccattntacataattgtgaaactgaaagcaagttatagtctaaagaatctacaagaaaaacatttgaaatggaatggtcaggtgatatagcaattntacccaatcctttgaccaaaccttgattntcatccccgaatgtngatagctcgtggggatcttgattnttctc

SEQ ID NO: 72768 - DNA, 365 bp, Zea mays
tgagccgatgaccagccccaccggaatagtgcaatcgcgctcgccggagttcgtgaacccgccggagcgcatggaccgggtaacccactgcaccatttctcaattccttccgcgcatggcctctacatcacccagtggagctcctcgtgcactttaatttaaccctaccgtcgtggcttggccggagcatgtgccgccaacgacctccgccgcctgcactcgtggccagagcatctctagccacctccggcgccgacccgcacaccgacgtgaccgccgtgacctccccgacgtcaccgaccaccccaccggagctctactaccgccggtaagcctcgccgtcatgatcttttgcccggttactg

SEQ ID NO: 72769 - DNA, 370 bp, Zea mays
ctgcctgatatgacgtaccatcgaaaaattcatgggccaatgtactacatgagtactgactactcctgtaggtaccgcattatatctaagcagagatatgcacgcgcatgtttacccataagtcgtgttacccatttgccacggcgttgatcggaccgcatacacctgtaccattgaagtgaagcagggtaccactacgacgcctttgacaagtttcactagcttcacataagccgctacagtttctagcacgctacactgctggaatccctctgttgaccgtcaccgcagcatatattacccattgaccgtcatacactgaccactgacctactgtccttgaccctttccggtgatgtagtgatccact

SEQ ID NO: 72770 - DNA, 426 bp, Zea mays
  unsure (1)..(426): unsure at all n locations
cttcatccccacatgtgctaagcggcgatgccacagccagcccatgctagtcttagcaattaagcatgcatctagaccggcctcctcttttgcaaaatcaactaagtaaagtttgtcgtctaatacacccttaaaagctagtgaaccatcacttcgtctaaagacagacacatctacatttgtgaatagacaattatatcccatattgcataattgattatatcccatattgcataattgactaacagataacaaattatatccaagcgactcaactaaaaacacattagatatagagtgctcagatgaaatagcaattttacctaacccttttaccttgccttggttcccatcaccgaatattattgaatcttggggatccttgttcttgacgtaagaagagaacatnctctnttcccccgtcat

SEQ ID NO: 72771 - DNA, 463 bp, Zea mays
catatttgggactaacaaatgttcattttgagaaagacagggtttgtagcgcatttcaagcaagaaagcaagttggtgatcaccatccccacaagaacatcatgacaaccgacaggccgctcgagctactccacatggatttattcgacccgatagcctacataagcatcgacgggagtaagtactgtctagttattgtggatgactattctcgcttcacttgggtattctttttgtaggaaaaatcacaaacccaggagaccctaaagggatacttaagacgagctcaaaacgagttcggattaaggatcaaaaagataagaagcgataatggaacagagttcaagaattcacaaattgaaggctttcttgaggataagggcatcaagcatgagttctcttctccctacacacctcaacaaaatggtgtagtggagaggaagaatagaactctactggacat

SEQ ID NO: 72772 - DNA, 478 bp, Zea mays
  unsure (1)..(478): unsure at all n locations
atatgacacgaagtgtaggactcctctatattgngatcagactggagaaagacagttctttgggcctgaacttattcaagaggcagaagaacaagtctgtataatccgggagaacttgagggtagctcagaccaagcaaaagagctatgctgataatcgaagaagaccactggagtttgaggaaggtgatcatgtgtacctcanagtgtcaccacttcgtggaatgaggagattcaaagttaagggcaagttatcccctcgctttattagaccattcagaatctttaggcaagttggggagatggcctaccaactcgagctacctgatcatctatctgatgtgcatgatgtattccacgtgtctcagctcaagaagtgtttatgtgtccctgtggaacagctatcaatggaagagctcactgttcanggtgatntgacttatacagaatatnctatcaagaaatgtgacacattgact

SEQ ID NO: 72773 - DNA, 454 bp, Zea mays
  unsure (1)..(454): unsure at all n locations
tccttctgcatagaataattgatgcccatagaaatgatgatggtatgaaacacattcatgagaaaatggaggccggtaaagccatctgcttcagaagagataatcaaggtgttgtagggttcaataaccgcatatttgtgcccaaggatgatgatatccaccgacaaattttagatgaagcacatcttattcgctattctattcatcccggaagcactaagatgtatcatgatctaaagcagcattattggtggacgaaaatgaagattgaaattgcacgctatgttgtaacacccctggtgttacggccactaaaacttgagcatgacatcacagcattggcatatcatgtgtttgtcacacctaaagtgcattcactangcacaaattttaaacaaagttgtattgatgtgacctttcatgggtgaaaccctatggtacaatgcttaaccct

SEQ ID NO: 72774 - DNA, 373 bp, Zea mays
  unsure (1)..(373): unsure at all n locations
tatgaaaacttcctctccttcagttgttttagtattctatccttagtgggatgtaccataatatagattaatttcattgcaatataaaatgttcaatagtgcatataactttgacatcaaccatatatgtgcactaatttaaaataatttaatctacccttttgggttctaagaatgatgattcatttgccatcctcatataaggatcatcatttgtgaaaccctcctttgtgtttctaatgctctcttttctaagtgtttcaataagggcctcccaagttctttgaagatgaattcaaaatctacaaatataagaatcttggnntgttcaatcattgagcttcanttgatctcatatcaagtatgatcgaat

SEQ ID NO: 72775 - DNA, 468 bp, Zea mays
tgtactttgcctcaacatgacctgatcggtgattggcgcgccgttttattgcgtctgctgacgcgcccactgtcaatccgccttcagtcacgtcaactgccatatctgtccccgcggctgactgacccgcggcccccacgcctggtggtttcgtctggccacgcgcggggcgcctcgttgttgctgcattgatttaaaatattaccttttgtcttccgcagcggccccaatgaggcgcactacatacacgcgcggcggttcgctctttccgcacccgaaatctggcacacaaactgtatgacttgtggacccgggccccgtgtcaaagattgggctgcctgtgtcctatgtacccgtcgagcgagttttcctacggcgattcatgggtgcgcggaagggtttcctgacaaggactctggttccttgaaaaggattccccagcgtgagcatgtacctttcgattctctc

SEQ ID NO: 72776 - DNA, 373 bp, Zea mays
  unsure (1)..(373): unsure at all n locations
atcttgcggatagtcttgcatataatagtctgaagtacaaagattgtaaattttgaattttatgaattttgaatgagtcctttactgttgtgttaatccattcattcttttgaataaggcttaatactcagcaatgccttaaggacacaaaagaatgctgaagacgagagctacactattgctcttaacaacctccgcacagaggttataaggctaagaaacgaagccatggaaaaggacaagattctagttacattggtggataaaatgaaggaaaacgaagctagctctaaaactcaaaccgaagctcagaagcgggaaatngaagatcttcggaaacaattagcccgagctaaagaagaacacattcttg

SEQ ID NO: 72777 - DNA, 433 bp, Zea mays
gtttagtgatttttggagttattaatcaatttataaaattctaggagtataggttttggctattttaaatactccataattccttatttggactaaaaatcataaaactatttttattaaatactataggaacttaggaatataacaaaattggtctggtatttttcgcatttttctacaattttctatgaattctctaatcctggaagaaaaagaaaagggaaaagtatgaatagtattgggccgggactggcccaagtcatcccgtgaacatgctaacgcgcccgcgcgtgcggccgctgtgggcattttgcaccgatgtccccatgggtttgaataactatcgaagaaccccgcgcactatttcaatgggtcactgacatttacaccgatgccctccactttctaattctttacaacccgcggtcctcga

SEQ ID NO: 72778 - DNA, 438 bp, Zea mays
  unsure (1)..(438): unsure at all n locations
agcttctaaagggatatcacattntangattaacaaatgttcgttntgagaaagaacaggattgtagcgcatgccaagccgggaagcaagttggcactcatcatccgcataagaacataatgacgactgacaggccactggagctcctacacatggacctatttggcccgatcgcttacataagcatcggcgggagtaagtactgtctagttattgtggatgattattctcgcttcacttgggtgttctttntgcaggaaaaatctcacacccaagagaccttaaagggattcttgagacgggctcaaaacgagttcggcttaaggatcaagataattagaagcgacaacgggacagagttcaagaactcacaaattgaaggcttccttgaggagganggcatcaagcatgagttctctctctcctacaccccacaac

SEQ ID NO: 72779 - DNA, 464 bp, Zea mays
  unsure (1)..(464): unsure at all n locations
tgctcctggtcctcctcttggacagttacttgctctttgatgatcactgttgggggccttcggcttccgaatgtcctcaaaaacatgatttaacgatgtttctggagtataatgtgtgaacaggtatcttcggactcaaatcaataccacagtgggagaagcccattaaatactaatgttgacacatcgccgaatgtgtgagcatgaaagcttcggcgtgatagcagataaggaaaccgacttaaagatgaaaaggctatttagaccttggtggattactatagaattactaccaaatgtaaagggcatgggtgtaattttacatgggctgtgtcccgcgcctataaatatgtgaacagtgcccccgtactgttcacgctgacttggcatttgcttntgcgtcacgcttgtattattaccttcttttaagccgaaggtacattnttaatttgatatcatttcta

SEQ ID NO: 72780 - DNA, 436 bp, Zea mays
  unsure (1)..(436): unsure at all n locations
agcttcgcacctctgaactaactcggctgcttcgttctttgctggtggccaatataatcctgacctgaagaccttcccgactagtgttctcgaggttgcatgtattccacattgcccagcatggacctcctccagaagttgcttcccagtggacgggagaatacacttcatgaggactcctgatgcaccccttctgtataatgtttcctcaatgagtgtatagtgagtcgactgtctggcaatgcgctctgccgagttcttgtcgtctggttcttcttcattntttctatacttaatgatcggccttctccggtcgtcagagtctgattcgggttgatctatgatgttgcactcttctgcttgatccattgagatactcggctgtagtatttcttgcacaaagactccgggtgggacctgagctcgactggatcct

SEQ ID NO: 72781 - DNA, 471 bp, Zea mays
  unsure (1)..(471): unsure at all n locations
ntactattgttctcacccttcaatccaaagatatagaatggttagattggtgaggttatattataacgacataaattagaggtagcaacattnttttactgctgctaccattgtctaactgtatttctaaccatgaaattttttaccaccgctgatttgtctaatgcctatgatgctattgtggcaggtcctaaaaataacacgaactaatctggtgtcgttgactgactgcaggcggtgcttgcaagcgcgtttgaaagtgaattcatcccttttgtgagttttggtgatttggataacaacacatttaaaggtctaacaagtttgctaagtgttgaacaggaaattcagtatgatgaacatacttgaatagtgtataatgatcagtgaacaatgttcaacacaatgtcaaataaccagtgagacaatgcaaatggatatactatggtctctatattggttngaatatat

SEQ ID NO: 72782 - DNA, 438 bp, Zea mays
  unsure (1)..(438): unsure at all n locations
agcttctaaagggagagcacattntaggattaacaaatgttcattttgagaaagacaggatttgtagcgcatgccaagccgggaagcaagttggcactcatcatccacacaagaacatcatgacgactgacaggccactggagctcctacacatggatctatttggcccgttcgcttacataagcatcggcgggagtaagtactgtctaattattgtggatgattattctcgcttcacttgggtattctttttgcaggaaaaatcacaaacccaagagaccttaaagggattcttgagacgagctcaaaatgagttcggcttgaggatcaagaaaattagaagcgacaacgggacggagttcaagaactctcaaattgaaggcttccttgaggagganggcatcaagcatgagttctcttctncctacaccccacaac

SEQ ID NO: 72783 - DNA, 475 bp, Zea mays
tgaacatgtacgtgtcatcttccactcgtactactgctacgtacgtggcttctcaacaagtcggcaggtgtgcagcggcatccggcccggcggtgggtgagtcatgagtggtggccgtgcttttccaaatcagcagcgccggcgcagcatgcatgtgctactactgctggtggagccactgcggcggtacggtggtgagagagatcccggccgccgccgacgatgacgcgtgaggtggcggtggatactggttactggatagggctgtgctgttgctttccctgtcgtctggcctgcttggcgcacgttggatttgggtcgtcggctcgtcgccggatacggcccgccgacgccatgtgcatgctgcgtggaacagcgtacgaatcggaatccacgctggttgtcccatgcattatcgtcgtaccttttgaggagatccatgggacgaacgtaccatcagcatagtctatcggtc

SEQ ID NO: 72784 - DNA, 268 bp, Zea mays
agcttaaatgatactattcaactaaagtaatataaagttgatcagaggccaaggtatgaaaacttcctctccttcaggtgtgttagtattctatccttagtgggatgtaccatagtataggttaaattccttgcaatataaaatgttcaatagtgcatataactctgacatcaactatatgtgtgcactaatttaaaggaatttagtctatccttttgggtttcaataatgatgattcattcgccatccacatataaggatcatcatt

SEQ ID NO: 72785 - DNA, 463 bp, Zea mays
  unsure (1)..(463): unsure at all n locations
ttaccatatggacgtgaaaagtgccttcctcaatggaccaatcaaggaagaggtctatgttgagcaacctcccggctntgaagatagtgagtatcctaaccatgtgtataaactctctaaggtgctttatgggcttaagcaagccccaagagcatggtatgaatgcctaagagattttcttatcgctaatggcttcaaagtcggaaaggccgatcctactttatttactaaaactcttgacaatgatttatttgtatgccaaatttatgttgatgatattatatttgggtctactaacgaatctacatgtgaggaatttagtaggatcatgacacaaaaaatcgagatgtctatgatgggggagttgaaatacttcttgggatttcaagtgaagcaactccaagatggcaccttcattatccaaacaaagtatattcaagacattctaaacaagtttgggatg

SEQ ID NO: 72786 - DNA, 421 bp, Zea mays
  unsure (1)..(421): unsure at all n locations
acaatctaaactagtgagcaaagagttgtgaaactgggtgcgaaaggataaaagaagaagaatcaaaagtgccaaaagtgtggcattgctgatggacacaacagtcacacatgtctgtgtgtggaggagaataaggttaaattggctagccttgctaatagaaaaagtggacggccgcccgggtctataaacaataattcaacgatggcccctcagtggaatgagacattgacttcaaagaaggacaaaatggttgattctagagaccatggatctgatgacgattatgtgacatgattgtgaaacatacatgcaaaattntatataggattatatgaaaatgttatgatcatgttactatatgatgattatttgcattaaaagctcattgtattgattatatctattaatgcaaagtaat

SEQ ID NO: 72787 - DNA, 445 bp, Zea mays
  unsure (1)..(445): unsure at all n locations
agcttgtaaaaccaatcacaagtttattgatgaatgataccaaatttaattggtcttcaaaatgtaatgaagcctttgagcagctgaaagtattattaaccactgctctggtattggctcaaccggacattgaaaagccctttgatgtgtattgtgacgcatcaggcagtggtctcggctatgttctaatgcaagagggccaagtgatagcctatgcttcaaggcagttgcgccagcatgaagagcattatccaactcatgacctgaaattagtcgatgtggttcatgccgtaaaaatctggcgtcattatttgctggggaatatctgtcacatctatacaaatcataaaagttntaagtatatcttcacccaattagagctgaatatgaagcagagaagatggcttgagcttattaaggattatgaactanagaatcattatca

SEQ ID NO: 72788 - DNA, 213 bp, Zea mays
ttttaagaaggagtagcacccgttaaaaagagatcaacgggtatatcaggctagacagacccaaaagaaagccaaaatctacaaggcaaacaagcacccttattcaaaaatgaagaaatgagcaaaaggagaaaaatggcaaacaaaagtagatggggcagacaaaaccattatgggagtaaacatggatcagagaccaaggacctttacaaa

SEQ ID NO: 72789 - DNA, 443 bp, Zea mays
  unsure (1)..(443): unsure at all n locations
agcttcacttgccagagacccgccacttgatgtttcacagaggattatttcagaagtgcaagcctttgaaattgaaactgcagatgattctggaatcaggccaaaagctgcacatgatttggcttgccgtcaagtaggtggaccacttaatcttagctacacttgtcgtgataggaaaaattatntacaaagcaaacagcagagggagttggcttttgggcaagccggaagcatgctgaaatattttcatgacaaaatttcagagaatccatcattccaatatgctttgcaagtggattgtgaggagcacataaccaacatattttgggttgatgcaaaaatggttctagactatgcacatttcggtgatgttgtcacatttgacactacttttggcacanataaagaatatanngccattggtgtttttcttgngctcaatc

SEQ ID NO: 72790 - DNA, 451 bp, Zea mays
  unsure (1)..(451): unsure at all n locations
tagacaatgctngatggtggaactccttaaggattatgatttgttgattcactatcacccgagcaaggcaaatctggttgcagatgccttgagtcaaaatgaacacgtccatgctactattgttgcccagctacccgatgagattgttgaggatttcacgagactcaacctgcgaatagttgcacatgctgaaggagtcactattgaagtggaacctaccttggagcaagaaattcgtaaaggttagattggtgatgctaaaatccaagagatcaaagacctgattgctgaaggtagaggtccagaattcatagatgatgagcaaggcacattatggttcaaggaccggatatgtgttcctgagattgacaaccttcgtgagactatattgaaggaagcccatgactctgattattctattcatcctggtagcactaagatgtatagcgat

SEQ ID NO: 72791 - DNA, 417 bp, Zea mays
  unsure (1)..(417): unsure at all n locations
ccatgacctgagttaacaagaagggaaaccggcgaatgaaaatggtgtgactaatacagtcaacacacgacagttactataactatatgacattcgagtcttgatcaacttctatgaaatcaaggcattcatcattttcacctgacaatcaatgaatntagaattattagccgagcttagcctccttagaactggaacttaaaggtctgccatttagctctttatctatatactatagggcacttttagaaagattgaagagatatactgaccaagagaaaattaataattgtgcatgggtatagctgttttcgttctaacatgttattgagcacctctagcatatgttgattgtctacctaantagcaatgactaaaatcgcatcggcatagcatcgaaatttgcatgatcattat

SEQ ID NO: 72792 - DNA, 438 bp, Zea mays
actaagcttgtaaaggagaacacgtgataggtctaaccgatgttcttttctaatattatagaccttgtgcagctagtcaagcatggaaacaggtgggaagctctcatcacaccaaatatgtgatgactacatcattacccctggagctgctacatatggacctcttcggacacgtcgactatctgagcatatgaggaagttaggatggtacatgtatcgccgatgactctttccgctctacttgggtgtccttttggcaggataagtctgaataccaagggaccctcaagcgctatctcaggagagctcaatatgagtgtgagctccatgcgaataagactaagagcgacaacgggtccgagttcattaaccttcatatggacgagtctcttgaggaggaagggatcaaacacgagatcttcgattcctacacaccac

SEQ ID NO: 72793 - DNA, 481 bp, Zea mays
  unsure (1)..(481): unsure at all n locations
gcttctaaagggagaacacattntangattatactaatgttcaatntgagaaagacaggatntgtagcgcatgccaagcagggaagcaagttggaactcatcatccacacaagaacatcatgacgaccgacaggccactggagctcctacacatggatctattcggcccgattgcttacataagcatcggcgggagtaagtactgtctagttattgtggatgattattctcgcttcacttgggtgttctttttgcaggaaaaatctcatacccaagaaacattaaagggattcttgagaagggctcaaaatgagttcggcttgaggatcaagaaaattagaagcgacaacgggacggagttcaagaactctcaaatcgaaggcttccttgaggagganggcatcaagcatgagttctcttctccctacacgccacatcanaatggtgtagtggagaggaagaatagaactctattggacat

SEQ ID NO: 72794 - DNA, 480 bp, Zea mays
  unsure (1)..(480): unsure at all n locations
tactaagcttgacatgangagatggcgctcgtcatcaagagcttccgccatatcctcaaacaaaggatggggaaagactacaagtcccgctccaagaatgtttgttacaagtgtggtaagcccggtcactttattgctaaatgtccattatcaagtgatagtgacaggggcgacgacaagaaggggagaagaaaggagaagaagaagtactacaagaagaatggcggcgatgcccatgtttgtcgggagtgggattccgacgaaagctcaagcgactcctccgacgactaggacgccgccaacatcgccgtcaccaatggacttctcttcccaaacgtcggccacaaatgtctcatggcaaaggatggcaaaaagaaggtaaaatcaagatcctccactaaatatgaatcctctagtgatgataatgttagtgatgaagaagataactngcattctctttttgcaatcttaacatgcact

SEQ ID NO: 72795 - DNA, 448 bp, Zea mays
  unsure (1)..(448): unsure at all n locations
atccttaagtcacctgttgcatgcatgtctttagagacatgagagaaccaaggacttctatgaaatccattgatcttaatggatacactgattagagataagttgataaaatgacgtcatgatccttggagaaagagtatgagaataattagaatagagagatttatgcagatcaacatccaatacttgagaacggtttatagcagataaccagataatatggcaggatcatatgggatcccgagattcggatgataaagccaacatgattcacaagaaaaaaggttaccagatctatgcaaaaggagaggtaggcaaacaggatcagctaggatgatcaacagaaatgttatgacgttttatgggcaaggacttatggaaagaaacatggccttgataggggtagcgcaactagacaccaaacaacattnttntatgtaacatgtgc

SEQ ID NO: 72796 - DNA, 426 bp, Zea mays
tctgttcggtgacgaagcattaacaccagaagaagcatgatcatgatctataagaaccacatcttcagtagaggacgaagctgattctcaaataacaaaagacactatataatggaccagacttcatgccatacagaacatcaataagtatcaggccgaaacaataaaatggcgtgataggaaagttcgattgaagaatatcaagtcaggccatttggtgcttcgaaggatagccaacccagatacagtgggaaagctacaactgaaatgggaaggtccttttctggtagtatcttcgtcaagactcgtttcttacagattgaaggatatggacggcaacgacatactcagaacttggaatgcggatgtgcttcggcgatattatgtgtaattgatggtaatacttttttaattttcctatgacac

SEQ ID NO: 72797 - DNA, 423 bp, Zea mays
  unsure (1)..(423): unsure at all n locations
gcttgaagacattgtatataatgtaagtttcctctgaccctcgccccaccttgcctggtgtaataccttgatggccattggtctaactgtaaatttggtgttgttgctggtttaagggccaaatgagtcaaacagtaaacaagaagcgtgggctcttatggccactgtcggaaatggttaggagattcttcactgccgatggtagcaagggttccacgctgtggcctgcgctgatgctattgatcccggtaatagcattggttgcagtttgtgtgggttactacatgcacagcagtgttgaagagatagactgcaccaactgttagttgagcaaggtatctgtgcttaccttctgtccttttcangtgagtgnttattcgtgtatagatctgatgagtactacacgtatttgttggcttgtgt

SEQ ID NO: 72798 - DNA, 459 bp, Zea mays
  unsure (1)..(459): unsure at all n locations
cggtcattntattgctaactgtcctgataatgattgtgaccatgaaaaggggaacaagagggaaaagaagaagcattacaagaaggcaaatggcgatgcgcatctatgcaaggagtgggactcggattgctcctcgtccgactccgacaatgaatgactctccgccaccgccttcaacaaatcaaccctcttccccaacgagcgtcacacatgccttatggcaagagagaagaaggtatgtactcgcaactctacctatgcttcttcaagtgaggacgaatctagtgatgaggatgaagtagattattcatgtttgttcaagggcttagatagatctaagatagacaaaattaatgaattaattgatgccttgaatgaaaagaatatactnttagaanagcaagaagatttgttgtatgaagagcactgataaattgttgaggcacaaaaatcctatgc

SEQ ID NO: 72799 - DNA, 382 bp, Zea mays
aagccagaaattcatctgccttattaccaaacccgtatatcctataaaacgttgtcacattccaatatgcaggtggcattccgcaccaaggtgttccatccaaacatcaacagcaacgggagcatctgccttgacatcctgaaagaccagtggagcccggcgctaaccatctccaagggtggtgactgctctcttggataacatcatcttctccatggttgtttgtaggtttgggagctacctacctaccagcaccctcaatctggtcgatttcaggtgctgctgtccatctgctccctgctgaccgatccgaaccccgacgatcctctggtccccgagatagcgcacatgtacaagacggaccggaacaagtacgagaaca

SEQ ID NO: 72800 - DNA, 459 bp, Zea mays
  unsure (1)..(459): unsure at all n locations
tcacttgccgagtgtctttntatgcctagtgttgtcccttatcaaattaggtttgtgtcgagtgtcttatttcgctgagtgtccaataaattgtagtcgataaagcatcgagcactcgtcaaagagccagattctggtattgatggcggtgtgcctctacaccatcgtcaaaggcgatgaacgtgtctataatgatgatgatggtcgccgaccggtggcggataattatggtccagaggatgtagtgccggtgatggggacgtcgacggtgacaacggataagaaagaataggttccaccaatgatgacgatggaaggacgacgatgatgatggacaaggtacgtatgtgtatccatctatatgcatgcatgataattatactactgtgctaccaactatatatactttcatatggtcatgttatgcattatgacacaaaaaggcactgagaagctata

SEQ ID NO: 72801 - DNA, 400 bp, Zea mays
tgtggtcgcacatctacaattgccatggtgcgtattgcggccgtcggaacatcatcttcatctatatcatcaagatcaacttgctctcttggagagccattagtatcatcaaatacaacgtcgctagagacttcaaccaaacccgatgatttgttgaagactctatacgcctttgtatttgagtcataacctagtaaaaacccttctacagctttgggagcaaatttagaattcctacctttcttcactagaatgtaacatttgctcccaaatacacgaaagtatgatacgttgggtttgttaccggtaagaagttcatacgaggtcttcttgaggaggcgatgaatgtagagccggtttatggcatggcaaggtgtgttcacagcttctgaccaaaatc

SEQ ID NO: 72802 - DNA, 428 bp, Zea mays
cttcatccctacatgtgctaagcagcgatttcacagccagcccatgctagtcttagcaattaagcatgcatctagaccggcctcttcttttgcaaaatcaactaagtaaagtttgccgtctagtacacccttaaaagctagtgaaccatcacttcttctaaagacagacacatctatgtttgtgaataaacaattgtatcccatattgcataattgactaacagatagtaaattatatcccagagactcaactaaaaacacattagaaatagagtgctcatttgagattgcaattttacctaacccttttaccttgccttggttcccatcaccgaatattattgaatcttggggatccttgttcttgacgtaggaagtgaacatcttcttctaccccgtcatatggtttgtgcatccgctgtcgataa

SEQ ID NO: 72803 - DNA, 458 bp, Zea mays
  unsure (1)..(458): unsure at all n locations
agctngagtaagactgaatgcgattatgactaatgataagatgatcacgaagctatgtgcagagaagcttcggcatggcagcagaaaaggggaaccgacttaaagatgaaaaggctattcagacctcaatgggttactatagagtcattagcaaatgtaaagggcatgggtgtaattttacatgggctgcgtcccgtgcctataaatagatgaacagtgctcccgtactgttcacgctgacttggcattcgctttttgcatcacgtcctgtacctttactttccgtcaaaccgaaggtacatttataacttgntattctggatatgataacgcanataagaataaattgacaatgatatctatattactcttcatantttgcatatgaattcctccttattatctatggtgcttacgaaaggatttttcttcatgaccttcgtccgaaatacattata

SEQ ID NO: 72804 - DNA, 476 bp, Zea mays
  unsure (1)..(476): unsure at all n locations
ntngctggtttcctgagccatataagaatgacagataggattgacaacaaaagatgttctttctgaacatgtatatcacataacccaattaaccagcccattgagccaaagacagcaacatattgcagctcagttgtattgagctataaaactcaccatagttttgtcatagaagggaaagccctgcatcctcttcagagcctcagtagctgatgcgacatcttcgaagacaacccaagcttgacctttatgcttcaaagtcttgaaagcaagcacatcaagaattttcccaaactgggaaaaaacggctgttaaggacttcttaagttctgcaaagatttaagcaaattactatcagctataacaataggataaaattacgaatgaacataaacacaaacatgagtgcgaataggttttcaattgctgcagcaagtatatgtaaaaaagaatattgccacaacaagagtgcatga

SEQ ID NO: 72805 - DNA, 421 bp, Zea mays
  unsure (1)..(421): unsure at all n locations
agcttctagatatgtcgaggtgacaaatgatgatggtgaattggtagttacgaaggttgcagctaagcaacttcgtcggttgcccatcattcctcggctntcaagggtgttcctcaacaaggaaatagctctgcatatgatgtggccaaagaatagtgtacgtctcgtcactgatccagacataatggtccatccgtcggacggtgatgcgtggaaggcatttgacgagtttgatcccgaatttgcaaacgaccctatgagtgtacggcttggtctatcgacggacagattcacacctttcaataccagtgcaagcctgtactcgtgttggcctgtcttcattgtgccatataatcatcctcctgagttggtcaataaagaagagttcatgttccttgcactagtcatcccangccccgag

SEQ ID NO: 72806 - DNA, 463 bp, Zea mays
  unsure (1)..(463): unsure at all n locations
tgagtcagttctcttgcaaggataattgatgcccatattgataatgagggtatgagacacattcgcgagaagttaatgactggaaaagccaaatgtttcaaagaagatgatcaaggcattgtatggtttaataaccgcatagtggtgccatataatgaatagctccgccagcaaattcttgatgaagcacatcttatccgctattctattcatcccataagcactaatatgtaccatgacctgaatcaacattactggtggacaaaaatgaagatcgaaattgcacgctatgtggctagatgtgacacctgcagccgtgtcaaagccatacatttgaaagctgtcggtccattacagtcactaccaataccgacatggaaatgggaagacataagtatggactntatcgtgggattacccaggactgcaaaagggtatgattctatctgggttataattgatc

SEQ ID NO: 72807 - DNA, 247 bp, Zea mays
  unsure (1)..(247): unsure at all n locations
acctttcgacccggatctctaatcacctgagcatgcacttataaatggacggaaaggccttctcaaggaccaacaagaagagtctatgttgtcaacctccggtntgaagaagtgagatcctaccatgtctataagctctctaggcgcttatgggctcagcaagctccaaagcatggatgaatgccttaagattttttattgtaatggcttcaagtcggaaggccgatcctcactcttactaaactct

SEQ ID NO: 72808 - DNA, 443 bp, Zea mays
  unsure (1)..(443): unsure at all n locations
tcttaaggctgtgcttcggttccacttgagcaagtttgtatttgaagtgttgaaaatctaccatatcttcctccatcagattacccccgaagctataataaggatggggatttttgtctgggcagtaaggagtcaagggctagagccaagcgcgaagtgcttctgcagtatgcacgaacttctatatgagacaaatgccatgggtaaagaacagtaccacaacaacttcggttgttatggatttatcgctcgccccaacgcaagccacccggtgctaacattccggaagagatggcccggagcttggatggaagaatggttttatgtgaagaatgatttgaaagtgagggaagacattaaagaagtcatcatgcgccccatttggtcccgctttggcctttgaaggccgaagatagaaatngatgggacagtcgaagcgtgtc

SEQ ID NO: 72809 - DNA, 473 bp, Zea mays
  unsure (1)..(473): unsure at all n locations
gtaaatattatttaacagccttgggtaaagtttggcatgatttggacaatgtttggcgccaaaaccccaaaaccctaatcttctccaaaaaccctagtttcttggagtcccatgaaggaaaattgtattcaagacctaagataatatacctttattatctttgcattttcataagcattacatgagcattcatggttatatatgtgatatatatagaaaacgaagaagaagtagaagttgaagaagcaagagctacaccaccacctgaagatccacctaccgggaactgcttttattttgacatttgtggagcagagcctgactctcctataacacaatgcaagcccccgtgcatttgccaccccttgctattttaaaatctttntcacttgcttgatgcattaagtgataggagttgtgtgctaaacactngctgcatttccttccttgagaattgattacctttccttgat

SEQ ID NO: 72810 - DNA, 470 bp, Zea mays
  unsure (1)..(470): unsure at all n locations
agctngacattgcttccctgttggagaccattgccatccttaatgtcatggcgtctcccattatagagcatgcttttagcaaatttaaacttttcattttcaatttcatgctcattgattttagcagttagttgagctatatgatcattttgttgtttaattaaagcaaggtgatcatttatagcacaacattaacatctctacatctagtacaaatagaaacatgaccaacagtagatacagagggtttgcgaacatttaattcatctatcttagattttagcatggcattttcatctctaagatagtaaacaaaatcattgcaaacttttaaatcttttaccttagaaattaaactagcattttcagttctaaggctagaannatgattcattcaattatcaatcttagcatttaagctagcattntcattactaannatggtaatngaatcatggcacatgctaagc

SEQ ID NO: 72811 - DNA, 416 bp, Zea mays
tctccaaagttggaggaggcttcctggcgaagtactgatctgactgacctggccgaagccccttgatcatggcctcgatgacaatttcattgggcaccgttggtgcctgtgccctcagacgcaagaaccttcggacatatgcctgaaggtattcttcgtggtcctgagtgcactgaaacagagcctgagcagtgaccggcttcgtctgaaatccttgaaagctggttaacaacaaatacttcagcttctgccatgaagtgatcgttcctggtcgaagggaggaataccatgtttgagcaacacttctgacagccataacgaaagatttggccatgactgaagcattgccaccgtatgaagacactgttgcttcgtagctcatcaaaaactgcttcgggtctgagtggccatcaaat

SEQ ID NO: 72812 - DNA, 472 bp, Zea mays
  unsure (1)..(472): unsure at all n locations
tgccgatggagaagcaaaaatcctttgtttcttggctgtctaactgcttgccgntgtcgacagttagttcggacggtactccgaagcggcaaacaatgttttgccaaaagaatttttgggcagtctttgatgttattgtggagacagcccttgcctcgatccatttggtgaagtattcgacagcgacgaaggcgaacttaatgttcccctgagccgtgggcaggggcccgacgatgtctatgccccagcgctggagaggccatgtgtgggcgatcagctttgtaaattacgaagggctgcctgatcgaggagaaaacttcttgcaggcttcgcaggaccttgtgacccgatttgcggcgcagatcattgcgggccagtagaaaccttggcggatcaccttatcaagtagggcccttggccctgcgtgagagccgcatgtaccactgtggacttcgcgtatgatctggacacc

SEQ ID NO: 72813 - DNA, 436 bp, Zea mays
  unsure (1)..(436): unsure at all n locations
caaaacacacttaataagaaacaacctgttaaggtttctatgtgagtttggaggccctctgggcgatgcagcttattcaagactacgtccccatattaacatgagctgccaccactgcccccctcttgcccatcttttatgaaaggttgctaagtactaagcgcattaagctaattaccaaagccagtgccatgatagcactcgtggttgcactattttcctatgtggtcgctccatgatccatntaatacaacatgatcttgtttaatcatcagattaacaacaatagtacaaatttcatctccagaacaataatatcttgaaaagagtgacatcataatgataaagttgagcaatagcataattcctaagcattaatcaaggaataaagtaggtatttctaggtaatcctatagttcagagtatggcatgcatg

SEQ ID NO: 72814 - DNA, 461 bp, Zea mays
  unsure (1)..(461): unsure at all n locations
agcttacttaactcggagtgaccactatgctctactaacggagcatttctgnttaagtcggcaacgactcaaaccggtgcaacatgctcacgcttacttaactcggggtgaccactatgccctgctaacggagcaatcggcttaagtcggcaacgacttaaaccggtgcaacatgctcacgcttacttaactcggggtgaccactatgccctgctaacggagtaatcggcttaagtcggcaacgacttanaccggtgcagcatgctcacgcttgagtaactcggggtgaccactatgccctgccaaacagagcaatcggcttaagtcggcagcgccttaagccggtgcaacatgctcgtgcttataaaattcanggtaaccattgcaccctattaacagaagcaatcgacttaagtcagcagcgacttaaggcgatctgatgtactttacaatactcatat

SEQ ID NO: 72815 - DNA, 405 bp, Zea mays
cagaggcatcaccatgctgcatattttgatgtacatgatgagtatttagctggcctgcgttacctacatggagtaaggctcgatccacaccttactgcagtcatggaccgtctccacatcgtacccgcactcatattccacacatcgacttttacccgctcgctgctatatcgttggtgacgatgatgctaagacggacaatagcatatgtgaccttcaaaaggcataaagcatgtgttaaaaacctcgccaaatatcatcttatcgcccatttcatctctataccacccagtaagcttggtcatggatgcattccactcggtcaacctaccagaatggtcatgaccaaatattggaggaattaccgggttctggatagaaaagattgtcttgttatctgcctca

SEQ ID NO: 72816 - DNA, 489 bp, Zea mays
  unsure (1)..(489): unsure at all n locations
agcttgcacccaggtacattggtccattcttgttgcttgagcaatgtggaccagtggcataccgactccaactacccgaaacattgtccgctgtgcataatgtgttccacgtgtcacaattgaagaagtgtattcgggttcctgatcgaaccgttgaagtgacagatgttgtccttgaaccagacttgacatactctgagcaccctattcgagttctggataaaaaggacagggttacccgaagaaaaactctcaagtttaataggatatagcggaaccagcattctgaagacgaggctacatgggaaacccaagacttcttgaataagaatttcccaggctttntagcctcttgtaaattgtaaaacctgtatagctgtgtaataaagaagtgacccccacatcacccctgccttgtaccaganataaagaaataaaagtattccgcgtttccttttccattacttaccctatgactnttaatctcgg

SEQ ID NO: 72817 - DNA, 180 bp, Zea mays
tacgcttggggcgggttgtcttcagggcgtggacatcaatgctctactagaagttaactctatacttatgtttaaaatagtacgataagcagacttaatgagtcgatcgtaataataataaatatagagccatttcgccttgctgctggcgtcgaacaaatggtgatggaaccgtcgagc

SEQ ID NO: 72818 - DNA, 459 bp, Zea mays
  unsure (1)..(459): unsure at all n locations
aatatgctttattcaagtgcattctttttatttgcaagggtatcaatagagggtttcaagttaattacttctatatctttattgtgaatcaactcttgaagctctaggtttctttccttttcaaggataagcaagtcttcttgagcatcaagagttgcctttcttttatctagnctttccattaattttgtgataacattgtatccatttaagccaaattctttaatcattttatttttcatggcaatttgatcatcatcatcatcatgtgaaaaatcattactaaataaagttaccttatctccctttgccatgaggcaagttggaatgtaggagtcgtcttgaaggttggtgaagagttgcgcgcttgaggtagattggatggccacatttgccaccacttcctcttcctcggagctagaactctcatcatcggagttccattcttcaccaatatga

SEQ ID NO: 72819 - DNA, 414 bp, Zea mays
  unsure (1)..(414): unsure at all n locations
taattcggatgggatttggattagactagggttatgatttctaatacgccttcgattcgtgagcccaacatggacgcctatatattgaggggtggagacgcagcaaggggtgaaccctaatcagccaccatctatcgcgccctcctcgctctcgccacgtcgcgtttgcggacctatcagtctggtgcacgacgcttactccttgcacgtgtggatacctcggaggtgttgcaattgcaaggatgtgatggacgtcgggattgcacgtcaatgctcgacgcgatcgtctacatcgagacaattntcagtatgactgcgcgtctagtggaatcccggagtatactgcagtgtcctgttattatggtgtcaaatttttgttttacgctagtgtagtctacccataatcctacgctg

SEQ ID NO: 72820 - DNA, 370 bp, Zea mays
ttgacaacgatgtgatggaacttaccatcaagagcttccgccaaatcctcaagcataggagggggaatgactacaaaccccactccaaaagagtgtgctacaaatgtggtaagcccggtcatttcattgctaaatgtccaatgtctagtgaaagtgacacgaacgacgacaagaaagggaagaagaaggaaaataagatgtactacaagaagaaaggcggcgatgcccacgtgtgtcgggaatgggactccgacgagagctccacagactcctcctccgacgaggacgctgttgggaatagtcccacattgtgtggtgagggtggaaaagcatggtttatatgggtgagggtgcaacccattaatgggct

SEQ ID NO: 72821 - DNA, 434 bp, Zea mays
tctaaagggagaacacgtgataggtctaaccaatgttcatttcgaaaaagatagaccttgtgcagcttgtcaagcagggaaacaggtgggaggctctcatcacaccaaatatgtgatgacaacatcaagacccctggagctgctacatatggacctcttcggacccgtcgcctatctgagcataggaggaagtaagtatggtctagttatcgttgatgactgttcccgcttcacttgggtgttctttttgcaggataagtctgaaacccaagggatcctcaagcgcttcctcatgagagctcataatgagtttgagctcaaggtgaagaagataaggagcgataacgggtccgagttcaagaaccttcaagtggaggagttccttgaggaggaagggatcaagcacgagttctacgctccctacacaccacagc

SEQ ID NO: 72822 - DNA, 447 bp, Zea mays
  unsure (1)..(447): unsure at all n locations
agcttcagcaacttgggctgncgctctgttctctctggactcgaaccaagaaaccctttctatttgggaggcccgaagccagaagaggaaggccaccagtccaatgcctcaggaggacgacttggaccaagaaatcaggaatatggagatgcttcatcagcaagtgcaacggaagaaagaaaagatggctcggctagctgacctacaaagacagatagacgaagcatctgaagaagttcgtcatcttgctcaggatgagcaaaactgaaggccccaacacagagagcttcaccaagagggcttcgtcaatgaggatgactggtatgaggactntccaccatggaaatttgcctttgacgatgcttctcctttgtcagctgaactgcaggctacaccttggcccncgtcttacaaaccacctcagcttcccatgtatgacggacactc

SEQ ID NO: 72823 - DNA, 468 bp, Zea mays
  unsure (1)..(468): unsure at all n locations
ctaagctttactttacacaacgattcataatataccaattctcttttttgccgaagcaaccactttggtacataaatgctatgaatgaatgcttatgtatgcaaatgccatgatgtaatgtaatgtgcaaatgaatgtccgaagcgtatatccgaagccacactcatccatcattttcttatgagcaaaacacacgtcagctctgcattcccttatgaacgactttggagcatctttgccttttacttatgcagtatcagcgttgacttttcgctgtaagctctgcatccccctatggacgtctttggagcttcttcgtcttttacttatacggtataagctctgcattcccttatgaacgactttggagcttcttcgccttttactttcggcggaatcagcgttgactnttcgctgtgagctctgcatccncttatggacgtctttggagcttcttctcttttttag

SEQ ID NO: 72824 - DNA, 458 bp, Zea mays
  unsure (1)..(458): unsure at all n locations
agcttaaacatttatgatggatcgtccttctttaacatcgcacgcaaggacatatatgcaatataaacaagtagaacaataagaatggcattcacacaacagttgtgattcggtatggctttgtttcacatggtgatctccatctccaataatctgtccatcacgatgatctccatctccatgatataggtatgccatcctccaggtgatgagtccttcaagacctatctaacgtatgctggtaaacaaattacatatacgctttggatcatcacatgttgacacgcaggtcattacattaaatttggacaatacatgtggctccagccgtattgccctggtcacgacacgcaggtcatgaatattntgttaacatgcatcacatacacataatagccataccgatcacatgtnctgcaaaacaggttagacaacactttctatacgttcgcactaca

SEQ ID NO: 72825 - DNA, 362 bp, Zea mays
cagcgcacaagagctaaaaattgagtgagcgggagtggttggccacaaagcgtgcaaaatgagtttgcggtatggccgtatttatacgctctgtgcgttgaaagttgaaagaccccacttgtcattgaatgttgctattctagcaaagggaaggtgttttttcggaccttctgcgtaaagccttcgtccatatcgcaatctaaatttattatttcaaacaaattaatattgcgaggggctactgttggggaccttctgcgtccgaaggtcctcaaaaacaggatttaacagtatttctgtattacaatgtgtgaacatgtaccctcggactaaagtcggcattgcagtagaccggaataata

SEQ ID NO: 72826 - DNA, 446 bp, Zea mays
  unsure (1)..(446): unsure at all n locations
agcttaccgcatttgaagcatgatcgttttctcttggtcttagtcttgcttggctgtcccttgcgaccttttagtgccgtcttgaatcttttgatgatgagagccatctcttcatcattaagaccggccgcctcaatttgcgccaccttgctgggcagcgcctccttgctccttgttgccttgagagcaatgggttgaggctcatggattgggccattcaacgcgtcatccacgtacctcgcctccttgatcatcatccgcccgcttacaaattttccaagaatttcctcgggcgacatcttgatgtacctaggattttcacgaatattgttcaccaagtgaggatcaagaacggtaaatgaccttatcattatgcggacgacgtcgtgatccgtccatcgcgtgcttccgtagctccttattntgtngataaggatcttgagtcg

SEQ ID NO: 72827 - DNA, 471 bp, Zea mays
  unsure (1)..(471): unsure at all n locations
tatgaagattcttcatcccaacatgtgctagttggcgatgccatagccagcccatgttagtcttagcaattaagcaagtgtcgagttcagctctatcaaaatttactaagtatagctgaccctctaacactcccttaaatgctattgaatcatcacttcttctaaagacagtgacacctacaccagtaaaaagacaattgtagcccattttgcataattgagaaacggaaagcaaattgtaatctaatgaatctacaagaaaaacattggaaatggaatggtcaggagatatagcaattntacccaatcctttgaccaaaccttgatttccatccccgaatgtgatagctcgttggggatcttggtttttctcgtaggacgagaacatcttcttctcccctgtcatgtggtttgtgcacccgctgtcgttacccaacttgatcccncggatgcataaacctacaaaacaag

SEQ ID NO: 72828 - DNA, 199 bp, Zea mays
  unsure (1)..(199): unsure at all n locations
tattactttcaatactaatatagccacacgatactatgctcatcaggagtaattggatgtcaataagacaatccacataaccaaactaccttgattaacctcacatacaacaaaacctactattactgcactcgaaccaattgtacctcgtgatatcacacgatgcattcanagtagtagacatacatgatctatcaaa

SEQ ID NO: 72829 - DNA, 421 bp, Zea mays
  unsure (1)..(421): unsure at all n locations
ctatctaaaagttnggtgaattttggaattattaattaatttctaaaatttcagagatatgggttttggctattttaaatactccataattccttatttggaataaaaatcctaaaactatttttattaaatactatagaaaatcaggagcctagcaaaattggtctggtatttttagcatttttttacaattttctaggaattctctaagtctagaagaaaaagaaaaaggtgctacagttctgggctaaatctggcctgagccgccccatacacatgctaaagcacgcccgtgcgcgcccgcgctatccattttacacagagaaccctgacggtttgaaatttctataaagagtccttcccactgttcctctgtctcactgactttgcaaatacacccatgtgcttctacttcttcaca

SEQ ID NO: 72830 - DNA, 427 bp, Zea mays
  unsure (1)..(427): unsure at all n locations
tcanattatatttttaaggcaatcaaagtattttctctacattttcttggcatggacccttaataacttttgttgtagagttcacatagagttatttcagcaagatgacaaggtttggttgaatttcaaaatttgtatttgttcaaacgagcattttcaagcaagcatatgatttatcttctcatgagagcatttggttcaacttcgagaaatctttaaaatacacttgatagataaagatgaatgatgatatagagataacaagtcgatttgcataagaattaattagaggttggcacaacagagattctgctagagaatgcagattcggactacgtatttggacatataccgaatatctagaaagcggattcagacacagatcgaataacataacaactgtcgagagtccgaataaatgagtcta

SEQ ID NO: 72831 - DNA, 436 bp, Zea mays
gaaatacagcatgatttggaagacaagatacacgaagttattattgaaaatttagaaagcaaaataaaggagcaatcagctgctattgagaagaagaacttcgagctccaagcaactgaaggtttattgacggaagccgaagctaagataacagaactgaacacgaagcttctctgccaatctgggcagtttgaacaagaaaagcaagaacttaatgcaaaacttgaagccgaagttcaacaaaattcagatttgagaaaactattgacggaccttcaagaaaaatgtttggaatttagctacaaatgtattcaacgactaagaaaaattttccactcagttggagccagtagtgagaaattcaccccgtcagctgaagatttaccaaagaccttcgaacatattgaggggtgaaatgatgagcttgacgaagtta

SEQ ID NO: 72832 - DNA, 289 bp, Zea mays
cactttatctaagcttacactaagccggggaagaatgtgtgcctttattacctgaaatatatatgaactgaaatttctttatttaacaaaatagaatttaacggaaaaattgtcatcaagttgatattgtcaataaatgtcttcgatcttgacatactgttgctgtgcgacatcagatgctctctgatatccttggtgcaaacaattggctcctctggtgttgaacgtgttgcactgagggtgcgaggcgttcatgagcttgatgctgactgcatactcataaactgca

SEQ ID NO: 72833 - DNA, 476 bp, Zea mays
gcttcgggaaccccatacttctagccatcttccgacagacggattattctttgttgtctgggaggcagtataggaaatcatcttcgttggtcccattgaatactagtgcccccttcggatatttcaattctttggtatagtgattagcttcaaaaacttcttcttcggataactttttccccgaagcgtgtcgcacaatataatcgtatattttggaagatgcttcgggggcagcagtatcaatttcttcaaccaaaattgtctctgacattttcattttttcggttgcctttgcaattttcgtttcttctgtttccaaaggttttaccttggttggctctgaaggcccggcttcaactccagtctgttgcttcggagcttcagcaacagatgcttcagcagacgcttcagaagtttcagtagtcttctttggagttatgcttgaagaattaattggtctccaaacatctaacaca

SEQ ID NO: 72834 - DNA, 168 bp, Zea mays
tatatatgtatgtccacagcggagtcgccaaatagtatgttgactcttttttggagcgccaaatactcaataataaccggcggcggtgctctctggtcatgtgcggacggtccgcggcctgtggccggactttacatgacctgtcacattgtctatgtgtttctgcct

SEQ ID NO: 72835 - DNA, 289 bp, Zea mays
  unsure (1)..(289): unsure at all n locations
gcccctgctgctgccgcggtggcctggtctgcagccgttgctccctccccagctgcatccgctgcgtgcgccccctctctgctttctctcttcgtagccgcgcagtactccgtcgcgggcagaattcgcgtcaaccatctgcgacgaccttcacgggtgtagccggtttggcgtcgccgggacctcacttgtgaaccagggggcgtcttcagtgtaccangaagcaaaccaaggccactgcgcgcacgaattggggtgcggtgctngggaatttctcgtcgacgacttc

SEQ ID NO: 72836 - DNA, 487 bp, Zea mays
acacttgaaactaagcttgcaacgaggaaatggcgctcgtcatcaagagcttccgtcttatcctcaagcaaaggagggggaaggactacaaatcccgctccaagaaagtttgctacaaatgtggtaagctcggtcactttattgcaaaatgtccactatctattgacagtgacatgggcgacgacaagaaggggagaagaaaggagaagaagagatactataagaagaagggcggcgatgctcatgtttgccgggagtggaactccgacgagagctccaccgactcctcctccgacgaggacgccgccatcatcgccgtcaccaaatgccttctcttccccaacgtctgccacaagtgcctcatggcaaaggacagcataaagaagaaggttaaatccaaatcctccactaaatatgagtcctctagtgatgataatgctagtgatgaagaagataacttacgtaccctttttgcaacctaaacatg

SEQ ID NO: 72837 - DNA, 396 bp, Zea mays
ccacatgtgcttagcggcgatgcctcttccagcccatgctagtcttaactattaagcatgcatctagaccggcctcttcttttgcaaaatcaactaaataaagtttgccgtctaatacacccttaaaagctagtgaaccatcacttcttctaaagacagacacatctacatttgtaaatagacagttataccccatgttgcataattgactaacagatagtaagttatatcccagagactcaactaaaaacacattagaaattgagtgctcatttgaaattgcaattttacctaacccttttaccttgccttgattcccatcaccgaatacaattgaatcttgggaatccttatttttgacgtaggaggtgaacatcttcttctcccccgtcatat

SEQ ID NO: 72838 - DNA, 402 bp, Zea mays
ctacctcatacctcaggaactcagttctgtagttatccatatttccaaaggtgactggcatgtagatgtgtccgagtggatattctacttcagtcggcatgatgccgaagaaaggagtatctgactcgtggagctctttgagtgcgactcccaagcctatgagtgtccggtggaatgtgacgttgatgctgctcccccgtccactaacaccttcttcaccctactctctctgatcaccggatcgacgaggagcgggtacttgcccggatgatcgaagtttatccactgatttgcccgggtgaaagtgatcgggtgttcagaccatcggtacggtgcgggaggaccggttgccgccaccagtatctgacgatcgttgagcttttcttgcctcctgctctcttg

SEQ ID NO: 72839 - DNA, 482 bp, Zea mays
  unsure (1)..(482): unsure at all n locations
gcaagcttcgaatggggacatattcagacttgcttgatgactattattatatgacaattcagcatatgggtagaatttatcccaacttcctccatgctgaagtgcacaagctctcaacatatcctcaattacttgattagtcctttcaatttgtccatcagtctgaggatgacaagccgtattaaagttcaactttgtattcatattctcatggaagcttctccagaatcttgaggtaaactatgaaccttgatcagacacgatcttctttggtactccatgtaagcacacaatccgagccatatataactctgtcggctgagagcctttataagtagtcttgaccagaatgaagtgngctactttagtcagtctatccacaatcacccatatagcatcatatcctttttgggtgcgaggcaatccattaatgatatccataccaatctcttcccacttccactncggtatcttcagtggat

SEQ ID NO: 72840 - DNA, 224 bp, Zea mays
ttaatttatgctaagctactgacacgaaaacgtgtgttgggtttgacaacaggggtgccgaccaatgttttctagaagttagatctattactttatagttaaaataataggaaaagtaatttatgaagcgatctaaatttatattaaattaacacattacgcttgatgatgggtagaacaagggtgaggaaccacgatgctttgtttgcaacggctgtgctttg

SEQ ID NO: 72841 - DNA, 414 bp, Zea mays
  unsure (1)..(414): unsure at all n locations
atctgttcacccgcctggtattatccttcccgagtcttgcacgaatcgccgcgatcagcgtgaatccttgcgtagaggtcaccagcggcgagggggagctgaacctgagatctttttgtgtactgtaccatcanataccttatcacgacgcctgacagagcatattgcagtgcccagatctccaattttcatatgataacttgctaatccacctttaacaaagttgttgtcctataatccaactntgattntgttatagcaaccatacttttgttctcactaaatcatacccaaaatagctcccaaacttggtcctagttcactggtagtcccagttcagagttgtactcgactggataaccaacttcaggtctggtttcttcaaattttgtatgtaccaagggttagtcactt

SEQ ID NO: 72842 - DNA, 468 bp, Zea mays
  unsure (1)..(468): unsure at all n locations
cgcacttacgaccaaaccgcacccgcatacatatctcattcaatggtttaacaatagnggtaaggtcaaggttaccaagctgtgtagaattaattttgccattggttcatatcatgatgttgttgactgtgacgttgtgcctatggatgcttgtaatattctgctatgtagaccatggcaatttgattcagattgtatgcatcatggtagatcaaatcaatattctctcatacaccatgataagaaaattattttacttcccatgtcccctgaagctattgtgcgtgatgatgttgctaaagctaccaaagcttaaactgataacaacaagaatattaaagctgttggtgataacaaagatggtataaaattgaaaggacattgctcgcttgcgcaaaatctgatgttatgaattatttcttcaactttgtgcctacccttggatgcaagatgcttgatttaattaat

SEQ ID NO: 72843 - DNA, 422 bp, Zea mays
  unsure (1)..(422): unsure at all n locations
agcttcttcgtgctcatcgtagcactgtcttctaagatggagtgtttctgttcgtccttcatgttatgatgatgatgatcctacgaatgtctgaatgaatgtctgtatgaatgcaatgaatgatgtaatgtaatgtgcaaatgaatgtcccaaacacacacgaagccgcacccagactctacatcctcttaggaatgacttttgagtctttaagctctgcatcccattaagaacaactttggagcttcttcaccttatatttcggtggcatttaagctctgcatccccttaggaacgacttttgagcttcttcaccttctatttcggtggtatttggctctgcattcccttaagaacgacttttgagcagaaaacttactctgcgctcccttangagcgatcttttgtagcttcgttatgct

SEQ ID NO: 72844 - DNA, 437 bp, Zea mays
cgtgacactgtataacactcaatcttgtatgacccatcatgagttgcgtgcctacgaccctttcctatgtatgccttgcatgtttatgcatccggcggctcatgctggattatctacagctgatgcaccaaccacacgaccggggaatagaggacgttctcttcctatgtcattaacaatgatccccatgattcatatcatattctgtgatgggagccaaggcaaggtaaaatggttaggaaaaactgctatttcatccgagcactctattgcgaatgtgatcttacttgagtcgctcggatataacttgccggctgagagtcaactgtgtgatatgggatataactgcttattcacaaatgatgatgtgcctgcctttagaataactgatgggtcattatcgtctaacggtgtacttaacgacacaccttatttac

SEQ ID NO: 72845 - DNA, 295 bp, Zea mays
cgcgcccatgttccgttcctcgaacggctcgcgcacgcgcaatggccacctcgcgaaccactcgccccgtcgcattaactccgcggcgggacatgccgcgcctctggcatggaaagcaaacgacgcttcgccttcgccataacgaccgcgtcaaaaaaggtacgccacgtcattcgaattcgtatccttttccttttactctttctctctcttacaacagggaccgggaaagggggataccccgaataggatccttctccgtgaaggaaacacgccccgagcctccctactgatc

SEQ ID NO: 72846 - DNA, 475 bp, Zea mays
ctttatttatagtttaacctttaacttctaattagtttattaataataagtttcatgttatttagaaagtggttatgaaagtatgggtatatatatgtatagtcaccttattgtgtagtgtaaaagataggttagggcaagaatagccttgggtgagaaagtttatagtgggaaagaattctgtattgagtggtaaagcatctgaagattgagtttgacttctctatccttccttgtcgatgttgatcttttcttcttcggtcttggtctcattgattcgaggttagtgtatatcatcggggttggggaatatggttaaaatagatatggatgagatagactacatgatgtatgtcaaaatcttgtttgatgtttggtgcagatagactgattatacagtccatcgtgactattcgttatgttagctcaacttaaggctagacttcgttaggttagaataacctattagattgga

SEQ ID NO: 72847 - DNA, 366 bp, Zea mays
agcttaatcccgagaagtgtgtcttcggtgttccccgatgcatgctcttggggttcatcgtctccgagcggggcatcgatgccaacccggagaagatcgcggccatcaccagcatggggcccatcaaggacttgaaaggcgtacagagagtcacgggatgccttgcggctctgagccgcttcatctcgcgcctcagcgaaagaggcctgcctctgtaccgcctcttaaggaaggccgagtgcttcacttggacccctgaggctaatgaagccctcgagaacctgaaggcgctccttacaaacgcgcccgtcttggtgcctcccgctgccggagaagccctcttaatctacgtcgccgcgaccactc

SEQ ID NO: 72848 - DNA, 416 bp, Zea mays
  unsure (1)..(416): unsure at all n locations
tgtagagtcaaagncagctcaagaaagtcgtaaacagactctttttaccaatctcattttcttgctagcctcttcttgaatctcgatggtgagattccacttaagggggttagatctgtaacaccctgaatttggggttataaaatttcttttctatatatccaccaaattcatgtgttaccctctcttttccttgcttttcttttctttttcctaaagggtgaagaattatgttgtttattatctatgtgtatcctgagaaaaaaaccctaaaggagtaataattgttgcatcatgccggaatacatctatttttgtatgatgattttctttagtgtgcatctatctaaactcgcataacgtggttgaatgtgaatccacaatctaaaataatattcacatagagaaaagagaaa

SEQ ID NO: 72849 - DNA, 221 bp, Zea mays
  unsure (1)..(221): unsure at all n locations
gcgcataattatactcttgatatcttctcgtgctntcagatcattcattacataaaaccattctgtcatccagccgctaagccacctctttcgaaaagttggcacggggcagcttgacccagaccgagaaacaaaattgtagcacccaaaggtattgtgatactgttccttaccccaaggtattggctcgtatgataattcgtgcatattgaaaaactttt

SEQ ID NO: 72850 - DNA, 437 bp, Zea mays
ttcttcggcggcatgacgaatgtgatgcttgccgaatgtgttcaaaactcaaaaaatggacgtgagttcaccggatgtgggcgccaatgttggggacttgttctcaaatgctgagttacgaacaaggcaacataaaaagtgttaaatgttaaagtccttcgtccttcaaaacattatgtcccttcggatataatgaattccggacgaatgttatgaagggaaaacccttcgcaagctcgatagatgataagaaagaattcatacatgaaatacgaataataatacatatattatcatcaactcatttttatttgcattatcatatttgtaataacaaattataaatgtaccttcgaattgatggaaagcaaaggtacaagcgtgatgtaaaaagcgaatgccaagtcagcctgaacagtacgggagtactgttcatc

SEQ ID NO: 72851 - DNA, 384 bp, Zea mays
  unsure (1)..(384): unsure at all n locations
ggatactgatgaagcttgaatagatgtctgtagaaaaaactctaaaaactcttgtataacttatgtaaagaatgatgtaattataatttacttttgggactttgtacataccttgtaatatattcttacctttccatcaatgtagaaaatgctttggtgtgaacgaaattagcatttttgagccgaaggcgaaaaacaccttcccttctttttatacacaacgaagcataaaattgcttcttttctttnttccgaagccttgtccttatagccgaagcaactgtctgtgttatgatgatgatgatcctatatatgtctaaatgaatgtntatgaatgtaaatgtatgatgaaatgtatcgngccaatgaatgtcanaacacaca

SEQ ID NO: 72852 - DNA, 429 bp, Zea mays
  unsure (1)..(429): unsure at all n locations
actggtgtactgctccatgtgcctaggggtccctnttgtatcctcaatgcagctaagagccattggagatcaacttggaaggcaaatcctgccttctatcgagtggtgcaccggacagtccggtgctcgatctccttccttatctagcgcatccgaccgttgggccgacggtccctttggcgcaccatacactgtccggtgtgcccaaccgactgttggcacgggccacacgttgcccgctgattgcgctggcgaccgttggctcgggcggctctgactcaccggacagtccggtgatatttatccgctgcgtccttggtgatttcccgagagcgacgagttcacgccaagccagcctggggcaccggacactgtccggtgtgccangctggtgctggattcttcttcaattcttttctacttttcttg

SEQ ID NO: 72853 - DNA, 469 bp, Zea mays
  unsure (1)..(469): unsure at all n locations
atctnttgtgcacttaccaccttggacaatatgggagtaaaccctataccccacttgaacccctatctcctaaaaccatggttgaaggggggagagattaagcaaatgtgcaaatcataacctaacctttggctaaagttaagtgacatattaatcaacaaatatggagaggaaacaatgcaaaaagaccccttaagaaaccccaaatccattccttaagtagagagagagctagagctctctaattctctctaagtcaaaatctacacctaatctaaagatccaccgtgttcaccttgtagatggcaccaaaaccacctaagttctataccaaatatgtggcataccacctaaggcaccccctggaaaaagttgagaccgagcccttgacgtttgacatgtcttggtatcactnttgtcgcgcagcgggcagggagacaagccagatttggcgtccgcatatcttctg

SEQ ID NO: 72854 - DNA, 384 bp, Zea mays
  unsure (1)..(384): unsure at all n locations
tctgacataatcttatgccaatgcttaggattatcggatatcttcttttntatcaagttaatcaatgtcctattactagactcgacctgtccattggcctgagcataatatggagatgaattaagcaacttaattctatataattcagcaaattcacatacctcttttgacataaaagaaagttccttgatctgtaatcaaaatctggggaatgccgaatatatgaataatatgctcaggtatgaactcaattacctccttgtgtgtcatggtcttcaaaacaacggcttcaatccatttggtaaagtagtcagtggcaactaacacgaaccgatgcccctttgatgatgaaggatgaatttctcctataaagtctaatcccca

SEQ ID NO: 72855 - DNA, 423 bp, Zea mays
  unsure (1)..(423): unsure at all n locations
acaagttaaatctctaagggtcttcttttatttattttattaaatgaataaaacatacatctacattagttcatatttaatcctaaaaattagagtgtgtagttagtaagtgaacctattntatttaaatagagaataattctatgaacattttgcaatttgaatcactaaatttggagttcatatgcaaaagttatgaaataaacaagtttgggaattcaaaatatgaatttagggctaattctgtgaatatttaaaagtccagggctaaatctgcaagattacaggggcctgcgcgcgaaaaccagagacggtgggttgatttccaataaaccgagggtatctttaagaaaactactgcgtgaaggggtatcaggtgaatctaaccgttagatctaaaaccaacgactgagattatatcta

SEQ ID NO: 72856 - DNA, 127 bp, Zea mays
tgtgatgcacgagcaaaatctggaaatattttcacttgagtaagctatcttttcaactatttcaacccccactgggtatttgaagatacccgtctactcttgtgtatatgtgtatacaaaaattatt

SEQ ID NO: 72857 - DNA, 485 bp, Zea mays
  unsure (1)..(485): unsure at all n locations
tgcaagcttctaaagggagaacacantttgggactaacaaatgttcactttgagaaagaacaggattgtagcgcatgtcaggcanggaagcaagttggtgttcatcatccacacaagaacatcatgacgactgacagaccactcgagctcctacacatggatctattcggcccgattgcttacataagcatcggcgggagtaagtactgtctagttattatggatgactattctcgcttcacttgggtgttctttntgcaggaaaaatctcatacccaagagaccttaaagggattcttgagacgggctcaaaatgagttcggcttaaggatcaaaaagattagaagcgacaacaggacgggagtcaagaactctcaaattgaaggtttccttgaagagganggcatcaagcatgagttctcttctccctacacnccacaacanaatggtgtagtggagaggaagaatcgaactctattggacat

SEQ ID NO: 72858 - DNA, 457 bp, Zea mays
  unsure (1)..(457): unsure at all n locations
ngacannaaacgctgattggttgctcttatggagtttctgaacaactttttgaacgtagaggaaattatcgtgaattgaacgtttcttaatgaaagcgttttgggttgtggagacgatctcgttcattcttggcgcaagtctatttgctaaaatcttggttaaagatttcataaaactgttgatgagactgatcggtctaaacatgtcaatcctgtcagccccttccctcttttgcaaaagcgtgatatttgcctcattaacaagatgcaggcttttgcatctatgattatagaaatcatgaatagcattggatagatcatccttaatcagctcatagcaacacttatagaataaccctatgaacccatctggaccatgcgccttttcatagtgcatccccataaccacatttttaatctcatcaacgttgatcgcagagtccagatctgataactc

SEQ ID NO: 72859 - DNA, 404 bp, Zea mays
  unsure (1)..(404): unsure at all n locations
agcttgtcctgaacttatgtttgagagttggttatacttatgttggtgaaacttggtatgaacatagacatgtttgtgaaaaacttgttagatgtgtggtttttgtgaaatatgtggtttctattatgtatgtgatgattatgtgaaatctgtgatgtatatgtgattactatgtgatatatcttttgtttcgatggatggaaaagcaaaaacaaattaaaaagcggtattctggtcactttgctgagtgttacactcggtaaagaggtactttgcagagtgtcagggtcatatcactcggcaaagaatgcacatctgggcaccggtaaagcctctttgncgagtactgtagctgtggcactcggcaaaaaagcaacctttgncgagtgtcacctaatgctctc

SEQ ID NO: 72860 - DNA, 434 bp, Zea mays
tctgttcatcaataacttgttttattttatcaaggcggctggatgatggagtatatctcaagtgaatgccatgtttaactggcataaccgaaaaatctccgggacaagattattttgcctgtacggtagacatctggactttgcctgtacgttagacatgttgacatctgcatgcgaattaatgttgaacaaatggggttggtctaattgtaaaaaataattattctgaataaatcttaattgctttgagcgaaactgataaatcttaaactgaataaatcttaattgcttttagtcggcactaccgctggtgatatttctgcagaaatctccccatcatctaccggttggaaatgtagctcttctggtgcatcttcatgaggtttaatgtctccaatagcacattgcttgattgatcacatgatgcttcttct

SEQ ID NO: 72861 - DNA, 460 bp, Zea mays
  unsure (1)..(460): unsure at all n locations
agcttgtgaagattcttcatcccaacatgatcaagtcggcaatgcctgatctagccgatattagtcttagcaattaagcaagtgtctagttcaacattgttatcaatgaaatcaactaaatataactgaccatctaacactcccttaaaagctattgaatcatcacttcttctaaagacgggaacaccaacatcagtaaaaagacagttatagcccattttgcataattgagaaactgaaagcaagttgtaatctaaagaatctacaaaaaatattagaaattgaatggtcaggagatatagcaattttacccaaacctttgaccgaaccttgatttccatccccaaatgtaatcgctctttgnggatcgtcattnttctcatatgaagagaacatcactttctcccctatcatgtggtgtgtgcacccgctattatccaacctgtcccaccggatgcat

SEQ ID NO: 72862 - DNA, 293 bp, Zea mays
gcttttccaaatcagcagcgccggcgcatcatgcatgtgctactactgctggtggagccactgcggcggtacggtggtgagagagatcccggccgccgtcgacaaagacacgtgatgtggcggtggatactggtcactggataaggctgtgctgttgctttccctgtcgtctggcctgcttggcgcacgttggatttgggtcgtctgctcgtcgccggatacgtgccgccgacgccatgtgcatgctgcgtggaacagcgtactaatcggaatccacgctggtttgtccatgc

SEQ ID NO: 72863 - DNA, 435 bp, Zea mays
  unsure (1)..(435): unsure at all n locations
gagcttacacagttatttgatgtcnatattttcantgttgcaatcacggaccaagataactcttttgcacaaagctggcagaagatatagctcaactctataagagctagctaaacatgctcagggacatagcctcgaaccatcaccagaagaatctgttcaatccatatgtggaagtcatgactcttcatccctaggactcatagagtagataagttcaccccctactcaggttagctgcatacccatcagggaacatcaacatcttgatccaatgcagtacttccttcctttatgccctgatgaggacaaaatcggccttaaggccttctcatgtctttccaccactaggtggcttcatctctgggtttggctatcacataaccctgccagatccactcatgcctntacgttatcttataacttattagaaat

SEQ ID NO: 72864 - DNA, 291 bp, Zea mays
  unsure (1)..(291): unsure at all n locations
ttactacacanatataggacacctactctcatcacatatatcaccattacacaacatatacttgattcaataatactaaccatacatgtttatcacatgaatgaagcatttcaacaagcaccctaaaacaaactaactctatcacacaactggcattttgaacctactcgattacttgaagcgtctactggacgtcatgaacacaaccatacattatatgtgaagcatatttaaacaaacgcatattgtgcattgacttaacttataaaccataaggaagcgatgacttcc

SEQ ID NO: 72865 - DNA, 445 bp, Zea mays
  unsure (1)..(445): unsure at all n locations
agctntatcctaataaaattctatggaattcttatacttaattgnagnaagtcactttaattagtcaattacaatgaacttattatcccgtcatcatcaaatctactgatatgttgcagtattaaatataaataaaatcctatggaacctcactcaaactgacttgatgctttgggtcactatgtaagctaagatgatatgcaaacgactaaacgaggatgcttgctggtccgtgtgtgggcacgcatgaatgcatcgctgcagcctgcatgtccatgcatgactggaaaaacaagctaagcgtaaacagtcgacacggtgctgtgttatgcaaaccgtgtgtctgtgtgtgcttatagtggtttccggcgatgacacnaatttgggcttccatgccttcactaggtcttacaaagcatcaagtagaagaaatattcaccacgta

SEQ ID NO: 72866 - DNA, 399 bp, Zea mays
tctaagcttgccattgggatcttgtattatgaaagatccaaaacctatatggttagcacaatatgtccctgttggttgtttgggtccgaccgcacacccggtgttgcccctcaaggtgtttttaggagtaggacggtgtcgacaactgtatcataatggttcgtgccgattgcacgatggacagtggacaatgtttacatgttctggccgcttatatatgcgtaacaccctacgtcctggtgagtatgcttggtggataaggttacaagagagctctctgaactagagaatgcagagagttgatgtgggtggctaagtaatatggtcgatcgttctgaaagggtgcccccctatgccttatatattcgaccgtggtgcaattcatgtggatatgataac

SEQ ID NO: 72867 - DNA, 428 bp, Zea mays
agcttgtcgagcttggtcgatggtggctgttgctccatccgctccttggggtggtcgtggctgaagcccctgcaacagcgacttcatcccctgctgtgagatcagagagttttggtctgtgatttacataatataggcacctgcacttctatttcctgcagcaaaccaacacatctgacatgctggatttggctgtcgactacatcaagggtctccagaagcaagttaaggtaagcaatccaatagtaaggtccttaataagagaaagacaaaccgaccctgagtagtaaggtctaaaaccaagctatatttgattgttgcgctctaaactaaaatgagaaagttgtgcatagcgttctgtttagacttatctgaaatacacactcggaacacagagtttgagagttcgtttctgctatctgttcact

SEQ ID NO: 72868 - DNA, 451 bp, Zea mays
  unsure (1)..(451): unsure at all n locations
ntaccaaatggacgtgaaaagtgccttcctcaatggaccaatcaaggaagaggtctatgttgagcaacctcccggctttgaagatagtgagtaccctaaccatgtttataaactctcaaatgcgctttatgggctcaagcaagccccatgagcatggtatgaatgcctgcgagatttccttatcactaatggtttcaaagtcgaaaaagtcgatcctactctctttactaaaactattgcaaaagatttgtttgcatgccaaatttatgttgatgatatcatatttgggtctactaacaaatctacttgtgaagagtttagtaggatcatgattcaaaaattcaagatgtctatgatgggggagttgaagtatttcctaggatttcaagtcaagcaactccaaaagggcaccttcatcagccaaacatagtatattcaagacatacttacc

SEQ ID NO: 72869 - DNA, 418 bp, Zea mays
agcttgtggcgccctctggcgtcctgccgttttcgaagtaccaagtctcccacctggaagtctcggggccgaacccctcgggcgtggtagcgtcgcagagactgctgataccgcgccgagtgtagtaaggccatgtcccgagcctcttccagctggtccagtgaatcttctcggctggtctggttgctttggtcgtcgtatgcccttgtccttggggaaccgtattctaagtctgtgggcaagatagcctcggctccatagactataaagaacggcgagaaacccgtggctcggcttggcgtcgtcctcagactccagaccaccgagggtagttccttcatccatcgcttgccgaacttgttgaggtcattgtagatcctcgggttaagtccctgcagaagcattaccgtggcacgct

SEQ ID NO: 72870 - DNA, 500 bp, Zea mays
acgtgacacttataaactaagcttcaaagggagaaatacatttaggattaacaaatgttcattctgagaaagacaggatttgtagcgcatgccatgccgggaagcaagttggctctcatcattcacacaagaacatcatgactagtgacaggccactggagctcctacacatggatctattcggcccgatcgcttacataagcatcggcgggagtaagtactgtctggttattgaggatgattattctcgcttcacttgggtattctttttacaggaaaaatctcaaacccaagagaccttaaagggattcttgagacgggctcaaaatgagttcggcctaatgatcaagataataagaagcgacaacgggacagagttcaagaactctcaaattgaaggcttccttgaggaggagggcatcaagcatgagttctcctctccctacacgccacaacaaaatggtgtagtcgagaggaagaatcgaactctattggacatg

SEQ ID NO: 72871 - DNA, 379 bp, Zea mays
  unsure (1)..(379): unsure at all n locations
agcttgtgaagattcttcatcccaacatgggctagtcggcggtgccatatccaacccatgttagtcttagcaattaagcaagtgtcgagttcagctctatcaaaatctaccaagtatagctgaccctctaacactcccttaaatgctattgaatcatcacttcttctaaagacagngacacccatatcagtaaatagacagttgtagcccatttgacataattgagatacagaaagcaaattgttattcaaagaatctacaagaaaaacattggaaatagaatgggcaggagatatagcaattttacccaatcctttgaccaaaccttgatttccatccccgaatgtgatagctcgttggggatcttatttnttctcat

SEQ ID NO: 72872 - DNA, 476 bp, Zea mays
  unsure (1)..(476): unsure at all n locations
tcngaattgcaaaccgacttataagtagaatgaccttttattccacaagtgtttgagtcattggtgtaaacttttatgaggggcatgattgtaattcctcatatgctgtgtcttgtgcctataaatagtgaacaatattcctttactgttcacacattcctgtaattgcaatcgcatcactcgggaattattccttgccaaggcagaggtataaatgtatctaatattatatttgaatacatcaagtttatataatatgtaaatgatgttgcttgcttataatttacttgtctttaatgctttatatctcacattgtgttatataatctttaagaatgtaattatgaaaattcaaccttcgtaattgtatcgttttaaccttcgtccgaagttcattaaatacttgaggaaataatgcttcagcggacgaatgacattaacatttaacattntatgttgccgtgttcttaattcat

SEQ ID NO: 72873 - DNA, 336 bp, Zea mays
  unsure (1)..(336): unsure at all n locations
agcttgtttattccaaatattntacagaaacgtggtggaaatctttctaaatattattggaaaaatattatgtagtagtaacacatttggactcaaactccgtgtgcagaacgacagagatatatggtatatagcctaagacaccatacatacatgtataataatgaaaatatacaaatatatcacgtcgnaccattattggtattttttgtttgatttgaataattgaagctcatcagtagattcagatgcaatgaacggcgacgtggtgtactggtatgaccacatgacatttgagagaaaaggcgacgggcacgatgatgaccatgtaccacg

SEQ ID NO: 72874 - DNA, 451 bp, Zea mays
agccctaaaggacagcttcgaattctgctatgttgtttgtgcaattgaactctaatctggctgcatagtaagttttgatttttgatggtgaaattagaatagcagctgcacctgcaccgaatgttccccatgatccatcacagaatattgttcaggcttcggtatctgttgggtgtacttcttcatgagccctatgtgtccaatcgacaatgaagtctgctagtgcttgagattgaatcaaagatctatgaacaaagtcaatggtgaacttgttcaactctgcaacccacttgtcaacccttcctatagcttctttgttccttatgatatcctttagaggttgacacaaaggtactatgatgtggtaggactggaaatagtgtcgaagcttcctagaggccattattacaacatagagtaccttctccaactatgtgtaattcttttcgat

SEQ ID NO: 72875 - DNA, 423 bp, Zea mays
  unsure (1)..(423): unsure at all n locations
atgcaagcttgtgaatgttcttcatccncacatgtgctaagcggcgatgccacagccagcccatgctaatcttatcaattaagcatgcatctagaccggcctcttcttttgcaaaatcaactaaataaaggttgccatctaatacacccttaaaagctaatgaaccatcacttcttctaaagacagacacatctacattagtgaataaacagttatatcccatattgcataattgactaacagacagcaaattatatccgagagactcaactaaaaacacattagatatagagtgctcggatgaaatagcaattttacctaacccttttaccttgccttgattcccatcaccgaatattattgaatcttgggaatccttgnntttgacagaggaagtgaacatcttcttctcccccatcatat

SEQ ID NO: 72876 - DNA, 457 bp, Zea mays
  unsure (1)..(457): unsure at all n locations
tgccttcttggcagcgagggctgccctggcctcatcgtcattcagtggtgatatggggggggtgttatttttgggaggcatcgtgggagtagtcttcgtcgcacaaatggtgggcgccaaatgtatggcacttacatgcgctggcgcactatcatgtggacccaaacactaagagacgatgggagagaattcaggtgcacgacaagacaagcggtagggaactgtagcttctcattatacgtgcttgtaccactacatgacgagggtatttatagggccatctggggttggtggtccaaagtacaccactacctccattcaactgtcatgtttttacaatatagattgtacaacggngtaattgaagcctcatatccccctctggttatgtgcacacacaaccatacccatcaattacattgataggtgggccccacccgtcttcactgcgtgcctc

SEQ ID NO: 72877 - DNA, 367 bp, Zea mays
  unsure (1)..(367): unsure at all n locations
agcttcagatntgaaaaaagaaataagaattgattatattaaaagaatgaagaaggctcacataaacctcactgggtcgatttcttcccccccggcccaactccccctttttccttctcttcaccgcgccgacccatctctgctttgtaagccccaccggcccatctnctcatccacactctaactcagacggccacttacaggtgggccccaccgtccagaagcatcatctccaccaaactggcgtagctcatggctcacgacgggattcccctggtctgcgtcaacaggggttgttgggatttcatccttcaaatccctattaaatcgggcggattttcctcccctgagactataaaaccggatc

SEQ ID NO: 72878 - DNA, 459 bp, Zea mays
  unsure (1)..(459): unsure at all n locations
atatggcgcataattatacctttgatatcttcttgtactgtcangtcattcttcacataataccattctgtcatccagtcgccgggccatctcttccgaaaggttggcacgggacagcttgactcggaccgagaaacgaaactgtagcagccaaaattattgtgatattgttccttaccccaaggttttgtttcgtatgataattcgtgtatattgcagaaactttttgcatcatgcttcagaccttggcttctcacggcccacacgaagatattcagccttatgattgcatcgggggtaagttggtgaagatagacttcgaagattttcagcacctctacgacaaactcgctcaggggaaatcgtagtccatctttcataaagcttcggtacactacgacttcattctcttcanggtgtggacaagtcttttccacttcgtcggccctcacaatggac

SEQ ID NO: 72879 - DNA, 370 bp, Zea mays
  unsure (1)..(370): unsure at all n locations
cgccttattctcaagcaacggaaggggaaggactacaagtcccgctctaagaaagtttgctacaaatgtggtaagcccggtcattttatagcaaaatgtccactatctagtgacaggggcgacgacaagaagggtaagagaagagaaaagaataggttacacaagaagaagggcggcgatgcccatgtttgccgggagtgggactcggacgagagctccatcgactcctcctccgacgaggacgccgccaacatcgccgtcaccaagggcctnctcttncccaacgtcggccacaagtgcctcatggcanaggacggcaaaaggaagaaggtaaatcaagatccctcactaatatgaaagctctagtgat

SEQ ID NO: 72880 - DNA, 316 bp, Zea mays
  unsure (1)..(316): unsure at all n locations
aagctagtgaaccatcaactcttctaaagacagacacatctacatntgttaatagacagttatataccatgttgcataattgactaacagatagcaaattataaccaagagactctactaaaaacacattagagatagagtgctcattagaaattgcaattttacctaacccttttaccttgccttgattcccatcaccgaatacaattgaatcttgggaatccttattnttgacgtatgaggtgaacatcttcttctcccccgtcatatggtttgtgcatccgctgtcgataatccagcttgaacccacggatgc

SEQ ID NO: 72881 - DNA, 478 bp, Zea mays
  unsure (1)..(478): unsure at all n locations
gcaagctatcgctggattggctgcggngagagtctttagaatctcttctttgttatagctcaacctgacggttctgagttcagtgttgaggattgccttgtgttgggttagccaattcatacccaagattacatctatatcctggcctttcataacaatcatgttagcaagaaagttccgtccggccattggtactggcactccatacgccacttctttagtataaatgtgtccgccaggtgaatgaattntaaatccctcctttgattcatggtatgcaatatgatgttgttccacaaacttcttgctaataaatgtatgtgaagcaccacaatcaaaaagaattattgctgggtgactggccacgggaaacgtacccatcattaccggctctcactacggtgtggtagccacttgcgtataatatactcgccccgtcttcttggtattcttgcccgaagtacttccttgctggagc

SEQ ID NO: 72882 - DNA, 476 bp, Zea mays
  unsure (1)..(476): unsure at all n locations
tacctgaagagtatatcagacaaaatatgcagcacacttatttgttgaatanggtagttatgctacaatccagatatgcatacatgttaattcagttttccctatacaaatataacaagcttgccttcaacacaactttgtgcagacatgttaattcagttttcttatgtcctattgtatttgcagatgtacagtgctcagatgggatctcaaatgggaccccagttcacccgtccatcacaatctggacagactcctaacaccaatgaaacacaagcatagttttgtagtatatttactttcatttacaattataatcatatgcatcgttttatttggttatagggttctgataccggacaaggaaacccacatatggacttacagtggtcgatgcccnctatatgacagattcttcctcctccacaaccaggtatgggatattgtgccgcaccaccatggtgatattctacaca

SEQ ID NO: 72883 - DNA, 463 bp, Zea mays
  unsure (1)..(463): unsure at all n locations
agcttcataactctctgtggtacttattgtttccttnggatgccggaggggctcaagaatgctagaggaagcttcagcagaatgatagccaaggttcttcactctcaaataagaaggaatgtatcgacttatgttgatgacatcatagtaaaaagcacgaagcaagagaatcatattgctgacttgcaagagacgtttgccaattttaggcaagctggtcttaagttaatccagaaaagtgtttttggagtaaacaagggcaagttccttggctgtctggtatcaacgaagggaatcgaagctaacccaagtaagatcgaagctatctttcggatggagccgccaaagaagggggctcaacgattggcaggaagactngcatcgttaaatagatttatatcaagatcagcataaatgaatgtgccattctttgaatactgaagtcagccgaagttttcaatgg

SEQ ID NO: 72884 - DNA, 434 bp, Zea mays
  unsure (1)..(434): unsure at all n locations
tactaagacatataatagacttgaaaacatgtattagtctcacagacttataatatagagtaacctcccactgaaagtgtacatacaagttttgaatacttgcatgagacatgcactttgatttgatatcaagaggggcaaattatctataatctgagctntggcacatataagttaaatgatacaaattgaaacacaattgaagtattattccacttgtagtatatgaaaatatcaatggatgtatcattgtcttaggaatgttaagaaagctatgtgccgtgcttaatttgacattataaaccatgtaggtttactcaagaatatgaatttaaagtgagcaatcctaccatatgagttaccaagtatgcatgcattgttaaacaaaagtaaatactaattgtagcactaggtatgaaaggtaaactagatac

SEQ ID NO: 72885 - DNA, 422 bp, Zea mays
  unsure (1)..(422): unsure at all n locations
agcttncactatgggtatgtcccttgcccctcgctcgcctgacgtgcctcttcatcctcctcccccagagatcaatgagtggcaccagcaggcctacggggtgccatttatgtcagcagacgacgaagaagaagaagaagcctacgttgatgatcgcgagcagtttgccctgcctccctaccatggggatccgggtcaattatcctctcaccctccgcctccctactcgggtcagggacccactcccggtgaccctatgccatccggctctggttaccatcaccaccctccgcctcctcctcatcatcgtacatcttcggcatctgttttttctgcggctgatgagcccctatggactccacattcgaggaagacgtgatgaggaccctcttccctgactacacttcataccctncatcata

SEQ ID NO: 72886 - DNA, 457 bp, Zea mays
tctgccacacttgcctcttggagctggtggcctatatgaactttgttgcgggcctgatgattgtgagctgtgctgttgcctttggggttggcttcccctatcatcacttgggctggcattatggattgacctgacatgcatggggtggaatcttcctccgaagcccctggccatctcagagtacatgtaagcttcttcccttctttgccggaaatcattatcagctctgatgtattcatcgattttctagagaagtttttccaaggttgtggcggcttctttgcaaaatattgtgtcgttggtcctggtctgatacccttgatcatggcatcaatgacaatctcattgggcactgtatgggcctgtgctctcagtcacaggaaccttcggacatacgcctgaaggtactcttcctgatcttgtgtgcactggaacaaagcttgatcagtgactatct

SEQ ID NO: 72887 - DNA, 388 bp, Zea mays
  unsure (1)..(388): unsure at all n locations
attggaacactaccccacttaaaaagaatgagggtagaactcttgaatcttggggatttgaactccttgaagtacctcataacaagggtgttacggngccttcttctgttgttgctgcttgaccaagctgcggagagatgactgacacagggttgattctgggacaaccttcttctcatcttctcttcactatcttcttttctcttctcacttttcacttttcactgcctctttctttctctttgctcttcccactggaggagtctatcgatgagtattaccatcatacagaggaggaaaccaaagactatgaaccatgtacaacagtcttcaacccaagaatcaccaagcattgtgatcttatgggcgagggagtgggaaaatggag

SEQ ID NO: 72888 - DNA, 463 bp, Zea mays
  unsure (1)..(463): unsure at all n locations
cctcattcttttccggcttcggagtaatctccttcccgccaaagcgaaccagctccttttttgtttcactaaagtagtccagcttcaccatttttggaagatcagcttcagagatggtggactttccaaagtccaaatgactatgtttgcttggcatcccgcagctgtactcatcttcggaaccaacttcttcaatatcagcttgcgttgcttcggcagcaggtatgtcctctgatggaaccatcccagagcgcctcatcgcttcagaaatcggaacagtttcaacggcttcggtctcgtctccatcacgctcaaccctatcagtggagcgtattctggccatttgattntaaatnttcttggaaaaattctttggaagtcaataacctttnttccgaagctatctttatggcgaagcacaatccaaactggagcttcgttggaatgcaaaaatcaagcttcg

SEQ ID NO: 72889 - DNA, 395 bp, Zea mays
  unsure (1)..(395): unsure at all n locations
gaccggatctcttagtcacctgcngcatgaagcttatcatctgattgaagtgccctttagtaagaaattatttcagttctccaatcttcactgtacacaggagaaatagtaagaactgctctttcaagtaactctactgaaggtgcctttattgtttcgaagaatacatccgaaggtaacggcagcccctgtgctgcagacctggctaacaaatcagcatgctcattttgtcctcgagggatattcttaacagaaaatccttcgaaggaagcttcgatccttcggactgtgtctaagtatttttcaagcttcgggtctttagccttgcaacttttgtcaatatgacccgaaacaatctgagaatcnagtttaaggatcgcccttctgatccccat

SEQ ID NO: 72890 - DNA, 422 bp, Zea mays
  unsure (1)..(422): unsure at all n locations
tacggacacttaaatactaagcttttatggacgacngtgtcggactccgctaaatnggtctgaacctgttgagaggtgcttctttaaacctgatctggtgaaagaagccgaggataaagttcagataattattcgtaatctgaagcaagcacaagctcgtcagaagagttatgcatacaaacggcgaatgcccttatacttccgggaaggagactacgtctacttatatgtttcaccaatgaagggagtatcacgtttcggggtaaagggaaagcttgcccncaggtacattggtacatttcctattcttcacagatatgggccagtggcgtatcaacttcaacttaccgaaacatttgtctgcagtcataatgtgttccatgtatcgcaattgaagaagtgtcttcgggttcccgatcgaa

SEQ ID NO: 72891 - DNA, 401 bp, Zea mays
  unsure (1)..(401): unsure at all n locations
tgcgagcttgatatcgatcacacatgcatactctttacataacaccgggcctagatgcgggaatataaagcacactaccaattattgaacgcataaggttttgatcaactatagcacctccttcatgttaatctatatgaccatatcgttgccattggaggcttgataggcttaacattctctataccacacttcgtgagcatgtgcttcaaatattttgattgacttataaaaactccatctttcaattgcttgatctgaaggccaagaaagaagctcaattctcctatcatagacatttcaaattcctttgacatcatttctccgaactcctcacaaaataattcattagtagatccaaagataatatcatcaacgtatatntgacagacaaataagtc

SEQ ID NO: 72892 - DNA, 464 bp, Zea mays
  unsure (1)..(464): unsure at all n locations
ctgtatcactaaattatactaagttcaagctataacctgcttagtcattgcacatgtcatacctgcacaagattgcaacaccatgcatcatcacatacagtgggcactatcttgtcctaaaacaaaaatattggtagcttctgtccaccttggacaagttttatgtgaatttgtaatagtcaactgattcttgtgtcacaaatattattaattttgtctagtttactagtgtccaagctacattgaccgcatgcttaattagtcacccagatcaaggcttctcttgcataagggattttgtttttttccaaattgcatctaagccataagaaaaggtggaagaagagccataattcccattataagtcatctcanatgctgcaggtgtacccatagtgatggatgaaactattcgggttaattgtgatagtgacacanaatcttccattccatgatgttatgca

SEQ ID NO: 72893 - DNA, 206 bp, Zea mays
  unsure (1)..(206): unsure at all n locations
acctttcgacccggatcttatagcacctgtgcatgcactgggatcgttctcagggtacctaagtcagggtgccctgcnaagttggggtgttggggtggttaattttcgcggagtttaccccgcaggaactatcctcgccgtggacgggcagccgccacattgaatcggaaggattctctatcgcgcttgcgtattctctgatcatg

SEQ ID NO: 72894 - DNA, 477 bp, Zea mays
  unsure (1)..(477): unsure at all n locations
actcagcttctaagggagaacacgtgataggtttgactaatgtgcatttcgaaaaagatagaccttgtgcagcttgtcaagcatgtaaacaagtgggaggagcgcatcacagcaagaatgtgatgaccacttcaagacccctagagttactacatatggacctcttcggacccgtcgcctatctaagcataggaggaagtaagtatggtctagttattgttgatgacttttcccgcttcacttgggtattctttttgcaggataaatctgaaacccaagggaccctcaagcgcttcctaaggagagctcaaaatgagtttgagctcaatgtgaagaagataaggagcgacaacgggtccgagttcaagaaccttcaagtggaggagttccttgaggaggaanggatcaagcacgagttctccgctccctacacaccacaacataatggtgtggtggagaggaagaacacgacactca

SEQ ID NO: 72895 - DNA, 362 bp, Zea mays
ggcatgatcattcatcattgattgtgcaacaaggcaataatcaacattactataacctaactcaaaatcctctgcacaacatgtattaatcaaaaaaatcttatgttgttattaatcaccaaaacccactaaaaaattcatgatcttctaagactaaaattctatctattgttagaaaccattctcacatgtggaataagtgaaaatgtataacagtaatatcaatactccatatgttcaggaaagaatacaaatttactatagtacacgttaaagtatcttaagttaaataagaatatcaacctttataattttaaataccatctaatgtatcatgaaatatattttatatactatactta

SEQ ID NO: 72896 - DNA, 402 bp, Zea mays
tgagtcagcatcaagcaaataataattgacgcacatagaaataatgagggaatgaaacacattcatgagaaaatagaggccggttaagccaactgcttcaaaagagatgatcaaagtgttgtatggttcaacaaccgcattgttgtgcccaataatgatgagatccgccagcatattttggatgaagcacatcttattcgctattctattcatcccggaagcactaagatgtatcatgatctaaaacagcattattggtggacaaagatgaagattgaaattgcacgctatgtggcaagatgtgacacttgcagacgtgtcaaagccatacatatgaagactgttggtccattgcagtccttacctataccaacatggaaatgggaggatataagcatggac

SEQ ID NO: 72897 - DNA, 429 bp, Zea mays
  unsure (1)..(429): unsure at all n locations
agctntagaanaattgatccatgtgcttaaccttaaattataaatatggaatggtcagcatgtaacgcaacaacgaaatagggcaccatataacattttggtatacaatcatcaagtaatcctgagactatttgcagcacaactatcacttcagatgagaaatgtgataattagggaaacaaataacattcaggtacatgacagatgaggaatatatgagttcaacaaatgaaatgaaaacataagccatcatttattttagagcagtctctatttgcaaaaagaaaagattagcacactaaaaatctttaaccaacctgctaatgctgtaggctattgaagtaggcgatgagaaaaatgatagcctgaaaacatgagcatatgcaccatgactccatgagcaaccaanaaatcaaagtaagaacagta

SEQ ID NO: 72898 - DNA, 437 bp, Zea mays
cggacacttagatactcagctgtgcccttgtgtggaaacccaatagatcgagttctctggtgtctgtcttgctgctaagctcggaggacttggaatttcctcttgaggtgacacttttcttcttcctttgccctttccacttgtatggatttgtttgagaggtgcgagaagctgatgaaatcttggctggctaggatggtcttgagttctggtctgagccctttcaagaagcgagccatcttcttggcttctgtgctgacgtcatcaggcgcgtagtgggctaattctgtgaatttgtgcacgtactcgctgacagatcttcctccctgagttagttcccaaaattcatcttccttgagttgaatgatcccttgtggcacatggtgctctcggaaagcagtttcaaactctgtctatgtagcatctctgacgacagc

SEQ ID NO: 72899 - DNA, 459 bp, Zea mays
  unsure (1)..(459): unsure at all n locations
gcttatgaagattcttcattccaacatgggctagtcggcggtgccatagccaacccaagttagtcttagcaaccaagcaagtgtcgagttcagctctatcaaaatctaccaagtatagctgaccctctaacactcccttaaatgctattgaatcatcatttcttctaaagacagtaacacctacatcagtaaatagacagttgtagcccatttgacataattgggatacggaaagcaaattgtaatctaaagaatctacaagaaaaacattggaaatagtatgggcaggtgatatagcaattttacccaatcctttgaccaaaccttgatttccatccccgaatgtgaatagctcgtggggatctttggttttctcatatgaagagaacatcctttntctccctgtcatgtnggtagtgcacccgctgtcgagtatccaacttgagcccccggatgcat

SEQ ID NO: 72900 - DNA, 372 bp, Zea mays
tgctgcaatgcacgatttagtctgatggtacctgttcacatattgtactacagaaatactgttaaattctgtttttgaggaccttctgacgccgaatgtccccaacacatgcaaatcaaacgtattggcatatgctttaatcacgaagagtcaagtcaatctgatggtcgctcgtccgatgccttatgagttggccaatgagttcgacaggttgagtctcggatttctgaacaattcgcggggagtcacagttgagttggaacctaccttaatcgcgaaatcaataagccagaagaatatgaaagatcaggagatccgcgactgattctaatggagagcaagattttcagaaatcagaagcttatatggtca

SEQ ID NO: 72901 - DNA, 446 bp, Zea mays
  unsure (1)..(446): unsure at all n locations
gtcagtctcccgctgacgccttgccttctcatgcacatcagcagaaatattccgacacatagagaaaaatgtcgcaatcccatgggccaagcgggcacccatccctcggccacgacctcgaccacgaccacgtggtgtgggagatccgcggccaggggagggacgcgaggcaccggcagcagcagcagcatgaccagcagaaggaccaacagaagtatgtgcacgggagctggaaggggctttcctcaagcgccctgctggattgttgggatcaatccagaaaggggtataagattgatgtctagtacctttntcatatcggaactgcgtcacaacttcaatcgtcttcatgatgaaaggagcatgtagacatcccttaagtggagagcaggaagcatggataatcttctgccagatcatatcanagatgttgatgctctctgagc

SEQ ID NO: 72902 - DNA, 483 bp, Zea mays
  unsure (1)..(483): unsure at all n locations
tcagttgccatgttcttctctntaatagataacccagaagtatctgcacagttaaagtttcagatgcagattttgtagaaagcgattctgcttaacatctccaagagactagtcaaatggttcgtcaagtcaaattttggctactcaacagtaaaataactctcaacagactagtcatctgactcaaagctatccgactctttaaattgactccctaactaatcaaacttggctaaccactctgactagccaaactagatagatgacaagcatcatccgtttctagaaaacatcagtttctagaaaacaggcacaattagcatcttcaaagactctntatttttagctctttatttgactatgtatttatttttttataaagattacgctctaaatgtaaaaataatgcctaaaactatagagcagtagctctctcattaaatctatactatacttaaagcaccaattgtacatattccttat

SEQ ID NO: 72903 - DNA, 412 bp, Zea mays
  unsure (1)..(412): unsure at all n locations
catgcaagcttaccgcatntgaagcatgatcgcttcctctaggtcttagtcttgctcgtgctgccattgcgaccctttagcaccgtcttgaatctcttgataatgagggccatttcttcttcattaagtcccgccgcctcaatntgcgccaccttgctgggtagcgcctccttgttccttgtggctttgagagcaaaaggttgcggctcgttgatcggtccattcaaggcgtcgtccacataccttgcctccttgatcatcattcgcccgctgacgaattttcctatgacttcttcgggcgacattgtggtgtacctgggattctcacgaatattattcaccaaatgaggatcaagaacggtaaaggacctgagcattattcggacgacgtcgtggtccgtccatcgcgtgc

SEQ ID NO: 72904 - DNA, 462 bp, Zea mays
atggacgtgataagtgccttcctcaatggacctttctttgaagaggtctatgttgagcaacctcccggctttgaagatagtgagtaccctaaccatgtttataaactctctaaagcgctttatgggctcaagcaagccccacgagcatggtatgaatgccttaaggatttccttatcactaatggattcaaagtcagaaaggccgatcctactttattcactaaaactcttgataatgacttgtttgtatgccaaatttatgttgatgatattatatttgggtctactaacgagtctacatgtgaagaatttagtaggatcatgacacataagttcgagatgtctatgatgggggagttgaagtatttcttatgatttcaagtgaagcaactccaagaaggcaccttcctaagtcaaacgaagtatactcaagatattctaagcaagtttggaatgaatgat

SEQ ID NO: 72905 - DNA, 239 bp, Zea mays
ctcgtacccgcgattcttatagtgacctgctgcatgcaagcttcaactgaatggtgcttagtactgtcaacagagagaatggattctggctaggccgcgaccttgacatgttcacacccagccttttctaagattgtcgtaatccctcgagcaccggaaaaagcacaaaagtcttcacgatcgctaatgatctcatcgaaagcttcggcttcttcacctatccattggataaccccttc

SEQ ID NO: 72906 - DNA, 453 bp, Zea mays
  unsure (1)..(453): unsure at all n locations
tcttcaccatgtaatcacggttatcttgagaaggttgatctatacacttcccttttagttgtgtcaagctcatctttagcctctcattttcttctttgagcttttgatatatatcatcttttgttcctgcaaattctatctcaaaggaaggtttgcttgttgacgaacaacaagcattagcacatggtaatatagtatcaatttgaatacatgtgcatgagtgaggttgttgggattttaagttttctatcacaacctcatgagtaacatttaatatgatatgatcatccataagattttcatgagagcataggagcatatcatatttttcttgaaaagctagattntcaacttttagcttttctacttggtccttaagcaaggtattcctatntactaattgagtgatacaatgtaaagcgttatcttgctcaattgaaatagtttcatacc

SEQ ID NO: 72907 - DNA, 445 bp, Zea mays
  unsure (1)..(445): unsure at all n locations
ggggatcttattcggctgccttatcattataaattcaagaaacatttcatagtgccttgccaagagtggctggatacgattgaaataatgtgcaatgaaattctctgcaattactcaaaaaagaagatcaactaatgattgcagccttcggcacccgtccgaagcgaatgttgaaccgagtaatggatgctctggattttgagtatcccgactacgagtggctagacaaagatgccgaagggcagaagagaaagagagtggctggtgctntgaataaagaagctaccaaatcgatgatagacgatgaagaacaatngaaaaagaaaaagctgatgcctgagctgaaaacagatgcttcgaagaagagaaaagctacagctncgaagcagatagcaattgatgaagaagaagatactgctgcaacaccctcttgcaccgacgtgga

SEQ ID NO: 72908 - DNA, 89 bp, Zea mays
aaagcaaaggagggcaaacaattgctagagccgagagaaatgaaacggaccagagaaccgaagaaacgcacccaagcacgaagcacgca

SEQ ID NO: 72909 - DNA, 359 bp, Zea mays
  unsure (1)..(359): unsure at all n locations
agcttcatcccctaacataatagcaagcggttgtttttttgtgctgaaatgatcacatcacaacagtactctgggtcccttataaagctntaatgtagttgctcacttgagtgtttgtgagagacaaactaataatcctgtatgcctacgattctgaattctctgatgtgcatgattcataaaaatgatagtgccgggtacagatctatcaagggcatactacgatatctgggattttctatggtgatatgacttaactctgacctgctgcgttgctgaccgtatttccttttcacttgcagaggaatcagcaaaggttcaaatgcagaactntgtcaggtcatcagctccagtaatct

SEQ ID NO: 72910 - DNA, 467 bp, Zea mays
tgtcatacacattatacccttacccttggagaagcgagaatattacattataaaggttgctccaaacattgcaagtagaaagaaattgtacgtgttgcacattgatatcatgactttccatgttcttttgcaaatctaagggctaacaaggtcgtgcagttgttgtataaactagatataaacaagttatgaatgaaatcaatgttgttttttgttcataatgtcagctgaataatacatattctattgctatctaaatcagcacagaactgtgagtatgttttctgatattctgttcttgtacagttggtaggataaatttcttttacattttccagtgttcagtcttactatgtgtatcaaacagataccaacatactgctattgcttgcatttcaaagtgaacttgtttgtaaaacccgtaaattgttgccctttaagatgtattccacacataccaagtaatc

SEQ ID NO: 72911 - DNA, 438 bp, Zea mays
  unsure (1)..(438): unsure at all n locations
agcttctaaagggagagcacantttgggtcttacaaatgttcattntgagaaagacagggtttgtagcgcatgtcaatcaaggaagcaagttggtgttcatcatccacacaagaacatcatgatgaccgacaggccgcttcagctgctccacatggatctattcggcccaatagcttacataagcatcggtgggaagaagtactgtcttgtaattgtggatgattattcttgcttcacttgggtgttctttntgcaggaaaaatcacaaacccaagagaccttaaagggattcttgagacgggctcaaaatgagttcggcttaaggatcaaaaagattagaagcgacaacggaacggagttcaagaactcacaaatagaaggctttcttgaggacaagggcatcaagcatgagttctcttcttcctacacgccacaac

SEQ ID NO: 72912 - DNA, 456 bp, Zea mays
gctcgagcttgaaccgatgacccccgccaccggtatatctcaatcgtgctcgccggagttcggaaccccgccgaatcacgtggaccgggtgagtctccgcaccattttccaattcactgcacgcatagcctctacgtcaccccgtggagctcctcgtgccgtttaatggaactataccgtcgtggtttggttggagcatgagccgccgacgacctccgccgcctgcgctcgtggtcaggatcgctccgaccacctctgacgtcgacccacacaccgacgtgaccgccgtgacctcccctacgtcactgacaaccccgccggagctctactgccgccggttagcctctccgccataatctatgccgcgggtactgtttaagccagccatggagcgcgggttagatttcggttagggtcagggggttttgtgcaatgtcagcgaactcataaaatagt

SEQ ID NO: 72913 - DNA, 377 bp, Zea mays
cccaatccaaccttttggaactatggctggggaaacagtccttatagccgcccacttatgctgccattgattggtggggactcggacagacttccttttattgggaatcatggttctgttgggcgccactttggaaatcaacgaaggaatatctcaccgaactgcattcttgatggtcaccgtcataacttcctttgaagccatgtcaatgagttttacttgtatgttaagagtgttttataaggacttcaatggtgcatatacggttagaccgccttgttcatatcgtcaagtcgcacacttatgcttgtgcacagcactcttatgatcttatcctaatatatccccttagtatcttagatcgtatctttactatc

SEQ ID NO: 72914 - DNA, 450 bp, Zea mays
  unsure (1)..(450): unsure at all n locations
gtgtcttgatcctacaggacattttcctgattggtgcgagtttctttgtcggctancactcctaataacacaaatcaacgcaagcttacagtcgataggttcggtcatttcacctgctgtaccaattcacaagatatgagcaaattgtgcctgtctaaatgcatgacctaccagcccaacaagcttgataggtattagtgcaagacagtagttaccaagctcataataaactggagccagatggaaactcgttcgttagttntagacagtaataggtctgatagcctcacagtatcatgcatgggcgggtagtaaaatttcacccagaatataatgggccctttcctatcccaggaccaaaaatctcagatctagtgtgttaatgctgccatattactcgtgtgtttctatatgcagagttagaagcccatatgacagaatgtaaaatgc

SEQ ID NO: 72915 - DNA, 154 bp, Zea mays
  unsure (1)..(154): unsure at all n locations
agcttntatatggagaacacgtgatangtcttaccaatgttcatttcgaaaaagatagaccctgtgcagcttgtctagcacggaaacatgtgggaggctctcatcacaccaaaaatgtgatgacaacatctagacccctggagctgctacatat

SEQ ID NO: 72916 - DNA, 433 bp, Zea mays
  unsure (1)..(433): unsure at all n locations
taagatcaatcatgatctttcatgcaagcatctccaccatcccatgatgatgatcaagctcaagatgatggtaataaatatcaagacgatgagccacctcaagatgaggacaatgatcaaggcgcagataacaataatcaagtcaaggaagatgatcattaagtacaaagaccgcctcacccaatagtccaccaaactatacatcgagatcaccccgtgaactccatcctcggcgatattcataagggggtaacaactcgatctcatgtcgctcatttttgtgaacattactctgttgtgtcttctattgagccatacagggtggaatatgcactaagagattcggattgggtgctggcaatgcacgaagagctcatcaacttcacaagaaatgaggtatggcatntatttgcacgtcttaaccaatatgttg

SEQ ID NO: 72917 - DNA, 212 bp, Zea mays
aagctttcgccaaatcctcaagcaacggaaggggaaagattacaaatcccgttccaagaatgtttgctacaagtgtggtaagcccggtcactttatcgctaaatgtccattatcaagtgacagtgacagggataacgacaaaggaaagaggaaagaaaagaagaggctccacaaaaagaggggcggcgatgcccacgtatgccgcgagtggg

SEQ ID NO: 72918 - DNA, 474 bp, Zea mays
  unsure (1)..(474): unsure at all n locations
taatgccggaattgccatcaaggaagctccctcactcttctcatccacccattgtctcatggcaaagggagatgctaaggtaaactacaaggcgggagggaatcattgggtgttggatagtggatgtactcaacacatgaccggtgatacgaagatgtttacccaaatgagtgatgaagattgctcaaattatgatagtatcacatttggagataatcgtaaaggaaaggttaaaggtttgggtaaaattgctatttcaaatgatcattctatatcaaatgtgctattggttgagtctttgaattttaatttactttccgtagctcaattatgtgatttaagattttgttgcaatttcacggttgaagatgttattatctctagtgttgatggtagcaatcttaaatttaaaggttntagacatganaatctttatcttggtgatttctcatctaatgatgcaaagctcacaat

SEQ ID NO: 72919 - DNA, 336 bp, Zea mays
  unsure (1)..(336): unsure at all n locations
ctgtatgagatccatgccaaagacaaacagtatgttaaagtgtgcactgcccacgaaaatacggatgactcacaagtcataacctatagtatgtgacacagatttttcttaaccacatgtgagtatgtggcagaatgtacagatagactaacaaacaccaagttggaatagcaatgttactaggtaaacataaaagatacatgcacacatagcanatatgtactctgtatttcttattcacaagtcctctatgatctctatcttcaaggatatatgctactcatggtaaagtgtaacacattaataataagtagaaacccacactaaccttaagat

SEQ ID NO: 72920 - DNA, 448 bp, Zea mays
tcttggcacagcgagccacatacaccgagcgccattatctgttctacggctataacgaactacaacctggttcctctaattattcagctaacggcatcccattccaccctcatggttgcactgttttcccgggcggttatccaacgaacatgtgcttacagagaggcactcgataaaccgctcgagccctctatagttaaatccagtccaacatcataatcataatgacaacatcgtatcataagtgttcacatcatgttcattgattaaagtaaaacaatagcatgaatctaaccatagtagcccaataagtaatcaacgaccaggtaaatagaaagcttgtcaatccatatgctgttcatagtatgcgggacaatgaattataatgtatatgggacataatgggtcagatgacaattgccttcaccatacagatgctcatgatctt

SEQ ID NO: 72921 - DNA, 399 bp, Zea mays
agctttagagattaatgagagagatttgttgtgttcttttgagctcttgcgctaggatcgcttctttttctcattctttcttgcgatcatctcaattgtaatcaaagcaagagacaccaattgtgtggtggtccttgcggggaagtttgggtcccggttgattgagaagaagaactcactcggtccgatggaccgtttgagagagggaaagggttgaaagagacccggtctttgtgaccacctcaacggggagtaggttggagagaaccgaacctcggtaaaacaaatccttgagtctcacttctttattcgcttgcgatttctttttacgcactctctcagactcgattataattctaacgctaacccggcttgtaagtgcgattcactttgtaaatt

SEQ ID NO: 72922 - DNA, 411 bp, Zea mays
tactaagcttacatgtctcgactgattcaaagatcaacgaagttactatcccatcagaatgaagcttgttcatgcgattctgacttatatgacccaaacgacagtgccatatgtaggtatgacttaaatcattatgccgaggccttttagcactaatattacagataggtgcatcatcaagatttaaaatgaataacccatttataatggatgcaaaagccacatacatgccattcttagagatcacacaaccatttgtttcactcgcatatgaataaccatacttcatcaaacatgaaggagacataatgtttctactcatactatgaactagataacaattatgtaactccaacataaatcctgatgggaggtggagttgcatcattcccacgggcaacgcagcaactc

SEQ ID NO: 72923 - DNA, 411 bp, Zea mays
  unsure (1)..(411): unsure at all n locations
agcttcacagcctnctaggggatctatctaggggcttggatcgagcggaggagggcgggaaatggttcggccacggtggttgccctcgagcggctctggcgggtcgcggagaggtcgccggagctacgggcgagctccggggagtttggcgcagtacagaggatgcaacggggaagatagccgggcactggggtaggctttatagccgtggtgcgagcatggtcacggggcggccgtgggcgcgtgggggttcgcgcacgggcgtgctctgagcgtgccctcgagtgtcagccatcgtcgaacacgtgtgtgtttgcttctgccatggttcaacggctgattggggcaccttagcgtgcggatcttggcaaaacacccgtgtacggtctcttccctgcaccaaatcctacc

SEQ ID NO: 72924 - DNA, 281 bp, Zea mays
acactcaagcttggtgcccaatcacaagcagaagtctttgaagtcctggctgtcaaattgtttgtcgttgtcaactatgagctcggacggaactccgaattggcaaacaatgttttgccagaagaatttctgagcagtctttgatgttatcgtgaatactgccctcgcctcgatccacatggtaaaatactcgacggcgacgaaggtgaacttgaggttcccctgcgccgtgggtagtggcccgacaatgtccaggccccagcgctgaaggggccacgtgt

SEQ ID NO: 72925 - DNA, 411 bp, Zea mays
agcttctaaaggggaacacattgtaggactaacctttgttcattttgagaaagacaggatttgtagcgcatgtcaagcagggaagcaggttggagttcatcatccgcacaagaacatcatgatgactgagaggccacttgagctactccacagatctattcggcctgattgcttacataagcatcggcgggagtaagtattgccttgtaattgtggatgattattattgcttcacttgggtattctttttgcaggaaaaaacaaaaacccaagagacgttaaagaaattattgagacgggctcaaaatgagttcgaattgagaatcaagaagattagaagtgacaatagaatggagttcaagaactctcaaattgaaggatttcttgaggagggggggcatcaagcatgag

SEQ ID NO: 72926 - DNA, 425 bp, Zea mays
  unsure (1)..(425): unsure at all n locations
gtcattatcagcgcggatatattcatccatcttttgaagcagcttctctaaggtctgagggggtntcctggcaaagtattgggccgaaggtcctggccgaagccccttgatcatggcctcaatgacaatttcattggccactgttggcgcttgtgccatcagacgcaagaaccttctgacatacgcctggaggtattcttcttgatcttgcgtgcactggaacaaagcttgagcggtaaccggcttcgtctgaaacccttgaaaactggtgatcaacatatccttcagcttctgccatgatgtaattgttcctggccaaagagaggagtaccaggtttgcgcaacattcttgactgccatgatgaaagattcgccatgactgcagtattgcctccatatgaagatatggttgcttcgtagctcat

SEQ ID NO: 72927 - DNA, 412 bp, Zea mays
agcttctgtgccaaaaatcacagaaagctaatggtttgttatttagttgtgattttccaaagtttaatgccaaaaaggcacttttcactaccttgctatttgaaaaatgttaaacagtagatttcatatttttcctatgttcttcataacaaaagattcactatcccaagggttgaggtgttttcactttggggttatttttgtagggcttttctaagttttccttgttttcttaaaataaaaggtatcctatttattttatactaaaccagggcataatcaatttttctagcaaactacactgaataagtatactaacaaaaatatgggggctccctggttctttatttaaatcacctttcctattttctttaaccttaagcataatgtaaaataaatggcaaactctacc

SEQ ID NO: 72928 - DNA, 425 bp, Zea mays
  unsure (1)..(425): unsure at all n locations
tgatatgggttatttgcttctcaaattggtattgcttttgccggnggcgacaacatgtgttgaaagggcattttctgcaatgagtttggtgaagactaaattgagaaacaagctgtgtgatagtcttttggatgattgtcttgttacatacatcgagagggatattttcttcgaagtgaatgaagaagatataattgaatcttttatggcgttgaggaagcgcagactagataagtagtattattgcaatctttatgtttaatgtatgcaattttcatgcttatntgttgagtgtcaaactctatatctatatatcaaattgtttaccacatttactatgaaataatatgtacattagatagaattctacatgaacaagttgttgtggcacaccctatattaaaattctaggtccgcacttcaat

SEQ ID NO: 72929 - DNA, 410 bp, Zea mays
agcttcggactaactagggccctgtgcctcatgacgtctgggtcaccatgccaacaagctgtagcagaattcagggtggtggctgaacagatcagcactagagatctagtgcaagaatacctggccaacagggtatctccaacgttgagcgaatggagtatgccgaagctaaaaggaacaaagaagaagaatgaacttgttcgattaccttatcgcttcaagtttgatgaacagttcaaatagccctaccaagaatgggtggagatgattgagactatgtgcaacgaaattttgggcaattataccaaaaaagaagatcaactgatgactacagccttcggcacccgaccaaaacgaaggttgaatcgggtaatggacactttatactttgaataccctgattatgtacg

SEQ ID NO: 72930 - DNA, 462 bp, Zea mays
  unsure (1)..(462): unsure at all n locations
ttcttcggcgccataacgaaagtttatgatcgccgaatgtgttcanaaaactcatagagtggaagtgagttcaccggaggtgggcgccaatgttggggacttgttctcaaatgctatgagtcaagaacaaggcaacatagaaaatgttaatcggtaaagtccttcgtccttcgaagcattattcctctcaaggtataatggttttcggacgaaggttatgaagggcataccttcataaatatattgtataatgacgaaggatgaattataagaaatataatgaacaacataaacaattatgtcttattatcatgtataaacagaaataatcatatgattacaaatgtaccttcaacttgaaggagatgaaagtacaagcgtgacgcataagtgaatgccaaatcatcccccccagtacgggggtactgttcatctatttatatgcacaggtcacagcctatg

SEQ ID NO: 72931 - DNA, 411 bp, Zea mays
  unsure (1)..(411): unsure at all n locations
tatctagcaatacacacctatatgtgtgtgttcttcttgccgngtcttagagacccgtgaaattaataataaccactctaccgatctaagtgatctattgagagagggaaagggttgaaatacacccggtctttgtgacctcctcaacggggactaggttctttggaaccgaacctctgtcaaacacatcactatgttcattcgctcgattctcatttgatttgatttcccccctctctcccggacttggttttagttctgacactaaccccggcttgtattgtgtgtttaaagttgtaaatttcagattacgcctattcacccctccctctacgcgagattgaatgacgatgttatcccgatgttgatcttgtgatattttaagggactcatgccattttactgagtacc

SEQ ID NO: 72932 - DNA, 391 bp, Zea mays
  unsure (1)..(391): unsure at all n locations
ttcacgggtttaccggagaggacgttagatntattggaactcatacatactgatgtgtgcggaccaatgagtacgacagctacgggaggattccaatacttcataaccttcactgatgattntagtagatatgggtatgtctacttaatgaaacacaagtctgaatccttacaaaagttcaaagagtttcagaatgaagtataaaatcaacgtggcaagagaattaaagcactgcgatcagatcgtggatgtgaatatttgagtcatgagtttagcaatcatctaaagagtngtggaattcgtccacagcttacactgcctggaacgcctcaaatgaatggcatgtctgagcaacataatcggactttattggatatgggtcgatcaatga

SEQ ID NO: 72933 - DNA, 185 bp, Zea mays
  unsure (1)..(185): unsure at all n locations
atgcttgacattcactttcccatattattctctcctttaactcaaagacgcacacttntactacgttgcacttgaatccctagtcctataactaattactctctccgtttttttatttatcgacgattagttcaaaaatgaactagtggataataaatattccgaaacagacgtagggggtgttc

SEQ ID NO: 72934 - DNA, 358 bp, Zea mays
tctcatgtggggacttaatgggaattctgaatttcagatttctgaaattcagaccttgagccaaagatcaaggatgttcaccttgatccctaactcgaatcctaatggccccattaacaaaaatgtgcctaattaacccctatgtcatgtgccaggagatggcattgggacgcgtgcctcatacatgtcaaaccagagattttttctccctgtgcgtggcagtgagacaaacaggatttctcccctctctatctcttaatccagtcagcgaaacttgctagcctccacacacaaacgacaaagggacctgagaggaagagatctttcaacgggatcgtggccttaatctcaaagaatt

SEQ ID NO: 72935 - DNA, 392 bp, Zea mays
  unsure (1)..(392): unsure at all n locations
gagctnttccttgtcggcatcaaccgtgacatatattctttctgacttacagcctgctgccgatttgcttcagtggctgattacaagaaactgtgtggctttccgataggcgaagttatagcaaccaaaattgtcgtgcaatccagcctttctagccttcttctgataatgcaactcatgaacccggcgtaagctgtccgcaaacggctccactgcttggcttcggagtgcccagatataaacactaagcctaacgatagcgttaggggtcagctggtgaaaatagataccgaacctcttcagtacctctgccataatatcatgtagggggaatcttaaaccagcctttataacgcttttgaaaataacaatttcatgcttcttcggcttta

SEQ ID NO: 72936 - DNA, 409 bp, Zea mays
  unsure (1)..(409): unsure at all n locations
acacttaaaactcaactggacaaatagctattgatgaatgacagcggtgttatagcctcgccaaaagaaccgatcatatattcgctacatagacctagccatatcaatgagagtcctattctttctttcaacaataccattttgtttcggggtatatntggaagagaattcatgtttaatacccttgtcatcacaatattaatcaattcttgcatttttgaattccgacccattatcacttctaactcttttgatatcaaaatcaaattgaatttgagccaatatagcaaatgactctaatggttcaaacacattagatntatctcgaagaagataaacccaagtgaatctttgataatcattcacaatcacaagacaataggaattaccactaatactcacaaatgat

SEQ ID NO: 72937 - DNA, 399 bp, Zea mays
  unsure (1)..(399): unsure at all n locations
agcttatgaagattcttcatcccaacatgggctagtcggcggtgccagagccaacccatgttagtcttagcaattaagcatgtgtcgagctcagctctatcaaaatctactaagtatagctgaccctctaacacacccttaaatgctattgaatcatcacttcttctaaagacagtgacacctacatcagtaaaaagacagttgtagcccatttgacataattgtgaaacagaaagcaagttgtaatctaatgaatcaacaagaaaaacattagaaatggaatggtcaggtgaaatancnttttacccaaacctttgaccaaaccttgatttccatccccgaatgtgatagctcggtggggatcttggtttttctcatatgaggagaacatcctttttc

SEQ ID NO: 72938 - DNA, 426 bp, Zea mays
  unsure (1)..(426): unsure at all n locations
ctggatattcttcatcagaacactatggatattgttgtgattaatgaaaattcttcttcacgaagcatgaaaagaagggaaggtgtttnttcgtcaaagactcaaaaatggtacgtatgtagaatttcatgcatcgtaaagaattgaatcataagaaacaagtatattacattcagggttacaagatattacacatattacatttcagatgtttttataatagcacctagtcttccctaagtactacttccgcagcttcgttcaggagttgattgacaactcgatccatgatagcttcagccatctttttaatttcatcgtcttcctttgggtgagggcccgaagacgctntattatgatctgagggaggacaggatacggctacattgctattacaaatngcgaacgaagtttaaatcacaatta

SEQ ID NO: 72939 - DNA, 401 bp, Zea mays
agctttgaccttcgtcatgccgctgaagaagacaacagggccaggggctgcactgcagccactagacgttaatcaggaaacgctacgcgaagctaggagccagaagaggaaggctaccagcccaacacctcagcaggaggagttggaccaagaaatcagggacctcgaagccatccagcaacaggttcagaagaagaaagaaaagatgcttcatctcgccgatcttcagaggaagattgatgaggccgctgaggaaatgcgtcatctcacctaggatgaccaagaccgaaggccccaacacagagagcttcgtcaagacaatccatacagcgatgatgaatggtatgatgatttccatcatggcaattttgcttttgatgatgcttctcctctggcagcaa

SEQ ID NO: 72940 - DNA, 407 bp, Zea mays
  unsure (1)..(407): unsure at all n locations
tatgaagattcttcatcccaacatgagctagtcggcgatgccagagccaacccatgttagtcttagcaattaagcaagtgtcgagttcagctctatcaaaatctaccaagtatagctgaccctctaacacacccttaaatgctattgaatcatcacttcttctaaagacagtgacacctatatcagtaaaaagacagttgtagcccatttgacataattgtgaaacagaaagcaagttgtaatctaaggaatcaacaagaaaaacattngagatagaatggtcaggagaatatagcaatttaccaagtcctttgaccaaaccttgatttccatccccgaatgtgatagctcgttggggatcttggtnttctcatatgaggagaacatccttttctccccggtcatgt

SEQ ID NO: 72941 - DNA, 398 bp, Zea mays
agcttgcataagatcaatggaatatcttcttttatccggtgcacaacatctatccgtagatttctactgcatagttccctgaaaaaggtccccagttctgcaattgcttcatatacatccttcctcactagtcctctaaggccagcgggtatgattctctgtaagagtatgtggcaagaatctgtttttagttttccaaccacctttgaaccatcttcacttatgtatctttctaggttatccgcaaatccatcaggaaacttgatacctttgaggaacttgcaaaactcgacttttgatccttccccaacacatatggagcaggtggagccctgcaggccgagttgccatcttgttgcaagtgcagttcaagtcttatgcccatatcatacaaatct

SEQ ID NO: 72942 - DNA, 311 bp, Zea mays
  unsure (1)..(311): unsure at all n locations
catcacgtatgaacagctttagccaaagctgtttctttctgtatgaccttctgcgatgaagcatggtcccaacactgagctatctcctttttcattcctctccaccagtatctggtcttgaggtctaagtacatcttggtggtccctgggtggatagggtangctgagttgtgggcttcgtcaagcatgactcctcatgcctctcccttcggcacacacagacggtccctgaaccaaagggccccttcttcatctgtcctgaggtccggaagttgttccttgcgagctttttctgcaagacctaccgtctc

SEQ ID NO: 72943 - DNA, 412 bp, Zea mays
  unsure (1)..(412): unsure at all n locations
agcttggatgaggtgtcatcatcatcatcattctatctatcatctgagtcccattcaactaagtaggctttgccatctttcttcttgttatagtatttctttttcttcttgtcactttcatctttgcccttcttcttcttgcttgggcaattcatggcaatgtgaccgggttccccacactcaaaacactttctatcattgaaagcatttcttctagatgtttgacctcttctaggttgacctctcttcatcttcatgaatttattgaatatccttacaaatagagccatgtcaccatcactctcactttcattttcttcatcattactatcttccttttcaaattgcctttgaggccttagctntgagagcaattgattcatttttcaccttctttgccaaacttaaagca

SEQ ID NO: 72944 - DNA, 441 bp, Zea mays
  unsure (1)..(441): unsure at all n locations
actatataaactcaagctttatgatctgtatagatatgacagatattccgcagcatataatgacgccatattttcagggcatgaaccacaacagctaattctaggtcatgagttggataatgttcctcatgccggctcaactgtcttgaggcgtatgctacaactcggccttcttgcatcaagacacaacctaagccactgcctgatgcgtcacaatatacatcanacagcttttcaatgtccggttgagctaataccggagcagtcatcaataatactttcagctgctcaaaggcttcattgcattttgaggaccagttgaacttcgtatcgttcttcaataaacttgtgattggtttcacaagcttggaaaaatctagaataaatcgacggtaataactagccagtccaaggaaacttcngacttgatgtataatgggt

SEQ ID NO: 72945 - DNA, 413 bp, Zea mays
  unsure (1)..(413): unsure at all n locations
agcttctgtgccaaagatcacagaaagctaatggatggttatttagttatgattntctaaagtttaatgccaaaaaggcactntctactacattgttatttgaaaaatgtcaaacagcagatttcatatttttcccaagttttcaataacaaaacattaattatcccaagggttggggtgttntcaccttggggtcatttttgtaggggttttctaagttttccttattttcctaaaataaaagggatcctacttattttatactaaaccagggtataatagatttttctagtgaactacattggataagtactctaacaaaataagagtgccctctggttcatcattttaatcaccttttctatttttctaaatcttaagcatattgtaaattaaatggcaaaaactaactt

SEQ ID NO: 72946 - DNA, 374 bp, Zea mays
  unsure (1)..(374): unsure at all n locations
tctaaagggagaagcacatttgggactaaccaatgttcattctgagaaagactgtgtttgtagcgcatgtcaagcagggaagcaagttggtgttcatcatccacacaagaacatcatgacgattgacaggccactggagctactccacatggatctattcggcccgatagcttacataagcattggcaggagtaagtactgtctagttattgtggatgattattcttgcttcactcgngtgttctttctgcaggaaaagtcacatacccaagagactttgaaaggattcttgagacgggctcaaaatgagttcggcttgaggatcaagaaaataagaagcgacaacgggacggagttcaagaactcacaaatcg

SEQ ID NO: 72947 - DNA, 397 bp, Zea mays
  unsure (1)..(397): unsure at all n locations
agcttgactcctttcgccttgagacaccggaatgtttctttttgtcggagaggaggtcggaagccttccgtgtcttgactacgatgtcatcgacgtacgcctcgactgtgcgtccgatgtgttcgccgaacacatggttcatgcaccgctggtacgtcacgcctgcattcctcaagccgaacggcacggtgacatagcagtacatgccgaacggcgtgatgaaagaagtcgcgagctggtcggactctttcatccggatttggtgataccccgagtatgcatcgaggaaggacagggtttcgcacccagcagtggaatccactatttggtcgatgcgaggcagagggtanggaaccttctgacatgctttgttgagaccagtgtagtctactcacat

SEQ ID NO: 72948 - DNA, 447 bp, Zea mays
  unsure (1)..(447): unsure at all n locations
tcganaggtgaaccgaaatagagaattggagaatggagttatggttcaagtgagtcangttgatgtgataaaaatcaaggataccacggaaaaaatgagatatgggaaggccgaggccgcgaataatgaaaggagtgtaaaccactgactcgtgggtatcttcagttgggacagtggtcccgtggcaagaacgccaagaacagagttcccgtggagggagaaccccgatggaaacaaggcggagaagctcaacttcagaaatcacagacatatggttacctgcgaaaggtaactgactgttggggtcgatggcggcgatcactgcagcagacgagttcgcgggtttcctcttgggcgccatcttgtttctcgctggcgaaacagagcaggaggcgagtggcggagaagactcatatgcggatatgcaagaactatggcacggaaagc

SEQ ID NO: 72949 - DNA, 412 bp, Zea mays
  unsure (1)..(412): unsure at all n locations
agcttctaaagggagagcacattntaggattaacatatgttcattttgagaaagacaggatttgtagcgcatgccaagcagggaagcaagttggtgctcatcatccgcacaagaacatcatgacgactaacaggccgctcgagctcctacacatggatctattcgacccgattgcttacataagcatcggcgagaataagtactgtctagttattgtggatgattattctcgcttcacttgggtgttctttttgcaggaaaaatctcaaacccaagagaccttaaagggattcttgagatgggctcaaaatgagttcggcttaaggatcaagaaaattagaagcgacaacgggacggagttcaagaactctcaaattgaaggcttccttgaggaggagggcatcaagcatga

SEQ ID NO: 72950 - DNA, 408 bp, Zea mays
tcgtcatccgaaagacaatagccttgtgtggcggaactgcccgaattattccaacttaagtgcctaagtcccgccttagaggatagaccacacttaaatgggaataacccgtcaatcccttggatctagtccgacgacgccactgacaagatcaagtaccacagtctcactcgatggtgagtcacagagcaaatacaataaagcataaaaccatacatcaaggagtattaaacttattacatcatcatcggagttttagcaaaagtagacatctttgttcgaagtgcagcggaataaaactaacgataaataaatagagagatggggaagcctgtcccatcactcctcatgctccacctcagccgaggcaggatcccactcgactgttcaacccggtggcaagatgga

SEQ ID NO: 72951 - DNA, 408 bp, Zea mays
  unsure (1)..(408): unsure at all n locations
agcttcagctccatctatgttatggattgcttttgagtcattccagtttccttcggcccttctggcagcttcctgacttccatgaatagcgatgggtccttgatccaaaggtatcttcatgcaaagataggcaggatgaagaattgcttcgaaagcattgagggtgccacgaccaataattgcattgtaagggtattccatgtcaacaatgtcaaacacaacttgctcagttctagtgttgttgatgaacccgaaggtcactgacatagtgatcttgcccagtgctacaatctgtcttcctccgaagccacagagagggtgtgtagcatcatgaatcttatcttctggctcttgaatntgcttgaaggccttagcaaatatgatatcagctgcactgcctgtatcaac

SEQ ID NO: 72952 - DNA, 389 bp, Zea mays
  unsure (1)..(389): unsure at all n locations
agtgtctccgaagatgtctgaagataatattgctgttgctgagatgaagctgagcctcgacgaagagaagaacttggggtttcttatagcgatgtcaaagaccaatatataacagatcaccaaggagattctggaaggtttgtctgatgatactggtgacagtgacaattatgatgtggacagtggtggtgaagactccgaagatcgtacctggcgaccaagccatttagtttatggtaaatcaactatcaaagagaatcatcttgtcaacatgagaggaagggatttccgggatttgtccattgcgaggggcgacgaaggggaaaaacttgtccacaccctgaagagaatgaagtcgtaatgtaccgaagctttntgaaagctggact

SEQ ID NO: 72953 - DNA, 391 bp, Zea mays
agcttcaacactactttcaagcatccatataattgttccttcatcacagtctttgaagggtattatgaggaacagataagctgctggaaggattggaaagtgggctgcggaactcaacgagttcagcattgattatgtgcacaaatctttgattcagtcccaggcgttagcagacttcatcgttgactggacgccatgagctaatgaggaagaagcaagtaaagatgccgaagcttggacagtgttttgcgactgttcctgaggaaccttcggggcaggtgcggctgctgtattagtggcaccttccaaagttagaacatgctatgcagcgaaacttgatttcagttgcacaaataatattgctgaatacgaagctatgcttttggggctt

SEQ ID NO: 72954 - DNA, 351 bp, Zea mays
cgttggataggtggaaactgaaatttacaactttaaacacactacaagccggtgttagcgttagaataaaaatccgagtccgggagagaggggataacaaatcaaccatgaatataaagtggatggcacgatgaattgtctatcaatgttcagttctaaagaacctattacccgttgaggtggtcacaaagaccgggtctctttcaaccctttccctctctcaaacggtcacttagaccaagtgagctttctttcttgatttcccgggtcacttagaccccgcaaggaccaccacacaatcggtgtctcttgcttcgcttacaaggctttgatgataagaatgagagaaag

SEQ ID NO: 72955 - DNA, 412 bp, Zea mays
  unsure (1)..(412): unsure at all n locations
agctttggaaacaaaacaagaagatacatagatattatgaaacaaaagagaaagcctactcgagcctagtgtgccgttttcggcccacttggcctttccctccgcgcggcctgcccagcccggcaccgactcctcggccccaccgggcagtcactgatcccctcgcccgctcccgtgcaccaattatgtcgctgtggggtggggcacgtttgcctacctcttctacacgtgcatgccaggctagtcgcccactggctagtgggccccgcatgtgagccgatgcgctactgttcttctcctcgcaacgaacggtaccgaaacacatggcactgcggggaaatcgagtgtcgttgcgttgntacaccgaactgacctcccgaatgccatatagtggactctcgagggtttttgg

SEQ ID NO: 72956 - DNA, 443 bp, Zea mays
  unsure (1)..(443): unsure at all n locations
tggaaagagcacaatctctacttatgaatgtccatgaaatatcttaaaagagattgtattagtaacacaagcgatagtttcctatttagcaacctctagtatatgaatgacaagaaggttactaaaacatgcaaggaaacctcatgatatgaactaaattacccttacaagcatcatgcataacatcaattgtaaaaaagatgaaagtagcacgattatttaattaagttcacatggcaagtttaattcatagcatggtgagtgattaatgtagaagactcaaaaccaatttatacaagaatgaatacatcacatagtattggttcgatcttctttgaatgttgaatggcacactccatttgtgnacacattctcatgttgtgagactacataaacacttagatagaaacatagtctacaactctatcatatagagattccca

SEQ ID NO: 72957 - DNA, 406 bp, Zea mays
  unsure (1)..(406): unsure at all n locations
agcttcaagagntgactaagggggtgtatttttatgcctggcagcaacaacttcttctggcgtcttgcaaaacatggcagccactgagttgccagacttttggttttgggtgggatgagctgaaacaacaaaagagctgatggctgcttgagatgctttcttcttcgcttgcttgcgctctgtccctgaacttggttcatgtaccttttggtcaggttcagtagcatcaccatcttcctgtcctccttcctcactttcaacaaaatcccaagccttgtgttccttttcaaataagcatacatgtccttcgaaactacttctggaaccattgaacatttttgtcgtatcataaaatccaccggcgaggtgctgtttgaaccttttaatcccagaaggaacatctttc

SEQ ID NO: 72958 - DNA, 450 bp, Zea mays
tgcatgacataaacgtgaatgccatatatctgactcattataataattaacagaaatcaccagtttattacacacatcatgcagtgataagcggaacaagcctccgcagtcatatcctttaccaacaaaaataccatgtttagacacaacacatttattagactcaagaacaactttgtatccatctcgacatagcatagacgcgctaacgagattcttcttgatagagggcacatgctgcacgctcttcaatggcaccgtctttcccgaagtaaacttcagaatgaccgtaccaacaccaagaacatgagcacgcgacccattttccattaacaagccgccagacctcccgacctgataggaagtgaacatagaggcatcatcacacacatgatatgttgcaccactgtccatccaccactcatgtgaattacagactgagagaacaaa

SEQ ID NO: 72959 - DNA, 406 bp, Zea mays
agcttcatcattttgagcatgttcctcatcttgtattggtggagatgcttgcatggaagatgatggttgatcttgtgcttgtgtgggctctttggattccttaagacacacatccccaatggacatgttccttagcgcgacgcacggagcctcttcatcatctagctcatcaagatcaacttgctccacttgggagccattagtctcatcaaacacaatgtcacaagaaacctcaactaatttagtggatttgttgaagactctatatgcccttgtgtttgagtcataaccaagtaaaaaaccttctatagccttaggagcaaatttaaattttctacctcttttaataagaataaaacatttgctaccaaagactctaaaatatgaaacatcaggcttttttact

SEQ ID NO: 72960 - DNA, 356 bp, Zea mays
cgaagtactgagctgacggacctggccgaagccccttgatcatggcctcgatgacaatttcattgggcaccgatggtgcctgtgccctcagacgcaagaaccttcggacatatgcctgaaggtattcttcgtggtcctgagtgcactgaaacagagcctgagcagtgaccggcttcgtctgaaatccttgaaagctggttaacaacaaatccttcagcttctgccatgaagtgatcgttcctggtcgaagggaggaataccatgtttgagcaacacttctgacagccataacgaaagatttggccatgactgaagcattgccaccgtatgaagacactgttgcttcgtagctcatc

SEQ ID NO: 72961 - DNA, 326 bp, Zea mays
atccttaagtcacctgcggcatgcagcttgaaatctgatattttttccgctgtgacaccattaataagtgttagggtttctggcaggtgcagcgcatgattatgttccaaaaccagctcagagacatttatagagtatttggtttgagaaataagctagtctattatcttctcactcacgtttttgtttggtttgtaaaatataattagtcgatccatcactaccttattaattggtagttagtaatacttaatactaatacgaggaattggatcatcccacccaaattaagaaataattcataatgaccatcctatttggatgta

SEQ ID NO: 72962 - DNA, 381 bp, Zea mays
  unsure (1)..(381): unsure at all n locations
tctaaagggagaacacattntatgattaacaaatgttcatttgagaaagacagggattgtagcgcatgccangcagggaagcaagttggagtccatcatccacacaagaacatcatgacgaccgacaggccgcttgagctactccacatggatctattcggcccgattgcttacataagcatcggcgggagtaagtattgtcttgtagtagtggatgattattctcgcttcacttgggtattctttttacaggaaaaatctcaaacccaagagaccttaaagggattcttgagacgggctcaaaatgagttcgccttaaggatcaagaaaataagaagcgacaacgggacggagttcaagaactctcaaattgaaagcttc

SEQ ID NO: 72963 - DNA, 404 bp, Zea mays
agcttgttggaatgtagtgttgtattttacatgatcacctattcacccccctctaggtgctctcacataggtacttagtatctgaatatacatgctactttcactcttgtgctttagtttggctgctgaatcgccgctctccctctaaattaggattagtgctggtttggaatccatgtccataaattccattgcttgggaaggacaagtttacccaaaagtaaggattattaaccacactgtaaattgaaatagtttttcctttttacacaaaaaggaaactttcgtaacacatttttctctctccttgcagataagcgcatttcagaaagcacatgattgtcttctgcccatgggaattacttctgaaaatgttgcccatcgatatggtgtaaccaggcaag

SEQ ID NO: 72964 - DNA, 364 bp, Zea mays
  unsure (1)..(364): unsure at all n locations
ggagatcaatgatatnccggtagtatgtgagtttccagatgtatttccggaagattngcctggactgtcccctaaaagagatgtagaatttgtaattgagctaaagccgggtacggcttccatctcccgaagatcgtaccgtatgccccctaatgagttggcagaattgaagattcaattacaagatctactgaataagggattcatccggccaagctcgtctccttggggttgccccgccattttttgttaaaaagaaggatcaaaccttacaaatgtgcgtggattatcaacccctgaatgaggtcaccatcaagaataagtaccctcttccaaggatcgacatcttgtttgatcaactgac

SEQ ID NO: 72965 - DNA, 399 bp, Zea mays
agcttatggacccgtagcctatcaattgaagttgccacccagcatgtcagctgttcatgatgtgttccatgtatctcaactgcggaaatgtgttcgcctacccatagaagtgctacctgaaccggacattgagatagaaccagacttgtcttatcaagagtaccccatcaaggtattggatcagaaagagagatcaacacgggcaatgtcaatccgaatgtataaagttcagtggagtcaccattcagcagcagaagctacatgggagactgaggattttctacgctctcgcttccccgactttctgcccaaaggagtcggtatgtaacccaaaaaaccccacccccacctgccctttgaatacaactataagaaaaacttatataacaaggatagtct

SEQ ID NO: 72966 - DNA, 334 bp, Zea mays
  unsure (1)..(334): unsure at all n locations
acatataatttctgagatccagaatatttagttcattcctcaacatgcaaaagcgggtcttatcaagtggcttagtgaaaatatccgctaattgatcttccgacctcactccttctaaaatgatatctcctttagcaacatgatctctaaggaagtgatgacggatatcaatgtgcttggtgcgagagtgttgtacatgattattagcnaatttaacagcactctcattatcacacaacaaaggtaccttttctagaactacgccatagtctagaagagtttgtttcatatataaaatctgtgtgcaacaagcacctgcggcaatgtatttcgc

SEQ ID NO: 72967 - DNA, 414 bp, Zea mays
agcttcggctttgaaaacagttgtttagtatttccgaagatgtctggagacaagaaagctgttgctgagacgaagctgtctcttgatgaagagaaaaagaaaactgctggtgagacgaagctgactcttgatgaggagaaaaacttgggatttcttatagcaatgtcgaagacaaacacggaaaaaattaccaaggaaattctggaaggcttgtctgaggatactggtgacagtgacagttatgatgtggacagcggtagcgaagactccgaagatcgtccctggcgaccaagccattcagtttatggtaaatcaactatcaaagagaatcatcttgtcaacatgagaggaaggtattttcgggatttgtccattgtgagggccgatgaaggagagaagacttgtccacaccct

SEQ ID NO: 72968 - DNA, 448 bp, Zea mays
  unsure (1)..(448): unsure at all n locations
tcgttcctcagcttaataacctctgttcgtaggttggtgaaagcaatattatagctctcgtcttcagcattggtttgcgctctcaaagcgttgctaagtattaaaccctacatgagaagaattagtataacaataaaagaataatttaaaaattatagatttccaaatatacaatnttcataccttcagactattatatgcaaggctatctgcaagatcgtcctttgtcatagagtagaggccagcttcaagcttcgggaaccccatactcctagccatttcccggcagacagataattctttgttgtctgggaggcagtataagaagtcatcttcgtctgtgccattgaatactaaagcccnctctggatacttcaattctcgggcatagtggatagcttcaaaatctctcttcagatatctgtttctgagcatgtctacatatatc

SEQ ID NO: 72969 - DNA, 389 bp, Zea mays
  unsure (1)..(389): unsure at all n locations
agcttgaagccatggtaagtagcataggcaattattatatgaattgactcaagcctagctatgggtgcataggtttcaccgaaatccaaaccttcgacttgtgaatatcctttggccacaagtcgggctttgttccttgtcaccacaccatgctcatcttgcttgttgcaaaatacctagntggtacctacaacattttgattaggacgtggaactaaatgccatacctcattccttgtgaagttgttgagctcctctttcatagccagcacccaatccggatctcttagtgcatcctccaccctgtatggctcaatagaggaaacaaaagagtaacgctcataagaatgtgcgactcgagatcgagtggttacccccttatgaatatc

SEQ ID NO: 72970 - DNA, 454 bp, Zea mays
  unsure (1)..(454): unsure at all n locations
gtacattntatatcctgctggttatccctttcacaaaattangagaattcattctaggaagtctcactctggctctcatcatgcttttatgtatgagagtgaggcatctagttctaggcaatccactcatgttaaattgcctaaaaataaaactcctactgcatcaaatgaacctattgtttcatttaagacttttgatgcttcttatgttttaactaacaaatcaagcaaagtagttgccaaatatgttggggccaagcacaatggctcaaagacttgtgtttgggtaccaaaggtgcttgtttctaatgtcaaaggacccaagaccgtttgggtatctaagaacaaagcctaaacttgtttagatgtttatgcatactgaggctcaagttggaccattgatagcgggtgcacaaaccacatgacttgggacgaacatcgatgtctcctctat

SEQ ID NO: 72971 - DNA, 413 bp, Zea mays
agcttgtcatgcccttcatcgaggtcatgaattcaccatatgtgggcaccaatgttggttacttgctttgatttctgagggagataaaaacaaggcaacataattaaaaatatgggtctttcgtcccttctatttatcttcaattgagaggcaaattgaagggagaagttcattacaattatgattctaaaaggaataaaatggataaatgcagtcaaggaaaatattactagcatgcttcttgtattatctttctcttattacaaatgaatacaattgtacctttcgaggccttgatagcagtcctaaagtaggggctaatacaactacagaaatcgaaatggccaatgtcacacgagtacgtgagccctctttctctgtgtatgggcactgattatctatttataaggtcc

SEQ ID NO: 72972 - DNA, 479 bp, Zea mays
  unsure (1)..(479): unsure at all n locations
atgaagaatacgacttcatcatctcttggttctggaatcacctcttccctatcaaaccaaactagtttgtcatcattctctccaaaatatcctatttttcatcaaaacaagatcttcttccttaactgtggatttcccgaactcaacatgactgggtttgctcggacttaaaatgccatcatcatcttcattttcactatcagcttcggcattgattaatttagctttggcatcaacaacatcttttgttggaatcagttcttttttcctcttgtacaatcaacccagaatgcctcatcatttctgagatgggggctgtctcagaaattccagcctcttttctttcacgtgctactcaagcagtggaccacactctatccatttcagtntttgacagacgaagctacacttatatgattgaacagttgttcaaacttacgccgcaagttcacagaaagaagctatgctcagtaaaaaat

SEQ ID NO: 72973 - DNA, 409 bp, Zea mays
  unsure (1)..(409): unsure at all n locations
agcttcggaaagccaacactctntgatagagtgctgacaaccttcgccccaatccggtcccggaggcatcctaaactctcttcggcaacgccaccgaagagcaatgcccctagttgatagccgcatgatattgcataatccctcagctcttccttctcagccttggatagctttttacgaagtatgtcttgaaaattaaaatcattttcctccaaagtatcttcggcaatctccttctctttctcgggcactggggccagggtctcttcggtagctgtagtagcttcttccgcggccatgttcaaaatcatcttatcaatatcagagaaagttccctctagatttgtatcttcgaccgtctcagcttcggcagttacagcttcggtgggggcagcctcggtagctccag

SEQ ID NO: 72974 - DNA, 466 bp, Zea mays
  unsure (1)..(466): unsure at all n locations
tactcagctttaacccgccgcgagaccttttctcgtttctttctaaccataatgaatgcgatatcgaatgtcatacttgatgcatatttactttatttgtcccattgtgtggtgtactgtttgtttcctaatttgaatggatgtatgtatgtatgcttgcaatcgcatagagaacgatccgatcgaagagcccgaggaactcgcatgagaagcccctgagcagcagtcggttggtggaggcaagtgtcccttgacctatctctgtcctattcattatttaattcacctcccgctttacacatttatgcctaaggattcactagcttttgttatccatgtccttgtttacctaattgggttggattattattgnttagctttatgccattgctcaaactctaatcaatgaacatgatgagaatatctattgatacgctgtttcccttctctcattatgatgttatac

SEQ ID NO: 72975 - DNA, 394 bp, Zea mays
agcttctaaagggagagcacatcttacgactatcttttgttctatttgagaaagacaggatgtgcagcgcatgtcaagcagggaagcaagttggtggtcatcatccacacaataacatcatgacgaccgacaggccacttgagctactccacatggatctattccgcccgattgcttacataaacatcggggggaagtagtactgtctaactattggggatgattattatcgcttcacttgggtgttctttttgcaggaaaaaatttaaacccaagagaccttatagggattcttgagatgggctcaacatgagttcggcttaaagatcaaatagattagaagcaacaacgggacggagttcaagaactctcaaattgaaggctttcctgagga

SEQ ID NO: 72976 - DNA, 388 bp, Zea mays
  unsure (1)..(388): unsure at all n locations
cctttaaactcagcttctaagggagagcacagtttatgactaacacangttcattttgagaaagacagggttcgtagcgcatgccaagcatggaagcaaattggtacccatcatccacacaagaacatcatgacgactgacaggccactggagctcctacacatggatctattctgcccgattgcttacataagcatcggcgggagtaagtactgtctaactattgtggatgactattctcgtttcacttgggtattctttttgcaggaaaaatctcatacccaacagacattaaagggattcttgagacggtctcaaaatgagttccgcttaacgatcataaagattataagcgacaacgggatggagttcaagaactctcacattg

SEQ ID NO: 72977 - DNA, 401 bp, Zea mays
  unsure (1)..(401): unsure at all n locations
agctntggtgaagaggcaagttcttaagtcttcttcttctgaagngaaatccactaagtagaggttgttgtatctaaatcccttgaataccattgattcatcatccatctttgttacaataacctctgttggagtgaataagcattgaagtccaagatcacagagttgacccactgataataaattgaagctcaaaggtgcaactaagagaacatttgatattgataaatcatttgagattgccaccttgccaagtccttgcacttttccttttgaattgtctccaaatgtgattttatcttgcccatcaacattctcatcaagtgaggtgaacatcccggggttgcctgtcatatgttgtgtgcatccactatcaataacccaatggctcccaccggtct

SEQ ID NO: 72978 - DNA, 475 bp, Zea mays
  unsure (1)..(475): unsure at all n locations
ngagttatgttattacagaccagactataagtgagtgcatattagtaatattatacaagacaggggaggcacaaactcctcccgatatagttaataaacaaaagatcctaagtggaggaccgagtcctcccacacttcagtcttcttttccctcgtttggtaccaccttggagcagaagcaacaaaagtttatcgcttcttcacctaaaaacaacaaagggataaaccctgagtatggaatactcagcaagtcttacccgactaaggaaaagactctcaagggtatgctggataagtaggagtcaaggagaggctntagcaaaaatcaacttatacttttgcagaagtagcttactaaagtgagtccttacttttcaaactttaacgccatattaagtattaatagactctatttgcatctagtcntaattcacatcacatcaagacaacanntcgtttatccatagtgttcaca

SEQ ID NO: 72979 - DNA, 408 bp, Zea mays
agctggacattgtctccctgttggaagccaatgccattcttaatgccagggcgtctcccactatagagcatgcttctagcaaatttaaatttttcattttctatctcatgctcattaattttagcattaagttgagctatgtgatcattttgttgtttaattaaagctaggtgatcatggatagcatcaacattaatatctctacatctcatgcaaatagaaacatgatcagcggtggatgtagagggtttgcaaacatttaattcatcaatcttagcatgtaacatggcattctcatttctaagattggaaatagaaacattgcaaacatttaaatctttagccttatacattaatttatcattctcaatcttaagactagaaagtgattcattcaacttgtcaatc

SEQ ID NO: 72980 - DNA, 455 bp, Zea mays
  unsure (1)..(455): unsure at all n locations
tgtatccnctactacaagcaccccggtgcaagataatatattcctcatcctccctctgctggaagtagggccttcttggcctgaaccangataaaccttgtgtttcatcttgcatcaatccatccaggcagggacacgcagcataaaatttactagtcagttgagggtcccccgggtccaaaacaccgacaattggcccattgatgaaggcactcttcacgttcatttgatagatcttaaaagaatggtgagcagcataggctaatagtattcgaatagactcaatcctaactacatgagcaaaagtctcctcaaaatccaaacttgtgacttggccataagtctncgccttgttcttgtcgccaccccgtactcgtctttgttgttgggaaacacccacttggntcccataaaattttgtttgaacatggcaccaaagtcaatacttcatttct

SEQ ID NO: 72981 - DNA, 407 bp, Zea mays
agctggtgaagattcttcattccaacatgtgctagtcggcgatgccagagccagcccatgttagtcttagcaattaagcatgtgtcgagttcagctctatcaaaatctactaagtatagctgaccctctaacacacccttaaatgctattgaatcatcacttcttctaaagacagtgacacctacatcagtaaagagacagttgtagcccatcttgcataattgagatatagaaagcaaattgtaatctaaagaatctacaagaaaaacattggaaatagaatggtcaggagatatagctattttaccaagacctttgaccaaaccttgatttccatccccgaatgtgatagctcggtggggatcttggtttttctcgtaagaggagaacatcttcttctcccctgt

SEQ ID NO: 72982 - DNA, 461 bp, Zea mays
  unsure (1)..(461): unsure at all n locations
tcggcactatnttcaagcttacaacataattgttccttctttacaacctctgaaggatattatgaggaaccgagaagctactggaaggattggaaaatgggctgcagagctcaacaaatgttgtattgaatatgttcatagatcttcgattccgtcccaggcgttagcagatttcattgctgactggacgccaggggctcatgaggaagaaacaaataaagacgccgaagcatggacagtgttttgcgatgggtcttgtggaaccttctgagcgggagcggctgctgtgttggtttcaccttccaaagttaaaacttgctatgtcggcaaacttgattttagttgcacaaataacattgccgagtacgaaaccttgcttcttgggtctttggaagctaaagcaatggggatcagaagggccatacttaaaactgattccagggtgtttcggtcatattgac

SEQ ID NO: 72983 - DNA, 401 bp, Zea mays
  unsure (1)..(401): unsure at all n locations
agcttcgcacctctgaactaactctgctgtattattctttgctggnggccaatagaatcctgacctgaagaccttcccaactagtgttctggaggctgcatgtattccacattgcccagcatggacctcctccagaagttgcttcccagcagatgagggaatgcacttcatgaggacgcccgatgcaccccttctgtacaatgtctccccaatgagtgtatagtgagccgactgtctggcaatgcgctcggctgagttcttgtcatctggtttttcttcattctttatgtacttgataattggccttctccagtcatcagagtctgactcaggttgatctataatgttgcactcttctgcttgatccactgaaatgctcggctgtagtatttcttgcacaa

SEQ ID NO: 72984 - DNA, 377 bp, Zea mays
ctcagctgaagcctgggagagcattgcctatatatacgtattgactcaagcctatctacgggtgcatagggttcaccgaaatccaaaccttcgacttgggagtatcccttggccacaagtcgagctttgttccttgtcaccacaccatgctcgtcttgcttgttgcggaagacccatttggttcctacaacattttgattaggacgtggaactaaatgccatacctcgctcctagtgaagtttgtgagctcctcttgcattgccactacccaatctgaatcttgtagtgctctctctaccctgtgtggctcaatagaggaaacaaaagagtaatgcttacaaaaatgttgcacccgagatctagtgttaccccctta

SEQ ID NO: 72985 - DNA, 414 bp, Zea mays
agcttactaaaatgaggccttacttttaacattttaatgatagattaagtattaatagaccttggttgcatctaatctaattgcatcaccactttaatcaatacatcatgatttttgctcattatgattccatccatgacttatattgcaagtcagtgaccaagtcttcatattcgagaagtaacgacgatcctgaatcgattaatacctagctggggatctccaaccacacgacatatgtagcacttaaccctttcatatgtcaactccccaccgggtttctcaagacttgaacaggttcacgccaaccgagagcacagatacaccaccgtccagcctcttgccacggagggtacatgctactctcgccatctctccactcccattgcgtgttggcctttctggtattggtct

SEQ ID NO: 72986 - DNA, 455 bp, Zea mays
tgggactccaccaaactcgaggactgttctgacaacttgtcgagacgttggcgaggcaaggtttgtcgagcacttcgatgaggagcacgtgcgcaagtctttgtgatgtttggggtcagggtcagggaagcgcggcgctgttggggtcggtggtcgatggctcggggctgaacacagtcgacaacgcggcacgacgatgttgttgtatgcgaaaggaaacggatggagcacccacagggatccctgcaggcgccagcacaagggagaaacctccaggtaagggtgttggcgaaggatttctccaggagccaagcttcatcagatgaaaataggaggcgaccatggtaccaggaaccgtgtcgagtggattctggaaacaggaaagagtaacgtgagaggataagatggagatatgggcggtggggaagaatttacagtgatgatcgtattatgga

SEQ ID NO: 72987 - DNA, 406 bp, Zea mays
  unsure (1)..(406): unsure at all n locations
agcttcagctccatctatgttgtggattgcttttgagtcagnccagtttccttcggcccttctggcagcttcctgacttccatgaatagcgataggtccttgatccgaaggtatcttcatgcaaagataagcaggatgaagaattgcttcgaaagcattgagggtgccacgaccaataattgcattataagggtattccatgtcaacaatgtcaaatataacttgctcagttctagtgttgttgatgaacccgaaggtcactgacatggtgatcttgcccagcgctacaatctgtcttcctccgaagccacagagaggatgtgtagcatcatgaatcttatcttctggctcttgcatttgtctgaaggccttagcaaatatgatatcagctgcactgcctgtatca

SEQ ID NO: 72988 - DNA, 351 bp, Zea mays
  unsure (1)..(351): unsure at all n locations
ccgacttcaactacccgaaacattgtctgctgtgcataatgtgttccacgtgtcacaattgaagaagtgtcttcgagttcccgatcgaaccattgaagtaacagatgttgtccctgaaccagacttgacatactctgagcaccctattcgagtcttggatcanaaggacagggttacccggagaaaaactctcaagttttataagatacagtggaaccagcattctgaagatgaagctacttgggaaactcaagacttcttgaataagaatttcccaggttttctagcctcatgtaatatgtaaagtgtatattgttattgcaataaaggaatgaacccccacaccacccc

SEQ ID NO: 72989 - DNA, 401 bp, Zea mays
  unsure (1)..(401): unsure at all n locations
gcttcaccggctactggcggagcttatcttatttttggtgggctggagggtggctggaatgggctggccacagcgaccgtatctctggcggcaatggcgggcaaaaatgagctcgccggagctaacgaacgggggctggccggtgagggtgagtgcggggcgaaaaaaggtgcgcccggggaggctttatangcgcgggcgggcaccgtcgaaggcgtgggcgcgcggctgacttgaccggacgccggggtgagcgcgcgcgcgggttgggcgagctctggcgtgccgaccaaggacgaacacgtgtgcccgtgcgttctgcccaagctctggcgcgtgtggtcgctcatccgagcctgctctcgccttggacagagcacaaaacctcttcttctccctac

SEQ ID NO: 72990 - DNA, 443 bp, Zea mays
  unsure (1)..(443): unsure at all n locations
tgtcaagcatattttggtccccatctcttgatgggtccattaatgttagtcaacaaagatctaggaatccaaatgtcatttgtgctaacacttggtaaactcattacctttctagcacaagttgcaattttgggttgcctagttacatatgaatcaattgacaagctaggagcggaatagttaccaatgggacaatctttgcatagatgtcccttccttcggcatatgtagcaaagtcgatcttcacattntgaagatttcttctttccttgtctcttgcttcctacatggttaggaaatattttcttttctaaaactatgcattttggttttacatanggacatgacttaaccatatgtcccttctcatagcatctaaaacattgttattatccttggttataaccaagccattttctgtaacatagggacatgacataatc

SEQ ID NO: 72991 - DNA, 410 bp, Zea mays
  unsure (1)..(410): unsure at all n locations
agctttcgacgcttgaagttgaacacagtgcgtgtattttatgtaggttgtaagccacatgtagtatatgtttttgtcatgggactagtggtgataggaggtctattggctcattgtttgtgacatgataggaatgtaaggagaaagtcttttgtctcatggtatgtgacataaggagacaattgtatatttaggactctagatagcgttccgcaagaatgccatcctaaacaattgtttcgcaaaaacagactataaacatcgtctaattgatcaagctgtcatttaatgtgttttcttccttttctaacctaatattatgtattttatgtctgattagataattctacccttntgtaattatatgcacaaaacgtatgcgaagcagcataaaacagcacggcacctgt

SEQ ID NO: 72992 - DNA, 428 bp, Zea mays
  unsure (1)..(428): unsure at all n locations
cttacgcctttcgccttgagacatcggaatgtcacttcaatgtcggaaaggaggtcggaggctnttctcgtcttgactacgatgtcatcgacgtaggcctcgaccgtccggccaatgtgttcgccaaacacatggttcatgcaccgctggtacgtcgcacccgcattcctcaagccgaacggcatggtgacatagcaatacatgccgaatggtgtgatgaaagaagtcgcgagctggtcggactctttcatcctgatttggtgataccctgagtaggcatcgaggaaagacagggtttcgcacccagcagtggaatccacgatttgatcgatgcgaggcagagggtatggaaccttctgacatgctttgtttagaccagtgtagtctacacacatgcgccagtttccttctttctttctcacaagcac

SEQ ID NO: 72993 - DNA, 409 bp, Zea mays
agcttgaagggagcagcagcaccctcggcgtttacttcaccttcggcgaggtccgacctagcctcggacggcgacgcggtccgaagatctccactctgaaggacgacgtcatcgccacgcccgggccgtcgctgccagggtcttctccgggaatccggcccgagtaagcagctcggacggtcacctccgggcctcggccagctgtcctccaaggacgtcagcccgacccgaggcctcggctggtcagtttcggcgtcagtcccgctaacggacgacccggccaagctccggccgaccaggtctttttttcaagccaactctgcctctgtccgcgctgacaccgctacccctggcctttgctcatcaaagagcggccgaggggttcctttaactgagcaagagaagcctc

SEQ ID NO: 72994 - DNA, 234 bp, Zea mays
acaccggacagtgtccggtgcgccacctgacaacgtccggtgcacctaatgactccaactcgaactcgccaccttcgggaatatccaaggcactctcgctattactcaccggaccgtcagaagtacaccagacactgtccggtgccccaacgaagagcggtctcaggaactctccatgttctggaaacgccgactgttagtcgctaaaattcacccgacatgtactgtgtgcac

SEQ ID NO: 72995 - DNA, 401 bp, Zea mays
agcttatcaaccgtgtctgtaaccgtgcgacgtggtctgaccgccggtgtcgtcatggaagctccgatgacctcaagtatgctacgccgtgtctctttactgcgcagtagtaaccgtggcacacctaggcttaccatctcagaaccgctgcatcggtgaacgccacgactgagccaccaatgaccttcttcctctctggccgccagcacgccatgcccaaattaggagccacagaccttggattctttaaattggtgcccaagcctgctctgctaagtagttgtgcacctagagaaccagccctcaccttcaatcgtcccccacagctccccaatttgagatctccccaaaatcagtcaagaattctgccgtgtgtgagctcgccatggccagctctccat

SEQ ID NO: 72996 - DNA, 462 bp, Zea mays
agaggaaccttcggctatcttatacagaacagcttcatccaaggatcacttctttctattagaccttcggcgacgaagcatatacccaacatgaggtgatgcttattccgaagatgcacacgcatccctgcaataaaacacataatcttttacaagcctcccttaagagcttcttcgccttttacttcagcggaatcagcgtttatttttcgctgtaagcctcccttaggagcttcttcgccttttactttcagcggtattcgcgttgacttttcgcgcttcgccttttacttaggcggtatcagcgttgacttttcgctatatgctctgcattccctttggaacgactttggagcagaaaacttacactgcgctccctctggagcggctttttgtgacttcagcaaacttactctgcgttcttataacgacttttgttgcttcggaaattctcgatatccg

SEQ ID NO: 72997 - DNA, 412 bp, Zea mays
agcttgccctcaacaagaattgtatcaaatgatatctctagaaggatattaaaataaaccatatgaatgataccagttgaaaggaactccccctaaatgagtgttctctttagaaagaagtttctcccccttttttagagatggagaaatactccccctgacagagatcctctacttaggaaaaagcatgtgaaaaattagaggtgcaagacatggtttgaaaagactaacttcccttatgcataggtaacagaatatgagttaactacttatgcatttttagcaacatggaagcatatgatatgaaatatagtctaatcaaatattggagaagacatgtaaatgatactgaatgtagtctcaaaagataccaattgaagatcaatggcgagcttgagagacatgagagttc

SEQ ID NO: 72998 - DNA, 446 bp, Zea mays
  unsure (1)..(446): unsure at all n locations
ttgtagcatgcacaaaacccctcgaataatatgtcaagaacttgnggaatgtcaagaggaaggatcaaaagaagaaaatcaatacctctaccaaaagcctcaaccacgcctccatgcaaggtaacatccaaggtaatgatcaagccacacttcacactaagaaaagtaagaagtgtagtgaatgcattgaaaaggggcacttgattatgtcatgtccctatattaaagaaaatggcttgattattaacaaggatgataaatattgttttagatgctctgagaagggacatttagttaagtcatgtccctatgtaaaacaaaaaggtatatctttggaaaagaaaaatatttactaaccatgtagcaagcaagatacaaggaaagaagaaatcttcanaacatgaagatcgcctctgctacatatgacgaaagaanggacatctatg

SEQ ID NO: 72999 - DNA, 416 bp, Zea mays
agcttgtgagcaatacaagttcagaagggagatagctgcttctgccgatcagccgaagcccatgctcttatgcgaggacatagcagagcagaaggtgctattgggatcccaattgtccgaagaacaggagaaaaccttgataagatttctgttcaacaacaaagatgtttttgcatggtcaaccaatgatctttgcggagtcaacagggatgttattgaacactcgctcaatgttgatccatccttcagacccagaaagcagaggcttcagaagatgtctgatgacaaggccgaaggtgctcggaatgaagtgaagagactcctcagtgccggagttatcagagaggtaaaatacccagaatggctggctaacactgttatggtgaaaaaggccaatggtaaatggagaatgtgta

SEQ ID NO: 73000 - DNA, 355 bp, Zea mays
  unsure (1)..(355): unsure at all n locations
tncacgtgttcgacgcgagctgacatccgggggcgcgctcatagcacgctcgtgcgcgaacccccgcgcgcccgcggtcgcccgtgaccacgcccgcgccacggctataaagcccgtcccagtgctcggctgccttccccgttgcctcctccgtacctcgcctgacttacccgagccagcaattagctccggcgacatccccgcgacccgccagtgccgcccgagagcaaccaccgtggccagcccctntcccgtcctcctccgttcgatccaagccctcagatagcttcctggtgaggccgtgaagcttgatccaacgtgcaccgagacccgagtgccagaatagctcaatcga

SEQ ID NO: 73001 - DNA, 406 bp, Zea mays
agcttgatctaattatgcagccttggttttacataccaaaggaaggaacaacaagtggccaaaattggcgcccaactccggagaactcacgactatcacaagaagcttttttatgcctccgacaaaaaacaacagatgacttttaaaaggacaaaacaatctaagaacaatccgacagtgcattatttgcgcatttgaatacattcgttggggcaaactctcatgccggtgacttgcttttgattactacgtggtatcaaaaacaaggcaacaaccagttagagaatggtgagcctctccctttgattacctctttttaaaatggtgagtcacgggataaggtaaaaaagagggaatgcatatgaaggaacgacgtatggaaatatgatcaagaacaaagattgtt

SEQ ID NO: 73002 - DNA, 402 bp, Zea mays
cagctcattggcccattctggcactgcagtctccagaagaactttttagtgtgtatatgcagttatcccttcttaagccactattgcattaaattcttacatagcacagaagaaagtaggggaggtgtttaaaagtcaacagttgcatgtgagtaatacattagtggtgccagcggcactaaaaggaatgtttatagcgggacctgcagcatcaccacttcggctacatttctttagctcttccacaaattcagccactgatttatcatgactgaaagaagaaatgatatatggcaaaagcttctttagttgtggttcagactctggttctttcttgtatactgtcagaactgactcaacgtctctatgaggatcattggtgctgcaacacatgatcagata

SEQ ID NO: 73003 - DNA, 408 bp, Zea mays
  unsure (1)..(408): unsure at all n locations
agcttgcagagacacttaattgtgtggtgatccttgcggngtcttagtgtcaaatcacaaggcaccaaagatgaagtcatggcccaatgcgaaactttttggttgccatcaactctcagttgatctaagtgattctccctacctggtgcttcatctgccaaaattatttgatagtgcatttatacggtaggccttgagattgaaagctaaaggtgaaggcatacgagacacgaaggtttaaaaaattaatagatttatataatacttgagatatgtattttatatatctgtttagatttattatgatccattttaatattgacgtaaaaatcaatagctaaaacgattactattttggaatggatgtagtagcatatatggctactctagagcttaaaactcggatcg

SEQ ID NO: 73004 - DNA, 398 bp, Zea mays
  unsure (1)..(398): unsure at all n locations
ntagatgggcagtctccagcaacctttccagcccaggactgtgctccgtttctggagtctcgagttcatgtctctcgacgacagctacgacatgatactccttccaccgccgtgcgacagcgacaatggcggccgacagcccgcccgccggcggcggaatcgacgacgtcttccccgcgtggtggaagaacaacattcgagctcaccccgtcctctcccccgccgacggaagaggaggcggngcaaccaatgccaagcaggaggcagcgcctcgtctgctgtcgatcgagtcgacggcgccagcgccccaacgggggggcgcgtcgggcatcgacctcgcgttggagacgaagacgagcgccgtctcccacgacacgccaatcctgagcatacggacg

SEQ ID NO: 73005 - DNA, 409 bp, Zea mays
agcttatgaaattatctacaacttctattactatcctaaaggttaattctgttgattgaattgcctaaatcttaagagaacagattctgcatagaattatgagactgaaaaactgctataatcaaactacaataactctctgatctgatgtcggattgaggtgttctttgcagccacgaaaagatctacaaattatctacgaatcatagatagaatttttattttttgaggccactaagaccacggaaaactatcatgaacagaaactgtcgaatctgtcattctatagagactaaattcgagatcaaaacctaaccgcacatctaatccaacctctaatcctttaatccccatgatgcaaaacctccaaaaacacttaattacagggaggaacaaggatcacatcctt

SEQ ID NO: 73006 - DNA, 443 bp, Zea mays
  unsure (1)..(443): unsure at all n locations
ngacatagttaaccaaagtgaatggttatcagaaactatattataatactaaaattaatttacgttcacactgcattctcaaaggggtaaaatagcaacacgttngaattcaaaatgtcactaatgaaaaaacaaatagattacacaatgccacgcacaaagaaactgatgttggtgctgcatggaaaagtacatgagaattcaaaccattacagttacaagtttgtgcagatttggaagtacaatgttcctttactgaacaatgttggcaaggatgcttacacatgaaaccaataaaatagctcatggaaagttcaaacatccagtagcaacagtggtattggcaacagggaaaaaaaggataccaaatttatagntggtaaccttggcaaaattgcctgaaaagattataatggtaatcagaaaccannatataatactac

SEQ ID NO: 73007 - DNA, 409 bp, Zea mays
agctttgatccatggattgaacatcaccttattattttgcatcaagagattgatggtgtacggagactctctggtagtcattagccagataaacaaagagtgggattgttcaagtgattcaatgggaaaatactgcactgtcgtccgaaagctggaagataaattcgagggtctgaaatttcatcatgtagaaagagatcggaacacaacagccaatgtattgtccaagctaggatccagtcgaactcaggtcccacctggagtctttgtgcaagaagtactatagccgagcatctcaatggatcaaacagaagagtgtaatattatagatcaacccgagtcagactctgatgactggagaatgccaatcatcaagtatataaagaatgaagaggaaccagatgacaag

SEQ ID NO: 73008 - DNA, 355 bp, Zea mays
  unsure (1)..(355): unsure at all n locations
ttacttagttgattgtgcacaagaagaagtcagtctagatgcatgcttaattgctaagactagcatgtgctggatgtggcatcgccgcttatcacatgtggggatgaagaacctctcccagcttctatagggagaacacgtgataggtttgactaacgtacaattcaaaaaagatagaccttgtgcagcttgtcaagcaggtaaacaggtgggaggagcgcatcacagcaagaatgtgatgaccacatcaagaccactcgagctgctacatatggacctcttctgacccgttgcctatctaagcataggaggacgtaagtatgggttagttattgttgatgacantttccgcttc

SEQ ID NO: 73009 - DNA, 408 bp, Zea mays
agcttaataaacgaacaaagcgtacttgacgattatcacgcacatgcacgcaccatgtatacttttatcatccatgagataagtatataatggagtatacttttatttagtgcagaggaaaaaaagatgaatatgtgtgcttctttttactgggaatatgttattatgtttttagaatttatgttcaaaagaactcaatgaaaatataatatttttatgtggtcatgattgaagtaagagtgttctcatttgatttttattgtggttagctgagcaaacaagggggaaagttgacggcttgcggccactgtggcacacagccgctgtgctcgctggataaacaaaaaaatatggacggataaacaaatcagtcacaaaaacaaaaaatctggataaaaaataaatcta

SEQ ID NO: 73010 - DNA, 390 bp, Zea mays
actcagcttctaagggagaacacgtgataggtctaactaatgtaactttcgaaaaagatagaccttgtgcagcttgtcaagcaggtaaacaggtgggaagctctcatcatgccaaaaatgtgatgacaacatcaagacccctggagttacttcatatggacctcttcggacccgtcgcctatctaagcataagaggaagtaagtatgggcttgttatagttgatgatttttcccgcttcacttgggtattctttttgcaggataaatctgaaacccaagggaccctcaagcgcttcctaaggagagcccaaaacgagtttgagctcaaagtgaagaagataatgagcgacaatgggtccgagttcaagaacccttcagtggaggagtatc

SEQ ID NO: 73011 - DNA, 408 bp, Zea mays
  unsure (1)..(408): unsure at all n locations
agcttataaagtccactatacccgttgtattatcatcacaacaagatttgacacttagaaaggtcaaacaatgctaaacataaattctgtccagacttggacataattcaactactcaattcaaaaatccataattggagtttcaatcatccaattcaggtgctcctagactttttagaaagctagtagaattgtctataattcatttataaacatatcaagttaattcaatgcatattaaggtcaaaagacacgagaaaggctctgctgtccaaatttggacagattcagagatcacacttaaaacagctgtaacttaacttatagatctccaaaaaaattaaatccaaaatttgttgaaacgattaagaaaagtactacaacttctntataatttataataagtta

SEQ ID NO: 73012 - DNA, 395 bp, Zea mays
tcaacactgtaattttagctgcagaccattgttcaccatctaaaactccagaaatctgccagctccactttagctcactttttctcctagttccaaatagcatacagggtatggccttcaaccaaacctggtcttctactatagctctattgctttgctataaaagacctaatttaattccctacaggttagccactacaaaggtacaaacatggctaaagtttactgaaattcagacttagccaattagctaagtctgaaacccagaagttgatagcccagttttgagcaagctttacactcagttatatttatgttttgggtcagatcacttaatcaaacttgtactcctataacagatctacagctttattatagcgggcataatctattac

SEQ ID NO: 73013 - DNA, 390 bp, Zea mays
agcttcaacatcttaagcctgtagagaagattattttccttgtggcagacaacgaaactattacatgagatttaaaaagtgtcctttattacacagaaaataaaactgaatggaaaagactactatcaaggtaggatatttgtcaataaatgtgcttcgactctggcacagtgctattgactgtgcgagcttcggactgttctctgaagtccctttggtgttgagcatattggcccccttctggctgctggccttgttacagcgttggtggaggcggaggctgttgccaggaagcttgaggttgactcgccgaagcaacagaaactgcagggtggttgcctacatattctgggatataaggcgaatgatacgaagcagtgtgcatgatct

SEQ ID NO: 73014 - DNA, 335 bp, Zea mays
  unsure (1)..(335): unsure at all n locations
tctcaactgctccatctgtctttcctttttaattcttcgttgtattttccaattctgaanatgtgattntcctcggatatctatattgggttgagataccccaacccttttgagagaacctatagaggggtgagtaggtgatcctacaaaaacataactaagaacaacaaacttggtatataaatggggttagtgaaatataaaaccaaattccatcaagaatagaaggaggatttcttcacttatttgctctcacaatatgtgtattgaaactagagcantaatgaaagtgaagtggggagctcagaagaacaaaatcgcaatgaaattaagtg

SEQ ID NO: 73015 - DNA, 354 bp, Zea mays
  unsure (1)..(354): unsure at all n locations
atgtatagtgcagtgacggctgactttattttgaataattcacttgcaatttaaattgtctgattctttactccttccggagtcatttaatgtgtgtgaatctacatgtctgaaattgagtttttggcaccatgctgtttcacttacatttcctacatgtgagattttcccatgcagtttactgatcattacttatctgatattnttaaatttttttctaatgtagtttactggtctgatattttttttgttttcttatgacttancttgatgcagcagcttggtcacgatttggaccaagaagagccaagaacctacagacattctcatgttggttcagctattgctaactct

SEQ ID NO: 73016 - DNA, 413 bp, Zea mays
agcttgagtggattactggaaataatccactcttatgtcttcatttcctgccttttagaagtcggtggttcatctttgtcttatgctttagaaatcagcatttcatcatcagttcatgctttagagatcaacattctatcttctaggattaatgattcattgggtgcatagcccccgagctttgagtggattactgaaaataattcactcaaaggtcttcatctcatgcttttagaaatcatcattttatcttcgtcgaatgccttagaattcagcattatatcatcagctttattctttagagatcatcatatggttctgcctttgagatcagcaatgcggtctacccatgtgctgttaggtttgaaatttatttgatcggcgacagattggacgtctggtagatggctctt

SEQ ID NO: 73017 - DNA, 431 bp, Zea mays
tcacaagtttattgaagaatgacattatgttcaattggtcttctaagcgtaatgaagcctttgagcaattgaagacattattaaccactgctccggtattggctcaaccgaacatcactaagccttttgatgtatattgtgatgcatctggcagtgggctcggctgtgtactgatgcaagagggccgagtaattgcgtatgcttcaaggcagttgcgccgacatgaggagcattatccaactcatgatctggagctagctgctgtggttcatgccctgaaaatttggcgtcactatctgctgggaaatatctgtcacatatatacagatcataaaagttggaagtatatcttcacccagtcagaaataaatatgatgcaaagacgatggcttgagcttattaaagactatgaactggagatcattatcacc

SEQ ID NO: 73018 - DNA, 409 bp, Zea mays
agcttgccaagccctcggacccggccggacttcaccggatgtccgagatcgacctcaccggacttcggtcttccgccgacgcgcgtggaccgagctatccagtgagtctccgaccaattgcttgcacccatatcttctgtggcatcccgtgaacctctgtgacccatccaattgctctatctcgccgcgaccagaccggagcaatctcgtcgccggtaagcccctccgccctttcttccgccgcgattactgtttaaggtataagaaggaccttgggttaggatatgtagaacctgaggggttttctgtaacgtcagcgactcatgtgaatagtgacctgaggaccactccgcgaggaaaacttataaacccgccagggaccccagtgcaaagtggatggtcattaaac

SEQ ID NO: 73019 - DNA, 378 bp, Zea mays
  unsure (1)..(378): unsure at all n locations
tccttatggtggaagtcctggtcgataacagttgtccaagtcgcagaacttcatcttgggatatctgcagctcatggcggtgatgatctatgtcagacatggtgaagtggtggctcctctccaagatggtcaaggagttactagtgtcacggtacaacctgtccaaattgtcacgagaggcaacgagtgctcgcttctcctcctacgaacagaaagcaacattcagtactgaaagtcgccttgaggggggtggataggcggaatatgaaaactataactntaaacacacactacaagccggtgttagcgttagaatgaatattaagtccgggagagaggggagaacaaatcaaccaagatataatgtggatgaacatg

SEQ ID NO: 73020 - DNA, 407 bp, Zea mays
  unsure (1)..(407): unsure at all n locations
agcttgattgaaaatctattgcctatgttgttctcttgatcgcatattggttgatcattgaacaacttcaattatcacttatgcttcttagtgcctcatgtaatttcaatttgatttcaattggtctatcttgatatgcactaaggaaaaaggagaattcatgattcatttatgcattttgtgatccacttgatatatgttaaccatgacttagaaaaggatcactagttgtaagaactctctcttgtgcaaaatattttcacacattgtcattgagcataggtcttaagcaaacaagactaatgacaaaagcacaatgaagagagcgtctacaagtaaaggtacaaaacgggtaaaacttattcctatcatttacatatgtacctaanatcttcctcttatataca

SEQ ID NO: 73021 - DNA, 478 bp, Zea mays
  unsure (1)..(478): unsure at all n locations
actcaagctgacaacccatgccatacacacttaatacatcanggtttaaaactcccatgttatgagtcagctgcatcaaaaatctatctacgattgaatccgtgaaaaatctgtccacgatggcatttgtgagctctacataaacttgccccctatcgtacctgtcggtgcaattctaaacctgttttaaaaccgtcattagctaacatctgcccgtgatcgaacctgtcaaccatcattagctaagtcttctcacgttgagcaacaataaaacatttcatgaatcattagttaagttacttattcaaaatatataatattgtatctcaatcatttttacgtaaaaataaaaacgaaccaaacttcgagtcgagtgtgggtcacctgtgggtagaaataaaaactcgcatccatacccgcanaacttaaggttgggtgtgggccganggtcanaatcttcactcgtatctacactcat

SEQ ID NO: 73022 - DNA, 411 bp, Zea mays
  unsure (1)..(411): unsure at all n locations
agcttatgaagattcttcatcccaacatgggctagtctattgngccaaagccaacccatggtagtcttagcaatcaagcatgtgtcaagctcagctctatcaaaatctactaagtatagctgaccctctaacaaacctttaaacgctattgaatcatcacttcttttatagacagcgacaccaatatcagtaaaaagacagttgtagcccatttgacataattgaaaaacagaaagcaagttgtaatctaaagaatcaacaagaaaaacattggaaatagtatggtcaggtgatatagcaattttacccaaacctttgaccaaaccttgatttcattcgcgaatgtgatagctcgttgggaatcttggtttttctcatatgaagagaacattcttttccttcacgtcatgt

SEQ ID NO: 73023 - DNA, 478 bp, Zea mays
  unsure (1)..(478): unsure at all n locations
cacatggatacgtcttttggagtcctcaaaaccgggagggtgntcaacatacactagttcactaatcttaccatttaggaaggcactctttacatccagttggtagagcttgatattatgtgcacaagcataagcaagtagaatccggattgcttctaatcttgctacgggagcgaatgtctccccaaaatccaatccttcaatttgagtatatccttgtgcaactaatcttgccttgtttcttactaccacaccatcttcattgtgcttgttgcgaaacacccattttgtaccaataacattgtggttctttggtctctcaacaagctcccaaacttcattttgagcgaagatatttaattcttcatgcatngcattcacccaatcaacatcaagtagagcttcatctacacggttagggtccatactcgatacacaagagaaatgttcacaaaacgaagctatgcgagaacgagtt

SEQ ID NO: 73024 - DNA, 402 bp, Zea mays
agcttcgagcctcggtttacgcttaactcttgtgaggaaacgatcatgtctacacaacgggaccatgtggatcctcttctcgaggaaatccccgtcacatctaccggtgaggaagtggaccccaaggtcctctacctcgccatgaagattgccgagaaaatgttcctcacaatgaaagatgaagatgctttgataaaggccgaagaagaggagacaagaacaaaggccgaagaaggtaaaggtaagggaacatttgattataatgacgatctagtggatcttttggtgtctaaggtattgagcaaggtaagtctcaacaccgaatgatcatctaccaaaagcaaaggtaatgactctagcagagttcaattcgattactctagaaattatattcccaacttc

SEQ ID NO: 73025 - DNA, 315 bp, Zea mays
  unsure (1)..(315): unsure at all n locations
gtcgatcggagaaagaatcaaagaataacgacttggagagcgacaactactgtctaggcgtgccggaccttcaacaggaccggtccagtggcgcatcggacctccaacatgaactgtatggtctcgggaattttggctaaaaattactggaccatgaatagtgttggtccggtggcacactagaccttggccaatggccactntacgggcgcgctggctcagcctaacggctagctgatgtggcccggtgtagtgcaacggtgaccaccanaagatgaaggcttgcaattggatcccggactgggggcgcatgta

SEQ ID NO: 73026 - DNA, 409 bp, Zea mays
agcttctaaagggagagcacattttaggatttacattgttcattttgagaaagacaggatttgtagcgcatgccacgcgggaaagcaagttggagtccatcatccacacaagaacatcatgacgaccgacaggccgcttgagctactccacatggatctattcggcccgattgcttacataaacatcggcgggagtaagtattgtcttgttattgtggatgattattctcgcttcacttgggtattctttttacaggaaaaatctcaaacccaagagactttaaaaggattcttgagacgggctcaaaatgagttcggcttaaggatcaagaaaataagaagcgacaatgggacggagttcaagaactctcaaaatgaaagcttccttgaggaggagggcatcaagcat

SEQ ID NO: 73027 - DNA, 447 bp, Zea mays
actacgctgatgttcacacggtgtgatgattcgattcaagaattatttactagtctacatgctgcattgactgagaaagttgaagtgctgactttaaacatccatagaatgaagaattacttgactgatgcatctactatacgaaaagctgctattgagaacaatgatttcagcaatgaggtggcagtggataatcgaacgcttaagaatgaggtccagatactaatacgtgaaaatgagcatcttgctacaagggtgcaacagttcaactcgggtcaatacctgcaaaagaagctgcttatgagcactgttatgattaacaacaagagtggtattggatacaatgcttttgtgcaatataaagctatgtctcaatacatgcctactgagactcactagcctatcaaatgctttgagtgtggaaatgacagtgtgtttgccacaact

SEQ ID NO: 73028 - DNA, 409 bp, Zea mays
agcttgggctaccaccatgcaaccggagtgttgatgatatcccgcatgaacatccatggaagtacaagaaggagaccccgctcggacaccctcgggggctgggccatagtttacgctacccacctgagccagatcatcttcggtagtaccctcgggggctaggcagtggcttgcgcttcccacccgagccgagtcatccccggcaacaccctcgggggctgggtaggcgtcaacaccatcctcgaggaccaagttctctgcagtatccacctccaaggctgagggtccttcagttacttccataggagcaagacgatccaagtcagcttcctgaccctcaagaccgctctctaaggtcgatgaggcgtgggacgcttgccgggacgaccccaacctggcgtcgagcaca

SEQ ID NO: 73029 - DNA, 360 bp, Zea mays
  unsure (1)..(360): unsure at all n locations
tcggctcaaaggagaagnttcgtccacagcatagcagaatgcacacggataaaggaaacagaatatattacaaggtatgtacaaatttacataagttctttccataatgatattacaaagatcccttcagaattgtttataggaaagactattctagcaactatcaagcttcagcttcgtcatacttcagcttcgtcgtcctgcacatattaaggagcagaataagataggtgcaaatttcaaggagaagggtaaagtaacaaatataagttttttaccggcttaaggtgacttcgagctttcgtaccagccatccttcgcccgccatttacccaaatctgggtcataaatctattcccg

SEQ ID NO: 73030 - DNA, 352 bp, Zea mays
  unsure (1)..(352): unsure at all n locations
ttcggcccgtgcgccatgggcgatcccctcattntcggcccagacgcaaggccgaacagacatgccgcccgtcgccttgcgcctccgtgccagtattcctccgttccgccatgcccttcacccaagacatacatattaccttcggtgtctttccacacgcttggacttaacttatttccggagccatgcccgaacctcgggttttcgcccctgcgccatgggcgaacccctcgttttcggcccaaacgcaaggccgaacagccatggccgcccgtcgccatcctggccttcacccaaggcatacgtcgcagcttcggtgtccttgcacacgctctggacttggctttttttt

SEQ ID NO: 73031 - DNA, 414 bp, Zea mays
agcttgtccatacatatgtgtgtctatacatgtattgtttgaaattgtattttatattggtcttacacatgtacatgtacaattttacatttattaaaaaacatgtaacgtgttaaatgtgtaatgattaatcatgaatacataccggttattttacaggagcaaatatttagaaatgggaaaggcgaacacaaagtatcatgggctaaggggtccaattaggacaaactaaaatatgatcaagaataagtaggaacattttttctacacttttaagttgagaaaaaaacatgatcatatgactctaatcataccgtcataccctacagttcatgtggagaaagttgcataattaaaattgcagggaataaataattcatatatgacaaaaagtaaaggggacaataataaaac

SEQ ID NO: 73032 - DNA, 363 bp, Zea mays
  unsure (1)..(363): unsure at all n locations
ntatatatgtattagaatgtatagaagcaccgatttattctgtctatgtgttcatgtatgaactaaaaggcttctaaaggttttgcctactcagcgggataggaaggttctatagctattccgcacatgcctttcttgtctgaaatatccttctccattctcaggtaaccattctcaccccatgtcgtgccccatgagttcttcatgagccaatacttggttccatcactggtctttccataaccaatggctgcaatcccgtggtccaagtcagtaccacatgatccagtcatcacaccaccagagtagaactgaaatgtcatgtcttcaccgtccactgtcaccgacacgggctgatttgca

SEQ ID NO: 73033 - DNA, 406 bp, Zea mays
agcttattgaaggatgcagatgcaagaatattttcttctgggtgtaaatattctaggctgtcatttttagtccacttatatcacttgaagtgcttacatggttggtcacaagaatcatttacaggactaatggatctgctatctggtattcctggagctaatctacccaagacatactatgaagcgaagaaaatcatccgtgacttatgtcttgattatgagagaatccattcttgccccaaagattgcattctttttcgaggtgattttgccaaacaagatttttgtcacgtgtgtgagagctctcgttggaaagttgataagaaggattcaaatgcctctgtagtgaaacctaaggggaaaaggaaaccagccaaagtgttgcgttactttccattgattccta

SEQ ID NO: 73034 - DNA, 350 bp, Zea mays
  unsure (1)..(350): unsure at all n locations
tatgaagattcttcatcccaacatgggctagtcggcggtgccagagccaacccatgttagtcttagcaattaagcatgtgtcaagttcagctctatcaaaatctaccaagtatagctgaccctctagcacacccttaaatgctattgaatcatcacttcttctaaagacagtgacacctacatcagtaaagagacagttgtagcccattttgcataattgagatacagaaagcaacatgtaatctaatgaatctacaagaaaaacattggaaatagaatggtcaggtgatataacaattntacccaatcctttgaccaaaccttgaattccatccccgaatgtgaacgct

SEQ ID NO: 73035 - DNA, 407 bp, Zea mays
agcttctgaaaagaacttcatacgagtatttctgtgacttcgcttcagctatatgaggtatcaatgctggctggtcgatttcctgatataataaagaaaccaaaaaacagaagttaaactactatgctttgtacttggtagtttgagcaaaacaatccttcagcaacaatatagatttcaaagataaataaatgcaagaccagattgcaataaaccaacaaaaactgctttatctcaaacccttaaacactttatttattatatttgttaccgcttcatgggtgcaactacagataaagggaagctgagatctccagacttgaaaataatcaaacagttcagactgagcataattggctatgctacgatggcaaaatttgccaacaaattaaacatcttattaacag

SEQ ID NO: 73036 - DNA, 344 bp, Zea mays
tagccgatcactgtggcaagcgtgtggaagcctacgcttatgacgtggtaatcaaaacagagaactctggaaacttcatcgaagacttacagctcgttttcaatagtctacggcgatatcgatggaagcttaatcccgaataatgtgtctttggggtaccgacagggaagctactcggatttattgtcagcccaccgggaattgaagctaatccggataagattgaagctatcatgaaaatggaagctccacaatcacaaaagaaggttcagtgacttaccggatgtttggcagccctgagcagatttatatccaggctatgagaaaaaggtttacccatttac

SEQ ID NO: 73037 - DNA, 414 bp, Zea mays
ctaagcacctgcagctgcactttgccactgatgtcctgccgaaggaatattccatgtctgggccacgttccgaactgccatgatgaaggacttatccatgacagctgcattgcctccgtatgaggatattgttgcctcatagctcatcagaaattgttttgggtccgagtgcccatcatacatgggtagctggggtggcttgtaagattgtggccatgggatagcctgcaattctgctgccaagggagaagcatcatcaaaagtaaaggtatcatgattaaaatcatcataccatccatcttcgttgaaaaagccttcctgacgaagctccctgtgttggggccttcggtcttgttcatcttgaacaagatgacgcacttcttcagtagattcggtgatctttctttgaagatc

SEQ ID NO: 73038 - DNA, 451 bp, Zea mays
  unsure (1)..(451): unsure at all n locations
acggacctattatactcagcttctaagggagaacatgtgttaggactaaccgatgtctgtttngagaaagacagaccttgtgcagcgtgccaggcaggcaagcgggtgagaactactcatccaagcaagactgtgatgacaacatcaagaccactagaacttcatttggatctcttcgggcccgttgcttatcttagcatcggaggaagtaagtatgggcttgtaattgttgatgatttttcccgtttcacttgggtattatttttgtaggataaatcagaaacccaaagtacattaaaacacttcctaaggagagcccaaaatgagtttgagctcaaggtaaagaaaatcatgagcaacaatggatctgagttcaagaatctccaagtagaagaatatctcgaggaggaaggcatcaagaatgagttctccgcttcctacacaccataac

SEQ ID NO: 73039 - DNA, 412 bp, Zea mays
agcttgaaatatatattcactcagaaagaactcatcctcagacagagaagatggcttgagttgattaaagactatgatttggagatacaatatcaccccggaaaagcaaatgtagtagttgatgctttgagccgtaagggtcaagtgaacaacatcactactcatttaatgtcacaaagaattgtgctgggaaatggaacgactcaaccttggattgctcaataatgtagaggcaacagtgatggaagtcgaatctactttggaagaagagattcgtaaaggacaagagtccgatgagaagattaaggaaattaaaactttgattggtttgggtaaagccccagatttcacggaagatgaacaaggcacaatatggtttaagaagagaatctgtgtaccagatatcgagcac

SEQ ID NO: 73040 - DNA, 379 bp, Zea mays
  unsure (1)..(379): unsure at all n locations
agtgttatggtagcatgcactaccaaacatgctatggtggtcatatgtgggggttgtgccgtacagggcgaagtatggagtatggtgactcaccgccttggatggaagacagttcagaatgtgggtggcggtgtgcanggcctctgcccagtatgtggtatggagagacgcctgcaagagaaggcagcagatcatattggtggtggtccgaatcatgcgttctgcctggccgttttgggcagaggtgttagggcatgagagacgcaactggacgccatgagtgataaagaaagagtgggacgcgtgattgtctaactcgcggtcgntgtcagactgtagggcatggatcgagcggtgaaactatgtggagacccacgcg

SEQ ID NO: 73041 - DNA, 401 bp, Zea mays
agcttctcataaatgaacgtaaatggaaattttcttaatgttattgggattcagatgggtcaaattaaggcgatagaaatcaaggagaccgcggaataagggagaaatatgaagagcgagaccgcagataagaaaaggaacataaatcacggattcgtgggtatcctctgttggaacagtgaccccatggcaaatccgccaagaacagagcttcttctgaggaaggaccccgatggacacgagatggagaaggtcgggctcataaacaacagacatatggttacctgcgaaaggcaactggttgttggggtcgataaggggaatcaccgcagcggatgaactcgaggcctttcgcttgggcgccatctcatctccaacggtgaacagagtgggagcctaat

SEQ ID NO: 73042 - DNA, 412 bp, Zea mays
  unsure (1)..(412): unsure at all n locations
cttgcagagctagattntcaatatatatcttttctaccgtgttcttgagcatatctatatttatttctaattgagcaatatatgatgaatgattaatagctttaatttgctcaattgaaatgtcttcatacctttggaccaaatcatcatgagagcactctatcttctcatgctctttggtcaaactctccaaatctttgattttttcgatgaggatatcttcttgcttatgaagcatttccttttgttcttccgctcttttcatgagtttgagcaagctcatccggttcttcttacttagttgagcgaagaatttttgaagatcatcctcatcttcactatcactttcatgctcctgctcatcctcactttcgctgtcactgtcactctcattagcaacaaagcacatatg

SEQ ID NO: 73043 - DNA, 412 bp, Zea mays
agcttcctaggcccagctcccaccaccaccacggctaccacctactttgacccgaagcgagcagccagaagggcaccaccacactcaacaacaacacgattttcgggaggagtccgaagctcgcacagtcaatagtactatgcctaaatccaagcacatctactaaataatatcctaccctttgtgtatctttatcttttctgtcattctatttttcttatatgaaaaagcaagtcttgaagaactgaattctgatttcatgtaataatagtgcttgtattattaagtgaaatacttcctcttaacaaacttctgaagccatatgagacgttcctaagggagcggagtaagtttcgaagctacataagacgttcctaagggagcgcagagtaagttccatagctacaaaagc

SEQ ID NO: 73044 - DNA, 437 bp, Zea mays
  unsure (1)..(437): unsure at all n locations
agtccatgttgatcattcctaggtttaacttctccattttctcacataatgtgaagntaggggtcttcactgtaagacaatggcaggaagccttgcgactcagcgcatctgccaacacattggcctttcctgggtgataatggatttctaaatcgtaatccttaatcagctcaagccatcttccctgcctcatgttcagttctgactgggtaaaaatatacttcagacttttatgatctgtatataaatggcagatatttcccagtagataatgatgccatatcttgagggcatgaacaaccgcagctaattccaagtcatgagttggatagtgctcctcatgccggcgtaactgtcttgaagcatatgctatgactcggcccttctgcattatgacacaaccaagcccactgcctgatgcgtcacaatacacatca

SEQ ID NO: 73045 - DNA, 359 bp, Zea mays
  unsure (1)..(359): unsure at all n locations
agcttgtacccttgctttcctttataccgattgtttatttgtaattngntatcgtgaatatgggcatgcacataaaaataaatcgatcataatgcctaagtatttatgttgtttttcgtatgttgcaaaagaaatcctcctcatcatttattttgctcacgaaaggttttccttcacaacctctttccggaattcattatttcctaaggaaataatgtctccaaggaccaaggactttaacatttaacactttttatgttgccttgttcttaactcttatcataatagaacaagttcccattagagacatatctgacccaagccaatctactaagagccagcctagactaaagctgggc

SEQ ID NO: 73046 - DNA, 224 bp, Zea mays
atctgaaactctagcccacggatgctttggcaaacagagacatctgaatctgcctgattattttcttacgccctacaacaatcattaggtgtcttactttatatggtttctgggtattaccatttctacgtcgcatgctacgaatatttttgccccaagtagaccgtgtgggactccagacgacctaaaatctcttattgataaaacgcatgagcatggcttgc

SEQ ID NO: 73047 - DNA, 391 bp, Zea mays
agcttcacatatctggactaacatggcggctccactcttcgctatcgaccaatagaaaccacatctgaaaaccttcccaaccagagttctggacgcggcatgtactccacattatccagcatggatttcctctaacagtagcttcccaacggccgaatgaatgcacttcatgaggactcctgtctcacctcttctgtacagaacgttccctatgagggtgtagtgagctgattgcctatcaatgcgttccacagccgtcttgacatccggctcctcttcattgtttatgtacctagtgataggctctctccagtcattgtggtccaactctggttggctcatggcgaggcactcttccgtgcaatctaagggaatactcgggtgtgattct

SEQ ID NO: 73048 - DNA, 414 bp, Zea mays
tgatgctaatagcgaatgcccactctgtctgaacagtactgtgatactgttcacctatttatatgcatgggacgcagcccatgtaaaattacaccaatgccctttacatatgctaataactctatagaaattcttcgaggtctaatgtgtcttttcatctttaagtcggttcccctttttgctgtcatgccgaagctttccttcgcacagcttcgtgatttccttgttcttcgtcataatcgccttttgtctcgctcaggcttcgacctgaccatgctctgtatgctcatgatccgaatccgaagatacctgttcacatatttcacttggaaaacattgacaatatatgtttttgaggaccttcggaagccgaatgcctcccacagtaaccccttgcaatataatttgtagagt

SEQ ID NO: 73049 - DNA, 406 bp, Zea mays
  unsure (1)..(406): unsure at all n locations
agctttggtttcatccgtgatatgaaggtcctttgtgcttcgaatttgatcccatttgttaccctgaaattgtacttactaatatggacttctggccaggagctctccccaatagttataaatattataccattcattttacaatatttcagatgtgaaccattgtaaatctatagttgcattatttcttgggcaaaggaagtaacttatcataatattagcgacacttacactactagaattcggctctttgccgagtgccaaatgattttgccgagtgtttttcgggtactcggcaaaaaagctctttgccgagtgccgtacaaaaaaccctcggtaaaatacactcggcaaagaaactctttgccgagtgttntatttttgacactcggcaaagagcttcttt

SEQ ID NO: 73050 - DNA, 404 bp, Zea mays
tcggtcatcgcacgcggacagctgaagctgaagctgcttctttcttcaagaccttcggcgcgacgaagcatagtcccaacatcacggatcaaagagacaaatgtacgatccacactagtaaatgatcttagcattaggcgcacgactttgcgatctgtccatcttgttctcccgtcattccacacttggttcaccagggacttgagccaattgtacatctcatgtggcccttcccattttcatggcgaacctcccaagctcaccttctatgagttccatcttggtgatcttattcatggttttgccctcatgttcaatccttagtgtgtcctagatttcttttggcatttcaagccattaacttagtcatagttgtgccctcatggtcaatcttaaacaaaaag

SEQ ID NO: 73051 - DNA, 409 bp, Zea mays
agactgtattgtctctgccactcgtcactatgaagtcagccccctttaactcatttctggatccgccaccgcaaaaaaaccgacctatattttcaccactagccagttgtacctttcttccaggtagggatgaaaacgggacggatacagccggatacagggtcgtcccgtatcctaccctaatgtatttctctcggatacgggaccggatacgagaccggatacgggtagttaagattcgggacggatacaggacgagaccggataataatccggacgggtaagaaaaggataacagatactactcgggtaggtaccggataattgtcgggtagttcatccgatgatattaattgtccaaccatccataagttaagcaatacataatcatatatatgatagatcagat

SEQ ID NO: 73052 - DNA, 205 bp, Zea mays
  unsure (1)..(205): unsure at all n locations
tgagagtaagaagtgagaaagaaaagaatagccagccattctnacaagagcaacaagaaacacaagtgatcctctcacaagtcataatgcactagaattgaattgnggactctgatcggatcagtgaatntgatttgtgtcttggagtgttgtactttgctcttctattgaatggagagtgatgaatgcttggatggttggagtg

SEQ ID NO: 73053 - DNA, 400 bp, Zea mays
agcttcagctccatctatgttatggattgcttttgaatctgtccagtttccttcggcctttctggcagcttcctgacttccatgaatagcaataggcccttgatccgaaggtatcttcatgcaaagatatgctggatgaagaattgcttcaaaagcattgagagtaccacgaccaatgattgcgttgtaagggtactccatgtcaacaatatcaaacacaacttgttcagtccttgtgttgttgataaatccaaaggttactggcatcgtgatcttgccaagtgctacaatctgccttcctccgaagccacaaaggggatgtgtggcgtcatggatcttatcttcgggctcttgcatctgtctgaaggccttatcaaatataatatctcgtgcactacct

SEQ ID NO: 73054 - DNA, 422 bp, Zea mays
taaagccatggtaagtagcataggcaagtgatattcgatctgactcgagcctagctacggatgcataggtttcaccgaaatccaaaccttcgacttgtgaatatcccttggccacaagtcgggctttgttccttgtcaccacaccatgctcatcttgcttgttgcggaagacccacttcgttcctacaacattttggttaggacatggaactaaatgccatacctcattcctcgtgaagttgttgagttcctcttgcatcgccaacacccaatccaaatctcttaatgcatcttccaccctgtatggctcaatagaagacacaaaagagtaatgttcacaaaaatgtgcgacacgagatcaagtggttacccccttatgaatatcgccgaggatggaggtcatggggtgatctctttgtatc

SEQ ID NO: 73055 - DNA, 413 bp, Zea mays
agcttctccagaatcttgaggtaaactgtgaacctgtatcagacactatcttctttggtactccatgtaaacacacaatccgagccatatacaactctgccatctatgagcctttataagtagtcttgacaggaatgaagtgggctactttggtcagtctatccacaatcacccatatggaatcatatcccttcggggtgcgaggcaatccaataatgaaatccataccaatctcttcccacttccactcgggtatctttagtggatacagtagtctagctgacctctagtgttcagtcttaactctttgacacacatcgcacatagccacatgtgcatccacatctctcttcaatccataccaccagtatttctgcttcaaatcctgatacatcttagtgctaccaggatga

SEQ ID NO: 73056 - DNA, 401 bp, Zea mays
gattcttcatcccaacgcgggctagtcggtgatgccagagccaacccatgttagtcttagcaattaagcaagtgtcgagttcagctctattaaaatcaactaagtatatctgaccctctaacacttccttaaatgctactgaatcatcacttcttctaaagacagtaacacctaaatcggttaaaagacagttgtaacccattttgcataattgagacacagaaaacatgttatagtctgaagaatctacgagaaaaacattggaaatagaatggtcaggtgatatagcaattttacccaatcctttgaccaaaccttggtttcgatccccgaatgtgatagctctttggggatcttgatttttctcatacgaggagaacatacttttctcccctgtcatg

SEQ ID NO: 73057 - DNA, 406 bp, Zea mays
agcttctaccatgatgtgattgtccctggccatgaggaagagtaccatgtctgggccacacttcggactgccatgacgaaggacttcgccatgactatggtattgcccccatattaagatatggttgcttcgtagctcatcagaaactgcttcggatctgagtgcccatcatacatggggagctaaggtggcttgtatgaagggggccatggggtagcctgcagttctgctgacagaggagaagcatcatcaaaggaaaagtttccatgatggaaatcgtcataccaatcatcatcattgtaggaaatgtcctgatgaagctctctttatggaggtcttcagtcctggtcatcttgagtgagatgacgtatctcttcggcagcctcatcgatcttcttctgtagat

SEQ ID NO: 73058 - DNA, 390 bp, Zea mays
  unsure (1)..(390): unsure at all n locations
tgagcaagtctcacagcttcaccaggaagctaactgaaggcttggatcgaacggaggaggacggaagaggggctggccacggtggttgctctcgggcggcactggcgggtcgcggagaggtcgccggggctaatggctggctngggcaagtcatgcgaggtacggaggatgcaacaaggaatgcagccaagcactggggcgggctttatagccgcggcgcgggcgtggtcacaggcggccgcgggcgcgcgggggttctcgcacgggcgtgctctgagcgcgcccccggatgtcagctcgcgtcgaacacgtggatgcttgcttctgccatggttcaacgggccgatatagcgccatagcgtgcgtatctttggcaaatcactgtgtacg

SEQ ID NO: 73059 - DNA, 343 bp, Zea mays
cgatcaccaagacacaagtaggagatcttccgcatgacaggggaagaaggaaaccggcgttcatatgacacaccaaaacataccgacgaatcgatacgcacggatttagctgctccacgtggacgcgcattaggccgatttctatgggctgctacccgagcctatatattgtaagcaattgtggaggactgggcacgctgacttggcgtatacttttgggtcgagcctgttttctccctccataccaaagagggactcttgatactgactactgatgactccggtttgatgatcggaaagatattaagcgacaatgggacagaagtcatgaacctccctatac

SEQ ID NO: 73060 - DNA, 410 bp, Zea mays
agcttggcgacggtcgcggaggtgagagttgcgccattctcgatgcattctttcattagggctctcccccatctctgaagcttcgtcccgagagacggttttagtctgggtcccgctctccggcttcatggtgtcgtcgcatgtttcgacgcctgcatctctcttgtcgtgtgtcgcactggggaggctcttcccccagcacggtgggttcgtcgtcagagatgggtgatgactctagtctcccctgaatgaagaggatgtctaggaagaaaggagtaggtgcagaggtgtgcttcttctcgtcctcctttgagggcggaggaatcgaggtggtcgtccgctgccgttttctgccccggttcggaatgttcaccttcttctatcgggtgatctgtgtccactccttagtg

SEQ ID NO: 73061 - DNA, 421 bp, Zea mays
  unsure (1)..(421): unsure at all n locations
gacctttaaactcagctccttgaaaggtntctgtcaaaacattcctcgaggagaaaatgaacatgctgatttgctagccaagtcagcagcacaggggctgcctttaccttcggaagtattttttgaaacaataaaagcaccttcagtcgaacttcttgaaatagcagtcctcaatatatctcctgttcatagtgaagattggagaactgagatcatttctttccttcatggtaatttcctttcagatgacgaagcttataacaagagaatagaggcaagagctcgaccatatgttataatagaaggggagttgtacaagcatggagtctgttctccactactcaaatgtttatccagagccgaaggtatagaattgatgaaggaaatacatgcacgcctgtgtggatctcacattggatct

SEQ ID NO: 73062 - DNA, 384 bp, Zea mays
  unsure (1)..(384): unsure at all n locations
tcccaaatctttcattacgaaagtgctcgatagaagatttttaacttcctcaatcgcagggagataaaatntttatattaagagggcancaacanaaaggcacaacataacagactcacccccaccataccgagaanacacacatgngncagaggcangaacaacaaagccagcngggggaagagnnaaaacaaacttttcatgccattgcttaggtgcttgttttaggccatacaatgattttatcaacctgcacaccttgttctcttgaccatccgcgatgaacccttctggctgatccatatagatctcctcatccaactctccataaaggaaagctgtcctaacatccatatgatgaactataagaccataagaggccgc

SEQ ID NO: 73063 - DNA, 401 bp, Zea mays
  unsure (1)..(401): unsure at all n locations
atgaatcccttattcagtagatcttgttattgaattntcaattccgccaactcattaaggggcatacggtatgatcttcgggagatgggagtcgtaccgggctttagctcaattacgaattctacatccctttcagggggcagtccaggcaaatcttccagaaatacatctggaaactcacatactaccagaatgttcttaatctccggtacaatggcttcaaatattctaccacaagctttggctggattggttacggngagagacaaaagaatctcttcttgattatagctcaacctgacggttctgagttcaatgttgagaatagccttgtgttgggttaaccaaatcatacccaaaattacatctatatcctggcctttcagaaacaatcatgtagc

SEQ ID NO: 73064 - DNA, 291 bp, Zea mays
cgcaccaagaacgagcagcacttaaggaaaagaaagtgttcttctcataaacaagaccgcaccgccgcagaacagggaaaacgcccacagaaggatacaccccgacacgaagcgccaacgaccctgcgcccctagccattacatacagaaccggcggaacaaaaaaagaccaacccataccggcgagcccccagaacacaaaaccaggacaccaccccacggcgaaccacaaagagcagccggggagaaaaagacacaccgcccagcaaacccaagcgagacactgagaga

SEQ ID NO: 73065 - DNA, 395 bp, Zea mays
  unsure (1)..(395): unsure at all n locations
agcttgccattcttcgaaatcctgaaatcatcacatgttttcaatgggggcctcctaagcagcaagcttttgaagaattaacggattatctgataaagcttacaacactatccccaccttcgccaggggctgccacattgctttatgtgttagcttcataaacaaccttaagagctacattggtccagaagatagtaactgaaggtacaaaaagtggatgcatgtttatttcgtctccgaaatattgagtccatccaacagaaattacacagagatggaaaggtcctttatgcactcctgatggcttgaagaaagcttcgacactatttctagtcccacaatatcattataccatcattgcagccactaaaggatattntaagaaatagagaagc

SEQ ID NO: 73066 - DNA, 393 bp, Zea mays
  unsure (1)..(393): unsure at all n locations
ggctgcacccttatgcgactnttgcacggatagtcttcgcgaaagactctcgattttcgcacttgttgtgctagtccggctgcacccttatgcgacttttgcacggatagtcttcgcgaaagacttcgatttttcgcacttgtgctagtccggctgcacccttaagtgagctttgcacggatagtcttcgcgaaagacttcgatttttcgcacttgttgtgctagtccggctgcacccttatgcgactnttgcacggatagtcttcacgaaagacttcgatttttcgcacttgttgtgctagtccggctgcacccttatgcgacttttgcacggatagtcttcgcgaaagacttcgattnttcgcacttgttgtgctagtcccgctgcaccct

SEQ ID NO: 73067 - DNA, 396 bp, Zea mays
  unsure (1)..(396): unsure at all n locations
agcnttccagattgttaaagagtgcattcatatgatttgtgaaactccagttatgtttgttgtactgtggctgttcctgttaacctgacaaaaatgagtgggtctgttcgctggtgggtttcatctaataaatggtcgaattggctcttccaactatggagacttttgtagagggataaaagttcttacttccagcagaatttcataatttttggttcaggagtttgggagatatcgaattttaaagttaaccatactgctgtctaaaacagattcagtcagttatcttgtcagatgttttagaacttgtagatggcagaatttaattatctattgaatactgaagttgtagaggattttgtatagatactcctacagtattttgttgatatcacc

SEQ ID NO: 73068 - DNA, 414 bp, Zea mays
gcttgtgctgcccttctcgagaccgcacaatgtcggtaacggtgtgacaccgcacgactgtgagctccacccacctacgtgtgatgccggctcatctccaaccgcctccaccactacaggaaacacctaaattttcgtgggccaaaaacccacgaaaataagcgtaaaccgacgaaaatagcctaaccgccgaaaataagttcgacgaaaataggcaactatttccgtcggtaccgacgaaaatgacctattttcgtcggcttatacaacgccgacgaaaatagttggtcggctgactatttatgtcgaaaataacccggtctacgaaaattcatgtgtttcctgtagtgcacgtgatccgagcccaccatcatgttcaccaagcgctaccacacctgcacagccaaaccctcg

SEQ ID NO: 73069 - DNA, 454 bp, Zea mays
tttgaacgtacttagcacatgtcgggaaatatggtaaccgtgtaacctaatacctgagtgaagccgggcgcagactttatccctcatgcgacctgagactgggtctcccatgctagctatggtgggtacaagagcggtcactgcacgacagcagccggggtcagtggagcatagtatgccaaggcggagaagcctgtacgcaaatggggaatccatggggacggttgacatgtgtggtgtcggagtaccctgacatgtcatgcgtttaggtataccttgcaaggattaaactcgattcgaatcgtctgcttctcgcagctaatgagactgcttgacccattgtactacattgagtaagaagtaaatgaggttcatgagaaatttgttgatgacaaatgcttgtacatgtttctagaagagcaactagtaagctatgatgtgaatggaaagcaaa

SEQ ID NO: 73070 - DNA, 410 bp, Zea mays
  unsure (1)..(410): unsure at all n locations
caccgccccggaccttaagcaccgagctcagctggccgcaacctcagctaagacacgacggagcctaacaatggtttcggatgtgaaacttaaaaaaaattaatggttccaacatattnaaatagagtaaatattctaattccgaacaaaacaatcatataactctgttaaatgccatatgtaattataatagcaatgaacagtagcaattccagtgactcgaaacatgaaacatagctactcagttccatttcaacattaaacatggcttggagatgaagaaggcagaagttgcacataaacataattgtttatcttaaaatattgctctcaaaatagcgggttactgcactaaacagccctccaacgctaaagggtgatcaaagaacctcgactaacgtgacagtcct

SEQ ID NO: 73071 - DNA, 436 bp, Zea mays
  unsure (1)..(436): unsure at all n locations
actcaagctttaagggagaacatgtgttaggactaaccgatgtctattntgagaaagatagaccttgtgtagcgtgccatgcaaggaagcaggtgggaactactcatccaagatagaacgtaatgacaatgtcaagaccattggaactcctccatatggatctcttcaggcccgttgcttatcttaccatcggaggaagtatggtcttataattgctgatgatttttctcacttaacttgggtattctttctgcaggataaatcagaaacccaaagtacattaaagtgcttcctaaggagagcccaaaatgagtttgagctcaaggggaagaaaatcaggagcgataatggatctgagttcaagatattcaagtggaagaatatcttgaggaggaaagcattcaacatgagttctcccgctcctacatgccataac

SEQ ID NO: 73072 - DNA, 407 bp, Zea mays
agcttgatggttagaatgacatcacgcctctttcatatctttcatctcgaaattgctcgatagaagatttttaacttcctcaatcacattgagatttgatccaaagatcaaaatgtcatcaacataaaggcacagcataacagactcacccccaccataccgatagtatacacacgtgtcagattcatttacaacaaagccagctgatgtaagagtattatcaaacttttcatgccattgcttaggtgcttgttttaggccatacaatgattttatcaacctgcacaccttgttctcttgaccatccgcaatgaacccttctggctgatccatatagatctccttatccaactctccatttaggacagctgtcttaacatccatctgatgaatgataacaccataag

SEQ ID NO: 73073 - DNA, 423 bp, Zea mays
  unsure (1)..(423): unsure at all n locations
tataacaagaggatagaggcnagagctcgtccatatgttataatagaaggggagctgtacaagcatggggtctgttctccattactcaaatgtttatccagagccgaaggtatataattgatgaagaaaatacacgcaggcctgtgtggatctcacattggatctaggcctttgctgggaaaagttnttcgtcaaggattttattgaccaaaggcagcttctgatgcagcagaattagtccaaaagtgcgaatgctgtcagaaatgtgcaagagatcaaaaacaacctttgtctctaacccagttaatacaacccactcggccattgcaaaggtggggtcttgattagttatgtccgttaccaccagcacaaaggaagttaagatatgttgtattggcagtggaatatttttcctaatggatc

SEQ ID NO: 73074 - DNA, 409 bp, Zea mays
agcttaccatgccctcggattgaaccagtttttcgtggtttggccggtatactcgccgccgacgaggacacccgcctgcacgcgtggaccgggcgattccggccatctccgacgtcaagccgtacctcgacgtgaccgccagagtctccccgagccgaccccacccttcgccggacctccctcgccgacggttagccgcgccacccttatatttcccgcggttactgtttcagttaggggaaggactgcgggtgagagggagagaacgtcggggggttttgtgaaatgtcagagacacaggggaatagtggcgtgagggtatattcgcgaatgaggatttagtttaaaccctaggaccccggtgtaaactgtttttcaggaaactctttttaaattctattttaaattg

SEQ ID NO: 73075 - DNA, 412 bp, Zea mays
  unsure (1)..(412): unsure at all n locations
tctgttnaacgagacacttgtagcacatggattaaaaagattgctcactgatccaaacttaatatcctaaatggaaacaggttttgtgacatgagtcaagtcacatggttgtagattttttaaagcaaataatgtaaaaaacataaaaaaggcacgctgaaaatagaaaagagtatgaaatgcagacgattcaaacattgttttaaaaccagataatacacaatggtcaattagatagggcatggaccccaacgagacggtcagcctcctcttccaaggttcgtggcgctgtcctctccccagtccccccatttccacgattttgtgcctatttaactgttcgttgtatcatgtgttgctgcatctacctgaatgaaacatcggtttaaaaccagataatacgcaatggtct

SEQ ID NO: 73076 - DNA, 409 bp, Zea mays
agcttatgcctaagaatacttaccaccatatataacgtaccatttgttatatcaattgaaaggtcttactatatgagatggtgtcatctaagtatacttaggcttaaaggcataaattaaattccttttaagttaatgcatatggaggagtgaattaacaatatgcaccaatttacaaatttaagccaaaatgaatttaaccttcatattgacatttctttccatagaatagattattaacaattgaaacaatgccacttgaaaggaactactattgatcaactactaattgaagcaattagttccatacctttgccttgagcaattttaatctttcattagatgaagagtaacctttaatgtttgtgattctaccaattgaaagagcacaatctttacttatgaattt

SEQ ID NO: 73077 - DNA, 377 bp, Zea mays
cttatgtctcacaagcctgtcattggtcttcaattggtccgccattgactttcaattgatatctttgagactacatttagcatcatttacatgtcttctccaatatttgattagactatatttcatatcttatacttcccatgttgctataaatgcatatatttgtgactcatattttgtgcataagggaagttagtctattcaaatcaagtcttgcacctccatttctcacatgttttttcctaagtagaagatctctatccgggggactatttcttcgtctataaagggggagaagtttcttccaaaaagggaacactcatttatggggagtagataattttctgcttcaatcgggttcattgataaatctttta

SEQ ID NO: 73078 - DNA, 392 bp, Zea mays
cttcatccccacatgtgctaagcggcgatgccacagccagcccatgctagtcttagcaattaagcatgcatctagactgtacttctcttttgcaaaatcaactaagtaaagtttgtcgtctaatacacccttaaaagctagtgaatcatcacttcttctaaagacagacacatctacatttgtgaatagacaattatatcccatattgcataattgactaacagataacaaattatatccaagagactcaactaaaaacacattagatatagagtgctcggatgatatagcaattttacctaacccttttaccttgccttgattcccatcaccgaatattattgaatcttgggaatccttgtttttgacgtaggaggagaacatcttcttct

SEQ ID NO: 73079 - DNA, 277 bp, Zea mays
  unsure (1)..(277): unsure at all n locations
taagcctgatgatactattgaaaggtacaaggcgaggcttgcaattaaaggctattcacagaaggaaggtgaggatntctttgatacttattcacccgtggctcgattgaccataatttgtgtgctactttcgctggttgcctctcatgatcttctcatccatcaaatgtgtcggtaccctgaaacaggggtacccctttctacagcatgaagacgcggtgcccacacgactatctctagccacgtggtgaacagcacccgactccaccacgtggat

SEQ ID NO: 73080 - DNA, 419 bp, Zea mays
  unsure (1)..(419): unsure at all n locations
acctgcggcatgcaagctttaactctcgcgagacctttttccatttctttctaaccgtagtgagttcattatcgtatgtgatattctatgcatatttactttattcgttctcttgtatggtgtactatttgtttcctaatttgaatggatggatgtatgtatgcttgcaatcgcatagaaaacgatccggttgaagagcccgaagaactctcaggagaagccccagagcagcaatcagttggtggaggcaagtgtcccttgacctatctttgtcctattcattctttaattcacctcccgctctacacatgtatacctaaggattgactagcttttgttatccatatccttgtttacctatttgggttggaatattattgtntagctctaagctattgctcaaactctaatcaatgaac

SEQ ID NO: 73081 - DNA, 385 bp, Zea mays
atcaacccacgaagttgttctacctcttctgtggcgaggacaagggccacacaacaaggacatgctatgtaacaatccagaagcaaaaggaaattgttgaagccgaggtgcggcaatatcaaccgaagcaaggcctccatactgcttcgtgctactctccatacatcccagaatatgtaggcaaccaacagcctatggcttctacagcttcaacaagtcactcccaagcctcctgtgctcaattaccaccacctcgagcaatggcgcctgccccaaaccatgatcagcagccagaaaggcaccttcagcctcaacaacaatgtgaccttctggagcagtctgaagctcgcacaattaataacactgtgcccgaattcaggcacat

SEQ ID NO: 73082 - DNA, 407 bp, Zea mays
  unsure (1)..(407): unsure at all n locations
agcttgttngatntgctggggaggagataactccggagccgtaggaggacgaagttatcgtctttaagagctcttcagagtagggcttcggtttcccctatatgacatgataggggaggttctaaagaactttgaaatataccttcattagctgacccccaacgctattgttagacttaacgtcttcatatgggctcttcgaagccaaggaatggatgctaacgccgaagctttttatcgagtgcacgagctacactactagacgaaggctagaacaaatggccttcataagaactttggctgttataactttgcatatcggaaggatacgaaggccccgtttattggctatcgcaccaagtggccaaccgggtggactaatgaatggttttatatgaaagttgatg

SEQ ID NO: 73083 - DNA, 462 bp, Zea mays
  unsure (1)..(462): unsure at all n locations
atattgtggccttggctactgactccctctatcgtcattntgagtagagttatgaattgacctgacgtgcctcgggtgaaatcttcctccgaagcccctggtcatttcagagaacctgaatgcttcctcccttctttggcgaaagtcattgtcagctcgaatataatcgtccatcttctggagcagcttctccaaagtctgtggtggcttcctggcaaagtattgcgctgaaggtcccggccgaagtcccttaatcatggcctcaatgacaatttcattgggcactgttggcgcctgtgccctcagacgcagaaaccttcggacatacgcctgaaggtattcttcgtggtcctgngtacactggaatagagcctgagcggtgactggctntgtctgaaatcctcggaagctggttatcaacatatccttcagcttttgccatgaagtaattgtccctggtcg

SEQ ID NO: 73084 - DNA, 397 bp, Zea mays
  unsure (1)..(397): unsure at all n locations
tttcttcactttccgtctatggctttgcttggcattgagcttcgatatagctggtgctttcctggtcttggattaaacctcagctctcctaattccgtctataggtggttcaatcttataagtntagcttaagtacatcgaatcaatcctgccccaggcgtacctgagacaaaccctttctcacccgagaattgcatttccgcttcagcttccggcgcatccaactttttctggatctaggcaaggatcctcagtcctatagaaagaaaagaatctaagttcattagattatgcttccttgcccgtgtggaacatgtgtgagcattatgtttttccaacaagtgatccgactggaagaagtgttatatgaggacttcgagatcaaataaagaatctg

SEQ ID NO: 73085 - DNA, 455 bp, Zea mays
  unsure (1)..(455): unsure at all n locations
cgtcgacaaattcttagaccccgttgtccagttttgaacgatgggaagtttaaatatctttcccacattagcgatntgagcaacctacagtgaaagctttctttgccccgccaaaggaaagggcatntgtcatccttggtcttcgttcaggcaagtctaatcacacaagtgagatagaaacactgaattcggagtatcaactatattcatttaaatggctgggaaagaaatcaactaattggttggtagcccgcttggtactaagaggttccttgcccttcttccatttggtaaagtgatatttttatgatttgctggcacggaagtatgtttgtaggtcaaagttggaattagaatcggcgaactcggtcaagtaactttcatagctttcacatatttgtgagccctatgggtagatagaagaaaggacccgacatcatccaccttacgttgag

SEQ ID NO: 73086 - DNA, 410 bp, Zea mays
agcttgtgaagattcttcatcccaacatgagctattcggcggtgccagagccaacccatgttagtcttagcaattaagcatgtgtcgagctcagctctatcaaaatctactaagtatagctgaccctctaacacacccttaaatgctattgaatcatcacttcttctaaagacagagacacctacatcagtaaaaagacagttgtagcccatttgacataattgagaaacagaaagcaaattgtaatctaaagagtctacaagaaaaacattggaaatagaatggtcaggagatatatcaattttacccaatcctttgaccaaaccttgatttccatccccgaatgtgatagctcgctggggatcttggtttttctcatatgaggagaacatgcttttctcccctgtcat

SEQ ID NO: 73087 - DNA, 431 bp, Zea mays
  unsure (1)..(431): unsure at all n locations
ngatgtaggtattcatggtacatacttgtcggggaccatatttaggggtaccctcaaagctcctaattctcagctggtaacccccatcagcacaaagctgcaaaggcctgatgggtgcgactaagccagggatcggtccattcgagggactcgatcacgcctagcccgagcccagcctcgggcaagggcagccgaccccggaggatctccgtctcgcccgaggccccctctagcgacgaacatacttctggctcgcccgaggcccagtcttcgccaagaagcaaccctggccaaatcgccacgccaaccgaccaaatcgcaagggcatntaatgcaaaggtggcctgacacctttatcctaacacgcgtcctccagtcgacagagccgaagtgaccgcagtcacttcgccgctccactgaccggnctgaca

SEQ ID NO: 73088 - DNA, 395 bp, Zea mays
agcttagaatgtttatgtatatatcttatggaaaggcttcacccttccaattattgtaataagttatgcacttcaagtactatcaggacttgtaataaatacatcttattctacaatgtaaaacttgagttctggaatgtaaaatgtactttgtaaaagtcttccgctctatctccaatgtgtgtgtatcaaatgtgattactgtaatatacctgttatgtgggaaatccttgggatgatgagctccaaatggcgaactcgatagccttgttaagttacccggtacacgtgcacagccatctgatgccagttaggcaaggattgatgcatgtgtgcctgataatttgggagggctgtcacagcgtggtatcggagcgatcctcattagcaagata

SEQ ID NO: 73089 - DNA, 472 bp, Zea mays
  unsure (1)..(472): unsure at all n locations
actcagctataggttctccgaataactangggcttcggagggagagtccaccctaggcatgtcagatcaattcatttcactcagaatgacgacaggggaagtcagcaacagaggccacaatattcctcccaggcttcggggcagcaacagagctatcctcggcccccatctccaaggggcagaggcgccaggggcttcggaggaaggtttgcggatcagcccaggaaaatttattgcctattctgcggtgaggacaagggccataccaccaggatgtgccatgtcaccatccagaaacaaanagagatagcagaagatgcagcccaacagagccaaccgaagcaagttatgcatactgcttcgtaccactcaccgtacattccagagtatgtgggtaaccattctgcagcttctgttgcttcggcaagccaatctcaagcatcttggcacagcttcaccctcccacaataca

SEQ ID NO: 73090 - DNA, 409 bp, Zea mays
  unsure (1)..(409): unsure at all n locations
agcttgtgacatggtttaatgatatacacacttatgcagntggattgcataatgagggagagagatgggctccaaaacctaagacttttctagagaaggcaaaggaaagggcgaacacacacactgttgattgttttgacttatagtcagggacatatgacgcattccttcaagctggtactacttccaacgtcgagtcacaagagtctatgaagcatgtggttgtccttaatgacttgtcatgtacctgtggggcaccgaggcagtaccattttccatgttctcatcttatcgcagctgcctgagcttgcaactttgacttagagaggaagataccccaagagtttactattgacaagcttgtgttgacttggagtccaagatttattccttaccatgacccgagtga

SEQ ID NO: 73091 - DNA, 316 bp, Zea mays
  unsure (1)..(316): unsure at all n locations
agaatatcttctagctcttgacgagcttcgctttgctctctcgctcttattagaaggttgagcatgaacgccttatcttctttacttaagcgagcgtagagatgccagaagctgctttcttcctcctcatcctcatttgggcttcctctatcattttcgttagccacacaacatatgtgggaatcgaaatgggaagacaaaccttctggagaggaggattcatcggttgggctccatcgttcattntcttattgtttcttcaaaggggtaggttcacaaataccaaaggaagtagaggcgcacaataaactatcat

SEQ ID NO: 73092 - DNA, 410 bp, Zea mays
agcttgcacatgatccagatgtgcaaaaattatcaattgtgaagacacaaagccaaatatcataaattacaggtgtaaaatattcacactgaagaacttggtaacagaggatggaagacaggagaccaaccgaagcaagaatcaagatagagaataagttgagatgttgggagtgagagagaagccaacgcttggttcgattaagggatgatgctactggcccatcttttttggaagtagctgcatcaagctcctgaacagcttttgactcgcttcctgataagcgagctgcaacatgacacaacacccatttacgttaggcagcttaaaccaattaaaagaacataaataaaatgccacaactagccttccaattcaccccaagaactcatggtaacatttctaaaaat

SEQ ID NO: 73093 - DNA, 467 bp, Zea mays
  unsure (1)..(467): unsure at all n locations
tattcgcccttctcttgcanattcttactaattgaacctgtgaagaaatttactttcctcgtggcaaacgacaaaaccattacatgaagtgtaaaaagtgttctttattacatgaaaaatgaaacttgaatagagaagacttctatcaaagtaggatacttgtcaatagatgtgctttgactctggcacagtgctattaactgtgcgagcttcggactgttctctgaaatcccgttgattttgagtatattggcccccttctggctgctggccttgttgtancggtggtggaggcggaggttgttgccaagaagcctgaggctgactcgccgaagcaacagaagctgcaaggtgattgcctacatattctgngatgntaggcgaatgatacgaaacaatgtgcatgacctgcttcggctgacctgttgcgcgcagctcagtatctcttttgcttctgatggaacatg

SEQ ID NO: 73094 - DNA, 411 bp, Zea mays
agcttgtgatttatccaatttaataataagcaccatctctcaacatagattttctatggataaactcaacacaagagatgacattagtagcacaagcactagtttcttatttagcaaccctttatatgtgaaaggcaaacaagttgctaaaatagagaaacctcataatatggactaaatttcccttgagccctcatgcacaatatattttgaatgacatggataatatgcaaggttgttcaatgaagtttaaagggctgacttaatccatattatggtgagtgtctaatatggaagaataaaatccaaattaactagatagaaaatatgtcacgtaattttggattgttgaccatatgataatattaattaatcttccaattggacctttatttcataatcaacaactgg

SEQ ID NO: 73095 - DNA, 444 bp, Zea mays
tgcaagaaaatggatcaaagggctgtcatacgtgggttgtagcctaagaactcaactcagtcgagctctgcatggaaataccccattcttcatggtttataggtcagaggtagtgctgcccgctgacctaatatttggggcgtcgaggttgactttcgaaagcatagctgaaccagaagctaccaggctagaagatattgatgtgttggaggaagaactattgaacacagtaattcagtcggctaggtaccagcagaccatgaggcgctatcatgataaagtcgtgcgacactggtcctttgcagtgggagacttggtccttcgccgaattctaactatggaaggacggcacaagctgtcaccactatgggaaggaccattcatcgtatcagaggtcactcggtcaggatcataccggcttactcaaatggatggcacggaagt

SEQ ID NO: 73096 - DNA, 406 bp, Zea mays
  unsure (1)..(406): unsure at all n locations
agcttcactgcgttggagcctccaaaagcgctgactagttntggagagctgccaaccctcgagactgtgcaagctaacaaggacatggcgatgaagctggcgaagatgatgcagctgagaagcgtatcgatcgacaacataagctctgccctttgcggggagctgtttgcttccgtctcaaagctgcagatccttaccagcctgcttctctctgcaacagatgagcacgagccgctcagtttccagaacctcgtgccgaagtcaagctacctaagcaagctgactgtgagaggaagctggttggggaagacactggattacccggtttttaaagagcatgggcggaatctcgcgtatctgtcgcttagctggtgtctcgttttgagaaatccactccagtttcttg

SEQ ID NO: 73097 - DNA, 404 bp, Zea mays
  unsure (1)..(404): unsure at all n locations
tcaagactaacatatgctgtcatcattacttgacacatccataaagttctagaatcttggaatcagtccctgaattctcacttatgctcacacaatcaaaagctcctctaaattcaaaatatatctcacttagactcaaggcacatgaagggaagaatatatgatgctcttaaggttttctaaaaattaggtagacctcaaagcatcaataaaccctcaaagtgggaggggttgagtacaaaaactcaacacccaaggaaaaattgttgggggtgaaattagtcaaaaccgacatagttagtttgtttcaaaaactagctattgctactcacacctatgcaaaactaccttgatgaggtttcctaagttccgttttctcttgaacatgtangagagcaacacat

SEQ ID NO: 73098 - DNA, 383 bp, Zea mays
  unsure (1)..(383): unsure at all n locations
agcttgaagtatatattcacccagtcagaattgaatatgagacaaaggcgatggctcgagctgatcaaggattatgaattanaaatccattatcacccaggcaaagcaaatgtagtggcagatgcactcagtcgcaaggcttcctgccattgtctaacagggaggacttctgacattacattatgccaggagatggagaaattaaacctgggaatgattcagcatgggacttcaaatcatttgaagctagagtcagtcatcttgcaaaggataattgacgcacagaaagatgatgagggtatgaaacacatatgtgagaagataagggctggaacagccaaatgtttcatagaagacgatcaaggtgtggtatggttcaacaa

SEQ ID NO: 73099 - DNA, 349 bp, Zea mays
  unsure (1)..(349): unsure at all n locations
tggagaagcaaanatccttgaagtcttggttgtcaaactgcttgtcgttgtcaactgttagttcgaatggtactctgaagcggaaaataatgttttgccaaaagaatttctatgcagtccttgatgttattgtggaaacagccctcgcctcgatccatgtggtaaagtactcgacagcgacaaaagtgaacttgacgatcccctgagccgtgggtaggggcccgactatgttcacgccccagcgctggagaggccatgtgtgggcgattagctttgtgaattgcgaggggctgcttgatcgatgagaaaacttctggcatgcttcgcatgaccttgtgacccgatttgc

SEQ ID NO: 73100 - DNA, 410 bp, Zea mays
agcttcgacatccgatgtgtgcaactgctgattgatgtatttcactctgtcggagctagctcttcgaaatttacaccttcagctgaaaacttgccaagaacattagaacacattgaaggcgaagttgatgcccttgatgaagttattggtgggcacgctgacttctgcgccctggtagcttctcggggcacaactgctgcttttttgaaggctggctgcacacatggaaacactgtgaacagaccaaacttcaacctatcagcttcagatttgttagatatcccaagcttagccagaagcatcggaaatagatttatgacccagatctgggtaagtggcgggcggaaaatggcaggcgacgaaactcgaagccatcttaagccggtataaaacttatgtttgttactttt

SEQ ID NO: 73101 - DNA, 445 bp, Zea mays
ctggaatcctggtcacctttatattcattaaactagcacactcaaagaagatgtagggtattatacatcttgtgaccccaacctctataaaatgtctgtgtgctggtaactagggtgcacttatatatcaacgtccctctaacatgtgctccttccataattcataaactttttctttctcggtacttaaggttccttaatgtcataccatgatgacacatagaaagagataaaaaacataaataaataaacataataaaagatataataaagcgtaatggaaataaaaaacatgaaatagaggaaaactaagaagaacatcacataaatactatttgactaatctaactataatacattataatacatctcatgagtactatatgaatataaaaaataattataaaatatcctatttttactatatgaaagtcacatatataga

SEQ ID NO: 73102 - DNA, 348 bp, Zea mays
tgtggcctaaggatataccctaaaggagggtgaaaatttctttgatccctactcaccagtggcttagttgactactatttgcacaataataaccgcggcactctcttatggtcttatcattcattagatggatgataagacaacttttctacatggatatgttgatgatgagatctatatggatcatccagaacggttcattgcggatggtcaacagaacaaggtgcgcaggttgataaaatcattgtatggtctaatacaatcacctaagcaatgacatgaaaagtttgattattctcttacagcagctggatttgttaaaatgaatctgacacgtgcgtatactat

SEQ ID NO: 73103 - DNA, 429 bp, Zea mays
tgtactctggtattgtgataacttctattcgaactctgttctatttgaagtaaggaatgtggttactagcctcctatgactagtaattgtatcacatttgagtcccataggatcaggacgcttcatgtggtatcagagccatatgactggccatatatcgcagccccgaccttaaaagtttgccttaaaagaaaatatctcttacctctaagaaaaatcttctctcctttcccccgatattaacagacccttcttttcttctaccagatggaaggctccttggtcattaggacatcctactgctcagaggtggaaggattccctcacctgttgcggagttgcgcgcttcgcatgggaatccgcaagagccggagtacgtctggaaagatatcacgagaatataaccgagaagtgctctatggaagtcta

SEQ ID NO: 73104 - DNA, 403 bp, Zea mays
  unsure (1)..(403): unsure at all n locations
agcttttgaggaaantttaagtgatcatggggatatctgtgcgttctctggtgtgagaggagtttcagctatcttggagaaggcaggttgcaatcatgttaaaatcttggctcaggccgaagctgccttctccgcggatgacacaaaggatccctcggccgaagcaagtttattgtgcggcaaatttttcactgatatttgggaaaattctggccgagaaatggcccatgaaataataaagaagagcgaaaaagatattcatgactctcgagaagcagtgaaaaaagctgaaaagctgcagaactcgagagacggataggtatcgtttaatggcttttagcttcggtgtttggtttcgtggcctccaactaaatgatgttttctaccgcagctgattacctcc

SEQ ID NO: 73105 - DNA, 450 bp, Zea mays
attcggacacttaaaactcaagctttaagggagaacacgtgatatgtttgactaacgtgcatttcgaaaagatagaccttgtgcagcttgtcaagcaggtaaacaagtgggaggagcgcatcacggcaagaatgtgatgaccacttcaagacccctggagctgctgcatatggacctcttctgacctgtcgcctatctgagcatatgagggagtaagtatgggttagttattggtgatgacttttcccgcttcacttgggtgttctttttgcaggataagtctgaaacccaagggaccctcaagcgcttcctcaggagagctcaaaatgagtttgagctcaaggtgaagaagataaggagcgacaacgggtccgagttcaagaaccttcaagtggaggagttccttgaggaagggatcaagcacgagttctccgctctctacacaccaca

SEQ ID NO: 73106 - DNA, 181 bp, Zea mays
  unsure (1)..(181): unsure at all n locations
aatgtaagaaatctcgatatccctccttgtgttggtgatccctaagaaaatgataccgaatggctatgtgcttagtgcggctatgctcgacnggaatgtcggccatattgattgcactctcattatcacatagcaaagggactttggttaattgtaacccgantcccgcagggtttgctta

SEQ ID NO: 73107 - DNA, 423 bp, Zea mays
  unsure (1)..(423): unsure at all n locations
atgttagtcttagcaattaagcaagtgtcgagttcagctctatcanaatctaccaagtatagctgaccctctaacactcccttaaatgctattgaatcatcacttcttctaataaagacagtgacacctacatcagtaaaaagacagttgtagcccatttgacantaatgcgaaacagaaagcaaatatagtctaaagaatctacaagaaaaacattggaaatggaatggtcaggtgaaatagcaattntacccanacctttaaccaaacctttggttccatccncgaatgtngatagctcgtggggatcttggtntttctcataggaggagaacatcttcttctcccctgtcatatggtttgtgcacccgctatcgatgatcaacttgagcccccgatgataaacctacnaacaatttagtc

SEQ ID NO: 73108 - DNA, 386 bp, Zea mays
  unsure (1)..(386): unsure at all n locations
tatctctagtggttgnttgtctagagacaacnagaaatctangattgtgagcctttgaaagggaaacagggtcaaaccttttcctaaataattttggtggttgaattgcccaacacaaacaattggactaactagnttgctctagattataagttctacaggtgccaaaggttcaacacatatcaatataaagtctaagaaagggttcaaatagaaaggagcaaaatcaatcgaaggctaccctggtctggcgcactggactgtccggntcaccaccggacagtgtccggtgcaccacggagatccactctgaactgctcagcttctagtttttggcgagccactccgctataattcaccggactgtccgatgtagcaccggactg

SEQ ID NO: 73109 - DNA, 109 bp, Zea mays
  unsure (1)..(109): unsure at all n locations
gacaactgcagaaacctatctcggtactcgctgatagacatgggtccctgctttagtgttagaaactactctntcttcactatcatgaagccctctggaacatggtatc

SEQ ID NO: 73110 - DNA, 439 bp, Zea mays
  unsure (1)..(439): unsure at all n locations
aactgagttcaagctagagcatatgtagtgcactcttcaccatcagcccaaatggtgcacgagacacagtgacgatgactcgagcaatgggagcaaaagatctcgtctacttaaacgacgaattatactccacataacatgaaagtgtggatacaccataccctatngatcacgatagtngcagaactcaacggaaggggtagagcccaacaataagttgtggtgagtccccatctacattgaacagaatgctaaagaagctctattaggctaccgtgaggattatnntaaatacgttgttcgagaaaatcaacaaagtggtnggatcgctccatcgctggtatggacaanaacaagaaaaggacccacaaattggctttagaaaagttgagaaaaataataaattagaggagaaagaagccaggggatagagtaagta

SEQ ID NO: 73111 - DNA, 137 bp, Zea mays
taagtgggaggatcacatcacagcaagaatgtgatgaccacctcaagacctctggagctgctgcatatggacctcttcggacccgtcgcttatctaagcatatggggaagtaagtatgggttagtcattgtggatga

SEQ ID NO: 73112 - DNA, 224 bp, Zea mays
  unsure (1)..(224): unsure at all n locations
actattatgtctcacaagtcaacaattggtctacaattggtatctttgagactacattngatatcatttacatgtcttttccaatatttgattaaactacatttcatatcttatacttcccatggtgctaaaaatgcatatgtngtcaaaaatatatttggtacctatgcataagggaagtaagtccaatcaaatcatgtcttggtcctctatttctcacatgc

SEQ ID NO: 73113 - DNA, 500 bp, Zea mays
  unsure (1)..(500): unsure at all n locations
gatctagttatcaaatgagctcagtcactatagtcgattngtagctggtatgtagccctataactntggtacagaaagcttgctcggttactacacantaatgngagtaaataaccctgcanatcactctgtcaggtcggctgatgatcttcgccatggtacagtgacaaaagatctgaggtgccgtgcatctcaccgtcngtgactcgccgccgcgaatcgtgtcgccaccgttcccaattggctcgngaaggaacggatacgccggagtagataacgcatacgtggaccatnttcgagtcagtcgagacctaccggagcaccggacccatgacttgcgcgggtaccatccggacttctactggttttacacgggtacatcctacaactatcggccgaatcgtgcggcgcggcttaataacgggcacggggatgactccaacgtagtatgagctatcacatttgcctctcaatgtacacgaacaagctgcgtatgctat

SEQ ID NO: 73114 - DNA, 397 bp, Zea mays
  unsure (1)..(397): unsure at all n locations
gtctacaagaaggtgctgatggtcgaaggtattgttgntcacatccctacgtctggttactgcaaggagcagatggtgactangggccatcngacatagttcacatgatcgntacctgatcagntacagtctatctatagataacaagatgagcttttgagaccaagagaccaacaataccttagtccaacatttcctgaacctgcttatcaatntcgtcctttttattgggggtgatacctatatggtcttatcctgggtgtgctcccaacaatagaggtgtagcgcgatcaactntatgctgaggtgcganacctgtggcttgcaaatagatgcaatattttctaacatagttngatctttaggaactgcacctcatatggcatcaatatatgta

SEQ ID NO: 73115 - DNA, 86 bp, Zea mays
  unsure (1)..(86): unsure at all n locations
tgtgaatcatacagcatgatggatcaccataagtntattttgaaacatccatccacttgagcatatctttgtcaaacaaacatttg

SEQ ID NO: 73116 - DNA, 441 bp, Zea mays
  unsure (1)..(441): unsure at all n locations
ttcttattctanattttgagattgagtatatgaacgatgtaccatgaagggggaaacaaatgtcaagggtaagggaaaccttatgctttgcaaactagaanacccanagctaaacaaaaccaacaaaaggtaaaacatattcttcctggcacacatggaagttccactgtttggcaccgaagctccatgccatagaacctctatgtttaggtgtagaaccttcacacttaaattgtacctttggaaagagggaangngtatntaattataccccatcctctttntacaacggtcacttgcttcattcanacactctccaactcgaagaaactgaccctcactcctccattgaagatcatccaacctcttctttgtgttcttagtgattccttctcgaaagaatgnngttgggaagtggatagagagcccacaacaatagat

SEQ ID NO: 73117 - DNA, 316 bp, Zea mays
ctcactgcacagaatggctattaagctcgcaatctattcacaaaggaagatacagtccgtcagaagttctcaggtggagcccgctttatctaagccttgttgtggcaggtacacaaaggaaagaagaaagaagtctcagagagggggatccattttccgaatggactccacaaactcacgacttcctcgacagacgcgcacatgcgtacaaggctctttcccacgtggcccaatgcctatacaagacgcaaaaaaagtaactaatctcctatatcacattagtgtagtacttatgtatgagatatatacctttgca

SEQ ID NO: 73118 - DNA, 369 bp, Zea mays
  unsure (1)..(369): unsure at all n locations
ccttgtgagagaattagctagccacccatagttcttcacanatcttttgtagtaacctatgaggccaagaaatcatctaagctcagtgacattctgagagcacctagaggnggggggtgaataggtgatcctgtaaaaacttatcttatagccacaagaacttgttaagagttagcacaatatattgccaagtggctagagaggagttaaaaacacattaaccacaataattctatcacagagatgacacggtggttattccgtggttcgagcaagtacataacttgcctactctacgttgtggccgtccaacggacgagagttgcactcaacttctctcaagagattcaatgatcacattgaatacca

SEQ ID NO: 73119 - DNA, 214 bp, Zea mays
  unsure (1)..(214): unsure at all n locations
aaagtaagaacccttctacaagttaccactgatgtgttcgtattagcttatatatctntaatgtncgagttcattttgtagagtatgttgctgagcaaagctttgataatgcaacaagatgatgaggacaagaagaacanaattattatcaaagatttagaagataaggtcaaagaactcgaagactctttgaanganaaagatgaaatgctac

SEQ ID NO: 73120 - DNA, 464 bp, Zea mays
  unsure (1)..(464): unsure at all n locations
gccacctcaagacctgagatgcatggatcgaaaagcactgtcagtaccaacagctagctatgccctctgacctagctagttacggatcagcgcgtgaagcattcagtatgcaccgtgaatgttgcagcgtaactaaaaatgcatgcattcgtagagtatatatatatacccttgaatggccgctcggccttcaagttcttactggggcagtcggcgcatgtggcgaggccgacgaccaccgaggacgcgtcgctggaggcggcgctggtgacggtgaataccatcagcacggcgtatacgccggagagaaggccccgaagtgcgtctgccgncatggtcggatcggatgttagatggtgactcgatatgagatacgaggaggaatgcatgcctatatagcctcgcattgacaacacagtcgacttcatgctgcctcatgacatgagtgaggcgcacacacacat

SEQ ID NO: 73121 - DNA, 270 bp, Zea mays
  unsure (1)..(270): unsure at all n locations
gtacgtcgccgatccaagcagtcattggaccaagcgctgatcgaggaagaggacgagccactgagagcacctagaggggggtgaataggtgatcctcgtaaacttgaacttaatgccacacannacttggttaagcgttagcacagtattgccaagtggctagagaagagtcttatcgaaacacaataaccacaagagaatcaacacaggtagacacagtggtttatcctgtggttcggccaagtacaacacttgcctacttncacgttg

SEQ ID NO: 73122 - DNA, 480 bp, Zea mays
  unsure (1)..(480): unsure at all n locations
tattatatacagcttcatcccaaggtcgaaggtccctgtgaatgtattatacttggaaaatatgntagtcttgggtttaggaccttcggaagacgaatggtctcaacacccgattaggcccaaattaaaatcgggttntgagttntggtacccgcaagaatcattcggaccggcttaggctaacggtacngtctcggtatttcgggctttgggctcgggttntatgcccagtgctaactcttactcactcttggatttggacttaacctagctcattcacaatactatagtaaaggtggtgctntcaatctacataatatcaagctttcaatcttttccacagagaactatcacangcncnctaantaattntagtagntgggtctctatgcctatgtcatanntaataacangctacacttaccaagatagagctacactagcnagctactacaaaaatactaactattatactacata

SEQ ID NO: 73123 - DNA, 291 bp, Zea mays
  unsure (1)..(291): unsure at all n locations
ccattccatgtntctaatgcactgagggtctgaggccacacttctgtatgtgcctaccgncaagacaccttgagctacacatgtggtttgtattatcttgaaagcgtgattgtgccaatactataaccttaatatgcttgcttaatctatanttnttatgtcatcaagaatgagacaattagataaggatanttngtagctntctgagtattgtctgagtctttaagcgtagtagtaaaagttttgcacaccatngtttatgtatttatgatctgaacaacccgtttatat

SEQ ID NO: 73124 - DNA, 402 bp, Zea mays
  unsure (1)..(402): unsure at all n locations
gcagccccgacaattccaatttctttgccatcaaaaagattacgattaagccacatccagcactgttcaatattatttggaatatgatcagaattgaaacatttagctacgcacccccacactgatctagcagtgtgacaggtaaaaaataaatgattagtcgactcgaaatctggacaaaaactgcaagaaatatcacctgtccaatttctactaatcaacttccttttagtcaacaacacattgttttcaagacaccacatganaactttgattnttggagggattttcccttntcaaatatgagtgaagcaagagacataccagttactatcaatggtaacatatagagttttcacagtaaattctttcttattgccccatttncatttaacatcatca

SEQ ID NO: 73125 - DNA, 397 bp, Zea mays
  unsure (1)..(397): unsure at all n locations
ctctacatcagcaccaagtggtcccatattcctatcactntctcccaagaggatctntatctcaaggattatccncatagagatgtcatgattatctcttgtgtcatananggcttcgttgtgcacaatgtcctagttgacactggaagcgttgcagatatcacatgggcgcctcttatctactntgtagagctaatcatgttctccttggtcatcgntgtcacacttctgctaatcctcatggtgctttgtntccanattcagtttcatcatgagtatcacaactatgaatctcggtgtttgaagggtatgcataaatcacaccatgagtnttatcacattgagaactgngagatcttattgactcgtgctttctcagtattgactgcaacctatt

SEQ ID NO: 73126 - DNA, 359 bp, Zea mays
  unsure (1)..(359): unsure at all n locations
gcataactactattgctcggcttctaaactgagaactatgcttaatgcaacttatgagcactaacgttaaagcatcacatatgcactcaaaagggaagaaaacatcaagcccaaattattttgaaatgccctaggggggcacacannatagagtttgcaaaacacgagtctacacgaatacctctcatacatgtagggctctagccaaagtgaagaanaacttcactacccaatgcatgcagaggactangcgtaactaacttcagaccaggcagcttctcttctggaanggctgggcacaacttcaatctgagaccatctctggatgggtcaagaaaggagctgatgtgatgacatct

SEQ ID NO: 73127 - DNA, 405 bp, Zea mays
  unsure (1)..(405): unsure at all n locations
tatctcttgtatgtgaggtccaagggaagaatagtcctaggtcagaagatatgccgacgccanatctggcttgtcttcctgcccgcttcgcgacaangtgatgccagacatgtcaatgagttaacttggatcaattttccaggggtccttagtggttggacatttggatcaaccagtggtntgtgcattactaatgacacgttgatctttatanggtacagtgactaaagatagaagcttacttctttattaagatgattgggttttaaggcttttgcatgtcttcatatgagatatatgtactacttggcaagtagtatattgcattctatttccctcacagttagaatggtagaggctngtatccctccagatatgcaactggagttgataatttgcaatgcc

SEQ ID NO: 73128 - DNA, 212 bp, Zea mays
atattcactcggctaacacatggttttagaccaatcattatcgacgatgtgtgcaagtggtgttcaccatatatgaagataatcgtttattacgcataagacataatgctatgacccattggggctactctgctttgaatcaaatagtgcgattgcttttaagcacggactattcatttatgacctatacaagactctagtgaggagtctgt

SEQ ID NO: 73129 - DNA, 224 bp, Zea mays
  unsure (1)..(224): unsure at all n locations
gctctcgacccggccgacttcaccgaggcccgagatcgacctctcttgacttggtctacnggatctatgtcngtctatggatntggatccatggacgatgccttgtccatgagacnggananatgaattaaggattaatgtgtggatacctgagtcaagcttttgaacgtactaagcacatgccgggataaatggtaaccagtaaacctagtacctgattgaag

SEQ ID NO: 73130 - DNA, 483 bp, Zea mays
  unsure (1)..(483): unsure at all n locations
gctatctncttagatntccatccatatagagcccgacctaatctaagtatatatgcatcatgggcattngntntagtgcagactagcttggactccgaggtggagatgaagntgagctggacttggctctctcttcttgtgaacgtccaagcttctcctncttgacantttggtatttctcaagtccttgctggtcctctccaaggttcctaatcattaaaacatccatggcaccaagcgtaagctctaaaacacaattgactangntagagcgaacctggagattagctatcatgcacatgctcatgttatcggtccatgccattgttatatgtgagtgatgtcctcgtcactttggctaanaagggcccncaacagtaccccctcatggaatagttatttttccataaagaatttagaccgcggaaatgatatagtcctcgtgtngaanggtctgaaaacacattcccctaagcacgtatt

SEQ ID NO: 73131 - DNA, 325 bp, Zea mays
  unsure (1)..(325): unsure at all n locations
aagcagcagcagcagctgctgctgctcgaaaggccctcacgtctgtacagactntaccaaaagggagtganggtttggatccatngngccttgngtaactatctatatcnatcaagctttgatcagcacatgcattatntaccatttcaggaacatcttgttaagaaaatacactccttgtctagttgtcgtgcgctattctcacctattagtccctcatttaagcataagtgcatctttgttctttcatttattactntccctctacaggagagtcctcagccattcatgtcttcagcatcatgctgtatggctggctagcatc

SEQ ID NO: 73132 - DNA, 375 bp, Zea mays
  unsure (1)..(375): unsure at all n locations
gtcganatcttaatcagctcaagccatcttctctgctcatggttagtctgactggantaagatatatntcagactattatgatctgtatatatatgacatatattccccagcagataatgatgccatatcttgagggcatgaacaactgcagctaattccaagtcatgagttggatagtgctcctcatgctggcgtagntgtcttgaggcataagctatgaactcagtgtggcggaaccgcccgaatattccagcttaagtgcccaagtcgcacccttaagggcagcaacacacttaaacaggaataacccgtctgtccctcggatctagtccgatanagccacttactangatcgaatatcactagctcacacg

SEQ ID NO: 73133 - DNA, 429 bp, Zea mays
  unsure (1)..(429): unsure at all n locations
agatgtgaacacactatcatgaaaagggttcttatatgatgcacaagtaatgtagaagtgacatgaagtgatgtacctttgcgttntaccttttcaaggggtttccagacttgtgttggatatagaattcatttgcaagctcttgntggcatagatgtgacatatgttcaagatatcaaatgaatattgtcactactattgaaagctgaatctttgtacctggagtctagatgtcatgtagcattttcttatcacaacaagaggcaatatgagatatgcacaagtatggattctacagctagtgatcatgtacgagaaatatcaattgagaaccaccattgtactatttgtagatagcagacactatttgatatacactaagtctctcaagttagtaccacattatataatcaatgatcctgtgaagac

SEQ ID NO: 73134 - DNA, 212 bp, Zea mays
  unsure (1)..(212): unsure at all n locations
ttgatccaatggtatcttcatgcatagatatgctggatgaagaattgcttcaaaagcattgagtgtcccacgaccaatgatngcattgtatgtgttgggggccttcggctttcanaggtcctcanaaacatgattngacaatgttntccaagtgaaatatgtgagcaggtatcttcggaatcggatcatgagcatacagagcacagtcagga

SEQ ID NO: 73135 - DNA, 123 bp, Zea mays
attgctgaagggctatgtgcctcacgtagcataatgtgatgtggattcagatggaactatctctcgcctgcaatttgaaatggcttgagcagttacgatagacctgtcaataattgacatgca

SEQ ID NO: 73136 - DNA, 377 bp, Zea mays
  unsure (1)..(377): unsure at all n locations
gtcatcttcaccgtcgataagaaacccacttgcgccattcgcgtgtggtgcacaacgtgtagcatcactttgatttgtgatggctcgtcagcttggctagctggccctgcaccggcgatggcgcttgcaatggtgccctgcaccgncgtactctaccctagcgaggaagggagaatcaggggtgccgtcgatctctgattgagggctanatagaagtgtgatacccctttggtatttggatcgtggctgttgatcggtgcaacggccagatangggacctctaccggtcggcaatatacgcgggcgttggtctgatgagggtctganggctaatgtttaatccgacatgagccgatcatggctagcgatccggtcag

SEQ ID NO: 73137 - DNA, 440 bp, Zea mays
  unsure (1)..(440): unsure at all n locations
agatatgaacatttgtactccagctttcggtgtagacnggacttatcattagatattatgataccgatgcacgntggaacttataatgctgatggtctccctgctcaaccatagaaagaaatgngtagtggaagggaagcattatttatggngacgtctgtcctatanatcggcctttcgagcttccttgatatgttgctttcttgaaacctaggaggtttaataaggggatatctangctaattctttggcatctatcacaaagaaaaatagatactagggagatcttgcagcaagatttgggttggataaatatgcatagataatgctgtacaatgtgttacgtaagagagttgtgacaattagagaatctagacaacggggggatagaacaaatcacttgcagtatagtaaactttacatgactagctacgcacata

SEQ ID NO: 73138 - DNA, 433 bp, Zea mays
  unsure (1)..(433): unsure at all n locations
tatgtgcttacttcacanacataattttggcctcagaacgccaattgcacatacttangcaattcgaaacatttctacaccttagcactttntaggatgcatngtgttaagaatcanaccatgatgctataatacacaaatgcacataatcagagttaaacaccattcataaagtggatatatcacaggagtaacaacctaccactattcatcattaagataccaattcanaactaataccaattaaactaagacanctaattaagacaatcttaaagcaccattaaccacatgactatctattacactatagacaatcttanagcaccattaaccacatgactatctattacactatagaagccanataattcatcgcagcggagacactagtccatatgagcaacattgcaagaaacatgaatatcacact

SEQ ID NO: 73139 - DNA, 475 bp, Zea mays
  unsure (1)..(475): unsure at all n locations
attgtctcaagcctagctacgggggcataggtttcaccaaaatccanaccttcgacttgtgaataccccttggctacgagtcgagctntgntctcttgtcaccacaccatgctcgtcttggttggtgcggaagacccacttggttcctacnaacatttggttaggacgtggaactaaatgtcatacctcgttcctcgtngaagtggtgagctcctcctgcatcgncatcacccaatccgaatcttgaagtgcttcctctaccctgtgtggctcaatagaggaaacanaagagtaatgctcacaaaaatgtgcaacacgagaccgagtagttaccctcttatgaatatcgccgaggatggtgtcgacggggtgaatctcgtggatggcttgatggactcttgngtgtgacngnctttggtcttcatcctnctttgcttcatcattttgcatctccncttgatcattatcgtcatct

SEQ ID NO: 73140 - DNA, 324 bp, Zea mays
  unsure (1)..(324): unsure at all n locations
cttggaccttgatagcactcaataagttcaaggtcatgtatgtatgttttactntatggcatcatttggatccttatgaatggaattcattcataatttagacgcacgttaattaagctaatatggntgtatgtgaaatatatntgtatattactattggccgtatgagagaaatacttatatgctgcaattntggtgtangggagtgaggccaagagtataattgtagagtagaaacgtagcatggtgatccatagaatcaagttttcatctccaccctatgaatttagatagattgtatgtgaacttcgaaagtgtggacta

SEQ ID NO: 73141 - DNA, 369 bp, Zea mays
  unsure (1)..(369): unsure at all n locations
aacctaagctattacccataaggcactctctccaagaggacaatactangaacaataattataatcatcaacattaatcatcatcataaaagtatctagagctactctaatagaaggagctaccaaggctgctcataaccgcgagtatggctgatataccagtttctaacactctgcagaggttacacactttacccagcgagtatgatcccttnccagcctgtgttgtacagacccgatcttcactaccgagatgaatggccagggactcactacgtagccttacaaagattcctagaggcatagctgctcgtagggtctctacttcataacacagacatgtcnccaagaaggtactaacaaagaaca

SEQ ID NO: 73142 - DNA, 343 bp, Zea mays
  unsure (1)..(343): unsure at all n locations
cgagggttcagtagctctgaatcacagagagactaatggagctagaagagaagtacacatcacgtcttattatctanaagacaanaataccttcatctgggtggtgtagattctgtacataaacatgtagcattaatataatntgatatgaagacggctctagacataggtgaaaagcgtctatagagtaagacatctntttagaactctagagctcgcgctatcttcgtagggctctcactaccggaaacagctgctntgccgatggctctagcctaganaatactcgataatcactttgccgagtgtaactctcgacacagaggactcggtgaactataca

SEQ ID NO: 73143 - DNA, 334 bp, Zea mays
  unsure (1)..(334): unsure at all n locations
cgatcacttcgcggccacggacagcatcactagcgcatgccgaccacgtcggtaggaggtacattgcgggagaacttcgacatgagcgccaccgcggcggaattcactagtctcggtggcccgcggtgaagtctccggctggactcanggaacggtgccacgtatgccgccgttaactttgactctatccatttcctatcgcgcacgaacccggacggcggcggcacgaattttggcgcanagaggtcgctggcggtgaacattntgcgctggcggtctgatctgcacgagcactgtaccatggccaacttcatcagacatcttgacagagcat

SEQ ID NO: 73144 - DNA, 181 bp, Zea mays
  unsure (1)..(181): unsure at all n locations
caatctganaccanaggaatgagaatgaaaccttcaaaacaactggccgaagccaaatggaaatgcgctattgccgaagctgaccgagatgccagtgagtactgggaaaattatttgaaaaacagttgcagagcttcgcccatcanaaggaagatgttntaaanattctatagaatgcgtc

SEQ ID NO: 73145 - DNA, 484 bp, Zea mays
  unsure (1)..(484): unsure at all n locations
catgcactacatncttttaagaanatgtcaaggatttgaggattgccaagaggaagaaacanaagaagaaattccacaccttcttcaaaagcctcaaccacgcctncacaaaaggtaacatncaaggtaatgatcaagccacacttcacattaagaggtgtagtgaatgctttgaagaggggcacttgattaggtcatgtccctacattaaaaaatggttgaatattaacaaggatgatagactntgttntaaatgctccaagaanggacacttactttagatctgtccnncattaaaacaaagaggcatagggttagaaaagaaagttttactaaccatgtagcaagcaacanacaaggaaagaagaaaagttcanaacttgaaaagcgcctttgctacacatgccgtaagaagggacatcaatgcanggatngtcccattggtaacaatccctactctagcttgcaattaatctcatgtact

SEQ ID NO: 73146 - DNA, 350 bp, Zea mays
  unsure (1)..(350): unsure at all n locations
aaaatatctaaccctatngngtattgacctagaagaccctagttntccctcgtgcaccgtgaagganagttntattcaagatacaacttggtgtgtctcttatattattgcatgtttcataagcattacatgagcattcatggttatatatnggtatatataananacaaagaagaagtgactggtgaagaggagagcctactncgtcaacagaaaatccacctgcctggaactnggtttacttgacatctgtggaacagagcccgactcttctacaacacaagggcaagcccggtgcatttggccacctccttgggtgtntaaactcttaatcacttgactgatgcatt

SEQ ID NO: 73147 - DNA, 303 bp, Zea mays
  unsure (1)..(303): unsure at all n locations
atgttagtcttagcaattaagcaagtgtcgagttcagctctatcaaaatctactaagtatagctgaccctctaacactcccttaaatgctatngaatcatcacttcttctaaagacagtaacacctacatctgtaaaaagacagntgtagcctcatttacataattgcgaaactgaaagcagagtgtaatctaaagagtctacaagaanaacattggaaatggaatggtcaggtgaatatagcaatttacccaatccttngaccaaaccttgatttccatccncgaatgtgatagcnntcgtg

SEQ ID NO: 73148 - DNA, 402 bp, Zea mays
  unsure (1)..(402): unsure at all n locations
gcaagcctcacaaagctgctganggcgacgaattggcacctctaanactcgttcattctgatctgtgcgagatgaatggaatttgaccaaagtggaaaagaactttctactttatagatgactcctagatttgcttgtgatctctaaaacaaagatgaacgtcattatttaagacctataagctgagttgaaccaactgaagaaatgaacataagtcgacaagggaatattcttatggtcatagtcgctgacatgtatatgaagctgcttctcccatcatgatgtgaagaaacgcttacaattggatcttgtagcacggaatcagctgggggagattacacgatctaaatcacaaacaaatccttagtgaaaaatatttttccctggtgtgatatgccaaaa

SEQ ID NO: 73149 - DNA, 422 bp, Zea mays
  unsure (1)..(422): unsure at all n locations
gctgtgcgcctcggcgtctgcgaccgagaccagtctccacctgttatctctcggtgccaaaccccttctggcgtggtagcgtcgcagagactgctgataccgtgccgagtgtagtaaggccacgtcccgagcctcttccagctggtccaatgaatcttctcggctggtctggntgcttcngtcgtcatacgcccttgtcctcgggaaaccgtattctaagtctgtgggtaagatagcctcagccccatatactagaaagaacngcgagaaacccgtggaccggctctgcgttgtcctcagactccagaccaccgagggtagctctttcatccatcgcttgccaaacattgtgaggggcgtgagatccttggtttagtccctgcnaatcataccagtggcacgctcacctgcccattcgtcat

SEQ ID NO: 73150 - DNA, 417 bp, Zea mays
  unsure (1)..(417): unsure at all n locations
tcatcactgacctgaaaaagacgaaccgttntatgaggggccttaatgaccggctacaatggaagatggccacctgcctcgacctctactacaacaaggctgtcagcaccgcgctggcaagtgaagccaagtatgcaagcctagggaagtcaaagggctttggaggtgacacggcccaccagnggcctaaaaagcgacaaanggtggtgatccgagctttcatcaaaactgttcttcaccttgccaccctcataccccttaaacagcctgtattatccgccctgcactgccccacttaacaactagacgagtgcccttggactcgtttcctgcactccgagtcattactcgtgcttaatggggaagctgactttataaagatgcctatcgagggacactcatatcacaactcgagtc

SEQ ID NO: 73151 - DNA, 451 bp, Zea mays
  unsure (1)..(451): unsure at all n locations
agcatattcccagtccgctatgtgctttacgtcagcttctttctcttttcatgcttttgaaagttntggtctgcctcaaagaatgcagccaagtcagtttggcttttcttcaacttttcaattaaagaaagaanaattttgtctttttcgacagcttggtgccgaaggtcaatgacttcngatcacatatntccgaaggctatccaggtgctttcatctttggcatctttctgcgcttttaaaggctngctaaggataagaacctaataaaaataatcataaaaataanaaaaataatangtactacagtaaagcattctccgaaattctaagtctaannataaaaaatanaanatatggaaacccttcaagctgattaagctaggtaatccgcaagttgatccttcngcatttgcagataaccannagtcaagtangggatacccatgta

SEQ ID NO: 73152 - DNA, 161 bp, Zea mays
catatcatcgcatcatatcgcataacatcacatcatacatcatctcacatcaatgacatcaactggaaatgaggccgatcttcgtgcaatgctttacataaaatgaaaaggtgctaatgtacacaataagctgagaatcacagcttcatcagttctgatgt

SEQ ID NO: 73153 - DNA, 230 bp, Zea mays
  unsure (1)..(230): unsure at all n locations
agtgattagatacaaaaatgaaagaaggagaaatacaattaccatcttgacaacttgattcatcncgatggaagctcgtgggatcttgatttctatataagagaacatcttctcccgcatgtggtggaccgtgcagatcactgcctcgagtaacacaaaatattgatagaccaagttgtctgataacaactggacaacagctgcctggtgccactatgatatgcgatgaa

SEQ ID NO: 73154 - DNA, 356 bp, Zea mays
  unsure (1)..(356): unsure at all n locations
atggtagtcttagcaattaagcaagtgtcgagttcagctctatcaaaatctaccaagtatagctgaccctctaacanctccttaaatgctatngaatcatcacttcttctaaagacagcgacacctacatcagtaaatagacagttgtagcccattttgcataattgagaaacggaaagcannnatgtatctaatgaatctacaagaaaaacatnggaaatagaatggtcaggtgatatagcaattntacccaatcctttgaccaaccttgattccatcncgaatgtgatagtcgtggggacttggttttctctaggaggagaacatttttctccctgcatgtggtgtgccccgtg

SEQ ID NO: 73155 - DNA, 478 bp, Zea mays
  unsure (1)..(478): unsure at all n locations
cacacctactcgtctgtntatatagtgctgcngtaagaagcgaacgccagaattttacaccatgcggacacccgctcgcactcgctgcgtggtggaccgcagagacagaacagtaactctgcaaggtggggccgctatacgatgggagattgaatcgtttctcgacaacgagctcacggaanggtagttttagaccttcngcgctccgaagctaagagactntnttacngatcaagctcgtacgaaaacgatcancaccgcaaaggggtactgtgggctatcttngcgcgaagcttataaaaatggcctcgtgactgtacataaaaccaaagtctctcggaactcgcttcaaccctaactaaagactttatcataagctagcatgtgagcttatatggatctgtatctacagctggctggccataaatacagatcctctgcccatcagatgcaccatttgatcacttgcagcaagtat

SEQ ID NO: 73156 - DNA, 301 bp, Zea mays
  unsure (1)..(301): unsure at all n locations
atggatgaagaagggggtagtgatgctcattctttaaaccctgggcgaggtacggatggcgggatgatggccagattgggcccgagaccacccggcgtggttggggatatctgttgcacgagctcanggagaaggtcctgaccatatgggtccacaagcagtgatccaacgaaccacgcgagtggntgaaagtctggcatgtggngcccactacgtcaacgagagaatatgtangcgcgagagagtggctgacgcccgtggcccacctgtcggtgctagggatggcaacgggtcgggtgga

SEQ ID NO: 73157 - DNA, 208 bp, Zea mays
  unsure (1)..(208): unsure at all n locations
tagaccttgtgcagcttgtcaagcanggaaacaagtgggaagctctcatcatngctaaaatgtgatgacaacatcaagacccctggagttacttcatatggacctcttcggacccgtcgcctatctaagcataggaggaagtatggtcttngtatagttgatgaattttcccgcttcacttgngtattctnnttgcaggataaatctg

SEQ ID NO: 73158 - DNA, 203 bp, Zea mays
  unsure (1)..(203): unsure at all n locations
aatgactggcacagggttgattctgggagaaccttcntcttatcttctcttcactatnctcttttcactgaccctttctttctctttgctcttccactggaggattctatcanagagtattactatcatacattggaggaaaccaaagactatgaaccatgtgcaacagtcttcaacccaagaatcaccaagcattgtgatct

SEQ ID NO: 73159 - DNA, 301 bp, Zea mays
  unsure (1)..(301): unsure at all n locations
accggtgacttggcccttngcatgctcggggctagatatgaatggacctttcaagaaagctcaatgaggatacactcatgtactggtagcaatcgacaaattcactaaatggatagagttcacacccattgcttctntaacctcagctaaagccgtggaattcatacaagacataatgatcanggttggaataccgaacagtatcataactgacctgnggtccaacttcacatgatcagagttcttcgatttctgcgagcanaatagcattcagatcaagtatgcttcggtagcacacccg

SEQ ID NO: 73160 - DNA, 259 bp, Zea mays
  unsure (1)..(259): unsure at all n locations
catggagtatgttctccacttctcaagtgtctatcaagagctgaaggtattgaattaatgaacgagatacacgcangtctctgtggatctcacattanggctaggccctttgctggaaaggtgtttcgacaaggaaatttactgccgaaggcagcttcagatgcagtagagttagtccaataatgtgaagattgtcaatatgtgcaagagaccaganacaaccttcatcactcacttcagtaatacagcccacctggcc

SEQ ID NO: 73161 - DNA, 343 bp, Zea mays
  unsure (1)..(343): unsure at all n locations
ttgactctagcctagctaccggtgcataggnttcaccganatccaaaccttcgacttgtgagtatcccttggccacaagtcgagctttgntccttgtcaccacaccatgctcatcttgcttggtgcggaagaacccattggctcctacaacattntggttaggacgtggaactaaatgccatacctcattcctagtgaagttgttgagctcctcttgcattgccaccacccaatccgaatcttggagagcttcctctaccctgtgtggctcaatagaggaaacanaagagtaatgttcacaaaaatgtgcaacacgagatctagtagttaccctcttatgaat

SEQ ID NO: 73162 - DNA, 512 bp, Zea mays
  unsure (1)..(512): unsure at all n locations
gcagctgaactgcgatgatgcttgtgtggcactacatgatacttgcaccgaagtggactangagaaatatctggcgcaacaagtccaggtggagctggtccagatatgttcactgcattataaattcagagatggaagtccatatcatgtacaaggtcaaggtacagactacagaactacaacaaacaaatacttatgggagaacacactntagtacacctaagtacctaacttcgtaaggaagcanatcaacagntattataaaatacagctaccagtttgcataacanaagcagatgtaaagggaatagttcatcttaccaactaatatatagaaatagatattttttgctatganaacgtacacaaagaatataaaaaagcagtatgctcatgcttaactattacaataagagctaaattaacattgatactaatatatgcttatttatgaatcttagattaagacgcatacctaatgttgaatatgtatacaggaaactatcatggat

SEQ ID NO: 73163 - DNA, 318 bp, Zea mays
  unsure (1)..(318): unsure at all n locations
attgatctctcacgatatgngagtgccttcgttcgtcttcaatctccacgtactgtgatatattctggcctgacttttacaccgtacgaactgctgtcattacgctcatcntgtctncatatcangcattggtggacgggatggctagtcagctgagggtacaaaggtgtttctgttcaaaaagagctntgtctctggcacgtatgaatccggtgttgtccaacatcgtgctctgactggagcgacaatgctggtagtactctnttgttctcttcgctaccctatgactgcttaacttgactcttttgctgatgctct

SEQ ID NO: 73164 - DNA, 354 bp, Zea mays
  unsure (1)..(354): unsure at all n locations
actgatgcgtacttaatctggatgcttcattgctcgcagaaatcgaagaattcagagctggtgaagttggatcccaggttggtgatgatgttgnttggtatcccaaaccttaatattatgccttgtataaaatccaccgctttggctgnggcaaagaagcgatcggcttgtactctatctatnttgtgaatntgtcaatggcaactagtatatgagtaccagcctcctaagccttcttgaaaggtctgatcatgtccagtccccagcatgcgaacgaccattgtatangaatggtctgcagctgatgtgcggggtaagtgtgttgcttttgatagtaatggcatgcctcacact

SEQ ID NO: 73165 - DNA, 132 bp, Zea mays
  unsure (1)..(132): unsure at all n locations
atcacccacacaagaacatcatgatgactgacaggccgcttgagctactccacatggttctattccgctcgatcgantatataagcattagcgggagtaagtattgtcttgtcattatggatgactattctc

SEQ ID NO: 73166 - DNA, 343 bp, Zea mays
  unsure (1)..(343): unsure at all n locations
agatattcatgacactcgagagtcaatanaagcagctganaagggtgcggagctcgagagacgaatangtattacttaatggnntttaactntgnntgttattnttgtgactntgaattgatgtacgttttctaccgcagctgaactatctccttccncagagcccttcgagtcactggccgacccagaggcaaaggaaacaacaagaattattaacatggtcgaaactattgtagacgaagtcgtacccaactgctgaccaaagctgcatatatagctttgaaagaagaagaatagctattgtagaaacatngctagaatattaatgtaacatttgctggac

SEQ ID NO: 73167 - DNA, 380 bp, Zea mays
  unsure (1)..(380): unsure at all n locations
tattctatggtgaggacaanggccatactacaaggatgtgtcatgtcaccattcagaaacaaaaagaaatagcagaagctgcagctcagcagaaccagccgaagcaggtcatgcatactgcttcgtatcactcaccctacataccagagtatgtgggtaactatcctgcaacgtctgtngcttcgactagtcaatcacaggcattctgggccacagcctcacctccgccaccactacaacctgcatattcacgaagctagcagccagaagggagccaacagacccatcagcagcgagaattcatggaagagtccgaagctcgcacagtcaacagtactgtgccagaatncgagcatatctactaagagaatatctacccc

SEQ ID NO: 73168 - DNA, 353 bp, Zea mays
  unsure (1)..(353): unsure at all n locations
acaagtgggaggagcgcatcacagcaagaatgtgatgaccacttcaagacccctggagctgctacatatggacctcttcggacctgtcgcctatctgagcataggagggagtaagtatgggttagttattggtgatgatttttcccgcttcacttgggtggttcttttgcaggataagtctgaaacccaagggacccttcagcgcttcctcaggagagctcannaatgagttgagctcaaggtgaagaagataaggagcgacaacgggtccgaattcaagaaccttcaagtggaggaaattcttgaggaggaaggaatcaagcacgagttctccgctccctacacaccacagc

SEQ ID NO: 73169 - DNA, 310 bp, Zea mays
  unsure (1)..(310): unsure at all n locations
cgagagacttagtacaagagcatattgccttcanggtatggccgctcgcggagaaatgggaaatgccacaagaaaccgtataaaaggccgacgaaggtggacttatcaggtngaagtacactttttaaattggagaccaaattcgtgagccagatgatgacttggtaaaaagtattgaannattaagtgatgaactgcttngngcttatctcgaggccgaagacactgcaatgtcagcagccttcggaggccgaaaaagaagggctgaatcggtattgatgcaatcggttgctacctgactatgtatcca

SEQ ID NO: 73170 - DNA, 213 bp, Zea mays
  unsure (1)..(213): unsure at all n locations
gcatctctaagcactgggctgcagctacaaagaatttagatcaatatgactatgcctagctgtaaagatgtcatcagggctggtaagatatcgtaatgatcttatattatgaagaatctcatatccctttgtgggaccctaaaaagatccgatggtatggcttaggcgtatgctcacggattgcgccatttaatngcactctcattatcacat

SEQ ID NO: 73171 - DNA, 143 bp, Zea mays
aatcgatcacgttctgtgacctcagtaatctcttgacaactaaaaatctgccacaaccgcgtacacccagatggctgaagctaaataatagagtagagctgctgacaacacacactgtgactctttgatgggggtctatatgg

SEQ ID NO: 73172 - DNA, 338 bp, Zea mays
  unsure (1)..(338): unsure at all n locations
gtgttcgtaacgggacaatgaagggtcagtcaacataggtagattntcttcaaatcacgctaatattcctgatctaanacactatntaaacactaattntgtcattttagatctttgctggagaccttctcttcacctataatnaattcataaatatagaaataaaagacatttgaccatactntatccctcacagaatagagtctacgtgagataatcaatntttaaanaaatatatatatatataatctaatttatttctagatgtacatntagaagatttgtaatttggaagtgcactcacgtcgacacgtcgtgacaggtgaagtgacacttgc

SEQ ID NO: 73173 - DNA, 424 bp, Zea mays
  unsure (1)..(424): unsure at all n locations
atcactaaccagataagaaattctgaataaataatatactctaccaagaacaactaattgacagctcctttacaacaatcacttgcatacatgttntgtcctatgttataatcataacaaactaaactatgttgaacaaaacanaacttgctatanacattactatattaactgtgaactagtggaataaataatgtcctggtttataatagaacaaactgaatatgattcaatagaacaatacatgctgtgaacagtaatgtattaactataaactaatggaatacataaatgtatgcagtcactaanagtatatggactgttcactgaatcatatactctacananacaactagctgaccacttcattaccacttgaacatcatctatataacagaaacttaactcatatgcataacatgat

SEQ ID NO: 73174 - DNA, 460 bp, Zea mays
  unsure (1)..(460): unsure at all n locations
acttggaagtctcggggcccgaatccttcggcgtggtagcgtcgcagggactactgataccgtgctgagtatagcaaggccacatcctgagcctcttccaactggtccaatgaatcctctcggctagtctgtgtgctntagtcgtcgtaagcctttgtcctcggggaaccgtattccaagtccgtgggaacagcttaagcatagagtttgaattaaccgtcttaagctctcccatggtctcccaatcatctcaaggcacctgcatgatatagttagcacagntgggtacccatcttgggatgggtccataatgatcatctaaatgtgcctttggacccanatagcctttgtgctagttctaggtgaatctcgtatagatctagcacaggtgtatgatttggtctcctaagcaatgagattgagacaatcacttgctangaacctaccttatacatacctt

SEQ ID NO: 73175 - DNA, 178 bp, Zea mays
  unsure (1)..(178): unsure at all n locations
gcgagtgaaaaagcttaacttcggtcaaacctgacaagtcttagtnnttaagtttagcacttanattcttaacttttatgcaattattggttcttgaaatatgcatgangtactgcacttatggggagtattcanaactcanatcactcatganaacccctagtgcaaaccanaatgc

SEQ ID NO: 73176 - DNA, 237 bp, Zea mays
  unsure (1)..(237): unsure at all n locations
gatcaacgaggacaattaggaacatcgtgcgcgctgtctgtcggggagcacaattagtgctactagggtcggttgtgagtggcaaatgaagggcctacactatggcggaggctgatccgcaaagtgacggggaaacctgcagcgtgtattggacttcgccggaggctagcctagctgtactccaagagggccagccttcggactacgctatngcgcacgcacacggacgcggcacat

SEQ ID NO: 73177 - DNA, 429 bp, Zea mays
  unsure (1)..(429): unsure at all n locations
acccggcgatgtccgagttttactaagctatggagaggactaatgcanaatagattgcacatgggacactagctgggatatctgagagttctaatgatagtgaagattctgatgcagaaagtgagaatgagggtgtcgaagatcgcgcctggaggccaagccatgttgtcttcgggaagtcgacgattaagcaaggaccaattgatgcattgaggggaacgtacttncgtgacatatctattgtgagggctggaggggataataatgtccccctgcctgaagctgacgaggtggtcgtatatagaagcttcatgagagcanggcttcggttccctctggataagatactggtcgaaatcatgaaaactntcanagtttaccttcatcagcttactcccgaagctatcatcanaatanggatctatatct

SEQ ID NO: 73178 - DNA, 387 bp, Zea mays
  unsure (1)..(387): unsure at all n locations
tctggcagcttcttgacttccatgaatagcaatatgccctcgatccgaaggtatcttcatgcaaagatatgctgngtgaagaatagcttcanaagcattgagtgccccacgaccaatgatngcgttgtaagggtattccatgtcaacaatgtcaaacacaacttgttcagtcctcgtattgntgataaatccgaaggtcactggcatcgngatcttgccgagcgctacaatctgccttccttcgagccacaangggatgtgtgcatcatggatctatcttcggctcttcatctgctgaagccttacnatataatatcgtgcctactgtgcaccaaacatgtgaccaaatcttgataccataatacctacatcatgaggtacctgact

SEQ ID NO: 73179 - DNA, 449 bp, Zea mays
  unsure (1)..(449): unsure at all n locations
cgcgatcttaagcacctgngctgcagctacnacataatgtccttcttacaacctctgttgatattatgaganaccgagaagctactggaagggatggaaaatgggctgcanaagctcaatgaatttgtattgattatgttcatagatcttcgattcagtcccaggcgttagcagacttcattgctgactggacgccaggggctcangaggaagaaacanataaagatgtcgaagcatggacagtgttttgcgatgggtcttggggaaccttcggagcaggagcggctgctgtgttggttcaccttccaaagtaanacttgtatgcggaagactgatttagttgacaaatacatcgctgagatgaactctgtcttgggcttcggatgtaaggaatggaatcaaaggccttttaaactgatctaagtattttggcatgtgacagagcttaa

SEQ ID NO: 73180 - DNA, 166 bp, Zea mays
  unsure (1)..(166): unsure at all n locations
tgttctgcaagacgggtgagacgttcctggtgaggtaaggaaagataccgaacttgtcaagtagntcacgtgcacctacanggttgtctgatgtccgctggacaaagacaactgtangtgggcctaattactttggagggtccgtcacagatcctcaattcaatct

SEQ ID NO: 73181 - DNA, 421 bp, Zea mays
  unsure (1)..(421): unsure at all n locations
gcaagctaatgatgaactggctagtcttaatgctcaacttattactatcaagaatgatttcgataagctaaaatttgcaagggatgcctacacacatggtagacacccctcaattaaggatggacttggcttcaagagagaagctaagaacttaacaagccataaggctcccattcccgccaaagagaaagggaaggcccctatggctactagtgctaaaaggaaccatgcatttttgtatcatgatagaagacanactagaaatgtgagtcatcgatgctttgattcatatgnttatgaatctcatgccatgttngctcctagttcctcttatgtgtatgatagaaatgttactangagaaatngtgtcctaaaaaaatgctattatcatgtcctagaggaaatgtgtcatgctctagga

SEQ ID NO: 73182 - DNA, 252 bp, Zea mays
  unsure (1)..(252): unsure at all n locations
atgctagtcttagcaattaagcatgcatctagaccggcctcttctntggcagaatcaactaaataaagtttgtcgtctagtacacccttataagctaatgaaccatcacttcttctaaagatagacacnatctacattgtgaataaacaattatatcccatattacannagtgactaacagacaacaagttatatccaagcgactcaactaataacacattggagatggagtgctcggatganatagcaatc

SEQ ID NO: 73183 - DNA, 386 bp, Zea mays
  unsure (1)..(386): unsure at all n locations
ataatggtgcctaagtatgctgaactctgtcaacaaatcttggatgaagcccatcttagtcggtattctattcatcctagaagtaataaaatgtaccaagatttgaaacatcattattggtggactaagatgaagatagaaatcgctcgctatgtggcanaatgtgacgcttgtagatgagtcaaggcggtgcatatgaagactgctggacctctgcaatcattacccatcccaacatggaaatgggaggacataagtatggatttnnggtgtggattgccaagacatgaaatgtatgactctgtttggtatagtggaccgctacaatagactcatttcttcagtaaacatatatcagtctactatgctaacatatatgtcgatct

SEQ ID NO: 73184 - DNA, 359 bp, Zea mays
  unsure (1)..(359): unsure at all n locations
cttattctagatatgcagaatgtgctactatgtgatgaatagtggaaaagccgaacaagatatcacatgctgatctgcngagaccttcctatttagacggctggttaaactgaatcagaaaatgtgtttcngaggaaaagggaaattcttggtgcctagttaacanaagaattgggataatcaaacaaatcgaagcaatcttcaatggaccaccaagtcaagaaagagctanagatgacagaaactgcatcttcacaatcatattaatcacaaagaattacattttcaagactgagcagcaagtttcatgggacatccacaagacctcaagactgaacatactgtaactacacactact

SEQ ID NO: 73185 - DNA, 155 bp, Zea mays
  unsure (1)..(155): unsure at all n locations
ctgcagctctaagggagaacacgtgatatgttgactaacgtngcaattgaaaaagatagaccttgtgcagcttgtcaagcaggcaaacaagtgggaggagcgcatcacagcaagaatgtgatgaccacatcaagagccctggagctgctacatat

SEQ ID NO: 73186 - DNA, 368 bp, Zea mays
  unsure (1)..(368): unsure at all n locations
gacccgtgcactcatagaacaanggtgtgctgatccacacgatgatntccttgatacacctctggaagctgtcaagaataccatcangaaccctgcaactcccgaagaagcactggcactnngccgctctcctcaagttatggatttcgacaattcagatgatgaaacccaagatctgaatattgcaactcaagccctccggcacatnctcaatatgccagttaccaagcagcanaacacaatatcggtacattcaccanagaaagacttcaaatatagagaatcagtgagaaagaaaagctgaccggagaacctganaggtgtcgagtgcaagcaatgcaagaagttntatgaatgctgtcttcctg

SEQ ID NO: 73187 - DNA, 486 bp, Zea mays
  unsure (1)..(486): unsure at all n locations
tcatgggctgggtcaggattatgatgacgacgtctaccattaccctccataccttgtcgaatacgtgcgaggcgttgtcacagcggtgcataaacatcgtcgtcatcgtcgtcgtcgtcgtcctccacaggagagtgagctggtgctggagtnggtggtggnggacgagcctccatgtcacacncggttntagaaggcanaccgaatgtgaaccatgcacgtgccaggatcagctattcacgtacacaacagttacataacatggacatcatcacacagtgctcanatagtattaagaggggaaaatatagtcgatacatcatacgtctgagacgtccacatagtccttacaataaatcatagtgcgaanacgatacgttgattaccgctgtcttcacangcaggcgactgggggttgccgtaacccacacctagaactcgtcgagtcttggactcctgtagtcttctcacagctcatctctctga

SEQ ID NO: 73188 - DNA, 429 bp, Zea mays
  unsure (1)..(429): unsure at all n locations
tgtgcagtgagttcttaaggcgtgatagtaatatgaagagagagaaaaagtcngaagtgacatgagaagagacagtanacgaagatttgaanagatagaatatatccaaagctttagcattgaataggagcacatgaaaacaactatacatgtgctngaaccttgattntgtggcttctgttggattcaactataacctgcccctaacttgcttgggactaaaagaacttgatggttgtgtatattagtcacataggtcctgctgaactntttctcatggtattttggagcttncanacagcgtctgaatatgtctacaatggatatggatgaaaatgaccctattaggtagagctattggataatttttgctaaataggtcaggattttgactgatctagagtgctatgaaacattatgatgtgacat

SEQ ID NO: 73189 - DNA, 481 bp, Zea mays
  unsure (1)..(481): unsure at all n locations
tcacctgtatacccctaagataccagaaaccctaatnggaaccctggataaccctataaccaaaccctangggcttatgtgcaaaaaatagtccatttgngactaaagtgcannaaaccaagtcaaataaatatttaagtccttnggttcacaaatatgtggacttgaaagctaaacccctaagtttgactctttgcanaaagaccttgatttgatcctatgctaagctgaaacanggtataggcccaacttgggctgtgagcttcaaatagtagaatcatgtatgtgccacatcnagtcaagactacataaagacaacttgttaagggtcaagcatgactatgaaaatggaaaacccaataagtggctgcaactgaaagctgacttagtggaggactgatcagatagagcttaacaaatcatggattactgatgttacaagtgaagataagagacacttgatggtgtggtggaccatgat

SEQ ID NO: 73190 - DNA, 376 bp, Zea mays
  unsure (1)..(376): unsure at all n locations
gtgatggcctcaaggaagcttcgacattattttcaagcatatcatatannatgtccttcatcacaacctctaaaggacatcatgaggaatagagaagccactgggaggatcggaaaatgggctgccgagctcaatgaattctctattgattatgtacacagatcctcaattcagtcccaggcgttagcagatntcatttgctgatggacgccaggggctcanggagaagaataacanaagatgccgaagccttgacagtcttctgtgatggttcttggggaaccttcngcgctggagcggctgctgttctagtagcgtcctccaaagtcagaacatgctatgcaccaagactggactntagctgtacaaataacat

SEQ ID NO: 73191 - DNA, 375 bp, Zea mays
  unsure (1)..(375): unsure at all n locations
cattatgtggatcatagttactgatctcctatatgtaactcanatcgaagtattctttctgatattntntccatctcatcttacttttggtagttcaatgtgtgatncgttgaccttttcttgtgcccctctagatcttgctggatcttgtgaagtttatctctntctatgtgtttccctcgttcgncgnntttcggttctcctctgcctgtctccctcttctttcctttgggtgagctctgaggtgttatatggagtatatctctacctacccaacgtgcttggacaaaagggcttgtgtgttgaagttgtgacgtagtctgaaacgcctaactttgattcatcgacatagatcaaactgttanngttactcta

SEQ ID NO: 73192 - DNA, 242 bp, Zea mays
  unsure (1)..(242): unsure at all n locations
agtcttagcaagtaagcatgtgtcgagttcagctctatcaaaatctactaagtatagctgaccctctaacacacccttaaatgctattgaatcatcacttcttctaaagacagtgacacctacatcaagaaaaagacagttgtagcccatttgacataatngggaaacagaaagcaagttgtagtctaatgaatcaacaagaataacattggaaatagaatggcaggagatatagcaattta

SEQ ID NO: 73193 - DNA, 488 bp, Zea mays
  unsure (1)..(488): unsure at all n locations
agtanaacaatcaggcagggagctgcatgntaaagattggtaacaaggttcataagtgagcagccagtcatgtagaatcacaccaacgatgatgactcctgtacacagccaagaagagaagggtgaatgggacgacgacgatgcctcctgcacacagtctacacacgcgccacatccgtcatcaatggttatggtaggtaagatgatgagatcacangatgaccgttaatgaaggtntgtntntgatatcgtagcacttcttccctacagatgaaggtaacgtggcttagtgtcgatgacccttgtagttggactaacagaagatntctataagtctgtacacatcacccctctcccctatcattcctttctcaccagngaacacattccgactgactcctctcttatgtacacacacagcacacactcatcgctgagctactactgtcttcatcgactacggtgggtgtctgatctgtccactacct

SEQ ID NO: 73194 - DNA, 332 bp, Zea mays
  unsure (1)..(332): unsure at all n locations
gatgtcgattgagcagatgtttctgatgcagactcangcagttcaagccatcggtcagactctggccgtcattcagcagcagcagcagcagcaacagcagcaagcaccaccccagcctcagatgcctcagatgcctagagacaagcgtgctgaattcatgagaggtcatnncaccaacgtcgctcactcttctgaccccatggatgctgaagattggctgncactgtggagcgggagttgataccgctcagtgcgatgaccgggagaaagtttgtatggccccgtctgttagaggagcagccagtcatggtggagtctacctcgcacccatg

SEQ ID NO: 73195 - DNA, 427 bp, Zea mays
  unsure (1)..(427): unsure at all n locations
acctcggattatgctttagtttaatnntgttgtagaattataatcaataccaagacaggagaggattaaagatcatgtcttttatttagtgaatgagtcataacttataaggattaatatagtgttatgttgagatacataagaattagtccacatatatactatggtgagtaactctatccaagtacataggatgttggaagataagataaagattacctttgttcattaaaccggagttgcgtgtctgccatatatagcaactgtgcgacaanattgccggcaacngtcggcttgcttaatcagtaggtatgattcttgtggattgtgctgatctatgataatcggaacactgtacggctaactcccttattaataagctacgcatgacccctatcacaacaacatatagttacttgtctcattc

SEQ ID NO: 73196 - DNA, 485 bp, Zea mays
  unsure (1)..(485): unsure at all n locations
atggccttaagcctctttgaaatccttaagggaaaatgcttganatgtntacaacatgctntcataagtgcatcaactgacctgagcatcacacttataatattacacaatgcacttcacattccgtataatatagatatgttctcattaacctaattatgtgccaatggcatttaaggccaaaatatatgttcctctccattgcacatattanggggagcaatctacattgtatagaattggttaatcttaattgacatatcctntntaatcatgtctctttcctttggacatttgcatatttcttatcttcattgngtgccaaggctaagactaatatgttntcatgagtatctcatgtattaagtcttagattgaaagggagatggagtattcggcanagacatcgcttncactcaactccattggtatatccactctttgccgggatcccgcgctctccgatttggataacttcactcatg

SEQ ID NO: 73197 - DNA, 429 bp, Zea mays
  unsure (1)..(429): unsure at all n locations
gctataagggagaacacatttggactaacaatgtcactttgtatatacatggctngtancgcatgtcaggcanganagcaagttggtgttcatcatccacacaagaacatcatgatgactgacaggccactcgagctcctacacatggatctattcggcccgattgttacataagcatcggcgggagtaagtacttgtctagtattgtggatgactattctcgcttcacttgngtgttctttttgcaggannaatctcatacccaagagaccttaaaaggattcttgagacgggctcanaacgagttctgcttaaggatcaagaaatatataagcgacaacgggacggagttcaagaactctcaaatngaanggcttcttgangagganggcatcaagcatgagttctctttctcctacacgccacaac

SEQ ID NO: 73198 - DNA, 358 bp, Zea mays
  unsure (1)..(358): unsure at all n locations
gctgcaatacttatanaacaacaacatctaccagtacagcaactgcaaaccatacctgtaacatggccattcgcgtgctggngactggatatgattggacccttcaagaaagctcaaggaggatacactcatgtactggttgctattgacaaattcactaagtggatagagtacaagcccattgcttctctaacttcagctaaggcagtggaattcatacaggacataattntctgcgaacaaaanagcatctagatcaaatatgcatcagtggcacacncaagatccaacgggcaggtagaaagagccaacggaatgatattggaagcactcagaaagaaagtcttcnacaagaatg

SEQ ID NO: 73199 - DNA, 165 bp, Zea mays
aagcaggtaaacaggtgggaggagcgcatcacatcaagaatgtgatgaccacctcaagacctctggagctgctgcatatggacctcttcggacccgtcgcctatctgagcacaggagggagtaagtatggtctacttattgttgatgactcttcccgcttcactt

SEQ ID NO: 73200 - DNA, 445 bp, Zea mays
  unsure (1)..(445): unsure at all n locations
gtcatatccttaatatctggtgtgatgatattgcctaagtgatagaatgcaacgcccaatcttacatgtggtatgataactctgaatggttttaaagatatgacctaatngtttggctattntctctnttgctttgttgggggttataggacgaacaacacaaatctaaagataggattatacctcacaggaaacttgaatcttgataccacttgatagaaggcaagacccgatctttcgtgtggtatgaataacttgataggtggagatctcgacgataatgatccaaggctctgaacgaatggcttctcgcaatcactacaccactgctccgtggggtataaccgtgacacactaatgatctttccacgaagtcttatccctacaagcgcaatcaagaataccagcaagaacaggaagaacgcaatcaanactgcattgatat

SEQ ID NO: 73201 - DNA, 218 bp, Zea mays
  unsure (1)..(218): unsure at all n locations
cactngagttatcgtgataaaaatgcggagagaganatgtatgctaaccttcannatattgtatgctaaacagtctgcaagatggttcttatgcatagcagatgatccgagttcaagcttcggatagcccattntatccatcatctcgcgatatacttcaatctctctgctatccggtaggcagtatagatagccatcctcatcattacctncgtata

SEQ ID NO: 73202 - DNA, 257 bp, Zea mays
actgatagcaatttgggtcttagagtgcgaccctctgctgaagaggcccgtccttatgtgcttcgctcggggagatacctgatgatgaacggcagaattattttgaagtgtccctgaaccctagtgatgcagacataaatgatatgctcgatctgctagctgaggattcatctgatgctgctcctgatggtacattggcagtggtgccccttccagaggttgatgcgaccttggatgtcccgaaacttgtcagtact

SEQ ID NO: 73203 - DNA, 139 bp, Zea mays
  unsure (1)..(139): unsure at all n locations
acaagtgggaggagcacatcacagcaagaatgtgatgaccacttcaagacctctggagctgatgcatatggacctcttcggacccgtcgcctatctgagcatangatgaagtaagtatggtctagttattggtgatgac

SEQ ID NO: 73204 - DNA, 447 bp, Zea mays
  unsure (1)..(447): unsure at all n locations
agcttaatcctgagaagtgtgtcttctgtgtaccccgaggcatgctcctanggttcatcgtctctgagcgaggcatcgaagccaacccggagaagattgtgccatcaccagcatgggacccatcaaggacttaaaaggggtacagagggtcatgggatgcctcgcggccctgagccgtttcatctcacgcctcggcgaaagaggtctgcctctgtaccgnctcttaaggaaggccgaatggttcgttnggacccctgaggccgangaagcccttcgcaacctgaaggcgctccttacaaaggcgccagtcttggtgccgccggcggacggagaaaccctcttggtctacgtcgccgcaaccactcangtggttagcgccgcgattgtggtcgaaaggcaggaggaagggtatacattgcccgttcagaggccggtctacttcatcag

SEQ ID NO: 73205 - DNA, 211 bp, Zea mays
  unsure (1)..(211): unsure at all n locations
ctgtagcgcatgtcaggcacggaagcaagttgatgctcatcatncacacaagaacatcatgacaactgacaggccactcgagctcctacacatggaccttttcggcccgatagcttacataagcatcggcgggagtaagtattgtctagttattgtggatgactattctcgcttcacttgngtgttcttcttgcaggaaaaatctcatacc

SEQ ID NO: 73206 - DNA, 389 bp, Zea mays
  unsure (1)..(389): unsure at all n locations
agccatgcaactgaactaaactctaagtcccanacaaaaaaagactagcatacctgaatactcagtgcttgaggccacttagatatataaggtgcctgcatttccagcctcatacgaaccaagtntgagagtctctcactcagtatcaagttcttcaactgctctccttctccagcatcaattcgatccatcagttgttggaggcagtcatccatgagaaactacgcanatacaagactataatcaacatgggcacanttaaatagagaatatcataagagcaactccaatagttctctataaaagagcttggctaanatcatgttagcangttgctaaatagctatcgggaagtaaaaataacttagtctccaatagtttctcatact

SEQ ID NO: 73207 - DNA, 445 bp, Zea mays
  unsure (1)..(445): unsure at all n locations
ttaagcaagtgtctagatcagcattggtatcattaagatcaactaaatatagtagaccatctaacactctcttaaatgctattgaatcgtcacttcttctaaagacagtaacaccaatatcagtaaaaagacaattgtagcccattntacataatngagagacaggaagcannatgtaatctagagaatctacaagaaacacattgganatggaatagtcaggagatatatgcattntacccanacctttgaccaaccttgattccatccccaatgtatagctctttgggatcttatttttctatatgangagaacatctttctccctgcatgtggtgtgccctgtatcgatatcaacttgaccatngatgctaactacaaataattaggctgtcttagactaacngctggtcttgcataaacaaccctgagactaaacagcttg

SEQ ID NO: 73208 - DNA, 269 bp, Zea mays
  unsure (1)..(269): unsure at all n locations
aagcttatgcactgctgcaganatgagagtgaactgcgttcctctgtctgtctctatcttcttnggcacaccatgaagacatacgatccgagacatatacaattctgccaatactggcactgtgtagctggtcttgacaggtatgaaagtgggctgacttggtcaagcgggtcactactacccaaatggaatcgtaaccggctcgagtgcgaggcaatccnactatganatcataccgattcatcccatttcactganggatctgaacg

SEQ ID NO: 73209 - DNA, 329 bp, Zea mays
  unsure (1)..(329): unsure at all n locations
caccgcaggatgaggcaccccaacaacagcaactgccaccgncgcccctgatgaccatcgagcagatgttcctaatgcagactcaagcagttcaagccattggtcagactctggccgccattcaacagcagcaatagcagtagccagcaccttagccttagatgcctcanatgcctagagaacaagcgtgctgaattatgagagggtcatccccagtgttcgctcattcttctgaccncatagatgctgaagattggctggcactgtggagcggggagtgacaccgctcagtgcgatgacagggagaatggtctgtatggtccccgtct

SEQ ID NO: 73210 - DNA, 204 bp, Zea mays
  unsure (1)..(204): unsure at all n locations
gcaatgaanactttatcatacaccanacaccaccaacttaaaattttatatctacaaatgattgttcaagtgagtnntggtcattggtccaaaaatacgaagtaagtgaattatggagttagggggaggcttaagtccataatatcacattgtggngacaatcatgcatcttagcaagtagatcgcatattntcattcacatac

SEQ ID NO: 73211 - DNA, 246 bp, Zea mays
  unsure (1)..(246): unsure at all n locations
gtcttagccattaagcatgcatctagaccgacctcttcttttgcaaaatcaaactaaataaagttgtcgtctagtacaccattaaaagctagtgaaccatcacatcttctaaagacagacacatctacatttggtaatagacaattatatcccatattacantaatgactgacagataggaaattatantccagagactcaactaanaacacnatagagatagagtgctcattagataatgcaatc

SEQ ID NO: 73212 - DNA, 443 bp, Zea mays
  unsure (1)..(443): unsure at all n locations
ttgtccccacctctctgtatcgagactgcttccattngcaccttnggatgaacttgagcagggtagtggatgatcgaaactagtgttnttagtgtctgaatgcttntctgtataggctacacccggntgaaaagttagacaatggcaatgcttacaacctctcgcacncacatgaattttagtgatactcgtaatctgctgcaaatccgataattnggaaaattcaactgatatcaattcaatatgttctacattatgagggcgctattggggagtcactggtacttacttgctaagtgatcctactactatatctaatgtgcttaggggaacttattgatgttaaatgatcaatatcactacatttctatacaatgattgtacaagcttatgtgcctaccacacctaacatttccttgtgaactcgactcgctttctttttt

SEQ ID NO: 73213 - DNA, 453 bp, Zea mays
  unsure (1)..(453): unsure at all n locations
tagctatcttagccttcatttcttcttgagctctngcatgtatatcttttgtcctgtatatttagctcanaggaggggattgcttgtggcgagcaacaagcattaacacatggtaacatagtttcaatttgaatacatgtgcatgagtgaggtctgtgggattntaagttntctatcacaacctcatgagcaatggttaacatgatatgatcatccataagattntcatgagaacatagaagcatatcatggttttcttgaaaagttagaattctcaactttagctcttctacttggccttaagcaaggcattctagttactaattgagtgataaaatataaagaagtatcttgctcaaatgannatagttcatacctttggaccacatcaacatgagagcactntatctnctcatgtctntantcaactcatcaaagcttagcatttttatg

SEQ ID NO: 73214 - DNA, 494 bp, Zea mays
  unsure (1)..(494): unsure at all n locations
cgcttgaatgcgacnggttgagcttcggatgtagatgggtcatcaagctcgttgatcttcctcgagccttcgatcatgcactcaaaacttacaaaattcccgattacttccttcggggtcattttagtatatcttgggattaccacgaataatngaacttgagtagggttaaggaanataagagaccttagaataaccttaaccacttcatggtcatcccactttacgctcccgaggttgcgcacttggntcaccaaggtcttgagccggttgtacatgtgttgtggctctttccctttgcgaagccggaaccgaccgagctccacctcgatcgnttccgcttggtgatcttggacttatcttctcgtcgcggtttgacacatcanacctcttgcgctctcaacccttgacttgtatactctcttacttaagagcaggagatcgttgtgttgaagtgagtgctcattggcactcatctatataatctatcctat

SEQ ID NO: 73215 - DNA, 239 bp, Zea mays
  unsure (1)..(239): unsure at all n locations
agacacatctacattngtaaacanacagttatatcccatatngcataatngactaacagatagcanattatatccaagagacgtctactaaaacacattagagatagagtgctcattngagatngcaattnntacctaaccctttaccttgccttgattcccattaccgaatataatngaatcttgngaatctntattcttgacgtangaagtgaacatcttcnttctccncgtcatat

SEQ ID NO: 73216 - DNA, 357 bp, Zea mays
  unsure (1)..(357): unsure at all n locations
atgctagtcttagctattaagcatgcatctagaccggcctcttctttngcaaaatcaactaaataaagngtgccgtctaatacacccttaagagctagtgaaccatcacttcttctaaagacagacacatctatatttgtaatagacagtatatcccatgttgataattgactacagatagcanatataaccaagagactctactanaaacacattagagatagagtggctcattagaaattcaattntaacctaaccctttaccttgccttgattcccatcaccgaatacaattgaatcttgggaatccttattnttgacgtaggaggtgaacatcttcttctnccncgtcatatg

SEQ ID NO: 73217 - DNA, 338 bp, Zea mays
  unsure (1)..(338): unsure at all n locations
gcttaagtcgggctgcagtccctccctgaactgaatntccaggagcagtgatatgggatgaactntgagcctcgattcaaagggagattagtgactntntgtggtaacaccatatagcaatcttgtagatggaagtattgctccaccacttgctgcanagtgttgatcttgctgccataganatctgagaggaaatgagacccacactctgtctgtcaggttgactgaatggctatcgccatggtacagtacccggctgggatcagaccgactgcgcccncaaaagatctcaccaccgatgtgcctcgccgtgaatcgtgtcaccgcgccaggatcac

SEQ ID NO: 73218 - DNA, 463 bp, Zea mays
  unsure (1)..(463): unsure at all n locations
tagaaatcaccattttattacacacatcatgcanggataagcggaacaagcctccacagtcatatcctttaccaacaaaagtaccatgtttcgacacaacacacttattagactcaagaacaactttgtatccatctcgacatagcatagaagtgctaacgagaatcttcttgatagagggcacatgctgcacgctctntaatggcaacgtctntcccgaagtaaactttagaagagactggtccaacaccaagaacatgagcacgcgacccatttcccattaacaaggcgccagacctcctgacctggtaggaagtgaacatagaggcatcagcacacacatgaatgtttcatcactgtccaccaccactcaggtgaatacanactgaaagaacanatggaaagaataccatcccagatgtccatcttcagtcagtggtacacattagtgatttttgtctat

SEQ ID NO: 73219 - DNA, 218 bp, Zea mays
  unsure (1)..(218): unsure at all n locations
ggattgtagcgcatgccaagcanggaagcaangtggctctcatcatccacacaagaacatcatgacgaccgacaggccactagagctcctacacatggatctattcggcccgcatgcttatataagcatcggcgggagtaagtactgtctagntattgtggatgattattctcgcttcacttgngtattcttcttacaggagaaatctcatacccaag

SEQ ID NO: 73220 - DNA, 280 bp, Zea mays
  unsure (1)..(280): unsure at all n locations
tgtagcgcatgccaagcacgannagcatgtggtacccatcatccacacaagaacataatgacgacggacaggccgcttgaactactccacatggatctattcggtccgatcgcttacataagcatcggtgggagtaagtactgtctagttattgtggatgattattcttgcttcacttgngtgttctttctgcaggaaaaatcccagacccaagataccttataaggattcttganggcggctcanaatgagttcagattaagaatcanaaagataagaa

SEQ ID NO: 73221 - DNA, 549 bp, Zea mays
  unsure (1)..(549): unsure at all n locations
agctngagcatagctcanacttaacaatatgaacatgcttcgtcatcatatcagcataattatcatgagtactgatcttgcataacttcaccaaacctttctcaatgatatcacaaatgaagtgataacgaatatagatatgtttggatttctcagtaatcatctgatctttggtgagataaaaagcatcggccatctaattntgtcagccaactcaactactagcanatctttgcgaacctttatccaactattgaaatgcatagaaagggtattggttatgtaattgcatntaataccaaggttaaatgaacatctcatccacttcgcttttatgatctttatttatccatganagcacatcaaggtctgctggcaagatatgaccaatatacctctcanaaacataacttcctttctatatgcccaagctgcaagaaacatgcctctatagcaattaccatggaacctcttaatgaaattttgcattagatgcctaaaacactttttatcctcagttngtcggacacaatntcaacaacacattct

SEQ ID NO: 73222 - DNA, 443 bp, Zea mays
  unsure (1)..(443): unsure at all n locations
tgcacattcaccttatcaaaaacctnccaaaccttggatnttgctttgctgccaccctcaaccttaactggttagtcactccttacgcctttctgacttagtcacatctcgcatcattgattcataactctaacaacatctacctctccacctacactgcatctcatctcaacatgtatcattctgtcgaagagtgcttctgatcagctcgctatttgctcctcattcgctgcacactgatgaaccataaggtccatacttacaattgcaacaaaccaaataccaaacctgaattattgacctggaaaataaatggtgaagtaatttagtgaatgacagctacngngtcactatatntcagttgctgtgcaatctntatatataatctgtataacatganggatgatatcatgangacaacttactaaactactgtagtagta

SEQ ID NO: 73223 - DNA, 257 bp, Zea mays
tatctatgctactcagccaacaactcataaatattggcctaatcattatgtactgttacttgaggcataacaactcctgctagtccagacgtgaacatgcactcgatttatgtctctctacctgcgcacacatatctctcccgatgatggacatgtccatacagggatcgtgagtccaccacttcatcctcagactcttgtctatatatctcaagctggagaagacatattgatgtgaagatgcgactctgagcata

SEQ ID NO: 73224 - DNA, 188 bp, Zea mays
  unsure (1)..(188): unsure at all n locations
gtcagctacgacaagcttatgtnggggtaccacacactctncaggtataaccctgcaatctaagcatgccatgcctgtcctctttctcaagaggacgaaatcaatctggctagtggtgtggccactactgaaggtcaccaggtgggatntcctcttnctaaagaaagtgttggctataaacatgtcat

SEQ ID NO: 73225 - DNA, 283 bp, Zea mays
  unsure (1)..(283): unsure at all n locations
gagtccatagcagaggggggaagcgctatggaatggggatacagaatattgtaccgacgacgtgccgaggatggngcattcagatccaggaagcacgacgcgcgacngccgacgcctcgacgtctacggaactgggtgcgaggcggctgtctactgtgcgaggcggcgagcaccgcgagggaaccgaggggagaccaggcggaaccgaggcgagcaccgcgagggaaccgangcgaccaacgcgagggaagggaatcgaatgccggcgaggcgagcaccgcga

SEQ ID NO: 73226 - DNA, 239 bp, Zea mays
  unsure (1)..(239): unsure at all n locations
gcagcttacaagctactagcccttgtctgcaccgaattatattctattatganagcacacctcagatagattatgcacctcaatatttccaaacaacaggtggtcactatttattcacatcgtgtgtaacacatgatgatgaaaaggagaatgagtggaaaataaagcagaaaaagaaaccgtggaagtatgctcatgtgctggtggcactaggtccagtcagtagccaaaaatgatct

SEQ ID NO: 73227 - DNA, 395 bp, Zea mays
  unsure (1)..(395): unsure at all n locations
gggactggatatgattggacctttcaagaaaagctcaaggggatacacccatgtattggtggcgaatgacaaattcactaacgaggcgtttggatcccttcatnnttaaaggaatggaattcacttaatanaataacttattttagttggaagttggcattccaccactttccannagtaagatataagcttatctcanattcataaggtgaaggataggaaatgatntatacatgatagaatttgttctaattataactacataacactcttcgtctactctctatagtaaaatgtacatataatatctnaacatctngctataatagtgtataaatatatttgtataaaagtgaatagntaattgactatgcctaatactatatagaatggat

SEQ ID NO: 73228 - DNA, 268 bp, Zea mays
  unsure (1)..(268): unsure at all n locations
gagcaaggaatcggactttgcctcgccggagaagccagtccacggtcaccggacttcacccgatcgccggtgaacgtagaccgggtaagtctctgcaccattccncgattccctgcgcacatagcttctacgtcatcccgtggagctcattgtgccatttaattgaactagatcgccgtggtaggccggagccctcgccgccgacgagttcgcccgcctgcgcacgtggaccggtcgattctggccaccaccgtcatcgagccgtacc

SEQ ID NO: 73229 - DNA, 269 bp, Zea mays
  unsure (1)..(269): unsure at all n locations
tcgaagacccaagagcagagcttcgtactcagcaatattatatgtgcaactgatattgagtcttgccgcataacaggatntaactgtataaggtgataccaacacagcagctgctcctgctccgaaggtttctcaagacccatcgcagaacactgtccatgtttcggcatctttatatcgttcttgcttctgagcccctggcgtntagtcagcaatgaagtctgcccacgctcgagactgaatcgaagatctatgaacatactcaatac

SEQ ID NO: 73230 - DNA, 303 bp, Zea mays
  unsure (1)..(303): unsure at all n locations
gctaagtgtgaatangaaaatcagtatgatgaacatacttgaatagtgtataatgatcagtgaacaaaggttcaacacgaggttaaataaccaatgagacaatgcanatggacataatatggtctctgtattggttngaatatatatggacaatacctgagatatcactacatacatatgatcagaatagagggatgaatgattaataggaatggtcaagccaaagtgaataagatatgaggaatcgtgaattggtntaccatattactatcagtncatatatgcttctatgagaatcaaact

SEQ ID NO: 73231 - DNA, 360 bp, Zea mays
  unsure (1)..(360): unsure at all n locations
atctcaagcacctgggctgcagctcgcatttgacagctcgctgatattcttgctgttgccaatagaatcctgaccttgaaaccttcccgacttatggtctggatgctgcatgtattccgcacttgcctgcatggacttccttcagaangtgcttcccggtggacgggagaacgcacttcatgaggacgcctgacgcgccccttcgatataatacctncccaatgagtgtgtagtgagctgattgtctggcanatgcgctctgctgagtcttgncatctggctcttcttcattctttatatanctaataatcggntgcctccagtcatcagagtctgacnntcggtggctatngatgtgac

SEQ ID NO: 73232 - DNA, 171 bp, Zea mays
  unsure (1)..(171): unsure at all n locations
catctagcttaagagaccggtngctaccatgtcattcgaaagatgaccttggcacttgcaagcanggaacaggtggaaggctctcatcacaccannanatgtgatgacaacatcaagacgcctggagctgctacatatggacctcttcggacccgtcgcctatctgagcat

SEQ ID NO: 73233 - DNA, 339 bp, Zea mays
  unsure (1)..(339): unsure at all n locations
gatagatcttgtgcagctggtcaagtangaaaacaggtgggaagctctcatcataccananatgtgatgaccacatcaagaaccgtggagatgcttcatatggacctcttcggacccgtcgcctatctaagcataggaggaagtaagtatgggcttggtatagatgatgaattttcctgcttcacttgngtattctttntgcaggataaatctganacccaagggancctcaagcgcttcctaaggagagctcanaatgnagttgagctcaaggtgaagaagataaggagcgacaacgggtccgaattcaagaaccttcaagtggaggagtaccttgag

SEQ ID NO: 73234 - DNA, 236 bp, Zea mays
  unsure (1)..(236): unsure at all n locations
tgctgaagcaatccattttcttccgtgtccaactcaactcgtcaagaatacccggaaggcggattctnttcagctgtcgatcggttttagttgcgctccttaatgatccttgcctgtgctcgtgatcgcaactcagagcacgcgctcttcgccacagcgtcgatggcggagaatgaagaatgcaanggtcctcatgaccaacaagggagcaacgatgtctgcgacccacacccacc

SEQ ID NO: 73235 - DNA, 168 bp, Zea mays
  unsure (1)..(168): unsure at all n locations
gtgaagatctcttctctangtccccttgtcattggtgtgaggctacaagttcgctactggatanagataagagggaanatatgttgctactgcaccacaagaaaatcttggtgactgacgagccgcgtcatgctctctgccatgacaaagtatagccatttgcatggg

SEQ ID NO: 73236 - DNA, 467 bp, Zea mays
  unsure (1)..(467): unsure at all n locations
gcgtatcgactgcagctncccgaaattntgtctgctatacataatggtgtccatgtgtcacaattgaagaagtgtcttcnggttccggatcngaaccattgagtaacagatgntgtccttgaaccggacttgacatactctgagcaccctattcgagtcttggatcanaaggacagggntacccgaagaaaaactctcangttntataagatacagtggaaccaacattccgaagatgaggctcatgggaaactcaagactnttagataagaattcccaggcttttagcctcttgaanattgaaagcctgatagctattgaatanaggagtaattccaagccaccctgcttgacaganatangaaatannagatgccggttctttcatactacctangatttatcttgacgaatctttatggggaagatgacacttgtgtatgaacaaactgacatgatatacatgg

SEQ ID NO: 73237 - DNA, 314 bp, Zea mays
  unsure (1)..(314): unsure at all n locations
tactactgtataaagatgcagtacccacgtggctacttttagtcgcgtggtaaaggagttatatgtgggaccaggccatgactcgccncagcctcgggcgactactctggaccagcaacagcacctgaccgcaccacatatgcgggtccggtgccgccacgtgtccagagaaagtgacatactctgaggtatcaccagtgagtccagaaccccatgagaaggtgtcggacctctgtatatacggtgcggggtctcaagttgggccaggacctcatgtgtggaaccggaccctggaatggatctagaccctgatg

SEQ ID NO: 73238 - DNA, 235 bp, Zea mays
  unsure (1)..(235): unsure at all n locations
gatgaggcgatgaccggcgctcccgagcgacagacaccanatcggatctatcctaagctnttcccccaactcaatggcatctaataccaactaaggagccctggccatggtgaccgagagcatggcggctaaggtgttgtgttcccggcgatcccaggcgtgtcagtttgaataaaggggtcggngagcatcactaacatgtaagggtgctagaacaagaacgagaagggaatga

SEQ ID NO: 73239 - DNA, 197 bp, Zea mays
  unsure (1)..(197): unsure at all n locations
gccgtgtcgccgtctgaggccgtgccaggttctgccganggtggatatgacgctgagcgtgctgctactctccctgccgatgtctgagcctgcaagaacagttngctttgaagtatgccgtatgtttttgcggccgctgaggcctataacatttaacgccggattataaagctgtgctttcctctcgtttcgtgtat

SEQ ID NO: 73240 - DNA, 337 bp, Zea mays
  unsure (1)..(337): unsure at all n locations
cagcagaaagaaagaagaatctctctttttccgtggtgacaatagtatctggtggataagatcaaaggaaggcaataataatgcagggcagaacagaaatatgcgctcttggattaaactttactccatgctaatgctaagatatggactgcatcgcattgtgggcctgtgggcactcgatcatctctcgaaaaatggttgggtcccaacgatccacaacgatgcacacaccccacttgggtgggaaccatggcctagatggagccgtgcgtgtngtccggctattcgtgaagagattggtcaccgataaaacgtatgcaccgatatgtctgtactt

SEQ ID NO: 73241 - DNA, 275 bp, Zea mays
  unsure (1)..(275): unsure at all n locations
ctcagcttagctccatcatgtatggatggctntngagtctgtccagtttccttttctgcccttctggcagcttctgacttccatgaatagcaatggaccctcggtccgaaggtatcttcatgcanaggtatngtggatgaagaaatgcttcacaagtattgagagtaccacgaccaatgattgcattgtaagggtattccatgtcaacaatatcaaacacaactcgntcagtccttgctgttgtgataaatccgaaaggtactggcattgtgatc

SEQ ID NO: 73242 - DNA, 136 bp, Zea mays
  unsure (1)..(136): unsure at all n locations
atatcctctagtagatgtgcttcgactctggcacagtactgttgactgtgcgagcttcngactcctctctgaagtctcgttgctgatgagagtngtggctcccttcttgctgctggcctacatgcattggtggtgg

SEQ ID NO: 73243 - DNA, 176 bp, Zea mays
  unsure (1)..(176): unsure at all n locations
aaaatactcaccgctatgcacatattnntaatattgagatcaatatactatatagccgcatgcatctgaaccctctcgttcacttgcctcgacggcgccgcaccgcgcccgctctatatacgacgagtcaagcatcaagacaaaacctacaaatctggatcattcaaacgcctcat

SEQ ID NO: 73244 - DNA, 442 bp, Zea mays
  unsure (1)..(442): unsure at all n locations
gctggaagctccgtcgcgcgcgcncgtcgttctctgacgcaagctcggcgagctccgtcgcacgatcaccgagctncgtcgcgcgagcccgccatccgttcacgccggcgtcgcgacgatcactcgagctcatcgcgcgcgcncgccatncgtnncacgtcgcctcgttccccgcggtgaggcctccncgtctccttcttccacgcctggcattttttcttccacgcctacaaatttgtgttctgaaaatatgtggttggtccanattcagagttctatccatagaggtttggntaatcatcattatgctactagaagaaaaagaacccataatggctaactatgtgatcatgcnggttgctttcgaccggattgggagatacaggaataggcaagggaagatcgcttcggaggagtctcgtcttaggctgtcagaggtagt

SEQ ID NO: 73245 - DNA, 451 bp, Zea mays
  unsure (1)..(451): unsure at all n locations
cgtgcatttctaaatatatagaccttgtgcagcttgtcaagcaggtaaacaagtgggaggagtgcatcacagcaagaacgtgatgaccacatcaagaccnctagagctgctacatatggacctcttcggacccgtcacctatctaagcatatgaggaagtaagtatggtctagttattggtgatgactnttcccgcttcacttgngtgttctntttgcaagataagtctgaaacccaagggagcctcaagcgcttcctaaggagagctcannaacgagttgagctcaaggtgaagaagatacggagcgacaatgggtccgaattcaagaaccttcaagtggaggagtaccttgaggaggaagggatcaagcacgagttctccgctctctacacaccacaacataatggtgtgtagagaggaagatangacgctaatcatatgtgaggacat

SEQ ID NO: 73246 - DNA, 450 bp, Zea mays
  unsure (1)..(450): unsure at all n locations
actccatacatngnntaacatgccatgaacggaggtgatacccanactccatacattgtntaattgcagccagcacaaggcgttgcagcctgtccacccgattttccgctattgtgtgacatcgttctgtcaggagaggngtaacactagaagctccaagttcctaaatagganaacaaaacagacttagaagtagacaatgaataagaagaacccaaatgtgtgtaacatacagtacatttctctataagccaatccgcacatccgcctttcagtgtccgtgaggaatagaaataataaagttattacagggatggaataaaaattctcctggtttacatagtacattagnttcacaagacttaccanacgcagcanagacatgccattggatgccttgangagctatgaatcctaacatctctaataactcaacatctgagccacctt

SEQ ID NO: 73247 - DNA, 355 bp, Zea mays
tcacactgagatatgacatgctcgatggtaaccgcattaaacttgatggttggacctggcagggctggatggctatgcagggcagtatcaatcttagacagtggccgatagaaatatcactatactaaatagtgttcatgataacacatatggggcaaataaatgaatgaccttggggaagtacactgaactgcaacctctataaatgtggcatgaatttgcctcactgaaggagactactgactatgggaactgcacaaagtgattttgattatgtcctacaaagcctttgctaaaaaatcatgtgttgctattttgtgatctactgcggtcaactggcgtagcgatgtcattg

SEQ ID NO: 73248 - DNA, 420 bp, Zea mays
  unsure (1)..(420): unsure at all n locations
tgggaggcagtataagaaatcatcttcgtctgtgccattgaatactaacgcctcctttggatacttcagttctcgggcatagtgattagcttcaaaaatctcttcttcagataatctttntcccgaagcatggcgtacaatataatcaagtactgcggaagatgcttcngnggcagcagngcctagttcttcagcctaaatttgttctatcgnttctggttctccggcttccaagggtttcaccttggcgggctcggaaggcccagcttcagtttttgcctggttctttgaagcttcngcagcanaggcttcagtgtgcacctcggaagtttcaacanatntcttcggagtcgtgctagaagacttaattgtctccaatacatctaacacattaaccatttctttcctttnntgggcact

SEQ ID NO: 73249 - DNA, 146 bp, Zea mays
  unsure (1)..(146): unsure at all n locations
ataagcatgtgtcgagctcagctctatcaatatctactaagtatagctgaccctctaacatacccttagatgctattgaatcatcacttcttctaaagacagtgacacctacatcagtatanagacagatgtagcccattngacat

SEQ ID NO: 73250 - DNA, 306 bp, Zea mays
  unsure (1)..(306): unsure at all n locations
gcttcaatctctccagttccacaatngagacaagtgatcatattgattagtgacttgagagagagagagagagtgattcgtgtgttatttgtcgctcttgtcgcttggcttttgcaatcgtgctttcgtcttctcccattcttattctcaagtgacttgtaatcaaagcaagagacaccaagtgtgtggtggtccttgcggngtctaagtgacccgtttgattaaagagaaagctcactcggtctaagtgactatttgagagagggaaagggttgaaagatacccggtctttgtgaccacctcaac

SEQ ID NO: 73251 - DNA, 139 bp, Zea mays
  unsure (1)..(139): unsure at all n locations
acaggtgggaggagcgcatcacagcaagaatgtgatgaccacatcaagacccctggagctgctacatatggacctcttcggacccgtcgcctatctaagcatangaggaagtaagtacgggttagttattggtgatgac

SEQ ID NO: 73252 - DNA, 364 bp, Zea mays
  unsure (1)..(364): unsure at all n locations
tcttttcctacctttctggcactttggtttgggtctattntagacctttctttctcttcataatatatgttcgaaagaaaaaaanacttgaattcaatacaaacaataattcagaggtgtatagtcttactctctgtgccaaatagcncacatcgcatacttcgtggaacaaacattntcaaagttgactagattttagaagataatataacatttgtatcttaatacggttgtatgaaacatatgatgtgatttgctaattgtgttggttgagactataacatnacacattntatacttggcaaactagaaattatgactttcaaggcagtgtgcctatttggacgaggtgataaaaataata

SEQ ID NO: 73253 - DNA, 555 bp, Zea mays
  unsure (1)..(555): unsure at all n locations
ctaagctgaccgcgattctcgagctcgaaacagatcacgatctaatcgcaacacanattcgtagaggaacaggcncaanggaacanatatatatatatatatatatactaagaacattacaccattcanagaanaacataatanaacatgcanaaatagagcttgcttctttgtgacggaacctccaagtaattaggcccacctacagntgtccttgtccaacggacctcagacaaccctgtangtgcccctgaactactngacaagctcggtatctttcttaccttttcagaacgtctcacccgtcttgcgacatacagaacatcggaggtaagaaatgggaagcgatacataactacattattaaaagtaagacaagtgttatacagccagaatatagnagtgtgagagatatatacacatccagggagccaactctccatagtttacnagtatctataagacactctccgatctacttgtttctatgggacactatcagacacaaattgtctctactaaaacaggataactgatgatatacagctacgctag

SEQ ID NO: 73254 - DNA, 393 bp, Zea mays
  unsure (1)..(393): unsure at all n locations
ataggggcttatgtangacagatatgagggtttaagcggaaatgcaatntaaaanagggatttttgntnngtgtgntgtatgctcatggccattgngtgactattctgcgtggggcacaggggcagggagtggttcagtgtttatctattcatgtggacgtcttgctagttntacttcccgttggacttatggggtgtttgaatgcagtaaaactaanggtgtgtttggttcaagaaatgtaacggaaatgataatggtaatgtgttacgctcgattactggcggtaacaagtttgaataggctgatatcactntttagtgtgatatctgattacgggtagactaaaacacatatgagttaacgntattatgtacctattacgttatgaatat

SEQ ID NO: 73255 - DNA, 208 bp, Zea mays
  unsure (1)..(208): unsure at all n locations
agtcttagcaattaagcaagtgtcgagntcagctctatcaaaatctaccaagtatagctgaccctctaacactcccttaaaagctattgaatcatcacttcttctaaagacagtgacacctatatcagtaaaaagacaggtgtagcccatttgacataattgtgaaacagaaagcaaattgttatctaatgaatcaacaagaaaaaca

SEQ ID NO: 73256 - DNA, 517 bp, Zea mays
  unsure (1)..(517): unsure at all n locations
tccgcgatcttaagcacctgggctgcagctgagtggatgcgaggcatcatgacaaggttatactatcacgaagctatgcgcagaaaagcttcggcatggcagcaggaaaggggaaccgacttaaagatgaaaagccaaattagacctcggagaattacgatagagntattgataaatgtaaaggacattaatgtaattntacacgggttgcatcccgtgcctataaatagaatgaacagttctccgtactgggtcacgctgattggcattggctcttgcgtcacgcttgtacttttaccttctcatgagctgaaggacatttgaattngaatcatttctattttccataataataaaaaaaaatagaatgagtcggaataaacataatggttatgtatctttatgttcatatggtccttcttcatatatatttatgctgatgaagatgtcttcataaccttgccgaaatcatatgtcttanggaataatgttcgaaggtgaggatataacattaaca

SEQ ID NO: 73257 - DNA, 458 bp, Zea mays
  unsure (1)..(458): unsure at all n locations
gatccgaacagagangtgatggaaaatgactgctggtatctgntcgatgaacgagacagagagttcgaatgcgaaagaaatcggtctgacaagctaactggttcaggtctcacgattcatactataatcgaaccagccttaaaaactagattcctaactgagaagtggattggtgcgtcagctattctgtcaggatcaagcgcagagttntcggggtaaaatttagctggcaacacnacatgaatagtggtcaaaatgttcgtttgattcacgttattgtngagcacggctgtgtacagatggatcagctgtcccctgtgatatgacatgttactaagcaagctgcatgtatgttatactgagtatgcacaaggcatatattgtctatatggcaaattgctttacgcctcaccatcatgatggtttcccttctagcgtatcagcctggtttccgtttg

SEQ ID NO: 73258 - DNA, 280 bp, Zea mays
taggcaatatataacagtctttgaatgtcactcataaatgtgagtgaaaaaatatgaacttaaaatcgaagttgagtgcagattaaagacttataatattgtttattaataaatattgtgaaccttataataccccatcttacgtatgtgaccaatcgtgcaacttcaattaagaatccccttcattagaaaccgtcaatgataaccttgccacgagtgcgtgcacgtacctaccgcgccaatcatctgtaactgcttcgcgccgtttccaatactgtac

SEQ ID NO: 73259 - DNA, 185 bp, Zea mays
  unsure (1)..(185): unsure at all n locations
gcgcatgtcaagcangaaagcaaggtggtgttaatcatccacacaagaacatcatgacgaaccgacaggccgcttgagctactccacatggatctattcggcccgatcgcttacataagcatcaacgggagtaagtactggctagntactgtggataattattctcgcttcacttgggtgttctt

SEQ ID NO: 73260 - DNA, 409 bp, Zea mays
  unsure (1)..(409): unsure at all n locations
atgcagagctganatgccacctaagtaaaaggtgaagaagatccaaagtcgntcctaaggggatgcagagcttagcacacaagtcgttcctacggggatgcagagctaatataccacctaagtaaaaggtgaagagactccaaagtcattcctaatgaaatgcagagccttagntnntgtgaagcattcgtgcattaacatcagttgcatcatatcatcatgtcatactacatagcattgcatcattcatcatcttgcatcattcgaaatagtggaanagaagaacatatngtccttcatacatactggctaacccatgaggggtgtagcactatcttcagcanagaaatatgataggacgtatcaataatacagattatgccttcgacatggtctcatacatatctat

SEQ ID NO: 73261 - DNA, 147 bp, Zea mays
cagcatgtcaagcaggtatacaggtgggaggagcacatcacagcaagaatgtgatgaccacatcaagacccctggagctactacatatggacctcttcggacccgtcgcctatctaagcataggaggaagtaagtatgggctagtta

SEQ ID NO: 73262 - DNA, 191 bp, Zea mays
cattcttctgaagatcgatattgtgtccccttcttgtgccatatgcagcatgatgtatgatgcttatgccatgcgaaatgatgcgatgaatgtatgctatgtaacatggtatttattccgaagatacacgcacatccctgtaataaaacacataatcttttaagatcagcgttgacttttcgctgtatacc

SEQ ID NO: 73263 - DNA, 367 bp, Zea mays
  unsure (1)..(367): unsure at all n locations
cctacatcggcacagtccttaatcgactcagacggagatactacaccgagactcctttctcgtgcaagtcacccgcccgggtctcagttaatcatttcaaacccaaagttgggtacctcgcagaggtacatcttttccgatgttgaacccatcatggccatgatggatccaccatcaagttttattttcgaaaacatcccacccacttttgccacatcatcttttgaaaaacaaaacattntgntnttctaaagcaaggctaagcatcaaaaatctnnttgtaaacgggtgatcaaggaaggtaatcaaattcaaggaanggaaatacaggaatggtttagcaatcaacttctatcacctaatgcat

SEQ ID NO: 73264 - DNA, 450 bp, Zea mays
  unsure (1)..(450): unsure at all n locations
ctgtcactaagtactgcatacaatatcatgtatatgtaactggttaattcaccatgaggagagtcagttcaaatgtgttngtacaagtaaaaaaaacacaagtggatgctcatnggttccaaaagcgcacgatgaaatccggagcaattattaaatggacataaaatagtaagcaattactccactcatggtgagnataagctggtgttaccttgccgacttaagttagtcgtttataaaggtcgtgttgaatacaaagcctganggttcttttcacgtcgatctttctatatnagtggattgaagagggaaagtaatngcctgcacctatcacagtgaaaagaatagtacttannaaactgaattgatatatagatagatacaacaatctgggatgagaaggaacaactaatacaagcatgcacagagaacatgtcaggaatttttgaa

SEQ ID NO: 73265 - DNA, 307 bp, Zea mays
  unsure (1)..(307): unsure at all n locations
ctatttaaatactccataattccttatntgggataaaaatcataaaactatntttattaaatactatagaanaccaggagcctagtaaaaatggtctagtatntttagcattntcagtaattntctagaaattatntagtcctggcagaaaaagaaaagaagaaagactctacagtattgggctcatttcaatccgagacgggccagcaaagacagaactcgcctgcgcgtgcgcncgtggaggacagttngcacagagacccctggcgtttatacaactagcagaggggtcgcgacactatntata

SEQ ID NO: 73266 - DNA, 346 bp, Zea mays
  unsure (1)..(346): unsure at all n locations
ctaagcttcgagcgccgaggtctcanaaacaccttccctgagctcngtgtcgataaacgatntaatntccctgcgcgtagcggtcccaccgtgcagaaatactgntcggtctctgcggtccaccgtacagcgagtgcgagcgagtgtctgcctggtgtaaaacttctggcgcttcgccttcttacctgcggcactatataaacagacgagtaagtgtgaagttaccacagcatttactgctannttgcactgtnntgctgccaaaattttaaccaccgccgaagcttgtctgtcgaaatcaaacgaagcttcatcttgaagcctgcttcggaggagaaaagtatta

SEQ ID NO: 73267 - DNA, 284 bp, Zea mays
gagagcagaagacaaccaaagtgtgccctagtctggcgcaccggactggtcggtgtgccaccggacagtgtccagtgcaccaccggacagtgtccggtgcaccaggaaactcaactccgaactgctcaccttcgggaattctgggagccgcttcgctataattcaccggactgtccggtgtagcaccggactgtccggtgtgccagcagagtaacgactactacatcgccaatggtcgtctgcaacagcagttaatgtgctacagtgcgcgcagaagtcagagc

SEQ ID NO: 73268 - DNA, 387 bp, Zea mays
  unsure (1)..(387): unsure at all n locations
cctatactcaagntanataanatataantaagtaaactccttgagtcattggtgtcttctgtgtgaattctccatggcattgcttcataaggatcacaaacatctntgtctcaccttntgaagcanacacanatcaagccatgtgacttgaaccatntcaccatatatgagttcaaatcatggcttcaagtcaccttactgatgcatcaacacaatataactcttcatagctganntcgtcatttgattagtgcaagtactctcttcttcacctagcaatggacctcggccacaagtcgcgcttggcctcaccttcgctagtccctcaagccctttcttgtatcttcacctatcagccattcttgagtcacatcatattgagcatca

SEQ ID NO: 73269 - DNA, 407 bp, Zea mays
agcttatgggtaacttgttttctatcacatatgatctttcacaagtcttgcaaaggaaggatataaatattatccatgccattgatttagttgatgatgtgaaatatcaattgattgccttgagggatcatggttgggaagactttcttgatgaggtcaaaaagttttgtgaagcaaaatgtgttctagtgccaaatatggatgatgagataccatgtagaagccgctcaaggcgtgaaaggcttatcatcacaaatcttcatcactaccgggttgagcttttttatgtcacaattgatcaaatcattgctgatatgaatcatcggtttaatgaagcaactacagagatcttaacatgcttttcatgtcttgatccaaagaataatttctccaagtttgacaccgat

SEQ ID NO: 73270 - DNA, 439 bp, Zea mays
tcttaatcacgccgctgcagctttcttaattggagttgccctatcctatcaacctcttggtcataatcgtcaaactaattttctagaggcatgaattatagaactgacatcctatatttaacaaagtgaacactagtgcatacttcagtttcagtgcaatgtctaatttgcaatgtgtttggtgcgcttaagctctgatgagtctcatgttattttttttgcaatcgacttgcaccatcaattgatatctaacaacatgatggagtatgaacttgtactctgctttcccatagccaattcatcattgcactatgtggattatattttcttaatgattcccagggttgtgttagtttgaagtataaacatactctttgtttctcaaagaatgccttttaacattactaacaattcatttgcttggcaagatagagtcttg

SEQ ID NO: 73271 - DNA, 420 bp, Zea mays
gcttaacataattaaattcgaagcttctctctttatcagaaaacttccaacaagaaaagctggagcttaatgcaaaacttgaggccgaagtccaaaaaagttcagagctgaaaaaatcattgacaagccttcaaaataaatgtctggaagtcagcaatcgatgcgttcaacggctgaagcaagtgttctatttttttggagccagcagcgagaagtttactccttcgactgaaaacctgcctggtgccttcgagcatattgaaagtgaaattgatgatcttgacgaagttatagctggacatggtgacttctgtgccctggtaacttctcggagcacaactgttgcctttctgaagtcttgctgtgaacaccgaaaggttatcaatagacccaactttatcttatcaccagcaggcttgg

SEQ ID NO: 73272 - DNA, 417 bp, Zea mays
tagcttctaaagggagagcacattttaggactaataaatgttcattttgagaaagacaggatttgtagcgcatgccaaacaagaaagcaagttgggtccaatcattcacacaagaatatcatgacaagtgagaggccactggagctcctacacatggatttattcggcccgatcgcttacataagcatcggcgggagtaagtactgtctagttattgtggatgattattctcgcttcacttgggtgttctttttgcaggaaaaatcccatacccaagagaccttaaagggattcttgagacgggctcaaaatgagttcggcttaaggatcaagaaaattagaagcgacaacgggacggagttcaagaactcacaaatagaaagctttcttgaagaggagggcatcaagcatgagttc

SEQ ID NO: 73273 - DNA, 293 bp, Zea mays
  unsure (1)..(293): unsure at all n locations
gcatgctttaagtggaattgggagaagattttatctctttggtgtgtctagaattgaaagctatatctctagtcagtagttggaaagcggaaaacttggatgccttggatgtggggcggttgcggaccctggnttgcaatactctcctgatttacgactctttatgtgcgcctacactctgatgactctgccccatattgtttatgaaatacttgtaccatcccctcatatcttaccacatctaggagtatgaaccttctctcctcctcccttagccaatttatcactccact

SEQ ID NO: 73274 - DNA, 412 bp, Zea mays
agctttaaccctgccgcgagacctttttctgtttctttctaatcataatgaatgcgatatcgaatgtcatacttgatgcatattcaccttatttgttcccttgtatgatgtactgttgtttcccaatttgaatggatggatgtatgtatgcttgcaatcgcatagagaacgatccggtcgaagagcccgaggaactcgcaagagaagcccctgagcagcagtcgtttggtggaggcaagtgtcccttgacctatctctgtcctattcattatttaattcacctcccgctttacacatttatgcctaaagattgactagcttttgttatccatgtccttgtttacctatttgggttggattattattagttagctttatgctattgctcaactataatcaatgaacatgatga

SEQ ID NO: 73275 - DNA, 444 bp, Zea mays
ggatctataaaacggcccgcagcgatgcagcttctaaaaaccaccacttatttattttggaagaggaacattattctccgctccggccctcacgagtgaaatatcacgaaagtatctccccctcattgcattgatctggccttgtctaatagctgatttttcgaagacaacatgacttggtctccatggccgatcttcgacatcttcattttcacttttcacatcaaagctttcgctattgctagtcttcaaaaatcccagctaacatctcattggcgatctctcccatgtaggttctatccatggcctcgtaaaacccggccagcgttggatcaatgatcttcttcacatcagccatttggacaatagttgctagaatgccgaagctcaaaatacaatcaagcttgatgaagtagggagggttaaaatggccaacacaacacg

SEQ ID NO: 73276 - DNA, 412 bp, Zea mays
agcttagagtatgcattgattttcgcaatttaaatagagcaactcctaaagatgagtatcccatgtccatagccgacacattaatcaataatgcatcaagaaatagaattattatctttcttgatggtaatgctggatataatcaggttttcatggccgaagaagatgcgtctaaaacggcctttatatgtccaggcttcattggtttatttgagtgggttgtcatgacatttggtctgaaaaatgctggtgctacttatcagagggctatgaatttgatctttcacgagctgttgggaaacactgtgaaagtctacattgatgatattgtagtaaaatcggctgagtttagttctcatttagctgatttgcgtaaagcctttgataagatgtgtcggtatgtgttgaaaat

SEQ ID NO: 73277 - DNA, 362 bp, Zea mays
tcaaaacgacatccaaaacacgagccattctcattttcctaagagtcattgttgtagcaattgttagcttcaacaaccctgtcatggttggaagactcagcagttttggatgctcttctgcctttgagctctctgtttctgtttcttcaaccggactgacactagcttcaaccgtcatagcaggaattttctccggagtcaaagggatggcttcggcgtgttcaacaatctccatctttctgtatcaagcactgcagctatcctttctaaagaatgtggcttcggcctacaagtcaaaaccttaactctcttcggcttaagcgcggaggaagaagaataagttcccatttttcttttcgaac

SEQ ID NO: 73278 - DNA, 382 bp, Zea mays
ttctatcataatgaatgcgatatgcgatgtcatacttgatgcatattcaccttatttggtcccttgtatgatgaactgttggttcccaattgaatggatggatgtatgtatgcttgccatcgcatagaaaacgatcctggtcgaatagcccgacgaactcgcaagaaaatcccctgagcaacagtcgtttggcggaggcaagtgtcccttgacctatctctgtcctattcattatttaattcacctgccgctttacacatttatgcctaaggattgactatcttttgtatccatgttcttgtttacctatttgggtcgattattattgtgtagctttatgctactgctcaactataatcaatgaacatgatgagactatcta

SEQ ID NO: 73279 - DNA, 364 bp, Zea mays
  unsure (1)..(364): unsure at all n locations
agcttctaaagggagagcacattgtaagattatttaatgttcattntgagaaagacaggatttgtagcgcatgccaagcagggaagcaagttggtgcccatcatccacacaagaacatcatgacgaccgacaggccactggagctcctacacatggatctattcggcccgattgcttacataagcatcggcgggagtaagtactgtctaattattgtggatgattattctcgcttcacttgggtattctttttgcaggaaaaatctcatacccaagagaccttaaagggattcncnnncccggctcaaaatgagttcggcttaaggatcaanaaaattagaagcgacgacgggatggagttcaa

SEQ ID NO: 73280 - DNA, 341 bp, Zea mays
tctgtcacgcgactaacacagaaaagggcgcgagccgggcaccgcgtactccacaagaaaggaggggtctaaacgacagctgcgccacgcatcgcactaaacatggccaaaagggaggcccgggccggcgcggcccaagcacgaaacgggtagggcacgaaccacatgggcaggtaaatagccgggcggagccggcacaacacgggagcccaagaacaggcccaagcacggcactaagcctgggtagccggcccgggcccggccgctgaacagggggagccggcgacgcgagcaacccggagaagacacaccacagaatgtgacccagacgttcacaagca

SEQ ID NO: 73281 - DNA, 267 bp, Zea mays
ttgaccacgacgtcatcgatggaggcctcgaccgctcggccgatggggtcaccaaacacgcgggtcacgcatcgccgggacgccgcccccgcatacctcaaaccaaacggcagtgtaacataacaacacatgccgaaaggagtgatgaacgaagacgcgagcagagcggactccctcaacccgagctggagacaccccgagtaagcatcgaagaaagacagggtgccgcacccagcagtggaatccacgatccgatcgaagcgaggc

SEQ ID NO: 73282 - DNA, 215 bp, Zea mays
  unsure (1)..(215): unsure at all n locations
ccccccaggcnnttgtctcaacgcacnaagacgagagcacggcgaaggagagttttcccgcgacacaaccgcgcgggagaaacaacaaaggcagggccccaacgaaaaaaaaaccgaagctatcacaaaagtttgcggaccaagactgggaagaacgagacaacccccaagaacctctcaaccccagcagccgaaagcgaacagcaaggcccaca

SEQ ID NO: 73283 - DNA, 432 bp, Zea mays
  unsure (1)..(432): unsure at all n locations
gatcttaagtcgaccgcggctgcaactgtatgttagtggactgctttttttgtctaacctttntatttctaaagaatatttatcctctagttaattacttgggcactttactttgcggtaacctcatatgtttttttgtcaaacaatgcagaaagcttgacatgacacacacaccatccttttcacaagattacatggtgaccacacatattagatgaaataaacacccttcttgtccctgctctctccctctatgttatttttttcttcaaaaacatattaaaatgggctcttgttcgtctgtttaataattcattcttcccgtgtttacaaattcacgtgctaatataatcctaatgtctgttttacaggaacttacctcacacatggggttacctgatgtctccataaagcgactttctgtgactcatg

SEQ ID NO: 73284 - DNA, 360 bp, Zea mays
acactataaaccgagagggattggctgccgatccgaacaaagtaacaactatcctggggtggaaagcaccaaaagatgtcagcgaaatcaagagtttcattggaacgaccgactattatcgacgtttcattgaaggtttctccaagattgccaggctaatgacagccttgttggcaaagaaaggtgagttcaagtggaccccagcatgccagaagtcctttgagacaatgaaagagaagttgacaacggcaccaatactgattctgcgaaaagttcacaagtcattctcagagtattgcgatgctctcgtcaccggactgggatgtgtgttgatgcacgaagggagagtactggcatact

SEQ ID NO: 73285 - DNA, 347 bp, Zea mays
ctctttgaaaaccttaaaagaaaatgcttaaaatgttcgcaacatgctttcataagtgcataaaccgtcttgagcatcacacatatactatgacacaatgcacttcactttctctatgatatagacttattctcactaacctaattatgtgcacttggcatctaaagccaaaatatgtattcctctcaaggcacatatttagggggagaaatctatactatatagaactatgaccatgcttaattaacatatctcttgaccatatctctctcattgtgggacaaatgcatatatcctattattcccgtaccatgacaaccactaatatgctcccaagtatatactat

SEQ ID NO: 73286 - DNA, 264 bp, Zea mays
  unsure (1)..(264): unsure at all n locations
cttcccttctcttttcctcccccccccagtggnttgtgtctgcaccgannaacacgagagcccaaaagaaactttttcaggggnccaaaaaaagtgcggtgaacaacactgttaagaaattcttcaccctctgcgctgagggagaattaagtagatgatttcttaactacctagtcaccgtaactttaaaaagagaactggatcaaactctaaaagcaagattatgatgagatgaaaacctgtgtcggcaaaacacgcgactgt

SEQ ID NO: 73287 - DNA, 425 bp, Zea mays
agcttcctccagcattcttgagcccctcatgcattctaaggtaacaataggtcccactaggggttatgaaacttgtcttaggctcattcgcctccttcatccagatttgatgatagtctgactagcagtccaataagctcataagccctaaagtggccgctgcatctacaagggaatctattcttggtaatgggaattcatccttcgggcatgccttattgagatctgtgaagtcgatgcacattctccattttccattagatttctttaccatcacaatattggccagccactctgggtatgttacttctctgataacaccagcactcagaagcctttttactttgtttcgtgcaccttcggctttatcatcggaaatttccgaagcctctgttttcctggcctgaaagccgggtctacattga

SEQ ID NO: 73288 - DNA, 421 bp, Zea mays
agcttatgccgagatttaaaatatggcaattttatttgaaatcatgcttatataggcgtgtggttaataataataataacaataataataataattttttggcttgtgtagtgaggtgatgacatgtcgtaagtagtcatcgcttccaatatctatttgagtcgggtcaatgcgcattatgtgttcatcgagatacactttgcacctagtgtagggttgtgttcaaaaagctaagtagacacttcaagtaatcaagtaagagtccattgtgttaagagattgttatatatatgttgtgtctcggattgtgataataatacgctaaccgacgagtatgttgtatagcaagctatgtcgctgctctatttagccgaattgttagaaggctttggttaagctcgtaatcatggtgatttgcttg

SEQ ID NO: 73289 - DNA, 371 bp, Zea mays
cacgctttatcgacacaggtctgccgattttttatttataacccagcgtttcataagagatcgaagcatatagataccaagttccactacattaaggaatgtgtggctgatgggggggtggatgggcaacatgtaagcactgaagatcagctcgccgacatactgacaaaaccacttgcaaggattcgttttgcaaagatgcggaggcagctaggggtggtttacatttgacagattaagggggcgaaatgttgcgttgatctctttgtaaacgtgtcaaatgaacacgtatttcatttaagagcatgaaagtagtttgatttagtaacaaatcatgcatatttggcgtaaaaacgcgggtgagctggaga

SEQ ID NO: 73290 - DNA, 401 bp, Zea mays
  unsure (1)..(401): unsure at all n locations
agcttcngcgtgacggcagcagatgaaactcttcttttatatgaaaaggctatttatacctcgacagattactatagaattattatcgagtgtaaagggcattaatgtaattttgcatgggctgcgtcccgtgcctataaataggtgaacagtagccccgtactgttcacgctgacttggcattcgctttttgcgtcacgcttgtattatcatctccttccaattgaaggtacacttgtaattcaatgatatttctgtttatgtttaatgataatacataactgttcatgatgccatttatattccttacatttcatccttcgtcgttatgaaatgaaattatgaaggtatactcttcataaccttcgtccgaaaagcattataccccaaaagagataatg

SEQ ID NO: 73291 - DNA, 389 bp, Zea mays
  unsure (1)..(389): unsure at all n locations
agcnttgaagatcttttggcaaaaaaaaagttatatatgtactactccctcgctcttaatttataacttatcggactttttatacatagattaattgactcgtcttatgattttttgcgatttttttttaaattcaaaaaatatacttaaagtatattatatgttaaacaatatcacaataaaatttagtaatagtgatggtttttaataatacgaactgactaaatttagaggaaagaagtcaaataaattataaattggaatcatttaaagtaggcgcaaaacttccacaaaatccattgggcccctgcagctacaactacgaataaataagaggaggggggcgctatgtcttctgactgacccatcaaaaagtagcgcgtcaacat

SEQ ID NO: 73292 - DNA, 415 bp, Zea mays
agcttataacaagagaatggaggcttttttctttatcatatgtgataatagaaggggaattgtataaacatggagtttgttcaccactcctcaagtgtttatcaagaactgaaggtatggaattaatgaaagagatacatgcaggtctgtgtggatctcacattggatctaagcccttgttgggaaaaagttttcgacaaggattttactggccgaaggcagcttcggatgcagcagaattagtccaaaaatatgaaggctataaaaaatgtgcaagagaccagaagcaaccttcatttctcactcagttaatacagcccacttggtcgttgcaaaggtggagtctcgatttgctacgcccacttccaccagcacaaggaaatctaaaatatgttgtggtggaggtagagtattt

SEQ ID NO: 73293 - DNA, 409 bp, Zea mays
  unsure (1)..(409): unsure at all n locations
agctngaagccatggtaagtatcatatgtatgcgaattgactcaagcctagcgacgggtgcataggtttcattgaaatccaaaccttcgacttgggaatatcctttggccacaagtcgggctttgttccttgtcaccacaccatgctcatcttgtttgttgcggaagacccacttggttcctacaacattttagttaggacgtggaactaaatgccatacctcattcctcgtgaagttgttgagctcctcttacatcgccaacacccaattcgaatcccttaatgcatcttctaccctgtatggctcaatagaagacacaaaggagtaatattcacaaaaatgagcaacacgagatcgagtggctaccccttttgaatatcgctgaagatggtgttcacggggtgatct

SEQ ID NO: 73294 - DNA, 411 bp, Zea mays
  unsure (1)..(411): unsure at all n locations
agcttcattccgctgaagcaaccattacttgaatggtctagtgaacaatgtatgcaatagttgcattaagaaaacaatcatgtcatttcaaaaacttcagaatttcaataggaccattgcatcttttggaatgaaatcctgaagaagcttcaattccacatatggctcattggcatcaatatcagatttcccatcacttgtaaggacaacctcacgatttttcacaagaacatttcaagatatcattatccaatgattgtaatgttttagatgtaaataagaaaccaacatttttctagtaatcttgatattgttcaaatctcgttgtaagcaaggaaatagcttgatcaataatgaataaaaatagttgattctaaatgattcctctgcanaccgagtggtggaagcatt

SEQ ID NO: 73295 - DNA, 412 bp, Zea mays
  unsure (1)..(412): unsure at all n locations
agcttgtgatccataatcactaatctctatttatattgaaccctaacatttaagtctgtccttctatgttcataatgtcttgtcaaactattgtatacttgattttacatgtttagtgtgctattcattcgtactttccaaatgtattgaatgtatgatcgctttatttagacaacgagtaacccgtggttcctgagtgtgttgccgaagatctttcttagcaacaacctagtgaaggcaagtgccctctgacctattatatcctacatactttataattcaccgtcccacattacattattgaagcttaaggattgactagtatgtagttaccttatccttgtttacctttagggttataatggttaactntatgctattgctttactttaatcaatgaacatgatgtgaa

SEQ ID NO: 73296 - DNA, 384 bp, Zea mays
agctctgctcttgggtctgtggaagtttaatgtcttgggaattaggagggcggttcttaaaactgattcccaggttatttctggtcatattgacaagagttgtaaagcaagagacccgaagcttgagaaatatttaaacacggtccgaaggattgaggcttactttgaagggtgttctgtcaaaaatattcctcgaggaggaaatgaacatgctgatttgttagccaagtcagcagcacaggggctgcccttaccttcggaagtatttttcgaaacaataaaagcaccttcggttgaacttcttgaaagagcagtcctcaatatatcttctgtttatagtgaagactggagaactgagatcatctctttccttcagggtaactt

SEQ ID NO: 73297 - DNA, 396 bp, Zea mays
agctcggagtataacacgtgttgttgataactaaagccaacgtgttgtgaggggagatggagagagagagagaactcttcacttgattgctccatttaaatgtggcggcgtttcgaccccggggggtccctggaccgacgagtaaattgtctccgcgtgccccaccccagatgggtctgcgcgagacggagcgcacaggggggaaaagccggagggagacacgagtaaaaggggaaacccccggtcttcgtgtttgttccccgcccaggtcgggtgcgcttgcagtaaggggctacaagccgtcgcgtgggaaggagcgagaggcttacttgcccaatgtcccgtccttcccgcgcggccaaccttctgtaagagggccctagaccttcctttata

SEQ ID NO: 73298 - DNA, 406 bp, Zea mays
  unsure (1)..(406): unsure at all n locations
agcttgtagtatggtattgtttatgggtgctacacacatcattattgatctttaattagagtcacccataacagtaggctactccatgctgttagctataatctcagcaggcattcaatttcttttttccttaatgaaaaagtatgatgaccaagactaccaaattaaacaacaaaccatactgttacccctaagcatgtcttcccttatcgatctcagagctgaaggaatccagttcactctacttcaaaccttttaagccactggcgaacttttctttagtgctcagtcagattgaagatcttatatctggaagggactatganactgccatggagcaatctgaggagctccgaaggctggctcttgctgagcttcattatttccaaacatatgactgggtcat

SEQ ID NO: 73299 - DNA, 426 bp, Zea mays
agcttatgaagattcttcatcccaacatgatctattcggtggtgccagagccaacccatgttagtcttagcaattaagcaagtgtcaagttcagctctatcaaaatctaccaagtatagctgaccctctaacactcccttaaatgctattgagtcatcacttcttctaaagacagtgacacctacatcagtaaaaagacagttgtagcccatttgacataattgcgagacagaaagcaaattgtaatctaaggaatctacgagaaaaacattggaaataaaatggtcaggagatatagcaattttacccaatcctttgaccaaaccttgatttccatccccgaatgtgatagctcgttggggatcttggtttttctcgtaagaagagaacatcttcttctccccagtcatgtggtttgtgcacccg

SEQ ID NO: 73300 - DNA, 402 bp, Zea mays
agcttctcttagacaagtgtcgcacttactttttagtgcgaagctgccacatataacaacagaggagcccctggcgctggtggagttaatgtcgttagatctatcaaatactgattcagctcgtcgaaggctttctactgaactgatccccattgaaaaacttcggctgactttagcacttcaaaaaatggtaaatttctctctgctgatctagatatgaatcgattcagagatgcaagtcttcccgttaaacgttgagcccccttctttgtgcttggtggttccatccgaagaatagctttgattttatttggattagccttaatcccttttgttgaaactaggcaaccaaggaatttccccttcttcactccgaagacacacttttctggatttagcttc

SEQ ID NO: 73301 - DNA, 407 bp, Zea mays
agcttgtgcaaagtccactcgaactaatcttcttataaacccgacctcgctgtaacatgacacccgaaggtccaacacaacaagcaatgaatgaattcataattattgcagaacatatcagtacaagggacctggttcaagagtttttggctttcaaagtttttcccagtttgaaagaatgggaaatgccgaagctgaagggggaaaagaaagaaggtgaacttgtacgtttaccttactatttcaagtttaagaaatactttaaagcgccttgccaagagtggctagacacaattgaggtaatgtgtaatgaaatacttggcaattattccaaaaaaaaagatcaattaatgactgcggccttcggcacccgtccgaagcgaagactgaaccgagtgttggacgcc

SEQ ID NO: 73302 - DNA, 364 bp, Zea mays
agcttatccttaaggtcattttatgacttttactctaaagtatttaggttttcttaacttgagttaagttttacccctttgaccactatttagggttaagtccattacccaaggttctatttgcaaaacacttaaaacaatacaacttgtttgaaatttttgcctagtgaatgcactctaggtgtgtcaaacatatgcaatgcccatgctcatgatgccatgctcaagttttagttatagtaacaccaggggtgttacactcgggggagacgagaccggaactgtggctcgcgaactaccggctggcctgccaactgggtggaacggacgatgacaacctcatcatccgcaaccttcccctgtt

SEQ ID NO: 73303 - DNA, 322 bp, Zea mays
agcttctaaagggagaacacatgataggttttactaatgtgcaattcgaaaaagatagaccttgtgcagcctgtcaagcagggaaacaggtgggaggctctcatcacaccaaaaatgtgatgaccacatcaagacccttggagatgcttcatatggacctctttggacccgtcgcctatctaagcataggaggaagtaagtatggtctagttattgttgatgacttttcccgcttcacttgggtgttctttttgcaagacaagtctgaaacccaagggacactcaagcgctttctaaggagagctcaaaatgagtttgagct

SEQ ID NO: 73304 - DNA, 328 bp, Zea mays
atcttaagtcacctgcagcatgcagcttaaagctcaacaatggatttatctctcagagagggagtgcggaactcaccggagcggagaaggcgcggggccgggctcaattagctcgggaaggaagaggagtggcgagctggtgtggaaaagaggactcggcggtcctttatacgccccgggcgggaaggggcgagagtggcagcccacgagcttgcacggggtgatggtggccacatgcgatgatgggacactcggcaggggggatgggaggtcggtgggcaaggacaaaccaagcccaccggctacaagtgattatgggaacacgggc

SEQ ID NO: 73305 - DNA, 418 bp, Zea mays
agctttatcaaatggacgtgaaaagtgtcttcctcaatggaccaatcaaggaagaggtctatgttgagcaacctcccggctttgaagagagtgagtatcctaatcatgtctataagctctctaaggcgctttatgggctcaagcaagccccaagagcatggtatgaatgccttagagattttcttattgcaaatggattcaaagtcggaaaggccgatcctacactctttaccaaaacacttgagaatgatttgtttatatgccaaatttatgttgatgatattatatttgggtctactaacgaatctacatgtgaagagtttagtaggatcatgacacagaaattcgagatgtcaatgatgggggagttgaagtattttctatgattccaagtcaagcaactccaagagggcacctt

SEQ ID NO: 73306 - DNA, 402 bp, Zea mays
agcttctcctggacaagcgctgcacttacttctgagtgcgaagctgccacatataataacaaaggagcccctggcgtaggtggagttaatgttgttagatctattaaatactgcttcagctcttcaaaagccttctgctgtattggtccccattgaaagacttcggctgacttcagcacttcgaagaatggtaagtctctctctgctgatctagatatgaatctattgagagatgccagccttcctgtcaatctttgagcccccttttttgtacttggtggttccattcgaagtatagcttcgattttacttgggttggcctcaattccctttgttgaaactaggcaaccaagaaatttccccttctttactccgaagacacatttttctggattcagcttt

SEQ ID NO: 73307 - DNA, 410 bp, Zea mays
  unsure (1)..(410): unsure at all n locations
agcttgtagcccctactgcaagcaccctctttctatataatataagcctcatccctcctcttgagtntcatcttgcatcaacccatctgggcagggacacgtggcacaaaattcattagtctgttcagttgagggtcccccgggtccgaaacaccgacagttggcgtgccaagtatggggctctctacatgtaaacaacactttcccgtgaggttccagatggacaatcttcagcagcctcttcagcccaggacggtgctccgctttaagagtctcgagttcatgtcccccgacggcagctacaacatgatactccttctaccacagcatgacaacagcaactgtcgtcggctcgtccggctgaagcgaacccgacgacgacatcgtcccggagcgaaagaagaacactc

SEQ ID NO: 73308 - DNA, 364 bp, Zea mays
agcttcaaacaaagagggacggtcttacttatttcagccttaaataggacatgatcattcagactaagggacatgcaaggaaatgaaatccctagatcttaggatgcatatgagctttcgagatactatgcatagcttaatcgcaatttccttcttcaacattggaaccctttttccttacaaaggggtatggttttttaatggggtcaattttgcaatatcttgtaaagtggcccaaatctataaggacatatccccaaaacacgatgcaagaatgtattctgtggtggcacctttgagtgcagcgatgaaaaaaagaaacaaatactgaagcccttccacgaaggcaggatcaaaatcacct

SEQ ID NO: 73309 - DNA, 364 bp, Zea mays
agcttcaccatgatctatatgttgtgaaatatgaccaacctcaagaaaggctggccatgcggctgcaccactcggcggcactagtgaccaccgatgggggaaaaaccggtgttcttggctaccgacagtggaacgacacaaacaaagggtggcttgggtgcataacggagaggcgagactgagagcaagctcaatttaaaaggagtcaacatgacggtggtcaatttgacagcatcaccggggcgacgatagcctgaggagctccacgttagcctcaatggtgttcacatgctagtaatgtggcggacttaccctggaccctttatgacggtgcaacacggaagcctccaaccagctgcatgga

SEQ ID NO: 73310 - DNA, 378 bp, Zea mays
  unsure (1)..(378): unsure at all n locations
agcttgtggaggttctttatttttcatgttctaagcggcgacgccacaaccagcccatgctagtcttagcaattaagcatgcatctagaccggcctcttcttttgcaaaatcaactaagtaaagcttggcgtctaatacacccttaaaggctagtgaaccatcacttcttctaaagacagacacatctacatttgtaaaaagacaattatatcccatattgcatagttgactaacagatagcaaattgtaaccaagagactcaactaaaaacacattggagatagagtgctcattagaaattgcaattttacctaacccttttaccttgccttgantcccatcaccaaatataatttgatcttgggaatccttattct

SEQ ID NO: 73311 - DNA, 325 bp, Zea mays
agctagacattgtttccctgttggaagcttatgtcttctataataccacggcgtctccgagtatagagcatgcttctagcaaacttaaatttctcatttgttaagtgatgctcagtaatgttgccactaaatcttgctatgtgatcatttagttggataagcaatgctaggagatgatgaagtgcatcaacattcatatcctctcatggaggacaaatggttacatgctcaacagaagatgcagagggttgcaaaatgtaaaagcaaaacgggttctgcgtatagcatttaatcttaagatggaaagtcggaattgaaatattta

SEQ ID NO: 73312 - DNA, 419 bp, Zea mays
  unsure (1)..(419): unsure at all n locations
agcttcgaaagatcacgacttcattntcttttttagtaggcacagtcctctcttcgtcatctgccctcacagtagacatgtctcgaaaatatctccccctcatgttatcaagatgactttgtttaatactcgatttaccaaagactgtgtgacttggtcgccacggtcgatcttcggagtcttcacctccactttctacatcataactgtcactctcaccggtatcttcagataagccttctaaaatttctctagtaatcttctctgtatttgttctcgctatcgattcaaggaagcccatattcttcttctcagaaaggctcagtttcatttcggcaacagttttcttttcctgagacttctcttcgaaaaatctgaaaatgtgtttgagcaggcaaagcagatggcaacaaagcgtg

SEQ ID NO: 73313 - DNA, 371 bp, Zea mays
  unsure (1)..(371): unsure at all n locations
agcttttcaaaaatattgggacgtaatatattttaccacgcttactgncgacatttcgaccccggggggttcctagaccgacgagtaaattgtcgctcgcgtgtcccaacccaaatgggtctgcgcgagactgagcacgaaaggggggtagaagagaaggagaaaaggggaaaacccgcggcctccgtgttgtcctgcgcccaggtcgggtgcgcttgcaataaggggttacaagcgtccgcgtgggggagagagcgagggaccctacgcgccgttccgttcttccgcgcggccaacctccctgtaagagatccctgtacctttcttttataagcgtaaagagagggtccaagtgtacaatgggaggtgta

SEQ ID NO: 73314 - DNA, 354 bp, Zea mays
ttttcctcacgcggttaagcgttagaacacagattatgctctgataccaattgaaagttgcctagagggggggggaataggcaagttaaaactttttcaacaaaaaccagaagcaaactgggtaaaactgaattgatctcgaaattcacccagttaactttggaaatgagatgttctaaatgatccacagggttcaaagtagtagatctgagaagggcacttctcaaaatccacacaccaaaaagatataaacaatcttccacggaatggtgagagaacgaagaacatgaacaaacacaatgagcatgacacaagagacacaagatttattccaaggtgtggtcacaccacaaa

SEQ ID NO: 73315 - DNA, 425 bp, Zea mays
  unsure (1)..(425): unsure at all n locations
ggatcttaagcaccgcagctgcagctggtggggaaatttncttctttatctgggaaagaggtggccgggagatggctcaagaaattataaggagaagtgaaaaaggtattcacgacgctagaaatatagcagaggccgctgagaaaagtgcagatctcgagaggcgaataggtattgactactaagttttgactttatgttgtaattatatgatttcagacttatttacactttgtaacacggtcgcactatcttctcccccagaccccgccgagccattggcggaccccaacgcaaagggggatgacgaaattagaaaaatggctgaagctattatggataaggttgttgatcaactactaaacgaagctgcgaaagtagtcttaagagaagaatagctgctattgtaaagacattgagaatgt

SEQ ID NO: 73316 - DNA, 407 bp, Zea mays
  unsure (1)..(407): unsure at all n locations
agcttaacgaacaagctaggtagtanctgctgttgaggaggaggaggtatctagccgggctgattgttgcagtgggagacaacacaacacaagacaacatgaggctggaggagcggtacagtgtaatcaaagtaaaagctcggagctgcagggggtagctgaggttctcgctgcaaataagagggttttatgtaggtggtggtaggctgccctgccctggtgtgtttgtgggtgggtgctcctgctctctcggccatgggcgggtcggcccatgctatgcctgcgagtctgcctccgtcggtccgtccactcactgtggagaaagagagggggaggcaaggtgcataactagctatgggccagtgcgtggatgccaccaaaccgcattgaaagatcttcaattctct

SEQ ID NO: 73317 - DNA, 414 bp, Zea mays
  unsure (1)..(414): unsure at all n locations
agctttgcattttctgcatctctcatcatctttacatgcaaattgagcattcaaaatcaataatgcaacaatgatgttggcaactcaaaactgaatagtgaaaagaaaaagcacctgccgaggagctttgagtttctttttcagttcatcagagcaaaattcgtaaacatccagttccagtgggtaatcaactttctggaaataaataaaaaaacacaaaagagaattattttagccaataaggtaaacatgtctaacaccatagtagagacaaaaataacaagattccatataaaatagacatactcataaaatctttgttgtagaaagttgctataatcatcaaaccattgttcaaaggagagggaataaaagaagctaacatacntcgaaaatcttcgccttttggtttga

SEQ ID NO: 73318 - DNA, 402 bp, Zea mays
agcttgacatttattgggacaaagatcgtttcttatcttcaaccaaccattgggtgactccatctagaaccaagctaatcctgcctgtgaatgcatgaccaaaacttaagcagagacctcaggcccctccatgtgatccttgcgggtcgcgacgtttgggtgccctcacactccccctcgtgcaacaccaatggagcgaagaccgctcgccttatggacagacgaccacacagagggtaaccacgctggtgtcagcatcgacccccctttcacacaagtcattccagtaagaacatgccaggactctggataatgaggccgacgatgacgaaagtgagaaaagatcgaagcaacgatactttgaccttcgattcggagctccctaaatgacagcgagcgggc

SEQ ID NO: 73319 - DNA, 414 bp, Zea mays
agcttgcaggtacctgtactccgtatggtttgtgggtgggtggtgcctgtactgtacaccgtatggtgtgatatagagaagggggttgacttgaagaaagttcagtacagaaagagagccaatgttctttggttttgatgatgttttcttttcccttctcttctataagagcaactccattagtttgctaaaggactctttaaatcaataagttaggtagttggtcttaaaacttgtgtccaacagctctttatgaactttctaaacataggaacttcaattcttatatatccttattttgtctctacatttagagaccatttataaactcccggaaccagaaaactgacgatattactcaaaacgtcgtgtagagattctctgttctgcacagtctaggttttttttctgccg

SEQ ID NO: 73320 - DNA, 387 bp, Zea mays
  unsure (1)..(387): unsure at all n locations
tatcccaacacaagcacttagatactgtcggcggagacattcaaccacagtacaaagataagaacggccgggcgtaaacgatgggacagaaaacaactctcgtgggaagagacaaccccgcctaattgggaggtaaccataacactcattacccacaagagtatagcgcgatttgataaaaaagcaaactataaaagtttgaatagtctaaacttgcccaaaaatgtgcaggcgaattgtaatcactctcaggtcacacggaatgttccaaatacgtgatcgtgcgagcgatgaaatataaataattaccggatacaccggatntcggaacaacgaagatccgaacatcacaaaatattacgaagagcccggagagaaaaacaaaac

SEQ ID NO: 73321 - DNA, 212 bp, Zea mays
cgagacaccccacgacagagttttggggcaccacgcagaggcgacgcaacgacgcagcccccctctgccaaacgagcagagcgagccccccccaaggggaggcccccaacgggggcccccccacgaaaaagggcgcaccgggagaacccgccccctctcccagggagaaaacgaaaaggggaagccaccgcgccccccagaggggccggggg

SEQ ID NO: 73322 - DNA, 427 bp, Zea mays
  unsure (1)..(427): unsure at all n locations
ctgcagcatgcaagcttgacantggctgcctggttgtatcttatgtctttcttaatgccagagcgtctcccattatagagcatgcttctagcaaatttaaaattttcaatttctaagtcatgctcattgattttagcagctaatgtagctatatgatcattttgttgtttgattaaagcaaggtgatcatgaatagtatctacattaacatctctacatctagtgcaaatagaaacacgctcaacggtagatgtagagggtttgcaatattttaattcaacaatcttagcatgtaaaatagtattctcatttctaagattggaaatagcatcattgcaaacatttaaatctttagccttagcaattaatttttcattttcaatcttaaggctagaaagagaaacattccatttgtcaatcttagaga

SEQ ID NO: 73323 - DNA, 407 bp, Zea mays
  unsure (1)..(407): unsure at all n locations
agcctgttcttatcattagaagcgcttcttgcatgataagtanatcgagcactgcgcatttcccctttcaatcttcttgggccgtgtagctgtccataagagataaaccacatgaacagactaaaattccttttggcaaaagcgaagccttgcattatgaaaaaggggtatgtgtctcattatgaaacacgccacgcttgcccatctggataacatctggacccaaataaatagcatgcccaccaagtaaaaagaatcctgtctcaaatgaaacacgggtcctcattgatggcttggcaaaaatcatgaccattgttttccctttgaacggttggaagctcttgtctccagactttatcaatgccttaacctcaatggctcgattaagaaccttcattattgtatcc

SEQ ID NO: 73324 - DNA, 374 bp, Zea mays
tcttgaatcgtccgcatttgatcttctcggcgacatgcaaggctcaacctcaatgtcacgcagaacaatgtctgagctatcttaggttatggcttctggaacttcctggacactgaggatcaatcattccttttctaacctagctaacttctcctttaacctgtgattttcttcggtatataggcataatgcctcatccttttcagatattgcagattcaagtgaagacaattttgcactaagaattagagcagcaccatccatattgtccttatagtcatcaagcaaatgttttgtaacagcttggcacattccttctctaatatcacaatcaattctgaagtcctcacaagcttctctaactatatcaattt

SEQ ID NO: 73325 - DNA, 397 bp, Zea mays
  unsure (1)..(397): unsure at all n locations
agcttgcacgccatatccaccaaagatccttttgctatgtcatcttccaccgcggcattcctagccttctctagctcgtgaattcgatgcatggaatctactgaggaaggcgtctcaaacatggagttgtccgcggctcacgagttggcgcggcccaacgtgaggacgaagctgggctcgtcattggtgctgtcgatgagcgtagatgccaccaatggggcatccttgggctccatcgctggccgaggcgaaaagcgccagtcccagcgagtcttccactcgtcgaacctcatggtgaactcgtctaagaagagctcgatggcaacgggcgggatccatanagctggaccgagaatcgattcctctgagtaccactggggttacacacacctctctc

SEQ ID NO: 73326 - DNA, 355 bp, Zea mays
aagccagagccaacccatgctagtcttagcaattaagcaagtgtcgagttcagctctaataaaatcaactaagtatagctgaccctctaacactcccttaaatgctacggaatcatgacgttctttaaagacaatcacccctatattcggaaaaagacaattgtagcccaattagcataattgagaaactgaaagcaaggtataatctaaagaatctaccacaaaaacattagaaatagaatggtcgagtgatatatcaattttaccaagtcctttgaccaaacccttgatttccatccccgaaagtgatagctctttagggaccatgggttttctcggaagaggagaacattct

SEQ ID NO: 73327 - DNA, 372 bp, Zea mays
  unsure (1)..(372): unsure at all n locations
agcatatcggtgacgactatcgtttataattgagctgccacagagcgcatgaagaaggtgataaacgaccctatagcaggagcaggtctcttttgtcgcatataggataatattattggttgcaagcacccaccatacaaggtgcaatttgcccagacacatcaatatgtgtttacaatcattttctaaattcgtttgcaggagcaagaactaattcaattgcaccggaggaccaatctagaggaggtgatggtgaaaaaantatacggaggcccgttgcaattgaccctatagctggagcagggattttttatagcatacagtataatattattgttgcaaccacccaccatacaagttgcaaatgtaccc

SEQ ID NO: 73328 - DNA, 411 bp, Zea mays
agcttctaaagggagagcatattttgggactaacaaatgtgcattttgagaaagacatgatttgtagtgcatgccaagcagggaagcaagttggtgttcatcatccacataagaacatcatgacgactgacaggccacttgagctcctccacatggacctatttggcccgatcgcttacataagcatcggcgggagtaagtactgtcttgttattggggatgactattctcgcttcacttgggtattctttttataggaaaaatctcaaacccaagagaccttaaaaggattcttgagacgggctcaaaatgagttcggcttaaggatcaagaaaattagaagcgacaatggaatggagttcaagaactcacaaatagaagggtttcttgaggaggaaaggatcaagcatg

SEQ ID NO: 73329 - DNA, 409 bp, Zea mays
agctctgcacatatgagaagtatatggctatctatactttcaatctatattatacttatcccaccagagaattgccaccgttacaaatattatcgcctgcagctggtgtgatttaaatggatgccatgatttcatacattcccgggcaaatgtgggaaagtctgtattttgtaacggttgattttctgtccattagactttctgctgaatatatggcatattcatgcagacgatagacaaatagaagctgaccatgctgatttcatgtccacttttagtaaaatggtgaatgctggcgtgagaaaaggctagccaagaatccaagatgtaatgctctaatttagaggaagaagatagcacgtagaggaatcgactgaaattgtattacctgtttgttagatgcagtggt

SEQ ID NO: 73330 - DNA, 367 bp, Zea mays
ccttaatctctggacgagaataattgttagtatgaattgatgcaccacccctagtgtaccaatactaaaaattgggcttgacatctgtcgcactagcctttgattattgatgagacccctagagcgcctccgttacgaaaaaaaaaactcgaacacagtgtgaagtgatgtcctgaactgatccttcaccctaggggagggggcttaccccacgactataaacatgtgggtgggtgagaaaacaatttgattatgaaactcgaggtttgtgaagatgttcacaagagactaaacttatagtgttggagcgggacataaacccttaaacactccaaccctaataaggacccttaaaaccctcattagg

SEQ ID NO: 73331 - DNA, 409 bp, Zea mays
ttaagtcacctgcagcatgcagctgaagaagtttaaaccaagttaaatacatatatagattcacatgatgaggataatgagaaagaagctcatgaaaaaaatctaataagtttcaagtgatcatcttcatcaaatgtggtgtcttcccaagattcaaatggtgttcatcccaaagcaacatgatttgtcttaagtggattccaagtggtgtcaagttttacgaaaattaacgacaaagtgggaaaatttggatgcggagatagcaaaagaagagaaatggatccaagaatgataaaatatggagagaagttggatacattagagaaaaatagggatcaaaatgaagcacacaagttggtggagcaagctcatgaaacttgattgttcatttgaagtggcatcacatttt

SEQ ID NO: 73332 - DNA, 265 bp, Zea mays
agcttcgtcttgaccatgctcttgtttactctcgtattctgattccgaagatgcctgctcgcatacttggaaaacattgtcaaatcatgtttttgaggaccttctgaagccgaaagcccccaacagtagcccctcgcaatattaatttgctggaatgataaattcattttgcgacatggactaaagtcttaagcctaatgtgctaaaaaacaccttttctttgctagaatagcaacagtttttgacaagcgagaccctccatttt

SEQ ID NO: 73333 - DNA, 403 bp, Zea mays
agcttctaaagggagaacacgtgatatgttttactaacgtacaattcgaaaaagatagaccttgtgcagcttgtcaagcacgtaaacaggtgggaggagcgcatcacagcaagaatgtgatgaccacttcaagacccctggagctgctgcatatggacctcttcggacccgtcgcctatctcagcatagggggaagtaagtatggtctagttattgtcgatgactttccccgcttcacttgggtgttctttttgcaggataagtctgaaacccaaaggaccctcaagcgcttccttaagagagctcaaaatgagtttgagctcaaggtgaataagataaggagcgacaacgggtccgagttcaagaatttttcagtggaggagttccttgaggaggaagggat

SEQ ID NO: 73334 - DNA, 416 bp, Zea mays
  unsure (1)..(416): unsure at all n locations
agcttatcgtcacatcgcagcaacaaagtcacagggtcccatataccaaatctatttccaaacccccaaggccaagatccatctctcaatctagccaaccttactgtctgatgcatgcgaggtgcgctgcgggaatctgggatcgaggctgcggcatcaggccacacagctgccatggcggtttatggtggttctccggtttgagcgatgctgacgcggtggttcttcaatttgggtgatgagatgctaattgatgcctctgcggatggtttggatgtgcccgtgtaggtatcttgcgtgactcgttgcacaagcttcggccacccgtggaaagcagaagacttggaggaagaagcgaaagtaatgatntttctcttccctatgtttttgtcattaggattcatttagctttgctt

SEQ ID NO: 73335 - DNA, 414 bp, Zea mays
agcttaaatacttcctgagatttcaagtcttacaactcaaggaaggtacttttctatgccaaactaaatatactcaagatatgctcaagaagtttggcatggaaaaagcaaagcacgccaagactccaatgtcatcaaatggacatctccacctaaatgaggaaagtaaacctgtagatcaaaaactatatagatcaatgataggatcactgctttacttatgtgcatctaggcctgatataatgttgagtgtttgcatgtgtgcatgttttcaagcaaatcctaaagactgccatcttgtagccgttaagagaattctaagatacttagttcacacccaaaacctaagattatggtatcctaaaggctcccttttcgatttgcttggctactctgactcagaatatgccggtt

SEQ ID NO: 73336 - DNA, 400 bp, Zea mays
  unsure (1)..(400): unsure at all n locations
agcttggtgccaatggagaagcaaaaatccttgatttcttggctgtcaaactgcttgccgntgtcaactgttagttcggacggtactccgaagcggcaaacaatgttttgccaaaagaatttctgtgcagtctttgatgttattgtggaaatagccctcgcctcgatccatttggtaaagtactcgacagcgacgaaggtgaacttgaggttcccctgagccgtgggcaggggcccgacgatgtccaggccccagcgttggagaggccaagtgtgggcgatcagttttgtgaattgcgaggggctgcctgatcgaggagaaaacttctggcaagcttcgcaagaccttgtgtcccgatttgcggcgcagatcattgcgggccaatataaaccttggcgga

SEQ ID NO: 73337 - DNA, 377 bp, Zea mays
  unsure (1)..(377): unsure at all n locations
gacctctaaaaccacccgcacgcctgccagcctaaggaagggggngtatgtttttcttgtttgacacgtaacccctcacaatgcgaaaggaaatggagtgcatctgctccactattataaaggaataaatatttagaaaaaattacctgcatcccttaccggtatatttaccctgaacgtgaacaatcctgcaattttgtttaccttaacttaacctacaggttcacacaaagagacgtaacacacaacttcatgacaggatgattctaactcacacaaagggagaaaaagaaaaagggaccgttgcaaaccccatgaccaatgtttttgaggatgaagaaaaagaaccaatccctggtcttgtgcgcaaagctgaa

SEQ ID NO: 73338 - DNA, 375 bp, Zea mays
agcttatcaaagaaaaactattcttaattttataaagtggtgtatgttgtcttaatggcctccaggaagtttcggcattattttcaagcattccatataattgttccttcatcacagcctttgaaggatatcatgaggaacagagaagctactataaggattggaaagtgggctgcagaactcaacgaattcagcattgattatgtgcatagatcctcaattcagtcccaggcgttagcagacttcatcgctgactggactccaggggctcaggaagaagaagcaaataaagatgtcgaagcttggacagtgttctgcgaccgctcctgaggaaccttcagagcaagtgcgggtgctgtcttaattgcacctttc

SEQ ID NO: 73339 - DNA, 419 bp, Zea mays
agcttactacggcgtggactaattattctttcttctgtgctaaacacggactcagatgccactgttgaaaccggaattgcaagaacatcacgtgcaatctttcttaaagtaggatatttaagcccagcatgctgccaccactgaatgatatccaaatcatgtgtcctaagaagcagtggttcctataagtacaaatccatctctgtgcgcacataagtggaggtcacgtctggttgcttggacatgtaatcatcaaaagtgtccatccaatcctcctcgaacatgtcattaggagcactacttgtcctaagttgagcaccatctgttgtggcaacaacttctatagtatcttgatactctaaaaccaagttataaaggatattcttgactttgttaacagcctccatacttgtaatttt

SEQ ID NO: 73340 - DNA, 416 bp, Zea mays
agcttgatctggacagtcataatacacgatggatatgtggcatactttataaaaagcccctggcgatgatctaaattaacccaccatcctcttgttgtggcaaataatcacaagcaaggtccattatttatacttgcgcccctgaactttccagtaatggaggccgcagtccaataatttggtataattgcaaatttaatccgaaaaattgaataatatgtgtaaaaataaatctaataacttgtaaaagcaatattttactcattgtagctctgatatgatccattcggattggttagcctcatagaaataattacaacacagttacaacattaactatacgatatcacatacttttataattaggtaactaatttgactaatctatgttcattagattagcttctccagcatta

SEQ ID NO: 73341 - DNA, 149 bp, Zea mays
tggggctcgacaacggcgccactcatcacatggccgaccggcgggagttcttcaccaagcttgattctagcgtccgaggctccgccaaagttaaggacactttcggcgtagagatcaaaggcgtcgctcagtcgtcttcaccaccctca

SEQ ID NO: 73342 - DNA, 370 bp, Zea mays
  unsure (1)..(370): unsure at all n locations
tccctccccagaggcnntttgtgctcgtgccgcaccttaanngacttgagcatgcaactttcgagaaatagagccggcaactctttcccttggagagctccaacttctccgccgagcccgcagttactccgcgggcgctcccgcgcttcaccaaggggtcggccgcacccaccgtgcggagagggtacccgcgcctttcgacgcccgcgcgggctggctcctgcccgggtttcggcgcgagggattccgacaccgcctcttgctgctctttgtctgatacgtcggccacggacactgacttgtctgacgcggatcgggcgctcgggatggctccagccgcgccgtgcgagagcccgccgctgctgggccc

SEQ ID NO: 73343 - DNA, 395 bp, Zea mays
tagcttgagaagattcttctctcttcgtgtgctattcggcgatgccagagccaacccatgttagtcttagcaattaagcaagtggcgagttcatctctaataaaatcaactaagcatagctgaccctctaacactcccttaaatgctactgaatcatcagttcttctaaagacagtaacacctaaatccgcaaaaagacaattgtaacccattttgcataattgagaaacagatagcgagttgtaatctaaagaatctacaagaaaaacatcggaaatagaatggttaggagatatatcaatttttccaagttccttgaccaaccttgatttccatcccgatgtgataactcttgcggaccatgattttttatatgaggaaacatcctttttccc

SEQ ID NO: 73344 - DNA, 373 bp, Zea mays
  unsure (1)..(373): unsure at all n locations
agcttcagtcttagcgatagtctctgtcttatttagtcttacntagacagggtagtttgctatatcctgtgaatttatgtttgctatgatgaactatgcttggtttggatctttgtaatgattgccaccagagtgtgggtatcccctacattttggtttacctattatgttaatggagttagttatatagttgggaaaccttgtattccactctcctctttatctgagaggctgagtggtctgtgttggagatcggtgaagatgctcatctgctcagtgctgaagaagaattctatactctcttcttatgctgcaagaattgccagatcagttctgaagtgtggttgcattctgcagatgtcacagaacacgc

SEQ ID NO: 73345 - DNA, 408 bp, Zea mays
gcttctaagggagaacacgtgatatgtttgactaatgtgcatttcgaaaaagatagaccttgtgcagcttgtcaagcaagtaaacaagtgggaggagcgcatcacagcaagaatgtgatgaccacgtcaagacccctggagttactacatatggacctcttcggacccgtcgcctatctaagcataggaggaagtaagtatggtctagttattgttgatgacttttcccgcttcacttgggtattctttttgcaggataaatctgaaacccaagggaccctcaagcgctttctaaggagagctcaaaatgagtttgagctcaaggtgaagaagataaggagcgacaacgggtccgagttcaagaaccttcaagtggaggagtttcttgaggaggaaaggatcaagcac

SEQ ID NO: 73346 - DNA, 403 bp, Zea mays
agcttctgaagaggttcgtcatcttgttcaagatgatcaaagccaaaggcctccacgcagagagcttcatcaggaaggctttcacaatgaggacgactggtatgaagatttccatcatggaaactttgcttttgatgatgcttctcctctctcaacagaattgcaggctacaccatggccccagtcctacaagccaccacagctccccatgtatgacggtcatacagaccccaagcaattcctgatgagctacgaagcaaccatatcttcgtatggtggcaatacgacagtcatggcaaaatcttttgtcatggccgtcaggagcgttgcccagacttggtactcttctcttcggccagggacaatcacttcttggcagaagttgaaggatatgctgataact

SEQ ID NO: 73347 - DNA, 406 bp, Zea mays
  unsure (1)..(406): unsure at all n locations
agcttgaccacttaattatttccataccttacacttaaaacctccggaaattcatactcacaatccgtaactccgatttgatccgttcaagttccgttagtctcgtagcaacgcatagattatttttacgcagtgtattattatgtgtgatgtgatgttaatttatgctatactatgtatgtattgtgttgatgcgagtagacgagcaagccactgtggaaactgaggttcaacaaatagagatagctgagcaggagctcattgaaggcaagttgtgcccttgatcacttactttcccagccatgttcttattaattntaatgatctgcataggataattntgatgggagcctttatgttaccccagttttgattacctctataccttgttcacccctgaaatatt

SEQ ID NO: 73348 - DNA, 387 bp, Zea mays
  unsure (1)..(387): unsure at all n locations
agcttctgaccaaaaccgttctttgtcttgtactctccaagcatcgtcctcgccatgttgataagcggcctgttcttcctctctaccacaccattttgctgtggtgtgtaaggagcggagaactcgtgcttgacgccttcctcctcaagatactcctccacttgcagattcttgaactcggacccggtgtcgcttcttatctttttcaccttgagctcaaatttgtttgagccctccttagaaagcggnttaaggtcccttgggtttctgatttatcctgcaaaaagaacaccagagtgaagcgggatataatcattaacaattacaagaccatacttactacccccgatgctaaggtaggcaacgggtccgaagaagtccatgtga

SEQ ID NO: 73349 - DNA, 391 bp, Zea mays
agcttgagcgtgaccataatgactaccgaaaggacctccagaaggtgttcgcccgggagctggaggtgacccggaaggagcgaggctggccaagaaggtggtgcacttggaccagaggcaggaggtcatcacagagctccaagcaaagctgagtgcctacaacaagatgctggaggagcagcgggaccagcagtccgcgactgtggagaacctgaaaaaggtgcagcaggggctcgatgatagggccaacagccttgccctggccgaagagaaccttaaggagaaggatgcctccctggataagcgggcggcggatctcgcctggcgggagaaagacctcgcctttagggaggaaatgcttgagaggcgggataagctgctggccgattat

SEQ ID NO: 73350 - DNA, 378 bp, Zea mays
  unsure (1)..(378): unsure at all n locations
agctctgatcaaagatntaatgtttataattaactctactttctgcgggtgataccagatacaaacatgcatcaattaataattaataataaaataataaggaagaggtagttgtctcgtccacatttacctctggagcttcttcatgtagaactcgagctctttaccctcaaagatgtagctggccaataaaaggaaatgccactgtagttagcctcgaggatgtagctagacaataaaaagaaatgcccaacaactgccaggaaatttcaggtggaaactgtaagctactgaagcgaggtgaaatggtccagtagtccttacccatcagctcggccacactacccatgacgagcataaatgcgagccaacaatctc

SEQ ID NO: 73351 - DNA, 172 bp, Zea mays
gagttccgaaggtcaccggcatgtagatgtgtccgagtgggtactctccttcagtcggcacaataccaaagaaaggagtgtctgactcgtggagctctttgagtgcgactcccaagccttggagtgtccgggggaaggttattctttatattatatttctctttcacttaca

SEQ ID NO: 73352 - DNA, 466 bp, Zea mays
  unsure (1)..(466): unsure at all n locations
tcgtcttgaccatactctngtatacccgtaacccgattcctaagacacctgttcacatatttcacttggaaaacattgtcaaatcatgtttttgaggaccttcggaagccgaaggcccccaacagtagcccctcgcaatattaatttgctggaatgataaattcatattgcgacatggacgaaggctttaagccgaaggtccgaaaaaacacctcccctttgctagaatagcaacagtctttgacaagcgggatcctccagttttcatcgcactaggtgtataaataagagctcaccacgagttgatttggcacactttcttgccatctgctcttgctcacccaacttttagcctgtgcgcaacaacacttgcttggcntntaaattttaagctttggttcagagcacttctcgcgtttgcaagatgttgagataagaaactgtgctgatcgagctgaccttctga

SEQ ID NO: 73353 - DNA, 391 bp, Zea mays
  unsure (1)..(391): unsure at all n locations
ctgcttcggccgatcagccgaagcccatgctcttgtgtgaggatataacagagcagaaggtgctcttgggatctcaactgtccgaagaacaggagaaaaccttgataaggtttttgttcaacaacaaagatatatttgcttggtcagctaatgatctttgcggagttaacagggatgttattgagcactcgctcaatgttgatccatccttcaaacccacanagcagaggctttggaagatgtctgatgacaaggtcgaaggtgctcggaatgaagtgaaaagactcctcagtgccggagttatcagagaggtaaaatacccacaatggcttgctaacaccgctatggtaaaaacggcaatggtaaatggaggatgtgtattgattttact

SEQ ID NO: 73354 - DNA, 474 bp, Zea mays
tgtcgaatgtggtcgagtaagttcactggaggtgggcgcttatgtttgccacttgttctcaaatgctataaatcaaaaacaaggcaacacaagtgtagaaggttaaagaacttcatccttcgaaacattatctcctttaggatataatgatcttcgaacgaaggtcatgaaggatgtaccttcttcatttcaataagcaaggatgtaaactaagacatatgaaatgcaaaggaaatatgaataatcatttcagatcattagactattcatatttccttcattatatgaacgagaacaaacatcaatgatattcgaattacatttgtaccttcggcttgatagaaggtgaaaaagcaagagtgacgcgcgagagattacaaatcagcgtgaaccgtacggtgttactgttcatctatttataggcacaggacacagcttggtgcaaattacattcatgtccctgacatttagtct

SEQ ID NO: 73355 - DNA, 476 bp, Zea mays
  unsure (1)..(476): unsure at all n locations
tttcaacctaactagaacgacacataatatctttagagtcttcttgtatcaacacaataagncagcatccagattctgtttcggtgttgggttagatttgtcttgcgttagttttttgatcctttgcatctgctgccatcccataaattcaatatttaaaatagattccatcgattttcatctcatcatcttgttttcatcacattagtatgtgtctagttttgtattttgagcataaatctcgcatacaaactgatgaggacatcctccactattacccgttagcaaagacgcaattggcccagttggcccaattgtagtcggacggcgaccgtgtgagcctcagaattatcccacctcgcttaacttgggaggaggaagccactctataagggaaagccacccttcccccattggactagtcttttggggcgactgggcctctccctgagttgngtgtgcttaatgaactgttg

SEQ ID NO: 73356 - DNA, 76 bp, Zea mays
ggactcctactcctccgggatacagataccttactcattaccttccgcgaagaaaaacttttgcccgcacaaacaa

SEQ ID NO: 73357 - DNA, 471 bp, Zea mays
  unsure (1)..(471): unsure at all n locations
tcgggaagccgatactctntgatagagtaccgacaaccttcgctccggtntggtctcgtatgcagcctaacccttcatcataaatgccaccgaagagaagcgcccccggccggtacccgcaagatatagcatactctnttaattcctctttttcagcttctgtcagctcctggccaactaagtttcgtaagtcagaagtttcatcttccgaagtatcttcggttattccttctttctcgggttttgcggccgtggtctcttcggtggctgcagcagtttcttcagcggccatgtttagcagcattttatctatatcagcagctatgctctctaaattaatatctttggagttggcatcttcggctctggcttcttctgcggcaacctccgaaagtacagcttcagtagctgtcgtgcttcaatttgccgcaccttcggagctggagcccttggtggtgttgttcaatcact

SEQ ID NO: 73358 - DNA, 401 bp, Zea mays
agatatagctttagttttacaccagctacgcccttccccattgcaacgttgttggttttctttttatttttggatccatgcaagccatttcctgttgataggaaggcagagtaacaagttgatttcgagtaccatacctcctttccggttcacagacagatcgagggtcacaccttacacttgcgtcacctgcctgcccttctcggtttaattgaataagaccgacccgagtaggaccaaggatgcattttttgaatggagtcttctctctaaatatttccgggaaatataccgggtcaaaccttccgagctaactggaccctacccttattcagagaatcattcctcccccactctctgcccttctaaaagaagatgcattccttcgtactgtgcttgac

SEQ ID NO: 73359 - DNA, 426 bp, Zea mays
tggtcgcaacatgagggcacagagcgacccatggtttgttgttatttgttgcgcgtcgcggggggcactgaggaagagaacaacgatggggatgttcgccttccagatgaggtatgtgtgccatatactggtaatgaccacgaccttgatagattgatagatgacatttaccccaaactaaatgagaatatgtctaacacaagctacatcacttcaagagcaatattgactactcggaacgactgggtggatatgataaatatgaggatgatcaaccgtttccaaggggagcagatgatgtaccatagctttgacaccgcgatggatgatcccaataactattacccatcggaatttctaaacaccctcactcctaatggactacccccgcatgttctgaagcttaaaagtggatgcccaatcatg

SEQ ID NO: 73360 - DNA, 341 bp, Zea mays
gaattattgccgcaacagaagttattgacaagacgccacacgaggcgtcaatcctgaaaacaccagctgttgtgggcacagaaaatgtctaagtcgcaccttctgaggtcgcggctaccgaagccgcttcagccgaagatgttaacttagtatctactactgaagacatcaacaaaattttaacagacatggctgcagaagaagctgccaccactgctgaagaaaccatggccacagtgcctgggaaagggaaagaaatatccgaagacacttcggacgacgaatcctatttatttaaaatttagtcgggcaaaactgtcgaagccgaaaagaagagctta

SEQ ID NO: 73361 - DNA, 332 bp, Zea mays
catgcaagcttgggaaggttcttcatacgcacatgctctaaacggcgatgccacagccagcccatgcaagtcttagcaattaagcatgcatctagaccgacctcctcttttgcaaaatcaactaaataagtttgtcgtctagtacacccttaaaggctagtgaaccatcacatcttctagagacagacacatctatatttgtgaattaaaaattatatcccatattacaaagttgactcacagacaacaagttatatccaagcgactcaactaagaacacattataaatagagtgctcggatgaaatagcaatttttcctaaccctttcacc

SEQ ID NO: 73362 - DNA, 437 bp, Zea mays
  unsure (1)..(437): unsure at all n locations
ntccaccacgacgtctctagccgcaccagctcaccggttttcgncgtagcttcttaaccggtgatcaccgaaagaagcgccacggtgaaagccacctgtttcacacaccgagcgctttgtttcctctggccgccagcgctgctcgaccggattgatcaccatcgctcatgtatcctataaattgaggcctcagcttgctccgctaggtaaccgtgcgtccgttgaaaccactcgtagctccgatcgtctcccacagcgtcccaatttgggatttcccccaaaacggttgaagaacaccgcgaacccaagctcaccgtggtaagtcctgtatgaggaaatcccagccccactgctatctgttctagctccctttaggtgtcgnggtgctcactgtctttggaaatggaactctactgcagcagatcatcgagaacatc

SEQ ID NO: 73363 - DNA, 303 bp, Zea mays
ttttttaaaggagcctcccagagtggctctttactaggtgtctctccctgtgcggggcctctttttaaaaaggaaaattgggtgtgttgctctccccatttttttattttttaaaagggtttttttatacaaagtggggctcttcctgcataggggggttccccccccccctcttgtgtcgctcctcaaaaaagcccgccctctttttgtgtggagggacccccccccccccctcttatttttaaatcccccggggggggggggggataaaaaaaaaaactttctgttgttttatatagaaaa

SEQ ID NO: 73364 - DNA, 461 bp, Zea mays
  unsure (1)..(461): unsure at all n locations
taatgcccctaagagattgtccaattttgttaagggcattgctcccatggcacaagataacgagggttacattntatatcatggtggttatcctaagcataagtgttggggacttgttctcaaatgctatgagttaagaacaaggcaacacagaaaatgttaaacattaagatccttcgtccttcgaaggattatttcccttaggatataacgatctccggacgaaggttatgaaggatcaaccttcatcactacaatatacattaataaaagacgaagcatatgaaacataaaagatagcgtgaataatcatataacattattcatttaactttattaactcatcataaagaaatagaaacaatattgaattataaatgtaccttcggcttggaaggagatgaaaatacaagtgtgacgcanaagcaaatgccaagtcagcgtgaacagtacgggggtac

SEQ ID NO: 73365 - DNA, 395 bp, Zea mays
tgcggtaactatcaagaacaagtatctattgcctcgtattgatgttctctttgatcagctgggcggagccaaagtatattccaagatagaccttcgctctggcttccatctgatcaagatacgagcaagtgatattctgaagacggccttctcgaccagatatgggctgcatgaattcttggtaatgtcatttgggctgaccaatgcaccagcatatttcatgtatctgatgaattctgtttcattcctgaattggataagttcgtagtgggtatcatcgatgataccgggctgtactcaaagaacgaagaagagcatgtgtaatacctccggtgttaccatggccatggcacatctatgcactatggatcgtgatcacattgtgaagaaacttg

SEQ ID NO: 73366 - DNA, 459 bp, Zea mays
  unsure (1)..(459): unsure at all n locations
tcttcaccatgttatcacagatatctagagaaggttgtttatgacactttcccttcaattgaatcaagctccttcttagcctctcattttcttccttgagctcattgttttcttttgcataggaaacattacttgttcctgaaaattctagctcaatggaagattggctctcttgagagcaacatttgttagcacatggtaatatagtttcaatttcaacatatgtgcacatgtgaggttggtatgatttcaaattagttaacacaacctcatgagccatttctaacatgatatgtgaatccataaatttattatgagagcacacaagcatatcatgtntttcttgcaaagctatattttcaataattagcctttctatcgcgtcttgaacatagtattttatttctaattgacaattatgatgaatgattacagctttaatttgctcaatgaatgtct

SEQ ID NO: 73367 - DNA, 444 bp, Zea mays
  unsure (1)..(444): unsure at all n locations
agcttgaggaagatgatgaatctagttcatgtgtagagaatgttantatctgtaatagatgtaaggaccttgatgtagatgcatgtaatgaacatcttattgctattacaaaattgagtgatgaagtggcaagtcttaatgctcaacttaagacttgcaaaaaagatcttgataagttaaagtttgctagggatgcctacacaattggtagacacccctctattaaggatggacttggttttctaaaggaaaccaagaacttaacaagccaaaagactcccgttctcaacaaggagaaagggaaggctcctatggctagtagttctcaaaaatgtcatgcttacatttatgatagaaagttttctacgaatgctcattataataggagttatgatgtgtttaattcacatgctatgtgtgcttctagctctacttttgtgcatg

SEQ ID NO: 73368 - DNA, 438 bp, Zea mays
tcagcttcatctatggtatggatagcctgtgaattcgtcttaatcccttcagccctcctggcagcttcttgactcccgtgaacagcaataggcccttgttccgaaggtatcttcatgcataaatatgctagatgaaatattgcttcgaaggcattaagcgttactcgaccaatgattgcattgtatggatactccatatcaacaatgtcaaagacaacctgttcagttcttgtgttgtggacgtagccgaagatcacttgcattgttatcttgccaagtaccacaatctgtcttcctccacagccacaaagagggtgtgttgcatcatgtatcttgtcctctggctcttgcattttcctgaaagcctttgaaagatgatgtccgctgcgcttgctgtgtcaaccagaacattgtggaccagaaatcccttaatgacac

SEQ ID NO: 73369 - DNA, 326 bp, Zea mays
agcttctccaggatgttattgtactacatgaacaacttatatatatacctattatataataaattaactctccattatttagaaaaaaagagagaagaaaagtggtaaaggagagagtaacacctaaatttggtgaatattagaaaagaaattttataccccaaattcagggtgttacagaacaccttgccgttgagttccagatgggtagtctccagcaacctcttcagcccgggacagtgctccgcttcgggagtctcgagttcatgtccctcgccggcagctacgacatggtactcctccccccgcagtgcgatagcaacaac

SEQ ID NO: 73370 - DNA, 466 bp, Zea mays
  unsure (1)..(466): unsure at all n locations
ngaatcactnttatacccccgggatacaagataccctaattgaaaccctgngaaaccctaagtctaaaccctatgggcttatgtgcaaaagtgatgaacctttggactaaaatgtaaaaactactatgtttatgcatctaaagccaattggttcacaaatatgtgaatttacaagccaaaccctgagaattggacttaagtgcaaaatggacctcatttgagttctacactaagtctgaaattcagtgttaaaggctccactttagggctntgtaacttacaaagcataaggtttttgccctaggtcaccacatcaaaattgaagctcaactataggagaacaactntgcttaaaggtgtgagcattgttgttaaggaaaaactgaagataatcactccttgaagtggactgtcangctatctaagtctgaaaattcagactgacagtggactgatagcaacttca

SEQ ID NO: 73371 - DNA, 387 bp, Zea mays
agcttgccacaggtgagacatttgttgtctcgtgtcgacttcttgatgccgacggcgccgccttgggcacctccacgggcaccatcctcagcatgtcctcacgccccggccaaggcgcctccacgcgccttgcgcggcttgccgcgtttgcgacctcgtgtcgaggaggactcccccttcttgtcaccctagcaggcctcccactgcttccgagtgagatgtagcttcccgccgatagtgataggcccagagggagcctgtggttcatcgccgtcgaccaccttgagacgtcctatcgcctcttcgatcgtcatcgtggagaggtctagcagagaatcgatcgagcgagcaatctacttgtacttttcggggatgcaacggaagagc

SEQ ID NO: 73372 - DNA, 462 bp, Zea mays
  unsure (1)..(462): unsure at all n locations
tactcaaccttgacaatgaagagatggcgctcgccatcattatcttncttcaaatcctcaaacaaaggagggggaaagactacatgttccgctccaagaaggtttgctacaaatgtggtaagcccggtcattntattgctaaatgtcctatgtctagtgacagtgaccgaggcgactactagatggggagatgaaaggagaagatgatgtactacatgatgaagggcggtgatgcccatgtttgtcgcgagtgggactccgacgaaagctcaagcgactcctccgacgacgaggactccgccaacatcgtcgtcaccaatggacttctcttccccaacgtctgccactagtgcctcatggcaaatgacggcaaatagaagaatgttaaattcaactcctccacttaatatgaatcgtctagtgatgatcatgctagagatgaggacgataatttgcgtattc

SEQ ID NO: 73373 - DNA, 451 bp, Zea mays
  unsure (1)..(451): unsure at all n locations
agcttcancaacttcaacactctggtgttgtattgttcttgaagacttaattgtctccaagacgtctagtacatttaccattcttttcctttttggggtcactgatggccccttttggttttttgctgtcccaatgattgctgtaagactcaaaacttctgatgttctggagccctcagttgcttcttttacctcctcaatattttctgtgagcggcgcttcggttttctcttttgtttctgacaacaaaatgtttgattgttttgattctatctttggtggcacttcggccgtttctgcgatctctggcaacaaggctggctcgattagnttttcagcttcggtggctgaagaagtcttcccggtaaactccggccccaagctggttaatataacgagccgttgcgtaaaaccttatcttttccttntggttctggctcctagagcactg

SEQ ID NO: 73374 - DNA, 429 bp, Zea mays
  unsure (1)..(429): unsure at all n locations
ntgagtggattactgaanataatccactcagaggtcttcatcttctgctnttagaagatattatcttgtcttcgtctcatgccttagaactcagcattatatcatcagcttatgccttagagatcaacatgttgtcttcatttcctgttttagagaataacaacgtgatctgcccatgtcctgttaggtttgaaatttatttgatcggcgacagattggacgtctggtagatgactctnggctggtcttcattttgctttgtgcttcaatgcttcagttgattagacttgtacttcagtagctatatttggctttccttcgatctccatcgatatctttcttatgtcttgatacattcattgcgtatactgtatggatgtgactgtctgggaaaatctattgaaaattcttggacgtcccctcccccat

SEQ ID NO: 73375 - DNA, 322 bp, Zea mays
  unsure (1)..(322): unsure at all n locations
gcttattaagattggatccttaanaatccattttactggttaggttaagtagttacctccatctagatttctttctattctagatcaagcacttggcctatgctagccgtcttttatcaatcctttagctaacttgattgctacatgtagggcagtgaccaagtctttattgtccgagaagtaacggtgatccaaatctattaatacccagctggggatctccgaccacatgacatatgtagcacttaacccttgcatatgtcaactcaccaccaggtttctcaagaccagaatgggttcacgccaaccgagagcacagata

SEQ ID NO: 73376 - DNA, 458 bp, Zea mays
gctaaaagtgagtgcttagtttttatattatacaaaccaagggaggcacaaactcctcccgataagttataaacaaaagatcctatgtggaggaccgagtcctcccgcacttcagtcttgtttttcctcatttggtaccaccttggagcaaaagcaacaaaaatttgtcgcttcctcacctaaaaacaacaaagggataaaccctgagtatggaattactcagcaagtcttacccgactaaggaaaagactctcaagggtatgctggataaaaaggagtcaaggagaggctttagcaaaaatcaacttatacttttgcagaagtagcttactaaagtgagtccttactttcataatttttaacgccatattaagtattaatagactctatttgcatctagtctaatttcaacatctcatcaatacaacatcatttttatccatagttgtcacatcctg

SEQ ID NO: 73377 - DNA, 475 bp, Zea mays
  unsure (1)..(475): unsure at all n locations
tagatatgatctcatttttcctttataacagccccgtagtgtgctntgcccaaccccttaagtgttggcgaaccttcctaatcttggcttgccatttctccaacggagtagaacctcttgtctcatttacccaaatatcttttaccatatccacaaaaccataccacagaaaccatcctaattcaaacttgaacgaaggaattgtttgggcggttacaactcctgtgctaagaagcagaggagtatgatcagatatatttcgcaacaaggcatgtaccgatgctctagggaatttccctcccattctatagctaccaaaatccaatccaatttctcataagtcagattatccctagtattagcccaggtgtaccttcgccccgacattgaatagaaatggccaacgatgatcaaatctatcattatttttctcagatggagatcgtacnatattaaagtctcccccaatgagaat

SEQ ID NO: 73378 - DNA, 421 bp, Zea mays
cttcatccccacatgttctaatcggcgatgccacagccagcccatgctagtcttagctattaagcatgcatctagaccggcttcctcttttgcaaaatcaactaaataaagtttgtcgtctaatacacccttaaaagctagtgaaccatcacttcttctaaagacagacacatcttcatttgaaaatagacagttataccccatgttgcataattgactaacagatagcaaattatatcccaaggactcaactaaaaacacattagaaattgagtgctcatttgagattgcaattttacctaatccttttaccttgccttgattcccatcaccgaatataattgaatcttgggaatcattattcttgacgtaggaggtgaacatcattcttctccccgtcatatgggttgtgcatccgcta

SEQ ID NO: 73379 - DNA, 488 bp, Zea mays
  unsure (1)..(488): unsure at all n locations
attacggacctatgaatctcaactgacttgccnctgtggaaccatgcctccttatgccttgtgtctcccactataaagcatactacgagcaaatttaaatttctcattttctagttcatgctcgacaatcttagcatctagtttagctatatgatcattntgttgtttaatcatagcaaggtgatcatgaatagcatcaacattaatatctctacatctagtgcaaatagaaacatgatcaatcgtagatgtagagggtttgcaatcatttaattctacaatcttagcatgtaaaatggcattctcatctctaagattggaaatagaaacattgcaaacttctaattctttagccttagcaattaatntatcattctcaaacttaaggctagcangtgattcattcaattngtcaatcttagcaatcaatttggcattctcattttctaagactaacaattgaatcatcacaaacattngatttctca

SEQ ID NO: 73380 - DNA, 441 bp, Zea mays
ctgcagctttcctttgagaagcacacattatgaatcatccaaagaggataagagtaaacgccgaagctatcaccagatggacagcttcatctcacaatgaagatgataaataatgttgatgatcgaaagaggaaaagactacttagtccttaatagcttgtattacgatcatgtgtaaatgatgaggacataaatgtacttttgctcgggctgcgtcccgtgcctataaatagatgaacagtaacaccgtactgttcacgctggattgtaatcactctctcgcattctcgccttcgagcaagccgaaagtatcaatgtaatatcaagtttgttgaatattcattcgcattatatggaacatgaatataaatgaattaatgaatataccatcttcatgtttatcctttcgcattctcattcatatattaaataatgaatgct

SEQ ID NO: 73381 - DNA, 445 bp, Zea mays
  unsure (1)..(445): unsure at all n locations
taagagaaaagattatgtacagaattatgagactgaataactgctattatcaaactgcaataacttcctgatctgatatccgattgaggtgttctttgcggccacggaaagatctacaaattatctacgactcatagatagactttntatttttttgaggccactaaaaccacggaaaactggcatgaacagaaactattgaatctgccattctgcagaaactaatttcgagattaaaatctaatctcccatccaatctaaccaaaaaaactaattgcagggcctataactcatccaaaacaagggaaagcattcatcaagtggataaaagagagagaggaaagganatccaaccaattcttggagaggaacgaccatgatgggcgacggtattgcccccatctccctctcttctcttcttttttcttcctctcttctcttgggg

SEQ ID NO: 73382 - DNA, 177 bp, Zea mays
gaaatttgggacgctttaaaagaccccgaagtgtttttgtttaaaatcatccaagtatggcgccctggtgtgactactgcaatcgcagctattttcctcgagatttttgaagaaatcctcaagaactcactttcgactatcaaactttagcttcgacttacctgcactctgaaatac

SEQ ID NO: 73383 - DNA, 371 bp, Zea mays
  unsure (1)..(371): unsure at all n locations
tgtgctgaggcacagnccacgcaagacgaggtttatctttctcgggcggaggccantctcacccgccaacgcgccgaggagatggagacaaggctcggcagcatgcgcgatcgcctagacaagacggaggcctcgacgcgcgcggaggtcgagcggacgcatactcagcttgtggacgtgtaccgggagctgggtgctcggaccgtgcccttcgaagcgcccggtcaggaggtgggcctccacttccttggatggctacaggaggagctggaggtgctcccgaccattgtgacgggccttatgtccttcgccttcctcgtcacctgcgaaggggccgtgaatgccttgtcccgcgaggggtgtgagcactt

SEQ ID NO: 73384 - DNA, 421 bp, Zea mays
  unsure (1)..(421): unsure at all n locations
tggtagagaagctgatggtggggtaactntgttacaattccattatgtggaaaaggtattgagtcgctttggttttagtgactgtgatcctgctccaacaccttatgaccccagtgtgatattaagaaagaatcggagaatagcaagggatcaattgacatactcccagatcattggctcgctcatgtaccttgcaagtgcaacaaggccagacatctcttatgctgtgagtaagctaagtcggtttgtgtcgaaaccaggagatgatcactggtgtgctcttgagagagtgttgcggtatttgaaaggtactatgacatacgatattcattataccgganacccaaaagtgctggaaggctattgtgatgccaactggatttctgatgctgatgagctntatggcacaagcggatatgtg

SEQ ID NO: 73385 - DNA, 431 bp, Zea mays
  unsure (1)..(431): unsure at all n locations
agctngagtcagttcttctgcgaagattattgatgcccaacgaagtgacaagggtatgaagcatattcatgagaaaatagaagccaacaaagctaattgttttagaaaggatgatcaagggatagtatggtttaatgatcgcatagttgtgcctaaggatgcgggagtccgccagcaaattttggatgaagctcatcttagtcgatattccattcatcccggaagtactaagatgtatcaagatttaaagcaacactattggtggacaaaaatgaagattgagattgcacgctatgtggcgagatgtgacacctgtagacgtgtcaaagcaatacatatgaaggctgtgggaccattgcaatcttttgccatcccaacttagaaatgggaggacattagcatggacttattgtgggcttacccagacaaca

SEQ ID NO: 73386 - DNA, 448 bp, Zea mays
  unsure (1)..(448): unsure at all n locations
ntctcaccatatatagcatgcttaatgaaacttcttagtttgatgcagcttaatacgaaaacttggtcatcaagctgactgttgaccttctgaccagtcggcactaaagtaggtcggctgcctttctggtagatgtggttaagtcggctttagaagcattggaaactagacttcaagagctttccaaaaagtacttatgggccttcatagcttttgggaatcaaaagatatgactgtttcttttggacagttctgttgcgctggactgactcggatatagctcttcttgctgattcgcccttgatatgttntgtccttcctctttggtgaacctaagtaatatcaacatacacgacttaggtagcataaaattctcattagtgtttaaatgaaattcataaagtagcgcgtgcacctcttgcttgagcttcttagctcggctacgtgt

SEQ ID NO: 73387 - DNA, 434 bp, Zea mays
  unsure (1)..(434): unsure at all n locations
agctntctggactaagatggagggttatcatgatgtggtaactcacgcctggacgtctgttcctgcagggccttgcccacttatcaccttggccaagaaattaaagacaacggctagatgtttgcagagctggaatgacaaaaaagttgggaagattaaactgcagcttgagatggctagggagctcctacatcaattagaggtggcgcaagataatcgctctttatctcctgctgaattgtggctccgaaacatgctcaaaaagcactcccttgccctctcctctatttctcgtaccatggcaaggttgaaatcgcggattggatggctcanagaaggcgatgccaatacctctctttttcatgcacaaacaaggttcaggaagaaaaagaattcattgcacaattcatcagagatggcagattggactgcca

SEQ ID NO: 73388 - DNA, 447 bp, Zea mays
  unsure (1)..(447): unsure at all n locations
acgtgacctatgaaactaagcttctaagggagagcacattntaggattaacaaatattcattttgagaaagacaggatttgtagcgcatgccaagcagggaagcaagttggtactcatcatccacataagaacatcatgacgactgacaggccactggaactcctacacatggatctattcggcccgattgcttacataagcatcggcgggagtaagtactgtctagttattgtggacgattattctcgcttcacttgggtgtcctttttgcaggaaaaatctcaaacccaagagacattaaagggattcttgagacgggctcaaaatgagttcggcttaaggatcaaaaagattagagggctgtttggactggcacctacgacgccgcaccacgcctaaggtgcggcgaccgatttgagcgccagaccagagtgtggcgtctggga

SEQ ID NO: 73389 - DNA, 315 bp, Zea mays
gcgagcccaaccacctgttgtttaaaattagccaggtcgagttcgctctattgaaatcactaagtatagcttaccctctacacttctttaaaagccatcgaatcatcactttcctctaaagacgagaacacctacattcggaaaaagacagttgtaacccattttacataattgtgaaactgaaagcaggttattatctaaagaattgtcaagaaaaacatttgaaatagaatggtcacgtgatatatcaatttacccaatcctttgaccaaaccttgatttcatcaccgaagtgatatctcttcgggatcttgg

SEQ ID NO: 73390 - DNA, 453 bp, Zea mays
  unsure (1)..(453): unsure at all n locations
ctcagcttctnagggagaacacgtgatatgtttgactaacgtgctattctaaaaagatagaccttgtgcagcttgtcaagcaggtaaacaagtgggaggagcacatcacagcaagaatgtgatgaccacatcaagacccttggagctgctacatatggacctcatcaaacctgtcgcctatctaagcatagggggaagtaagtatggtttagttattgtggatgacttttcccgcttcacttgggtattctttttgcaggataagtctgaaacccaagggaccctcaagcgcttcctaaggagagctcanaatgagtttgagctcaaggtgaagaagataaggagcgacaatgggtccgagttcaagaaccttcaagtggaggagtaccttgaggaggaagggatcaagcacgagttctncgctccctacacaccacagcanaatggtgtggt

SEQ ID NO: 73391 - DNA, 453 bp, Zea mays
  unsure (1)..(453): unsure at all n locations
ntaatttgtatntttagggcaatcagagtattttctcgacattttcttgacatggacccttaataacttttgttgtagaattcatatagagttgtttgagcaagatggaaaggcttagttgaacttcaaaatttgcatttgttcaaacgagcagtttcaagcaagcataggatttatcttttcatgtgcgtatttggttcanacttcgagaaatctttaagatacacttgatagatagagatgaatgatgatatagagataacaaatcgattttcataagaaataattagaggttgacacaacagaggttccattggagaatgcagattcagattaaatatttggacatagaccanatatcaagatatcagaattagatacagatcggataacaactgtcaagagttcgaataaatgagctttagacgagaattaacattcgaattacattcg

SEQ ID NO: 73392 - DNA, 322 bp, Zea mays
tatatcttggccaccaacttatatggcgaactaagaacctataatggctacatgtggtccaattgcacaatgaacatttacatctgagtaccaaacctgttttgtgaaaaggtgcaatgcaatgaggggaattccttcagcgccaccatcatatggtgctggtcccactgccttgacagcatccaaagtatcttcgttatgggatttagcacttaacctatatcaatcacatatattttgcaattgcacaggtgagcgcctaatttcaaaacatcactatttcctgccttcatcttgcacagaaaactgcagaaccaattaa

SEQ ID NO: 73393 - DNA, 431 bp, Zea mays
  unsure (1)..(431): unsure at all n locations
tgtgttaactagacctaaggaacctgtgttccatacttctcaaagaatccgagcagtaaaagtaaagagctctgcagagatagaggaggaaatgttggcaaagatacccaagttcagggcacggccattcaacaaaaaagtaagaacttgctattttgtttacatgaaagatcgtcttgcgttaactgcatgctgacactagctgttgctttttgcctaaagattgctgaagccccttcgttccctccacttccaaggaaacccccacagatttctgaattcagtgtacgtattctatcacagtggaaaattcatgaatgaactntttcatcactgataaattcattcgttgctttgcatcaactacaggaatttcatcttataacaatggagagagcatgtcgatatgcggacacctgttcagaagtatc

SEQ ID NO: 73394 - DNA, 469 bp, Zea mays
  unsure (1)..(469): unsure at all n locations
tcagagtcacctgcngcatgcaagcttggctgcgtaacatgttctgactntcttatgtgccaacaaccatcacagaacattgtccaagcttcggcgtctttatttatttcttcttcctgagcccctggcgtccagtcagcgatgaagtctgctaacgcctgtgactgaattgaagatctatgcacatagtcaatagtggaattgttaagctctgcagcccattttccaatccttccagtagcttctctgttcctcattatgtccttcaaaggctgtgatgaaggaacaattatgtggtatgcttgaaaataatgtcgaagcttcctggaggctattaacacagcatacaacaccttctccaattctgtataatttttctttgatagacttaaaactttcgagacgaagacactggagcttgtttttgacttggcattagcttctctgtacagcgccgattactacaaat

SEQ ID NO: 73395 - DNA, 440 bp, Zea mays
  unsure (1)..(440): unsure at all n locations
tanagccatggtaagtagcataggcaagtaaaatgcgaattgattctagcctagctacgggtgcataggtttcaacaaaatccaaaccttcgacttgtgagtatcccttggccacaagtcatgctttgttccttgtcaccacaccatgctcatcttgtttgttgcggaagacccacttgattcctacaatatnttggttaggacgtggaactaaatgccatacctcgttcctagtgaagttgttgagctcctcttgcatcgccaccacccaatccaaatcttgaagtgcttcctctaccctgtgtggctcaatacaggaaacaaaagagtaatgttcacaaaaatgagcaacacgagatcgagtagttaccccttttgaatatcgccgaggatggtgttcacagggtgatcttngtggatngcttggtggactcttgggt

SEQ ID NO: 73396 - DNA, 407 bp, Zea mays
  unsure (1)..(407): unsure at all n locations
ctttagtcacctgcacgctgcaagcttctaaagggagaacatgtgagaggtctatccaatgttcatttcgaaaaagatagaccttgtgcagcttgtcaagcacggaaacaggtaggaggagcgcatcacagcaagaatgtgatgaccacttcaagacccctggagctgctgcatatggacctcttctgacccgtcgcctatctaagcatagggggaagtaagtatggtctagttattgttgatgacttttcccgcttcacttgggtgttctttttgcaggataagtctgaaacccaagggaccctcaagcgtttcctcaggagggctcanaatgagtttgagctcaaagtgaaaaagataaggagcgacaacgggtcccagttcaagaaccttcaagtggaggagtt

SEQ ID NO: 73397 - DNA, 425 bp, Zea mays
tgcacatatccgttctcttaaggtagcatagaactagcttggctattgctttgggtgaagggcattccccatctttcatcttaattactatctgtataagaccgcacagagatcaagccagcttttcaaaacaaatggctaaatcatttaattagggcaacagaggtaaagagttttatggtcagactgctgaatgaggaccaaagctaaattctttattaaatgaaatgagcaagtagaatttgatattgaaaacatatataagaaaatattgcttttgtttctaagagcatctcaccggatatcttatccgatctcctatacctaataagtagtattttagaagatgaaggtgttgcagcaaatctattatcatatctcctatacttactaaatttatgatatcttctgaaagaagcatcatc

SEQ ID NO: 73398 - DNA, 419 bp, Zea mays
  unsure (1)..(419): unsure at all n locations
gcgagctgttggtgtggttggcgttgaagcagcacctgcaagcaatcatgcaaaaaaaaatggtatatggctgatactcaagattatnttcgataaaggaagcttttataaaaataccaagtacattacactcaagatatctattctgttgattggtccaccatgattaataagcaaagctattcggtgtggtaccaaaccaggttacaagaaataaaaaaaaggccttgatgtaacctatcctgaatttagtggactggacaaaccctgttgacatgtgtgagcccaagtagctagacccgcttctagggctgggttgctgcaaaggcccagaagatcttttgaactgtgtatatttgaggtctggaagggagacccaattgagattgatggtccattcgagaaaattagttacacca

SEQ ID NO: 73399 - DNA, 497 bp, Zea mays
  unsure (1)..(497): unsure at all n locations
gcgacctatgaaactcagcttctaagggagaacacgtgataggtctaaccaatgtttatttcttataagatagaccttgggcagcttgtcaagcagggaaacaggtgggaggctctcatcacaccaaaaatgtgatgacaacatcaagacccctggagctgctacatatggatctcttcggactcgtcacctatctgagcataggaggaagtaagtatggtctagttattgttgatgacttttcccgcttcacttgggtgttctttttgcaggataagtctgaaacccaagggaccctcaagcgctttctaaggagagctcaaaatgagtntgagctcaaggtgaagaagataaggagcgacaatgggtccgaattcaagaaccttcaagtggaggagtttcttgaggaggaggggatcaagcacgagttctccactccctacacaccacagncaaatggtgtggtagagaggaagaacacgacgctaatcgatata

SEQ ID NO: 73400 - DNA, 427 bp, Zea mays
  unsure (1)..(427): unsure at all n locations
agctngtgatgctcaccgtgacgcccgactactcattccggccccggatgagcgggaacgtttgcccatgagcacggttttcgccgtgcacatggacaagccgttctcagggtgtccgtgccaaattgttaggtgttccgaggtccctggtagtcgctaatgcctccccggtagttggccgtagccgccgtcgccggccatggtcggtacaaaccacgtcggtgacattctgtgtgcgcgccgcggtcatggagctagttggggaagaagtanaaaccggagggcgtttcggtaaactgtcagtgactgatgcaatagtgtttgaacccctgacataatcagtattccaaggacctctctgaaagatgccacagagcgcgtgggcgcgtgagggcgctcacatgtttccctgtgttgccggccgcgt

SEQ ID NO: 73401 - DNA, 489 bp, Zea mays
  unsure (1)..(489): unsure at all n locations
attacgtgaccttagaaactaagcttctnagggagaacacgtgataggtttgactaacgtgcatttctaanaagatagaccttgtgcagcttgtcaagcaggtaaacaagtgggaggagcgcatcacggcaagaacgtgatgaccacttcaagacccctggagctgctgcatatggacctcttcggacccgtcgcctatctgagcataggagggagataagtctgaaacccaagggaccctcaagcgcttcctcaggagagctcaaaatgagtttgagctcaaagtgaagaagataaggagcgacaacgggtccgagttcaagaaccttcaagtggaggaatttcttgaggaggaagggatcaagcacgagttctccgctccctacacaccacagcaaaatggtgtggtagagaggaagaacaggacgctaatcgatatggcgaggaacaatgcttggagaatcaagacccccgagtggttctggtcgg

SEQ ID NO: 73402 - DNA, 381 bp, Zea mays
  unsure (1)..(381): unsure at all n locations
agcttctatagcagcgagtgatgttagcatttttgtttatttgagtgccatttcgagagtgtacataacatcaacaaaattcacgattgatgtgcttatctaggcttgagccctatttatgttcggtgtatattgtttgcatgtaaccaaccgttgtgagcgatgactgatctattactgtcttcttgttttatctatctttactccttttcatataacactttcgtgtgtcatgtgttgttttcccctttgtatgtcgcgtgttgatatcaacttcgtgcgtcgtctcccctttgtatgtcgtctctccatagatgatgtngattaatattcgccacatatttatcattgtttatttttttatcaataacaacacggtac

SEQ ID NO: 73403 - DNA, 345 bp, Zea mays
  unsure (1)..(345): unsure at all n locations
gtgtggagttggaagaagatttgatctctctggtgtgtcttgtattcgaatgctagctcttctaagtagttggaaagtggaaaacttcgatgccttgaatgtggggtggnannncnnccccccatcccccttcaccccctcatcctctccctcttccaccatcctttttcctcaccatataccatattcctatcctatctctccccactatccctcccntctatccccccccttacccaccctactattccctccctcctccccccttaccaccttctcttctctcccctctccctctttccccttccctccctccctcttttctccctcttaccccccccttcc

SEQ ID NO: 73404 - DNA, 421 bp, Zea mays
  unsure (1)..(421): unsure at all n locations
agcttaacccttgcgagacgcttttcttgtttctttctaaccatggtaaatgcaatatcgcatgtcatattctatgcatgtttaatctacttgttctcttgtatggtgtactgttggtttcctaatatcaatggatggatgtatgtatgtttgcactcgcatagagaacgatccggttgaagagcccgaggaactctcatgagaagcccctgagcaacagtctgttggtggaggcaagtgtcccttgacctatctctgtcctattcattctttaattcacctctcgcattacacatctatgcctaagggttgactaactattgatatccatatacctcgtctacctatttgggttggattattattgtttagctttatgctatngctcaactctaatcaatgaacatgatgagattattta

SEQ ID NO: 73405 - DNA, 451 bp, Zea mays
  unsure (1)..(451): unsure at all n locations
ggatataaaacaacagattaagccttgcgtaagaatctttatttcataaccgttactggcctattcgttcagcctaccaaataatatttccttgcaaaattatcttaccatatgcttctaactctgatggtcaataccaggaagggaggactatcatgcatcaacaaacagaaatgaatccttcaaattctccaccggctggaaccgatccagtggttgccgctcaaatgctggtactacaacaaatgacaaacgtggttaacgaaatgcaaaatcagataaggcaagaacgtcaggaaatgcgtcaggaccgctcggagatgcgacatgccatgagacaagcacggttggaaagacaacaacaacaacacccactaccttcaccaccactagctccaccatgctacataaatatatacatatattactatntgtagtacctaaatggtac

SEQ ID NO: 73406 - DNA, 454 bp, Zea mays
  unsure (1)..(454): unsure at all n locations
agctntatcaaatggacgtgaagagtgtctttctcaatggaccaatcaaggaagaggtctatgttgatcaacctcccggctttgaagatagtgagtaccctaaccatgtttgtaaactctctaaggcgctatatgggctcaagcaagccccaagagcatggtatgaatgcctaagagaatttcttatcactaatggcttcaaagtcagaaaagccgatcctacactcttcactaaaactcttgaaaatgacttgtttgtatgccaaatttatgttgatgatattatatttgggtctactaacgagtctacatgtgaagaatttattaggatcatgacacacaaattcgagatgtctatgatgggggagttgaagtatttcttcggatttcaagtgaagcaactccaagagggcacctttctaaacaaacanagtatactcaagatattctaagc

SEQ ID NO: 73407 - DNA, 399 bp, Zea mays
tgccgtcgattcaaggcctccgatctaggacgcctcccatttctgtagcatagctggtgctcttctggtcctgacgttcactcggccggacatcacctatatatatgtacatgtattccctctcaatcaattaataaattattcctaccatcgtctaacacaccttatagtataacactatatatgtcattagtgtcatgtgaaccaattttctttttatctccatgtgagcgcctgtgttatttaggttagctaaccaaacctatgacatccttcccctctttggtgaggccatgaggcttgaaaacttgcgtgggactaacacacttcagttttcatggtggtgatgttctggcaaccaagaaaaaatttgctcataattttgttttggtagcatgc

SEQ ID NO: 73408 - DNA, 473 bp, Zea mays
  unsure (1)..(473): unsure at all n locations
agcaccgcagcatgcagcttaccaatggacgtgaaagtgcctttctcaatggaccaatcaaggaggaggtctatgttgagcaacctcccggctttgaagatagtgagtaccctaaccatgtgtatagactctctaaggcgctntatgggctcaagcaagccccaagagcatggtatgaatgcctaaaagattttcttatcactaatggcttcaaagtcggaaaggcggatcctactctatttactaaaactcttgcaaatgatttgtttgtatgccaaatttatgttgatgatattatatttgggtttactaacgaatctacatgtgaagaaattagtacgatcatgacacagaaattctagatgtctatgatggtggagttgaagtatttcttggtgatttaagtaaagcaactacaagagggcaccttcattagccaaacgaagtatattcaagacattctatacaagttt

SEQ ID NO: 73409 - DNA, 476 bp, Zea mays
  unsure (1)..(476): unsure at all n locations
ctcagctntgattcaattctgctattttagctgcggcttctgcctataagccttcagttgtctgaagctcgaagtctttcttttcaatagtagctgattgctctttcattttgctctctaaattttcgattataacctcgtgttttttgtcttccagatcctgctgcattttcaaagctntactcaacagcatactctgcacataaacaaccttcattagaaatgtcttcattattaaaaacaataaaagtcaagggcgaagtagttcaccttgaaattggaataaaataaactaccaacgatatgttgtcgtcggtagcggcttatatccgtttctagcttcggaaaaccgatactctntgatagagtaccgataatcttagctccagttngatcccagatacactctaatttttcatcgtcaataccttcgaagaggagtgctcctagttaatatccgcaagatttgcatactc

SEQ ID NO: 73410 - DNA, 282 bp, Zea mays
  unsure (1)..(282): unsure at all n locations
atgttactttcgaaaaagatagaccttgtgcagcttgtcagcagggaaacaggtgggaagctctcattatgccaaatatgtgttgacaacatcatgacccctagagttacttcatatggacctcttcggacccgtctcctatctgagcatangaggaagtaagtatggttttgttatagtggatgatatttcccgcttcacttgggtattctttttgaggataaatctgaaacccaagggaccctcaagcgctttctaaggagagctcaaaacaagtttgat

SEQ ID NO: 73411 - DNA, 439 bp, Zea mays
  unsure (1)..(439): unsure at all n locations
tganaagggtaatgttactatagcagtgaccggcataccacgtatgcccaataataatttgttgaatgactcgccatgttactacactgaaactcatatctccatccacctaagttgtgagctctcgtccacttctccaaatccggcatcaatccattcaaccaatctctaccttcggcatttggtgcgactttgagcttttctaacttttctctaaagaacttgtcttccagctggcgacatgtctcctggaaaagctcaaagttatccttgacaccatccttacgcagaagattctcagctaggtgtcgagtacaccacctgtgatgcaaaggagggtacccatcgatctgctcacggaccgcgttgagtattccctggtgccgatctgatattacaccaacttcccgttctgtgccaaccacatgtattcngacat

SEQ ID NO: 73412 - DNA, 320 bp, Zea mays
  unsure (1)..(320): unsure at all n locations
cttctaaagggagaacacgtgatatgtttactaatgtgcatttcgaaaaagatagaccttgtgcagcttgtcaagcacgtaaacaagtaggaggagcgcatcacagcaagaatgtgatgaccacttcaagacccctggagctgctgcatatggacctcttcagacccgtcgcctatctgagcacaggagggagtaagtatggtttagttattgttgatgacttttcccgcttcacttgggtgttctttttgcaggataaatctgaaactcaagggaccctcaagcgcttcctcaggagagctcanaatgagtttgagctc

SEQ ID NO: 73413 - DNA, 421 bp, Zea mays
  unsure (1)..(421): unsure at all n locations
tcagctccgtaaactggagaacatggagtccctctgtggtccttctagttgtctccaccggagtaggacccttcagcgaagacatccttcatgtccccctcgggtgactgatactcgaggtcccgttcagccgcggctacctcgtcgtcgtccaccttttctttgccaagccggcgacgaggtggggagccatctttggaagactgcccgcgccgctcactgacacattttttgaggtcaatgatctcgtgacactccgcggcggtgtggcgaccgttggggtgcacagggcatgagccactgntacccctctgcggtcgtggacgtttgttgcgatcgccttgacctccagtcgtggctgcgacaaccagagcggtagaccactacttctggtagtcacgatccttcttcctcttcttct

SEQ ID NO: 73414 - DNA, 446 bp, Zea mays
  unsure (1)..(446): unsure at all n locations
agctatatcagatggacgtgaagagtgccttcctcaatggaccaatcaaggaagaggtctatgttgagcaacctcccggctatgaagacagtgagtatcctaatcatgtctataggctctctaaggcgctttatgggctcaagcaagccccaagagcatggtatgaatgccttaaagatttccttattgctaatggcttcaaagtcggcaaggccgatcctacactctttactaaaactcttgaaaatgacttgtttgtatgccaaatttatgttgatgatattatatttgggtctactaacaagtctacatgtgaagagtttagtatgatcatgacacacaaattcgagatgtcaatgatgggggagttgaangtatttctaggattccaagtcaagcaactccaagagggcacctttattagccaaacgaagtacactcaagac

SEQ ID NO: 73415 - DNA, 447 bp, Zea mays
ggccaagccctcggacccggccggacttcaccggaggcccgagatcgacctcaccggacttcggtcttctgccgccgcgcgtggaccgagctatccagtgagtctctgaccgattccttgcacccatatcttctctggcatcccatgaacctctctgacccatccatttgctcaatctcgccgtgaccagaccggactcctcgccgccgacgagcatccccgcctgcgcgcgtggaccgaccaactccggccatctctgacagcgacccgcacaccgttgtgatccccgagacctcccctacgtcctcgaccacttcaccggagcaatctcgccgccggtaagcccctccgccctttcttccgccgtgattactggttgagatagagaaagacctcgggttatgatttgtagaactcgaggggttttctggtacgtcagtgactcat

SEQ ID NO: 73416 - DNA, 353 bp, Zea mays
  unsure (1)..(353): unsure at all n locations
tcgacccgtgattcttaagtcacctgcngcatgcangcttgacaacaccatgtgacatcttaaataaaatttctgagatcaagtatatttaattcattcctcaacatgcaatagcgggttatatcaagtggcttagtgaaaatatccgctaattgatcttccgacctcactccttctaaaatgatatctccttttgcaacatgatctctaaggaagtgatgatggatatcaatgtgcttggtgtgagagtgttgtacaggattaatagcaattttaacagcactctcattgtcatacaacaaaggtaccttttctagaactacaccatagtctagaagagtttgtttcatata

SEQ ID NO: 73417 - DNA, 455 bp, Zea mays
  unsure (1)..(455): unsure at all n locations
ttaagtcaccgcggctgcagcttagcagaatgcagcgaggttctttattctcagataggcaganatgtgctaacttatgttgatgatatcattgtaaacagcacgaagcaagaaaatcacattgttgatctgaaggagaccttcgctaattntagacaagccgatctaaatgtgaatccagaaaagtgtgtcttcggagtaaagaaggggaaattccttggttgcctagtttcaacaaaaggaattgaggctaatccaaataaaatcgaagctatccttcgaatggaaccaccaagcacaaagaagggggctcaacgattgacaggaagactatcatctctcaacaaattcatatctagatcagcagagagaaatctaccattcttcgaagtgctgaagtcagccgaagttttcaatggggaccagttcagcagagagccttctaagagctgaag

SEQ ID NO: 73418 - DNA, 152 bp, Zea mays
  unsure (1)..(152): unsure at all n locations
ntaccttgagtcccaaaatccagcatccccttgagagtcttgtctttatgtcggtaagccttgctaagtaattgcatactcagtggttttattccctatgtggttgtaggggggatcctggtattctttacctcctattagtggcttcttgg

SEQ ID NO: 73419 - DNA, 410 bp, Zea mays
  unsure (1)..(410): unsure at all n locations
agcttatgaggccaaccatgatgcgaggttctttatatccgaagggggcagtaatattcaatggaacaaacgaagatgacttcttatactgcctgcctgataacaaagagctatccgtctgccgagagatggcgagaagcataggctttccgaagcttgaagctgggtaagtgccatgacgaaagaggatctcgcagacagccttgcgtataatagcttgaaggtaccggaattaaacacttgaaaaaacccccttattatntttacgcacatcattcctttttccttattagaattctttttcgtatagggcctgatcctaagcaacgcgctaagagcgcagaagagcgccgaagatgaaagttatgaaattgcgtttaataatatacgttccgaagatatcaagctga

SEQ ID NO: 73420 - DNA, 472 bp, Zea mays
  unsure (1)..(472): unsure at all n locations
tcgcacctctgaactaactcggntgcgtcattcttcgctgttggtcaatagaatcctgacatgaagaccttcccgactagtgtcttggatgctgcgtgtattccacattgcccggcatggacctcatccagaagtcgcttcccagtagatgagaaaatgcacttcatgaggacgcctgatgcaccccttctgtataatgtcttcccaatgagtgtgtagtgagccgactgtctggcgatacgctcggctgcatttttgtcacctggctcctcttcattctttatgtacctgatgattggccttctccagtcatcagagtctgactctggttgattcacaatattacactcttctgcttgatctattgagatgctcggctgtagtatttctcgcataaagactccaggtgggacctgagttcgactggaccgtagcttaaacaatacatcgactgtcgtgtccgatctctttt

SEQ ID NO: 73421 - DNA, 495 bp, Zea mays
  unsure (1)..(495): unsure at all n locations
cccgcgatcctcttagtcacctgcggcatgcaagcttatacaggaggatagaagcaagagctctatcatatgtcataatagaaggggaactatacaagcgaggggtctgttccccgttgctcaaatgtttatccagatccgaaggcatagaattgatgaaggaaatacacgtaggcctgtgtggatctcacattggatctacgcctttgcttgggaaagtttttcgtcaaggattttattggccaaaggcagcttctaatgcagcggatttagtccaaaagtgcgaaggttgtcagaaatgtgcaagagatcaaaaacaaccttcgtctttaacgcaattaatacaacccacttggtcgttgcaaaggtggngccttgatttgctaggcccattaccaccagcacaggggaacttaagatatgtggtagtggcagtgtaatatntttccaagtggattgaggcatagcccttagccacaataaccttatttacta

SEQ ID NO: 73422 - DNA, 438 bp, Zea mays
  unsure (1)..(438): unsure at all n locations
ntagataacccatgttgtccatcatctcacgacaaacatttatctccttactgtctgatagacagtaaaggaaatcatcttcgtcgtctactccgtataccaaagacccacgggggtatttcagctccttagcataatgttgcgtttcggtaagttgctcttctgatagcttctttcccgaagcatgtcgaacaatatagttcaaatcaccctgcgaaggtgcatcgggagcaggtgatgtgggcttttctggtagattttctttcaccagctctactggcgcagcccccgaaggccccgcttcaacatgaacaggagatgcgcttgcatcgactactttccttgcatcttcaattntatcatcaataaattcagtagtagttggagcgggcaacttagtggattgtaaacagcatccaaaacactagccattctcct

SEQ ID NO: 73423 - DNA, 90 bp, Zea mays
tgtgtcgacgttataagagatctatataatacaccatcagcgctcgcacgtttatgatcgacaacaatcttgaacacaacaagaaaagtc

SEQ ID NO: 73424 - DNA, 450 bp, Zea mays
attgcggacacttaaaactcagctcgacagagtccgctagagctaatcttcggagaaactcgacccctgtgcagcatgacaccagaaggtgcaacccctacggcgatggctgaattcacaattattgcagagcacattggcgctagagatttggtgcaagaatctctagctatcaaagcatatccaactatgaacgaatgggctatgccgaagcttagacgagagaagaaagagagggagcttgtcagactaccctatcattatcaattcaagacatattttaaggcaccctgccaggaatggctctgaacaatcgaaataatgagtactgacattcttggacattactctaaaaaatatgaccaattgatgacagcagccttctgcacccgggcgaaactaacgctagacagagtacttgatgctataggctctgaatatcctgcatat

SEQ ID NO: 73425 - DNA, 409 bp, Zea mays
  unsure (1)..(409): unsure at all n locations
cttataagaaacatgctaagacatccagtctccgctttcacgcaatcggatcatcgntcttgagattcgagcactatttgagttgtaaactcctcgctctgtgtttgtgtgctcacgttctcacttttgtgcgttgttgagctgcggatttgagtcttgtgtgtgatgctctccccaaccttaatgtgtgctttctttgtgatctcaattgtaagggtgagggactacaaattgtggagattcctcgcaaacgggaaacatactctaaaggaaaagaccatggtattcaagttgatcatctgatcacttgagaggggttgagtgcaacccttgtccattgtgacgccacaacatggaagtaggcaagtgttacttggccgaaccacgggataaaaatcgcgtgtctctt

SEQ ID NO: 73426 - DNA, 475 bp, Zea mays
  unsure (1)..(475): unsure at all n locations
tanagccatggtaagtagcataggagagtaatatacgaattgattcaagcctagctacgggagcataggtttcaccaaagttcaaaccttcgacttgtgaatatcctttagccacaagtctggctttgttccttgtcaccacaccatgctcatcttgcttgttacagaatacccacttggtacctacaacattttgattaggacgtggaactaaatgccatacctcattcctcgtgaagttgttgagctcctcttgcatttccagcacccagtctgaatctcttagtgcatcctctaccctgtatggctcaatagaggagacaaaagagtaatgttcacagaaatgtgcaactcgagatctagtagctacccccttatgtatgtcgccgaggattgagttgacagggtgatctctttgaatngcttggtggactcttgggtgtggcggtctttgaccctgaatctcttgatcatc

SEQ ID NO: 73427 - DNA, 386 bp, Zea mays
  unsure (1)..(386): unsure at all n locations
agctntcaaggtaacagagcgacacatagttcagtcagttttggcatcggcactgaaactactgaacatcattttcgaaaaccgaaaaaggagtttgcaattgtaacttataaagctgcaatatatgaagtattcatcgtgggcagagcttagatcgaccattagcatgggattacggcttcaggagtcaatcaaatcacaaaggtggatagaaccaaaacgacattaaattccctcgctccaaacgccagcctggcagcgcangcaaccggacccaaattttctgctagagtgatggcgaaatttaacgacaaagcgaagcccacctccacgaagccggcgcggtgaccccggagccctggggcgttcacctgttgaaggtggac

SEQ ID NO: 73428 - DNA, 327 bp, Zea mays
actaagcttctaagggagaacacgtgatatgttggactaactttgcttttctgaaaagatagaccctgtgcagcttgtcaaacaggtaaacaagtgggaggagcgcatcacagcaagaatgtgatgaccacttcaagacccctggagctgctgcatatggacctctttcgacccgtcgcctatttgagcatatgagggaagaagtatggtctaattgttggtgatgacttttcccgcttcacttgggcgttctttttgcgggataagtctgaaacccaaaggaccctctagcgcttcctcatgagagctcataatgagtttgagctc

SEQ ID NO: 73429 - DNA, 455 bp, Zea mays
  unsure (1)..(455): unsure at all n locations
agctngcattatgttccattgtgaaggataacacaagcactcatctacaaagtaatatttatgttaaagctaaatggcagcaactcacaacagaaaaatagatttaagtaatactaaccagcctaacatcttcttgcgtccaaaggatctgtttctcagttcgaacagcttcatcctcgctgtccacatcaatttgattctggtttgcttctgcagtcgaagtacatgtcctcatgccaacaaaatggaaattctgcgatgatgggttgttcactaggttcataaatccacctgcggggtgtggattgttatccctgaaagcatggatcgaacaacatcatgaacttactaagaaaaaggaaggacatcacccctggtagttacaagttaatctgcaaataaaatatagttgaataagcaactactacatggttcgtgtaacaagacatatatgc

SEQ ID NO: 73430 - DNA, 342 bp, Zea mays
ctgttagctcggactgtactccgaatctgcatacgatattctgcggaagaattttgggcagactttgatgtgattgtggaaacagccctcgcttcaatccatatggtgaagtattcgacggctactaaagcgatactaaggttcccctgagcggtgggcaggggcccgacaatgtccaggccccagcgttggagaggccatgtatgggcgatcagctttgtatattgcgaggggttgcctgaccgacgagagaacttctggcaacgctcgcacgacctcgtgacccgatttgcggcgcagatcattgcaggccagtaataccctcgtcggattaccttggct

SEQ ID NO: 73431 - DNA, 411 bp, Zea mays
cagtgttcgggttcgtctatttctcttggaaactagtgatcagcatatcctttatcttctaccatgaagtaattgttcctggccggagagaggagtaccaagtttgggcaacattctagactgccattacgaaggatttcgccatgactgcggtattgcccccgtatgaagatattgttgcttcgtagctcatcatgaactgcttctgatctgagtgcccatcatacttggggagctagggtggcttgtacgacgggggccatggggtagcctgcagttctgctgatagaggagaagcatcatcaaaagcacaactttcatgatggaaatatcctaccactcatcatcatcatatgaattatcctgacgaagctctttgcgttgaggcttcggtcatggtcatcttgactg

SEQ ID NO: 73432 - DNA, 329 bp, Zea mays
tcttagcaattaagcatgtgtccagttcaattctatcaaaatctactaagtatagctgaccctctaacacacccttaaatgctattgaatcatcactttctctaaagacagcgacacctacattagcatatagacagttgtagcccatttgacataattgtgagaccggaagcaaattggaatctaaagaatctaccacaaaaacattggaaatagaatggtcaggagatatagcaattttaccacgacctttgaccacaccttgattccatccctgatgtgatagctcggtgggaacttatttttctcgaggaggagaacatcttctc

SEQ ID NO: 73433 - DNA, 472 bp, Zea mays
  unsure (1)..(472): unsure at all n locations
taacgacgatgagtgggtctctcagctagaatngaaggttataatgcgcgcgatgactgaagctntcaaaaaataatatgactctgcggcgacatcctatgagcatcttgatcgacgagttgcggaacttgttacacacatggacgtactggagactcgtcccccaccacaagctccagccccagctgcttgaggaggacaatgacgatgatgacagagatgttgatgcatcgctgcgacgacgcctcacacgtaatcgacaaggtatgtgaggtaatggtagagatcgtcattatattcatgaaatagacaatgatccatatgataatattaagttctctattccaccgttcattggttcttgttggggacttgttctcaagtgctatgagttaagaacaaggcaacatagaaaatgttaatcgtttaagtccttcgtcctccgaagcatttatttccttacgatataatg

SEQ ID NO: 73434 - DNA, 267 bp, Zea mays
  unsure (1)..(267): unsure at all n locations
tatacggctcgcaccccccaaaatgggagggtcatgtctgtcaatgactggtgctaatctagcaaagggaaagtgtttttcngaccttctgcttaaggccttcgtccatgtcgcagtctaaatctttatctaaacaaattaatactacgaggggctactgttggtggcctttcgtcctccgaaggttctcaaaaaacgtattttaacaatgtcttccaagcatggtttatagacaggtaccttctgattcaggattaaaagcatata

SEQ ID NO: 73435 - DNA, 390 bp, Zea mays
  unsure (1)..(390): unsure at all n locations
tcttgatgcnncttgtgttccgcttccggatgtgagcgctattggatcacttttgaatttgtaagtaaaaaattgttatttcagtttctatcttgttttaattgattctaggacagcaccactgattcattatttaacacatagattcatacaaaaaaaggaacagattggagcaccaaaggttaaacaatttggtttatatccaatacaatagaaagatggcagctaggttccaaagattgcgtgaggagggaaatattggtaaccctttaattttagaggatttccaatgggacaatgagtgggtggacaatcaaaatgaaacagttagagaaggggatgatcttgcatgggctcatgtggatgatgcaatcggtgcttctagttcac

SEQ ID NO: 73436 - DNA, 325 bp, Zea mays
cttctaaactggatatcagcatgtccttcagcttctgccatgaggtgattgtccctggccgaagagaggagtaccaggtttgtgcaacactcttgacagctatgacgaaagactttgctatgattgcagtattgccaccatacgaagatatggttgcttcatagctcatcaagaattgcttctggtctgaatgtccgacgtacatggggagctggggtggcttgtaagaatggggccatggtgtagcatgcacttctattgacagaggagaggtatcatcaaaagcacaattttcatgatggagatcttcataccagtcgtcctc

SEQ ID NO: 73437 - DNA, 421 bp, Zea mays
  unsure (1)..(421): unsure at all n locations
ntaacccctgcgagaccttccctcgtctctttctaaccatggtaaatacaatatcgcatgtcatattctatgcatgtttaatctacttgttctcttgtatggtgtactgtttgtttcctaatttgaatggatggatgtatgtatgtttgcactcgcatagagaacgattcggtcgaggagcccgaagaactcgcaggagaagccctgagcagcagtcggttggtggagacaagtgtcccttgacctatttctgtcctattcatactttaattcacctcccgcattacacatttatacctaaggattgactagcttttgttatccatgtccttgtttacctatttgggttggattattattgcttagtcttatgctattgctcaactctaatcaatgaacctgatgagaatgatcaatgata

SEQ ID NO: 73438 - DNA, 387 bp, Zea mays
  unsure (1)..(387): unsure at all n locations
agcttgaagtcatggtgagtagcataggtttataatatacgaanggactcaagcctagctacgggtgcataggtttcaccgaaatccaaaccttcgacttgagagtattctttggccacaagtcgagctttgttccttgtcaccacaccatgctcgttttgcttgttgcggaagaacccattggttcctacaacattttgattaggacgtggaactaaatgccatacctcattcctagtgaagttgttgagctcttcttgcatcgccaccacccaatccgaatcttgaagtgcttcctctaccctgtgtggctcaatagaggaaacaaaagagtaatgctcacaaaaatgtgcaacacgagatctagtggttacccccttatgaatg

SEQ ID NO: 73439 - DNA, 423 bp, Zea mays
  unsure (1)..(423): unsure at all n locations
tgcttacttggtaagatgaccaaggctgtctttcacgggtttaccggagaggacattagatttattggaactcatacatactgatgtgtgcggaccaatgagtacgatagctaggggaggattccaatacttcataaccttcactgatgattntagtagatatgggtatgtctacttaatgaaacacaagtctgaatccttagaaaagttcaaagagtttcagaatgaagtagaaaatcagcgtggcaagaaaattaaagcactgcgatcagatcgtggaggtgaatatttgagtcatgagtntagcaatcatctaaagagttgtggaattgttccacagcttacgccgccttgaacgcctcagaggaatggtgtgtctgagcaacgtattcggactnttatggatatggttcgatcaatgat

SEQ ID NO: 73440 - DNA, 339 bp, Zea mays
  unsure (1)..(339): unsure at all n locations
agcaccaaataaacagctcatgtgctggcttttgtttctcttcaacatactgtattatgcttgtaacttctttatgatcttcaaatttgtgtgcatatcctgtaatataatacattgcacttctttatgctcagtattactagtaacaatgtattggagaagtatgatctgcaacatatgctcaaagctctcaaagataggctgatgggaaagaacgcggtatatatatattctgtagttgcttatttgatatacttaatacatatcatttttctatctggataaagaacgctggccttacttacacaggcaaaggaaatngcagagaagctgtgtgaa

SEQ ID NO: 73441 - DNA, 431 bp, Zea mays
  unsure (1)..(431): unsure at all n locations
tagccatggcaattctatgtgaatatagtgccaaccaatcatttttatccgatagggtgaactaacaattaaatgagtgcttgcagaatttgggacaacagcaaaacatttacttgttttaatcataacttttcaaatattaatccaaacatagcaaactaggactntctggaaagcttaaaatgttctctataactttggtattttcacctcaacaagattcaacatttagcaaggttaaaagtgctaacacaacagatctgtccagatttggacagattcagacttgtgaatttaaaaattcataactaaagattcagacatccaaacaaagtgatttttgactttctggaaagataattaaatattctacaaantatntataaacatcattggctagtttaatatgtatcaagggtaaaatacactat

SEQ ID NO: 73442 - DNA, 445 bp, Zea mays
  unsure (1)..(445): unsure at all n locations
actcagctgagcctggcttccttatgccgaagactaacancttatttcttggctacaatagcttnagggttgtgttacttttctcttctgcctttgataattattttagataaaatatttacttgttttctttttgatgccattagggacttattttgagcaaagctttgaaagcgcagaacgagtgcgaagatgaaagcactgaaatagccttcgaaaatctgcgctcagaagttataacgctttggaatgaggcccttgagaaagacaagattcttctttctttagtcgagaagctaaagacaagtcaagctaacttgactaaattctctcagacagatcaaaaaaattgaagcttgaaaaggaaatagaggttgacgcaagacgcatagccgacttataatacgctctatttactcaagtgaactacacaaatctgaagtga

SEQ ID NO: 73443 - DNA, 468 bp, Zea mays
  unsure (1)..(468): unsure at all n locations
actcaagcttatcaaatggacgngaagagngcctgtctcaatggactttatctattgaatgatgtcnacgncgagcaaccccctggctttgaagatagcgagtaccctaaccatgtatataaattctctaaggcgctttatgggctcaagcaagccccaagagcatggtatgaatgcctaagagattttcctattgctaatggcttcatagttggaaaagccgatcctactctctttactaaaactattgcaaatgatttgctcgtatgccaaatttatgtngatgatatcatatttgggtctactaacaaatctacttgtgaagagtttagtacgataatggctcaaaaattccagatgtctatgatgggagagctgaaatatttcttacgaattcaagtcaatcaacttcaagagggcaccttcatcagtcaaactaagtacattctagacatactcaccaagttt

SEQ ID NO: 73444 - DNA, 418 bp, Zea mays
  unsure (1)..(418): unsure at all n locations
gcagaaatgtgctaacatatgttgatgatatcatantaaagagcacaaagcaagaaaatcatgttgctgatttgcaagaaacatttgccaacttcagaagggtcggtcttaaactaaatccaaagaaatgcgtctctgagtgaagaagggaaaatttcttggttgcttggtatcaacagagggtattgaagctaatccaagtaagatagaagccatactttaaatggagccaccaaagtcaagagagggtgcccaaagattgacaggaaggctggcatcactgaacagattcatttcaagatcagcagagaggaacttaccattcttcgaagtgatgaagttagccgatgtctttcaatggggaccaaatcagcaaaaagccctctaagaactgtaacaatatgtgatagagctgaca

SEQ ID NO: 73445 - DNA, 476 bp, Zea mays
  unsure (1)..(476): unsure at all n locations
tgacctatttgtgttgnnctgatttttaatacctttatgggattttatacaagnggccaatattggcgcccacctccggtgatcctacttccacaacaatgagcgtgataaatcatcaagcttcgtcagaggggccgacgaagcttatttccccaaacacaggtggttcaagcttcaaaccagtcaacaagatatagaagaaagaagctcaacagagggtacaacatgtcggagtgcaggggccctatgttagatataaatggtctcatattccaatcacattctcccaagaagacattcagctcaaagattacccatataatgatgtcatgggtatatcttgttttataaaatgcttcttggttcacattgtcctgatagatacggacagttcggcagacatcatctttggtaaagccttcagacagatacaagaaacgggtgacaagatacaagatgcagtgcaccctttatgt

SEQ ID NO: 73446 - DNA, 328 bp, Zea mays
  unsure (1)..(328): unsure at all n locations
cctaaacctctctngaacactatcttcaaagccatgtataaagggggagatacatattaaacgtgctaaccatgagtttatctttatccaacacttaagtgacctatataccacctactgtgaggacgatatgttgcaaaaagacccctagagaaaccccaaatccattccttaagtggagagagagcgtgagctctcttattctatctaagactataactactcccacactaaagatcaaccgcgtttaccatgaagatggcaccaaaccacctatgttctataccaaaatgtggcataccacctatggcacccactggaaaaagat

SEQ ID NO: 73447 - DNA, 367 bp, Zea mays
  unsure (1)..(367): unsure at all n locations
taagcttgaacgccctggaagtagcataggccaataatatatgaattgtctctatcctagctacgggtgcataagactcaccgaaatccaaaccttcgactagggagtatcctttgggcacaagtcaggctatgtttcttgtcaccacaccatgctcatcatgcttgatgcggaacacacacttgagtcctacaacatgttgatttggacgtggaaccaaatgccatacctcattcctagtgatagtgttgagctcctcttgcatcaccaccacccaatccgaatcttgtagagcttcctttaccctgtgtggctcaatagaggaaacaaaagaataatgctcacaaaaatgngcaacacgagatct

SEQ ID NO: 73448 - DNA, 435 bp, Zea mays
  unsure (1)..(435): unsure at all n locations
ttgtgaaagctggacnacgaagtggcgtgagcatcnttttttnttacanacagaacacaatggaaatctatcttcatcaacttatccccgaagcgatcatatcgatgaatatcttcgcgtgggccgcgagaagccaaggtctggaacctgatgcgaagagtttctgcaacatacacgaattgttatacgagacanagccctgtggtaaggaacagtatcacaataatttctgctgctacagtttcgtctctcggtccgggtcaagctgacccgtgccaacctttcggaagagatggcccggcgactggatgacagaatggttttatgtgaacaatgacctgaacacaccggaagatattaaaggtataattttgcgccctattttggatagctctttcctgcggatgcctgatgttgaaatgaaccatgttgccg

SEQ ID NO: 73449 - DNA, 217 bp, Zea mays
gtgaccctataacactccttaacgctactgaaaatcacttcttctcaagaccggacacctacatcaggaatagacgtggtagcccatttgcataattgagatacacaaagcatattgtaatccagagatctacaaaacaactttggaacagaacggccaggggaaatacacttaacccattctttgaccgacctagatatcatcctcgatgtgaaac

SEQ ID NO: 73450 - DNA, 468 bp, Zea mays
  unsure (1)..(468): unsure at all n locations
taggaaatcccatactcttagccatctgccggcttatatattttctttgtatccgggagacagtacagaanatcatcttcgttactaccattgaacactaagacccccttcggatatttcagtctttgggcgtagtgtttggcctccaagatttcttcttcagataatntttccccagagcatgtcaaacaatgtaatcagtatcttcagctaaggcttcgaggacaagagattctgctttttctaccatatcttgctctgtcgttttgctggtatctgaaatttgctgatccaccttatcttcaggctcggtggccttcgtttcagtaggcagtgaaggcctagatttggctttgacttggactttggcagcttcggcagttttcttggcaagagcaggagttaagggccttatggtctctataacagcgtctagcacgcttgccattcttcttctattgggagttg

SEQ ID NO: 73451 - DNA, 442 bp, Zea mays
  unsure (1)..(442): unsure at all n locations
tgtcgcagttgtgtcagccgtcgtctcgagcctgtttctgttgccgacagcgccgccttgggcacctccacggacaccacccttagcatgtcctcgcgccccggcctgtgcgcctccacgcgctatgcgtggcttgccgcctttgcggcctcgagtcgaggactcccccttcttcttgtcaccctggcaggcctcccactactcccgcatgagatgtagcttcctgccgatagtgataggcccagagggagcctgtggttcatcgccattgaccaccttgatacgacctatcgcctcatcgatcgtcatcatggagaggtctagcagagactcgatcgagcgagcaatctgcttgtacttttcggtgatgcaacgtaagagcttctcaacagctctctcctcatcgtaagtgtcgncactgaactgcaccatcttctgcaac

SEQ ID NO: 73452 - DNA, 314 bp, Zea mays
cactcacaaacacggttggttagcacccttagcacaaaccgcacatactgatgggcatggatcatgactaggtctcttttaccaagggacgcatctcttgtcttgtccgagccctgtcttaggcggtaacagtatttctggacgagttcacgcctcgaccgagggcctcctcatgcggcgggcgcacctttgactcgtccgaagcccaacttgggcaggctttaatgagaagcaaccttggtcatattgcctttacaaccgaccgtaatgcatgctcatttaatgtcaggattgtctgacaccttattctgaca

SEQ ID NO: 73453 - DNA, 455 bp, Zea mays
  unsure (1)..(455): unsure at all n locations
tcctcctgcattcttgagcccctcaagcatccgtatgttttatattgttccactccgaggtaagaaggtggtcattggctcatctgccttcttcatgcgaatttgatgatagccagaataacaatccaacatactcatgagcttcgaagaagctgctacatgcacaagggagactatccttggcaatgggaactcgtccttagagcatgccttgttgagatctgagaaatcgatacacattctacatttggcgatagccttcttcaccataacagtgttggctaaccattctggatatgttacttttctgataacattagcactgagaagtctctttacttcngttcgagcaccttcagctntatcatcagacatcttccgaagctttgcttcttggctgaatgaggatcccattaattgttgctcatgacatttgtgacccacaacatcatgct

SEQ ID NO: 73454 - DNA, 295 bp, Zea mays
gaccttgttgtctcacctcggtatataaagtcatccgaatgctatccatgtacgtgccatgatcaattattcacgtacactctagttacttaatatggtcatcatcactcaacgctcgaaatattattaagaagggataatattactattcattatacgtctgatacgtccatatatgttcttacaataaatccaagtgcggaaaataaacttatataaacccggtcttcacaagcagccgactgggggttgtcgctaacccacactctaaaatcgggtattcttggaacttctg

SEQ ID NO: 73455 - DNA, 394 bp, Zea mays
  unsure (1)..(394): unsure at all n locations
ggccaccctggctccagcaagcctccgcctagcgcgcccggcaccagtatgccgctccctgtcgtgcccacacaggagcgaaggcctccgtcgccaccgcgtgctgctgagacgatggtgggtggggccgaagtctccatggatatttccgtggaggactaccttgtgagcggngtcgcgattttcgacgcccacacacggcgaggacctgtcagtgagttttttttgaatgggggtcagggtttctggcgtgaccatggtgcagggtcagagtctatgcaactgactgttgtcccggcgccgacggcagctgggtcggtggctgtggcgactggggcgaatgggtcttcgcaggacccatggtccaggttttgcgcgagcggcgaaattgctt

SEQ ID NO: 73456 - DNA, 398 bp, Zea mays
  unsure (1)..(398): unsure at all n locations
agcttgcttcggccgaggggtctttcgtatcgtcaacagagaaagcagcttctgcttgtgccaaaattttcacatgttcgcaccctgctttctccaaaatagccgcgactcctcttgcaccagagaaggcacagacgtccccacggtcgctcaaaatttcttcaaaagcttcggtttcgttgctgatccactcaattgggccttcggggtcgcctcgtacgaagttatcttcacttgaatatgcgccaacattggcgaagctagtttttatctttttcacacattctatagattnttcannaacattttcttttgatgcgcgaagttatgcaactggtttttcccagtaattnttccagtaatcactggcatttcgttcagcttcagcaacaacgcat

SEQ ID NO: 73457 - DNA, 465 bp, Zea mays
  unsure (1)..(465): unsure at all n locations
tagactctaaatgctatacttattcaaatactttagaattaagtatggatttagtcacataaaatatattacttggcgccatgcatataaaaacaaacatgtgtatacgcaggcatttaattctccctggatccatggccgacatataaccatgcatatataataaaaccttgcatctcgatcagattataaaaatgtgcagtcatcgtttatggtagtaaagtatcaaccatgtatgttcggcagtctaccaagtaaagataatggaaatatcaattcccatgtacccatgaaaagccatctataaagttgattgcaaaataaaatagataatgactntctcacacaacaatgtttcgaatgagattaatcaatttcatacaccatgatgannagtcgatgtgcagcatatttggtcataccttagaatagcagcatattggtcataccttagaaataaacacg

SEQ ID NO: 73458 - DNA, 396 bp, Zea mays
  unsure (1)..(396): unsure at all n locations
gctttgagaataggaagttgtgtgctttgcctcattagatgagaaatcaacaagataaaaggttntcatgtctaaaacctttaaacttaagattgctaccatcaacactagagataataacatcttcaaccatgaaattgcaacaaaatcctaaatcacataattgagctacagaaagtaaattaaaattcaaagactcaaccaagagcacatttgatatagaatgatcatttgaaatagcaattttacccaaacctttaacctttcctttgcgattatctccaaatgtgatactatcataatttgagcaatcttcctcactcatgtgggtaaacattatcatatctccggtcatgtgttgagtgcatccactatctaacacccaatggatccctc

SEQ ID NO: 73459 - DNA, 430 bp, Zea mays
  unsure (1)..(430): unsure at all n locations
ntcaattccctggaatattgtgtgcgctgcgaatagccaaagattacttgcaatgtgttgtttattatcccctctgccaaaaaaatattaagatttactagatttagaaaatatattatcaacaattttgatcttcaattggatttattatgaaaatatattccataattaatctagtgatacttattatacatcataaatatcaataggtttatatatataattggacaaaatttagattatttgactcttcgggaagcaaggcttcctttcttttgggggtgggggatacaggaattagtattgaaataatcgtccggctgatattggtgttgcttgagttgctttagtcatttattgcagaaatatgaattattactattatgatggaagtgctgggtagttcttcaagtcaactgagtgatggaag

SEQ ID NO: 73460 - DNA, 470 bp, Zea mays
  unsure (1)..(470): unsure at all n locations
gttacctgcngcatgcaagcttctcctggacaagtgctgcacttactcctgagtgcgaagctgccacatataataacaaacgagcccctggcgatggtggagataatgttgttaaatctatcagatattgcttcaactcctcgaaggctttttgttggcttggtccccattgaaagacttctgctgatttcaccacttcgaagaatggtagattcctttctgctgatctagatataaatctattaagagatgccaaccttcctgttaatctttgggcccccttttttgtggttggtggctccattcgaagtatggcttcaattatacttggattagcttcaattcccttagttgaaaccaagcatccaagaaaattccccttctatacaccgaagacacattgttctggattcaactttaaaccaacttgtcttgaaatggcgactgtctccttgcaatcagcaacatga

SEQ ID NO: 73461 - DNA, 410 bp, Zea mays
  unsure (1)..(410): unsure at all n locations
tgtgaagattcttcattccaacatgtgctagtcggcgatgccagagccagcccatgttagtcttagcaattaagcaagtgtcgagttcagctctatcaaaatctactaagtatagctgaccctctaacactcccttaaatgctattgaatcatcacttcttctaaagacagtaacacctgtatccgtaaaaagacagttgtaacccattttacataattacgaaactganaacaagttgtaatctaaagaatctacaagaaaaacattggaaatggaatggtcaggtgatatagcaattttacccaatcctttgaccaaaccttgatttccatccccgaatgtgatcgctctttggggaatctggttnttctcataagaggagaacatcttcttctcccctatcatatgg

SEQ ID NO: 73462 - DNA, 437 bp, Zea mays
  unsure (1)..(437): unsure at all n locations
nngctgtgaagattctttattccaacatgtgatatttgcgatgccagagccaaccaatgttagtcttagcaattaagcaagtgtctagttcagcttgattatcattaaaatcaactaagtatagctgaccatctagcactcccttaaaagctattgaatcatcacttcttctaaagacagcaacacctatatcagtatacagacagttatagcccactttgcataattgagaaatagaaagcaaattgtaatataaagaatctacaaaaaaattggaaatagaattcacacccggttttaagggacaaagccgggtgcatcttatacatgctgccaaaaaacaacatatataataacatagtgtatagagataaatgtcataatataatcagagtatttattacatagcggaagtcttacaaaataaacgataaata

SEQ ID NO: 73463 - DNA, 500 bp, Zea mays
  unsure (1)..(500): unsure at all n locations
tacggacctatgatactcagcttctaagggagagcacattnngngactaacaagatgtgcattnttgtgaaagacagggtttgtagcgcatgtcaagcagggaagcaagttggtgttcatcatccacacaagaacatcatgacgacttacaggccactcgagctactacacatggacctattcggcccgatagcttacataagcatcggtgggagtaaatactgtctaggtattgtggatgattattctcgcttcacttgggtgttctttttgcaggatatatctcaaacccaagagaccctaaagggatttttgagacgggctcaaaatgagttcggattgaggatcaaaaagattagaagcgacaacgggacggagttcaagaactcacaaatagaagggcttcttgatgatgaaggcatcaagcatgagttctcttatccctacacaccacaacaaaatggtgtagtggagaagaagaatagaactctacttgacat

SEQ ID NO: 73464 - DNA, 412 bp, Zea mays
  unsure (1)..(412): unsure at all n locations
gctttgcccatgacactgtgctacgcttaattttctatcacacacatagaanatgtttaatttagaagtcctccagataataggatcatggtattatgcaacaaatactcagatgaaactagagaattgggaatgccgccactatgaaacaatttacctgctcgcatcggaggaagaacaacctgttctctttagaaagaatggtatccggactcttgcaaccattgcatatgacatattcatctaanaagcgaaattgcacaaaaacaaggaagaattatttagcaagcctagaaataaaaacattaaaaaattgaaaaacatttgtgttgattctccgcatagaagaaggaaagaacagtaactacaacccaatacaagttctaacctacattcattataagcttcacag

SEQ ID NO: 73465 - DNA, 470 bp, Zea mays
  unsure (1)..(470): unsure at all n locations
cgcgacctataaaactcaagcttggatnttggtgatgaggacatcttctagcttgtgaagagcttcgctttgctctctcgctctttttaaaagtttgagcatgaccgccttatcttcttggcttagatgagcatagagttgcatgaagcttctttcatcctcctcgtcctcatttgtgcttccgctatcattttcattatccacacaacatatgtgggaatcaaaatgggaagacaaaccttttagagaggtggattcatcatttgggctccaccgttcattttcttcttcttcctttaaagggttagtttcacaaggactaaaggaactagaagcatcatatgaactaacatgtttggactcatcaaatctatttttaattctagtctagatatcatgcgcatcatgaatagggtcatcatatctaattatgaacgcatggatatcttccttgctaaaagaatacctga

SEQ ID NO: 73466 - DNA, 319 bp, Zea mays
  unsure (1)..(319): unsure at all n locations
ttcaccggcgaacatccggtgtatctctgtgctcgggcgagggctcggggcgtgcaagtgccaacggctaaggcctttagaggcatttataggcgagggcactgcacaggcgcgcagggcggggcgaccacgcgcggggggcgcgctgccgtggccagtccgcgctcggccggtcaggcaagcgatcgaacatgtggttctttgcttctgccagagttcaagcgctcataggttgaagatcttctcgaatttgggcatgatcactgcgcaagaattgcttccccgacagagctttgtcgtntgtgtgtggaagtcgagc

SEQ ID NO: 73467 - DNA, 422 bp, Zea mays
  unsure (1)..(422): unsure at all n locations
tgcatgacaaaaccgngaatgccatagatctgacttatcagatttattaacagaattcaccagtttgttacacacatcatgcagtgataagcggaacaagcctccgcagtcatatcctttaccaacaaaagtaccatgtttcgacacaacacatttattagactcaagaacaactttatatccatctcgacatagcatcgaagcgctaacgagattcttcttgatagagggcacatgctgcacgctcttcaatggcaccgtctttctcgaagtaaacttcagaatgaccgtaccaacaccaagaacatgagcacgcgacccatttcccatcaacaaggcgccagacctcccgacctggtaggaagtgaacatagaggcatcagcacacacatgaatgtttgcccactgtccatccaccactc

SEQ ID NO: 73468 - DNA, 455 bp, Zea mays
  unsure (1)..(455): unsure at all n locations
tataacataagaatggaggcaagaacaagaccatatgtcttgatttattgggaattgtataaacatggagtttgttcaccactcctcaaatgtttatcaagaaccgaaggtattgaattgatgaaggagatacacgcaggtctgtgtggatctcacatccgatctaggccattgctgggaaaagttttttgtcaaggattttattggccgaaagcagcttcggatgcagcacaattagttcaaaaatgtgaaggctgtaaaaaatgtgcaagagatcagaaacaaccctcatctctgactcagttaatacagcccacttggccattgcaaaagtggggccttgatttgctaggcccacttccaccagcacaaggaaatctataatatgtcttggtggcgggagagtatttntccagtggattgacgcgaagcccttaccacaattacttcggtca

SEQ ID NO: 73469 - DNA, 368 bp, Zea mays
tgtgttttactatccccacagttggccccatgttactgaaacacagtttcaatttcaacactttatctgaaatcctttccctcccttactaactctactaatagagccactctgaggcgtgattactcctctttccatgtagcaccataccaacatcacttaagtaaactttactatagtgaccatggtgcttaactttctggatcaaccacagaacaacccccacagttgggtgaatatcattgaaatttcaatttcagcacacttctaatctgacagtcatactttagagatgttttactccaagttccatgtagttttagggctacgttacctaaccaatttaatactactatggtagccctata

SEQ ID NO: 73470 - DNA, 431 bp, Zea mays
  unsure (1)..(431): unsure at all n locations
tcgggaccaggagcttcgatcttttgagatgcaatccgctctgtagntntttccttaggctcagaaggttccatctcagtgggccctgaaggcccagcttcggtttctacttgcccagttttgatttcggcctgcgtttttgcaatttcagcaactttctatgtaacagcagggcttaaaaccttcgtagtttccagcacagcatccagcatgttggccattcttctcctcttgggagttgcagcagaagccttttgcaccttcggcgatggtgcctctgtcgcagggctcagaatttttggcattttaattattttttcaatctttaaatcttcagctttttcaacctcacctttgactgggtccgctatgggtaccttcggcattgcgttcgtctcttcagtgctctgtgcaatcgaagcactttctgt

SEQ ID NO: 73471 - DNA, 420 bp, Zea mays
  unsure (1)..(420): unsure at all n locations
agctttgtgcacttactaccttgggccataggatggagaaccctacacctctcttaaaccctactttccaagccatggttgaaaggggggagagaataatcatttgggcaaatcaagagttaatctttaaccaaacttaagtaacttcataaccagcaattatggtgaggatattttgcaaaaagacccctggagaaaccccaaatcaaatctccaagtagagtgagagctagagctctctaattctctctaagtcaaaaactatgcctacactaaagatcaaccgtgttcaccttgaagatggcaccaaaaccacctatgttctataccaaaaatgtggcataccacctagggcacccactggaataagttgagcccgagaccctgacgttngacatgccttggcatggcttttgtcgc

SEQ ID NO: 73472 - DNA, 374 bp, Zea mays
  unsure (1)..(374): unsure at all n locations
nntaccacccttgcatttgcccctgatttcctagcaactatcttcctatcctttctacaaatagcgaaggaagcatttaaagtatgataaattgtagagggaccattcataacttttctagtcacatgaacaatattcttcctaggcacatgattaatagcatttctcctagctacgtttctgccatgcatataggaagaactagaagcaaacatagcataagagtcaaaagcatcattacaactcctataagtatttctaggttgtctcctatcatggtacataaaagcatggttcttttgcacactactagccataggagccttccctttctccttggcggagatgggagtcttatgacttgttaagttctt

SEQ ID NO: 73473 - DNA, 453 bp, Zea mays
  unsure (1)..(453): unsure at all n locations
taagtcacctgcggcatgcaagcttctaaaggtggaacacgtgatatgttttattaacgtgcaattcgaaaaagatagaccttgtgcagcttgtcaagcaggtaaacaagtgggaggagcgcatcacagcaagaatgtgatgaccacatcaagacccctagagctgctacatatggacctcttcggacccgtcgtctatctaagcataggaggaagtaagtatggtctagttattgttgatgacttttcccgcttcacttgggtattctttttgcaggataagactgaaacccaagggaccctcaagcgcttcctaaggagagctcaaaatgagtttgagctcaaagtgaaaagataagaagcgacaacgggtccgaattcaagaaccttcaagtggaggagtttcttgaggaggaanggatcaagcacaagttctctgctccctacacacca

SEQ ID NO: 73474 - DNA, 380 bp, Zea mays
  unsure (1)..(380): unsure at all n locations
aaactcaagcttgngcacacatcngaaggagagaagcagagatttccttttacagaaggccagaccgaaaggaccaaccatattcttgaagacatgttgagagcctgcgcattgcaagatcagtccggatgggacaagagattgccttatgcggagttatcctataacaacagttaccaggccagtttgaagatgtcaccatttcatgcgctctatggaaggagttgtagaactccgttgcaatgggatcagcctgtagaaaagcaagtatctgggccagacattttgctcgaagccgaagagaacatccagatggttcgagagaatctgaagataacgcaagcaaagcagcgaagctatgcatacacaatatgaataga

SEQ ID NO: 73475 - DNA, 396 bp, Zea mays
  unsure (1)..(396): unsure at all n locations
agcttattacacacgagtgctacctatgtgtctctccaactctttctctnaagcgtccccaaactccttgagaaggtcatcatagctggccagggacatgttctcggggtccgactggttcctgggagggttctcttcctgctgctcagactgacatccttggcttttggtcttcttgcggattatccttgcgggggcgagcttcttcagtttcttgtcgtaatccattttgagggtgcggtaagacttacgggtgttggtctcttcgccttcagctaacgagaggctctcttggagggacgctctttcttctgaaagtccctgactttctgctcacgcttttcaccctggaggatatggatatgcactggacggcgaggtcatcataatggttat

SEQ ID NO: 73476 - DNA, 438 bp, Zea mays
  unsure (1)..(438): unsure at all n locations
tcttcaccatgtgatcacggttatcttgagaaggttgttctatgcatttcccttctagttatgtcaagctcttctttagcctctcattttcttctttgagcttttgatatgagtcatcatttgttcctgcaaattctagctcaaaggaagatttgcttgtcgacgaacaacaagcattagcacatggtaatatagtatcaatttgaatacatgtgcaagagtgaggttgttgggattntaaattttctatcacaacctcatgagcaatgtttaatatgatatgatcatctctaagattttcatgagagcataggagcatatcatatttttctttgaaagctagattttcaatttttaagctttctacttggtcctttagcaacgtattcttatntactaatngagcgatacaatgtaacgcgttattttgctcaattg

SEQ ID NO: 73477 - DNA, 334 bp, Zea mays
gcttgagatcgatgcatgtgtgagcacattgcttaacaattgtgatcggcaaaaaaaaaagtgggcccttgggtgattgaccctccccgacgtatatcatataacgaagattttttcttcaactataaagtccagaaaaggccatataaattggctgccagaatgcacctacgacacagatatatctacagacagttacacaacatgggacctttcttcgtgctactcaacatttgaacccctgagcggcagcctcccaacccaagaacctaccactgtgctaaaccaagatgttgagtacttgagtatataaagtaactcaagcactgaaatg

SEQ ID NO: 73478 - DNA, 475 bp, Zea mays
  unsure (1)..(475): unsure at all n locations
nggtgganacacanaaaattaaattcagccaactgaagttagaactgaactcaacatacttccttactaggaactattccactgccttcactccgcatctttcttttaatgattgctaactaaagctccacaaactctgtgttaataaggtcctaagtcgaccaacagagttgagagtactaaaactgggtttcagctggctactccaaattcagcacacatttgtctgacagaaagtttagaggtgttttactctcacttttatgtagaaccaagtccacccctatttataaaacatattctctgtattatgggctccaacttttctatatagttcttagttcaacaccccatgatttagtcacaaaaagacatcaaactggcaccaaacactaattntcaagttttagtgaactgagaanaattcagtttcagtcacaaggcagtccaactttgagcaagnttactccacttt

SEQ ID NO: 73479 - DNA, 446 bp, Zea mays
agcttcgacgccgacgactgcataaatgttcatggccggcagccggcgtcagacaaactagtagtagagacacagaacaatccatggcactatggcaggctttaatttgctgcaccgatggacggaatggggctgtactgtacgtctgtacgacgcacgcaagctgcgggatagatacgatctgcatttgggggaagaggtataccgtatgcccaagtgagctagctctgcgtacacgcaccactacttacccggctcgcgttccggcggcgtgaggactcagggaggagcgcctggagcttggagatgagctcgttgatctcgtcgtcgctgatcctgccacgtcgccccgacgacatattttcggcggcgacgactgcagtatcttgcttcgagacaccacgcgcgctcggaagctacagacactggatcgtttcgttctcgtc

SEQ ID NO: 73480 - DNA, 432 bp, Zea mays
  unsure (1)..(432): unsure at all n locations
tgtggtgagccacgagagaatcatgatagccctaatatcatcttcataagagaagagatgaagcacactgagccaaagaaagtggtccaaagagatccgtctagattgcactatgaagtggttattcatgactttctcaatggagacttgcagctcttgtggagacctgaacttcgtagaggtttacttttgggtgattcaccccgatctacttgttcctgtgttctctgttgtttgttttgcaaagaatcaattcactagatgcatatctatctntgataacaagcatattcaataattattatatatataaactttggtgattaagattgtatgtacccagatttgttttttacttttgaggttcaaaatcgatatattttagctactattaacccacttaacgacttcatcccattacttgatcaattt

SEQ ID NO: 73481 - DNA, 366 bp, Zea mays
  unsure (1)..(366): unsure at all n locations
ttgatactatanaattatatgctaattntccgatgtacaacttatagcacactcttctacttgcgcctataacataaatgtactatataactatctctctcatatgagttaggagaatatacaaatatattacatatattaatatataaacttaattagttttgtctaaattataattaataaaatggaattcaattcctacgaaacaaacgggaccttatgttatattccacgatggatttaaccgaataaaaaaaaataattagtcttgattattttacggcatggaatgtgtggcggaactgacctaattatatcaacttaagtgcctaagccctgccttaaggcttcaccacactaaatggg

SEQ ID NO: 73482 - DNA, 459 bp, Zea mays
  unsure (1)..(459): unsure at all n locations
ttgaatatcatgtcactagacagagccctcagtatggacaggaatggaggagtccgtccaagttgttttctcctccgtcccaccgttccaaagaaacttatctcgtttcttgatgacttaaatcattntaaatttaagtaagtttattttaaaaataatgttaatggcacctaataatagggttatgtttggctgcatgaataagcagcagctgcccttctactgctgctactgatctgagagagaagagaagcacacttgcagcagcggcagtttctttctacaagggatacaacatcaacttactcatcctatctcccatcccgtcttgtattttaaatnttattatgtgaacaatataatctacaatgcanaatagtgttgtacacaaccatgtgcacgatctactgatngttgcttcagatcgtgtatatggttattcaaaacactattttacac

SEQ ID NO: 73483 - DNA, 412 bp, Zea mays
gcttggctatatgcgcaccaactatatataaagctagtttatccatgtcagcttatgtacaactttacattcacaagctacatttgtctcaaagaaccacgaagcaaaaaaaggaacaaagcctttgatttcctctaaagcatgcaacaaccaacatcttatcttctagctatatgccaactggttgaacttgaattgattgtccccaaagcacgagagacagccctgcgtttggtccttggggttcacgtcgccgccattggacatgtcgatcgcctccaccagggacaccacctctgccatctcgggacgcttgtccgggtttgtgtaccaccatcgcacgttcgctagcgagctatgacaacaacgcgatatctcaggcctaagggtttgtacaaaagtttatttattt

SEQ ID NO: 73484 - DNA, 452 bp, Zea mays
  unsure (1)..(452): unsure at all n locations
tctaagcttacaaggctgaagtgcttctaacgaccatcatgaagagtcttgtgagcaacctccgctttgaagatagtgagtaccctaaccatgtgtataaactctctaaggcgctttatgggctcaagcaagccccaagagcatggtatgaatgccttagagatttccttattgcanatggattcaaagtcggaaaagtcgatcctacactctttaccaaaacacttgaaaatgatttgtttgtatgccaaatttatgttgatgatatcatatttgggtctactaacgaatctacatgtgaagagtttagtaagatcatgacacagaaattcgagatgtctatgatgggggagttgaagtacttcttaggatttcaagtgaagcaacttcaagagggcaccttcatcagccaaacgaagtatactcaagacattctanacaagtttgggatg

SEQ ID NO: 73485 - DNA, 447 bp, Zea mays
agtacgccgctgcagctttgattcgctggagccctgtcttctctcagcccatacgaagattcccatttgtatgattgcttcgggagtaatttgatgaaggtatacttgatatatcttcaaaacctcaaccacgatactgcttagggggaaccgaagtccagccttgaagaagcttcggaagattacgagttcatctttttcgggagtaggagaagtcttgtctccgttgtcagccctcacgatggacacatctcaaaagtatcttcccctcatattgtcaagatgactctgtttaatagttgattttccaaaaactgtatggcttggtcaccacggtcgatctttggagtcttcgcctccactatccacataataactgtcactatcaccggtggcttcggataaacctttaaagtctcctaaaatctttctcttttgcttcctatg

SEQ ID NO: 73486 - DNA, 373 bp, Zea mays
  unsure (1)..(373): unsure at all n locations
tctcacccaaaagattcanaanttcacaaacagatgcggtttctctttattaatcggtaactgcanagcgaaagttccgaacttccccgtatcgaaccgaccatctgtctgaaaaaattaattaatccagagcanaaacaaagtgccgcgccgcccacaaggatgcccgtcgtgcaccagcacggtccgtgctcgccgctggccgacaacaggaacgggaaggcgccgtcccacgcggagatcctcgccgcggaccagcgccgcgccgagtacatccaccgccgcgtggccgagaccaccgggcgggcgagacgactgaagcagggcgcaccggtcgagctccggcccggcacgccgccgtcgtcgatcgtcg

SEQ ID NO: 73487 - DNA, 497 bp, Zea mays
  unsure (1)..(497): unsure at all n locations
cgcaccttaaaactcagcttctaagggagaacacattntaggactaacagatgttcattttgagaaagacaggatttgtagcgcatgccaagctggaaagcaagttggtactcatcatccacacaagaacatcatgacgaccgacaggccgcttgagctactccacatggatctattcggcccgattgcttacataagcatcggcgggagtaagtattgtcttgtgatagtggatgattattctcgcttcacttgggtgttctttntacaggaaaaatctcaaacccaagaaaccttatagggattcctaagacgagctcaaaatgagttcggcttaaggatcaaaaggattagaagcgacaacggaacggagttcaagaactgtcaaattaaaggcttccttgaggaggagggcatcaagcatgagttctcttctccctacactccacaacanaatggtgtagtggagaggaagactagaactctattggacatgg

SEQ ID NO: 73488 - DNA, 377 bp, Zea mays
agcttaaagcgaagggagagtccttggacatgctggagaccgacctcgccaggcgggagacggacctcgctaggagggagaaggatctcgccttcagggaggaaatgctcacccgacgaggcgagctgctcgctgagcacaagctcgaggcggagaagaaagaaaaagagctggaggagcaggttcgccagttcaacgcggcacaggccacccatggtttccaggcggtggaggccaccaggaaggccctcgaggatctttatgcggagcaccgcactggggtccagcgcatcgccgcatgggctggcgaggtgagcaccgcactggtgtcgctagggatgagtcccatcccactgtcggagctgccgacgtctatc

SEQ ID NO: 73489 - DNA, 455 bp, Zea mays
  unsure (1)..(455): unsure at all n locations
taacttgcgaactggcttcnttgaccttcagatgttcacgacgaattgatacaattcttgaggatctcgtggacctatgggttaggatccacacacgcttctgctgcaccactctgatcttgttggttaatgttggtcgcattgtcttcgttgcggttagcggctaacccccttaacaggagcgttgatatgcacttggtgaagatgctgtcgactctgatcttgaccgattaagagaggttgtaggatgtcaactggacaggtgcaaaaggaaagagtatagatagaaaaggtaagcatagatggattaaagagagaaaagggagagcacccagctaccttaccttatggcaatcagctagtaaactgatgtcattgcggaccaagggccacaacacatcaacactcatcacaatgaagcanatcagtcatgacacaaagaacaacatcacaag

SEQ ID NO: 73490 - DNA, 388 bp, Zea mays
  unsure (1)..(388): unsure at all n locations
gcatgcaagcttccccatntatattattatttatcgtttgtttcattccgctgcacttcgaacaatgatgactacttctgcaaaaactccgatgatgatgtaataatttaataccccttaatgcatggttttatgttntattgtatttgctctgtgactcaccatcgagtgagattgtggtacttgatcctgtcagtggcctcgactgactatatccaagggattgacgggttattcccatttaagtgtggtctagcctctaaggcgggacttatgcacttaagttagaataattcgggcagctccgccacaattcaactaccaatattaattataggaagaggttaaccctatttccctttcaatctcctcctttttggtgattgat

SEQ ID NO: 73491 - DNA, 476 bp, Zea mays
  unsure (1)..(476): unsure at all n locations
tctaaagggagaacacattntgggactaacagatgttcattntgagaaagatagggattggagcgcatgtcaggcaggaaagcaagttggtgttcatcattcacacaagaacatcatgacgactgacaggccactcgagctcctacacatggacctattcggcctgatagcttacataagcatcggcgggagtaagtattgtctagttattgtggatgactattatcgcttcacttgggtgttctttttgcaggagaaatctcatacccgagaaactttgaaaggattcttgagatgagctcaaaatgagttcagcttgaggatcaagaaaataagaagcgacaacgggacagagttcaagaactctcaaattgaaggctttcttgaggaggaaggcatcaagcatgagttctcctctccctacacgccacaacanaatggtgtagtagaaacgacgaataanactctactggaca

SEQ ID NO: 73492 - DNA, 468 bp, Zea mays
tcacctgccgcatgaagcttggaagagtgtggtggtctttgttgtttgcaccctctatcatcgccttgagcggagttatgaattgacctgacatgcctcggatgaaatcatcctccgaagcccctggtcatctcagagaacctgaatgcctcctcccttctctggcggaagtcattgtcagctcggatgtactcgtccattttttggagcagcttctccaaagtttgtggtggcttcctggcaaagtattgtgctgagggtcctagccgaagtcccttaatcatggccttaatgacaatttcattgggcactgttggcgcttgtgccctcagacgcaggaaccttctgacaaacgcctggaggtattcttcgtggtcctgagtacactggaatagagcttgagcagtaactggcttcgtctgaaaccactggaagcctagtatcaacatatttctcaacttctgcaag

SEQ ID NO: 73493 - DNA, 377 bp, Zea mays
  unsure (1)..(377): unsure at all n locations
cgagctnggnttgtctgctatgacgaaagatcttcttgttgcagcttcgcctacaatagcttgaaggtttgtacattttggcttcacattcatcaatttttgttacaatgaactgtttttgcagtggcttttattgttattatttgttcattctttgtctaacagggtttaattcttagtaaggctctaaaatctcaaaaagatgcagaggatgaaagctattagatggcaattggaaaccttcgatcggaggttataaccttgaggaacgaatctattgaaaaagataagattatactctccttggttgaaaggctaanatccagtgaagctaaactatccagtcaagaggatctgcatagagctgaagtacaaga

SEQ ID NO: 73494 - DNA, 477 bp, Zea mays
  unsure (1)..(477): unsure at all n locations
ttaagtcaccgccgatgcaagctggcttgtattaatcggtccacttactatcaccatgcacccacaagtgcgcatgtatgaaagtgatggttntctcccaacccacttctcataaggggttttctcttctttgcccataggaattctattcaaaacatgacacgaagttaggactgtctccccccaccatgccttagataaaccatatgtgtctaacatgacattcaccaagtcagtcaacgtacgatttttcttctcagcaatctcgtttgattcaggtgaatagggaggtgtcctctcatgaataatgtcatgtcctacatagaaataattaaaactttgggaaagtattcaccaccacgatctgatctcagacgtttgatctttctctctagttgggtttcaactttagccttatagagttgtaagtagtctaacacctcatctgtagtttttagcaactatatatagcagaat

SEQ ID NO: 73495 - DNA, 437 bp, Zea mays
  unsure (1)..(437): unsure at all n locations
taccgcatttgaagcatgagcgcttccgcttggctttggtcttgcttggctggcccttgcgacctttaagcaccgtcttgaatctnttgatgatgagagccatctcttcatcattaagtccggccgcctcaatctgtgccaccttgcttggtagcgcctccttgcttcgtgttgccttgagagcaaggggttgcggctcgttgaccggaccattcaaggcgtcgtccacgtacctcgcctccttgatcatcattcgcccgctaacaaatttcccaagaacttcttcgggcgacatcttggtgtacctgngatgttcacgaatattgttcaccaaatgaggatcaagaacggtaaatgaccttagcattatgcaaacgacgtcgtggtccgtccatcgcgtgctcccgtagctccttattttgttgataagggtcttg

SEQ ID NO: 73496 - DNA, 406 bp, Zea mays
agcttgtcgagtgtggggtgcgaagttttacactcgccattgaggatggtgaggcccgtgagcatggaggagatccatgccagacatttaataaccaatttaaaatcaataagctaatacctatatttgcatttgtggggaaagaactttatataattcttctggtagagataatacttaagattatccagtgaatcatgaaggttggtgtttaaccatgtataaaataaggaagaatttttttttaatcttaaaaaaatgcagagtgacacataagaaaaagatataatttcagtacataatattgtaatgggtggctctggattctaaaattatacgatttacatataaaatggattcgaatattttaggagttacatatgaaaagaaacgcatcttataattg

SEQ ID NO: 73497 - DNA, 449 bp, Zea mays
  unsure (1)..(449): unsure at all n locations
tccaatctctccaagntccacaatgtagacaagtgatcattattgattagggacttgagagagagagagtgatctgtgtgttatgtgtcgctcttgttgcttggcttttgcaatcgtgctttcttccttcccattcttattctcaagtgacttgtaatcaaagcaagagacactaagtctgtggtggtccttgtggggtctaagtgacccggttgattaaagagaaagctcactcggtctaagtgatcgtttgagagagggaaagggttgaaagagacctgatctttgtgaccacctcaacagggactaggttctttggaatcgaacctcggtaaaacaaatcaccgtgttcatccgctntatttcttagttgatttgttntccctctctttcggactcgaatttaatttaacgctaccccggcttgtagtgtgtgcttaagtttaatt

SEQ ID NO: 73498 - DNA, 402 bp, Zea mays
  unsure (1)..(402): unsure at all n locations
agctnggaaaggtgtgcggcggtgtatttatcaatctatcatacacaagaagtcatagcgtattattgctcttcacggcccgaacgtctctaaattgcccccacattggtaccaggctgtaaacaggttcatcatacattcagcccacacccacgctttatccacaatnatttttatcttttgggtacgttggatactccagtgtatcacaacagacaccactggtcctcagcgaaggttcagaggaagagcccacgatgcagtgacagttcgccagttcgccacggttgtagtttttggtgatctgccgagcttgataccagcggttattcacatgtgccaggaatattttgtggtcagtcctccagtgattgagctacagcttctacctgaacataccct

SEQ ID NO: 73499 - DNA, 382 bp, Zea mays
tcatactcggctgcgttgttagaggccgggaatagcagttggagagcatacttgaggtgctcgcctccaggtgcagtgaagagaattcctgctcctgctccttgcagtttcagcgagccatcaaaatacattcgccatacttctgcggtttctgggttatccggtacttgctgttctgtccactctgatacgaaatcaaccagtgcttgagttttgatggctgtgcgaggtcggaactcgatatcatgggatcccaactcgcaagcccacttggctattcggccaatggcttccttgttgtgaagaatgtcccctattggaaaaccagtaactactatgactttgtggtcgtcaaagtaatggcgtaacttgcgggcagtta

SEQ ID NO: 73500 - DNA, 383 bp, Zea mays
  unsure (1)..(383): unsure at all n locations
ngcttctatagggagaacacgtgatatgtttgactaacgtgcaattcgaaaaagatagaccttgtgcagcttgtcaagcaggtaaacaagtgggaggagcacatcacagcaagaatgtgatgaccacttcaagacctctggagctgctgcatatggacctcttcggacccgtcgcctatctgagcataggaggaagtaagtatggtctagttattgttgatgacttttcccgcttcactcgggtgttctttttgcaggataagtctgaaacccaagggaccctcaagcgcttcctaaggagagctcaaaatgagtttgagctcaaggtgaagaagataagcagcgacaacgggtccgaatataagaatcttcaagtggaggag

SEQ ID NO: 73501 - DNA, 383 bp, Zea mays
  unsure (1)..(383): unsure at all n locations
nggaggcgtctataggttgtcgacttggtgtatactcctccttcttctcctccggtgccttgaatgcaacgggttgggcttcggatgagtcgccaagctcgttgattttcctcgagccttctatcatgcactcaaaacttacaaaatgcccgataacttcctcgggggtcattttagtatatctaggattaccacgaatcaattgaacttgagtgggattaagaaaaatgagagatcttaaaataacatttaccacttcgtgatcgtcccacttcttgctcccgaggttgcgcacttggttcaccaaagtcttgagccggttgtacatgtgttgtggctcctcccctttgtgaagccggaaccgaccgagctccccctcgatc

SEQ ID NO: 73502 - DNA, 468 bp, Zea mays
  unsure (1)..(468): unsure at all n locations
acctatgatactcagcttggttaatttntaggatgtccatggcaatatgattctgatgctatacaccatgttcatacatggaaagaaaaatgtnttgcttccattaactcccgctcaaattgaacaacgtaagaaagaacttgctcagaaaaaatgaatatgttttagattatagcatggcacgaaatgaacaatcatctgacattaaattaaagggatatattttacttgctactaaatctatttttactaaaaattaatactcatgttgaaccattttatgctttaacttggaaacagactatatattctcctacttaggggtggtaatggatcgcgatgcaaatgtttcttcacaatttattaggattctaaattagttntagttcanaaatgaatagaaatagagcttgaccctaatacaatccaatccttttaagtttacggtgtactaaaagtacaacctat

SEQ ID NO: 73503 - DNA, 391 bp, Zea mays
  unsure (1)..(391): unsure at all n locations
agctcgccttcggtgagtgtatcatccttcttccaacggngncgcggagcgcgccaatgggaaaatcttcacagctgtcaagaagatgctcctccatgaaaaaaaggcagatggaccgatttattaccagaggcagtctgggcgctaaacacaaaccgatgcaaggcgactgggttcactcctttccgccttctatacgcatcggaggccatgaccccgcaagaaataaagcatgggtccccgcgtacagttccgtcagccgtccccgacgtggacaagccaacttcataagatctcattgacggagaccgggtctttcccctacaggtcctaaacaaacaccaagcccagaccaagcatggcgcgaccatgctatcatcccgagggagtt

SEQ ID NO: 73504 - DNA, 447 bp, Zea mays
  unsure (1)..(447): unsure at all n locations
tgaactcnacttgtctgcgatgaccaatgatcatcttgcttatatccttgcctaccacagcctgaagggttatatactttcgtttgtcattttgcaatttgtgttacgataaactatttttgtggtatttcttatcgtcttacgtgttcactctttgttntctcgggcttgattctaagcaaagctctgaaagcccagaaagatgtagttgagagagctatcgaataacgcttgggaaccttcgttcggaggtcattacattaagaaacgaagctcttgagaaggacaagatcctactctctntagtggaaagattaaaatttagcaaagtcaggctttctgctcaagctgaagctcatgaagccgaggtgcaagagctaaagaagaatgttgccgaagcaactgagaactntaatgttgaagtggtgaagcacgaaatatgtgaaa

SEQ ID NO: 73505 - DNA, 439 bp, Zea mays
agcttagcctatacaagtgtggaggtgaattagtttcttcttctaacattttctttgtgacgaaggtataaaatactaagaattttcggtttttggctaaaaatgcaggctttgttattgagcaaggctctgaagattcaacaagactcagaagatgagaaaaaccaatccattatttagtaactacaaactaaaactgaaatgcttcgggaaataaatgatggcaaatataactagataaagtccctgagtgaatccttagccaaagctcaaaaagagagcacagacgcacgaatagagagagatcaaagcatgcaacacattgagaaataaaataaagaaattgaaaagctcatgaccgagtctaataaagaatgataagatcgtgaacatgaagtttcctagctccgtctttatattgaaaactaaagaaagatgt

SEQ ID NO: 73506 - DNA, 413 bp, Zea mays
tccactgcaaatctacaagaactcttatgtctcacaagcctactcattgtcttcaaatgggccgcctttgattttcaattggtaactttgagactacatttggcatcatttacatgtcttctccaatatttggttagactatatttcatatcttatacttcccatgttgctatacaagcataagtgggtaaatcatattctgttacctatgcataaggaaatttagtctaatcaaatcatgtattgcacctctattcctcacatgttttttttctaaagtagaagatctctgtcaaggggagtatttcttcgtctctaatgagggagaaaattctttctaaaggagatcactcatttatgggggagttataatgtcaagttcttcaattgggcttaattgataaatcctttat

SEQ ID NO: 73507 - DNA, 369 bp, Zea mays
ctctgtctatagctacttcttctgctgccttctcttcaaatcccgaaggttgtttatcaacaagctctgaatgcccaacttctgcgctggcctggctcatcacagcttcggcttctgtcagttttgttttggcttcaatttgcacttttgaagccttgctaattatccctggagtatagcttgaagcctttaccgtctccagcacatctagtacacttgccatcctttttctcttgggggtcgcacgaagacctttttgtgccttcggcattgccacttctgccgaagggcttaaaacttcaaattgttttattccttcgatacttggctactcagatttatcagacttctgctcaactaacttggctg

SEQ ID NO: 73508 - DNA, 465 bp, Zea mays
  unsure (1)..(465): unsure at all n locations
tcctncagcattctngagcccttcacgcatttgaaggtttcantatttaccactgggagntatgaagctagtttttggctcatcttctttcttcatccaaatttggtgatagccctactagcagtccaatagactcatgagtttcgaagaagcttttgcatctacaagggagtctattcttggtaaaggcaacttgtcctttggacatgccttgttgagatctgtgaaatcaatacacattcttcattttccattagccttcttcaccataacagtgttggctaaccattctagatatgtaacttctctgataacgccaacactgagaagactctttacttcattctgagcaccttcgactttatcctcagacatgttccgaagtctatgcttccttgacctgaaagatggatccacattgagtgaatggtcaatgacatctctattaacaccacaaagatcatt

SEQ ID NO: 73509 - DNA, 441 bp, Zea mays
  unsure (1)..(441): unsure at all n locations
catgcaagcttcggcgttcgatcatcctagctttgtgttgtacctcatatcacatataccttcgtcttagagccaaagcttcctgtaacagtttatgttacactaaaaaacatattagtcatgtttttgaggaccttcagaagaggaaggcccccaatagtagcccctcgcagtattaatttgtttctacattaacaaattcagactgcgacgtgaacgaaggcctttatccaaaggtccgaanaaacaccttcccttctctagaatagcgaaagacactgacatatatggcccaccaagctgtggtgcgctaggcatataaatagggactcacattgatagacgttgatgtgccatttcaactgcttgcgctattattgccattctgaatattcttgctctgccaaatttttgaataatttgtgagctttggcatttgca

SEQ ID NO: 73510 - DNA, 450 bp, Zea mays
  unsure (1)..(450): unsure at all n locations
tncggagcaggagtggcaaccttttcaagcgaaagttgctctgtgtccttttcttctggtgccctttcttcaatttccgaaggttttttctaagcgggctctgaaggcccagcttcggtatcagcttggattactgcagcttcaatttcggtcggctttgtttcagctntggtttgcgcttttgaagcctcgacaattntccttgaaggagtagagctcaaggtcttcactgtttctaacacatctaatacatttgccatccttctcctcttgggagttgctgcagaacttttttatgctttcggcactattacttctgatgtagggcttaagatatcccagcgcttttgtttcttcaatattggctnttcagctttatctttatcaatcttcaactcagctagctcggctgaaggaccttcggcttataaacggtcttcagtctctatg

SEQ ID NO: 73511 - DNA, 389 bp, Zea mays
  unsure (1)..(389): unsure at all n locations
agctngatgttgagaatgacatcatcttctcccaaatctttcatttcgaaaatgctcgatagaagatttttaacttcctcaatcacattgagatttgatccaaagatcaagatgtcatcaacataaaggcacagcataacagactcacccccaccataccgatagtatacacacgtgtcagattcatttacaacaaagccagctgctgtaagagtattatcaaacttttcatgccattgcttaggtgcttgttttaagccatacaatgattttatcaacctgcacaccttgttctcttgaccatacgcaatgaacccttctggctgatccatatagatctcctcatccaactctctatttaggagagtcgtcttaacatccatctgatg

SEQ ID NO: 73512 - DNA, 468 bp, Zea mays
agaccgtcgattactcgaagctcggaaacgaatcacgatctaatcgcaacgcgaagcgaagacgaagaggcgcacgataacaaacatatacatatgcataagaacattacaccatacaagatagaatgttctaaaaacatgcagcctataatagagctcgcttctactgttatgcgagaataagatacgcgtctgtcgaagctacgtttgacaagttataacgtttacgctacgctagtaatagtcaggacatttaattagacagtatcaaatataaattataactgctatctagttctaattaaatctgctacactaacagctgtcaaatacgtaatttaataaaaacgagagattctaagctatgcgaatttatgacgcgcgaaacagcacgacagcgtgccgaacgacgtgcggacacgcatacgacgcacgataccatgcgcgaccagcgcgaacgacgcgcga

SEQ ID NO: 73513 - DNA, 448 bp, Zea mays
  unsure (1)..(448): unsure at all n locations
agcttgagacatgtagagtgagtccttttcttaattctcaaatatcatcattgctaaagtctagatagcttattctcctctgtcctctccccttaaccttgttttctcacttgctatntttacttaataatattttgctgtgagggtttccctcacagcttttctcttcaaaaaaactgaaatgaagcacttataactagttcattgttaactttatcatccatgttttgaaaaactaaaacgaagaaacacttataactagttcatttttaacttttattggaaaattgaaacaaattcatacctggagggcacaattccatagagggcacaaaaatcattgattgcccaaatcactactattatggtttaattatattgtctctacaaaacacactcttgtcttatattgaaaggaaatatgttaccttttatatatataatgtgt

SEQ ID NO: 73514 - DNA, 415 bp, Zea mays
tgagcgggatagcaaggactacaaataggacctctctattgtgttcgcccgacagctggaggcgagccgtaaggagaagagggtggccaacaaggaggagcacttgaaccagagggaggaggtcatcacagagctccaggccaagctgaacgcctttaacaaaatcctggaagagcaacgagtcgagcagaccgtggctgtggagaatctgcaaaggctgcatcgagagcttgatggcaaggcccgcgacgccgcccttgccgaggagaagcttaaagagagatgagattccttggacaagcgggagacagacctcgccaggtgggaggcggacctcgccaggcgggagaaggatctcgccttcaaggaggaaatgctcgaaggcgggagaagtcgctggccgagcatgagctct

SEQ ID NO: 73515 - DNA, 439 bp, Zea mays
  unsure (1)..(439): unsure at all n locations
agcttnctggatgccaccagaacagcatataataccttctccaattctgtatagttnttctttgatatactaagaacttcagatacaaaatacactgggacctgcttcttgacttggccatctagcttctcctgaacaagtgctgcacttaccgctgagtgcgaagctgccacatataataacaaaggagcccctggcgttggtggagttaatgttgntaaatctatcaaatattgcttcagttcctcgaaggccttttgttggtttggtccccattgaaagacttcgactgatttcagcacttcgaagaatggtaaatttctttctgctgatctggatataaatctattaagagatgccagcctccctgtcaatctttgggcccacttttttgtagtggtggctcattcgaagatagctcaatttacttggatagctc

SEQ ID NO: 73516 - DNA, 466 bp, Zea mays
  unsure (1)..(466): unsure at all n locations
tganaagtatctagatacagtccgaaggattgaggctttcttcgaatgtttctctgtcaaaaatattcctcgtggagaaaatgaatacgctgatctattggctaagtcagcagcccaggggctgcctataccttcggaagtatnttttgaaacaataaaagcaccttcggttgagcttcttgaaagagcaatccttaacatatcccctttttatagtgaagattggagaactgagatcatctctttccttcagggtaattttctttcagacgacgaagcttatagcaggagaatagaagcaagagctcgaccatatgtcataatagaaggggagttatacaagcgcggngtctgttccccattgctcaagtgcttatccagatccgaaggtatagaattaatgaaggacatacatgcaggtctgtgtggatcgcacattggatctaggcccttgctgggaaagttt

SEQ ID NO: 73517 - DNA, 405 bp, Zea mays
  unsure (1)..(405): unsure at all n locations
agcttctaaagggagaacacgtgatatgtctaactaatgttcaattcgaaaagaagaccttggcagcttgcaagcacggaaacaggtgggaggctctcatcacaccaaaaatgtgatgacgacatcaagacccttggagatgctgcatatggaccttatnggacccgtcgcctatctgagcataggagggagtaagtatggtttagttattgttgatgactttatccgcttcacttgggtattctttttgcaggataaatctgaaaccaaaggaaccctcaagcgcttcctcaggagagctcataatgagtctgagctcaaagtgaagaagataaggagcgacaaccggtcctaaatcagaaccttcacgtggaggaatatcttgaggaggaagggataagcatg

SEQ ID NO: 73518 - DNA, 455 bp, Zea mays
tgagttattcaggatcacctattcaccccccctctatgttctctcaattggtatcggagccgctctcttcaagaagggactaatcgcccgaagagatggatcctaagggaaaggggatggtggtcgacaacaacgagaaggagtctatcttcaacaagccaaagaatgacaagtctaccgacttgggctcaagccacaagcgcaaagatgggaagaagaagaagacaaggcgcatcaaggagatcgtctacttcgacagcgatgaatcctcttcttcccaaaaggacgacgacaacgactacaggaagacggtcaattcgaacttttcatttgattattctcgcattccacatagttcgaattcgcatttgctttccattcctcttggcaaacctccacacttcgatggggaagactacggattttggagtcacaaaatgcgtagtcacttattc

SEQ ID NO: 73519 - DNA, 414 bp, Zea mays
  unsure (1)..(414): unsure at all n locations
agcttatacaacaagtgggtgcatctgtgactttccacgacgaacatgagccacaagccctgacatgctaccaactgctcgcaacaagtccaaaagaaagtgaagagagcatgttatcattgccaaactttgttgtaccccacaacaaaaggagctttgaatttgtttttgcatattcactctaggagagccaacgacaccaagcaagcaagtagtgaacctgtaagagcttatcctcatctgaaacccaagagatacaaacttttggaatataagtgaattgttgacctctccccattatcttaattttttgggttaaactagtctatgtataaaactcaatatagcatcaagactagaggttttgagtatgagtcttggttaacgcacttaagtanaataattactgctcgc

SEQ ID NO: 73520 - DNA, 425 bp, Zea mays
  unsure (1)..(425): unsure at all n locations
tgtatatgcacaacantaacaagtgctgcataatacatcttgaggttataatcagggaacgattgggcaattggagacaccaacacatatacctctctctcgagcatttcctaaccgagttcccttaagaatatatccttctccacgtggagaagctagcatgtttgaaaccttcgtggaggaagaatatgccttccacgggttctctactctcctctccgatcctctgggccaagcaaaacgaatccacgcgggccgctggccgaaccagtgaattccccgttccgttccgttccgtccgtccggtcgctgtcgacgacccctcctcctcaattacgccgctaacgatgtcgcttagctagcattaataaaaatactccagaccgtcgtcatgatctcgcgcgcgcgccttccgtggggacggg

SEQ ID NO: 73521 - DNA, 378 bp, Zea mays
agcttcctaccggcatgcttcttctttctatctcttgggtttctgggcggggtcgacgaacacaggcagacggtgcttctgatacttcggtttggtgagcagagcactacacaccgatacgaaaaagagtgagccgatcattgctgccattctgcgcaacgaaagggggagggaggggccaatgatggacgacctctctctttcgtctgacagagacgaacttggacggacttcacacgactacacgaggacgaggcataattggtgatgggcacacgacacgacgacagcgactgcgacggcgaccatatgttccaaggccccacgggccctccttcatcaacgtcgtgcatgggacgggacgccgggcgctttttg

SEQ ID NO: 73522 - DNA, 458 bp, Zea mays
  unsure (1)..(458): unsure at all n locations
tcacttgccaaaaacccgccacttgatggcatcacagatgaaaatntcagaagtgcaagcctttgaaattgaaactgcagatgattctggaatcaggccaaaagctgcacatgatttggcttgccgtcaagtaggtggaccacttaatcttagctacacttgtcgtgataggaaaaattatttacaaagcaaacggcagagggagttggcttttgggcaagccggaagcatgctgaaatattttcatgacaaaatttcagagaatccatcattccaatatgctttgcaagtggattgtgaggagcacataaccaacatattttgggttgatgcaaaaatgattctagactatgcacatttcggtgatgttgtcacatttgacactactntttgcacaaataaagaatatangccatttggtgtttttcttgggctcaatcagtntagagaaaccacta

SEQ ID NO: 73523 - DNA, 339 bp, Zea mays
agcttcggcattatgaaccgacttatatatagaatgaccttttagtccataaaggtctgagtcaatgttgtaagttattataaggggcatacttgtaattcctcacaggctgcgtcctgtgcctataaatagtgaacagtattccgttactgttcacgcattctgacgattgcaatcgcatctctcggaatccaacctttgccaaggcatatgtattatggtatttgatgattcaatatagtaaataaatgtaatataattagtatatgaattatatacacatattatacctttttgtattatcttataaatgcctactgaaatatgactacgaaggtc

SEQ ID NO: 73524 - DNA, 460 bp, Zea mays
  unsure (1)..(460): unsure at all n locations
tcagctatggttaanaatttttggcagcaaaacagtgcaattgcaatgaatgctggggtaacttcacacctacccgtctgtttatatagtgctgcaggtaagaaggtgaatcgtcaggatttttacaccaggcagacagttgctcgcacccgctgcacggtgggccgcaaaaaccaaaatagtgaacctgcatggtgggaccgctacgcgctcgaaaactgtatcgtttctcgacaacgagctaagggaaggtgtttttcggaccttcggcttcctgaagcctaagagattntttttcacggatcaagctcgttacgaaaaacgatctagcaccacgaaggggctactgttgggaccatgcttcgtcgccgaaggtcctgcagaaagatacagattcggctgaagctgctcgtacgtgatgccgaaggcatcatccatgaagcttcngtattacagcata

SEQ ID NO: 73525 - DNA, 439 bp, Zea mays
tcgacccggatcttaagcgacgcggctgcagcttcttggaggagtatctgtcaataatatccctcgaggacaaaatgagcatgctaatttgctagcttagtcagcagcacaggggctgcccttacctttggatgtgttcttcgaaacaataaaagcaccttcggtggaacttcttgaaagagcagtcctcaatatatctcctgtttatagcgaagattggagaactgagatcatctcttaccttcagggtaaattcctttcagatgacgaaacttataacaggaggatagaggcaagagctcgtccatatgtcatgatagaaggggagttgtacaagcatggagtttgtgctccgttactcaagtgtttatctacaaccgcacgcatatagttgatgaaagaaatacatgcacgcctgtgtggatctcacattggatct

SEQ ID NO: 73526 - DNA, 363 bp, Zea mays
  unsure (1)..(363): unsure at all n locations
ggacctataaaactaagcttgaaccttggttntgtcacactcgatggtgtaaccacatgtttcttgtattgtcttttgcatcataaaaatataaagcagaaaataatagatatagagggcatcagggcattcttttggctaaaacactgtgtcttcttcagtagatgtgcctggattcgggcatagtgctattgattgtgcgagcctcagactgctcccaaagattgcgttgttgtagaggccgaaggtgcccttctggctgctgatcatggtttgggacaggcgccattggtgggggtggtggtagttgagcccaagaggcctgggaatgacttgttgaagctacagaagtgaaagggaaat

SEQ ID NO: 73527 - DNA, 409 bp, Zea mays
  unsure (1)..(409): unsure at all n locations
gcttatgaagattcttcatcccaacatgggctagtctgcggtgccagagccaacccatgttagtcttagcaattaagcaagtgtcgagttcagctctatcaaaatctaccaagtatagctgaccctctaacactcccttaaatgctactgaatcatcacttcttctaaagacagtgacacctatatcagtgaataaacagttgtagcccattttgcataattgagaaacaaaaagcaaattgtaatctatagaatctacaagaaaaacattggaaatggaatggtcaggtgatatagcaattttacctaaacctttgaccaaacctttgattccatcctcgaatgtgatagttcgntggggatcttcgtttttcttataggaagagaacatcttcttctcccctgtcat

SEQ ID NO: 73528 - DNA, 403 bp, Zea mays
  unsure (1)..(403): unsure at all n locations
tcatgaagaggaaccttcgaccatcttacacaaagagcttcattctaatgttgcttcttcccaaaagaccttcggcgacgaagcacaggcccaacaacattgttgacatggaatacccttacaatgcaattattggtcgtggcaccctcaatgctttcgaagcaattcttcatcctgcctatctntgcatgaagataccttcggatcaaggacccatcgctatacatggaagtcaggaagctgccagaagggccgaaggcaattggactgactcaaaagcaatccataacatagatggagctgaagcttgtgaacagtacaaattcagaagggagaaagcagcttcagcagatcagccgaagcctatgctcttatgtgaggacatatcagagcagaaggtgct

SEQ ID NO: 73529 - DNA, 207 bp, Zea mays
gactaagaaaagagccccaccttccgtacaccagtggaaaacttacacccagacaaacatgtggataaaaacaaatttgaaccccgatgttgatgtgtggtacttgtgagaattgccatgacaaatattctgagtgtgatggaacctggagcagtgataaagaattgcataagacaacacttagaaatgcctgctctagctttcgat

SEQ ID NO: 73530 - DNA, 245 bp, Zea mays
acccattagagacgggccctgaatctaatccgacgaaatctcttaatgacggaattgtactggagcctctcatactggcgatcattacacgctacatggacgggaacaataactgtgcaagaataatgaataattattagacacattgcaacggccgcaactcgtaattgtacgtgggtgattgtcggtccttcaccgatcaatccccacgaacaactgacgcgaaggtaatcaaagacgctaaa

SEQ ID NO: 73531 - DNA, 450 bp, Zea mays
  unsure (1)..(450): unsure at all n locations
agcttcgcacctctgaactaactcggctgcatcacttttcgctgntggccaatagaatctcgacctgaagaccttcccgactagtgtcttggatgctgcgtgtattccacattgcccagcatggatctcatctagaagttgcttccccgtagatgagagaatgcatttcatgaggacgcccgatgcgccccttctgtatagtgtcttcccaatgagtgtgtagtgagctgactgtctagcgatgcgctcggctgcatttttggcatctggttcctcttcattctttatatatctgatgatcggccttctccagtcgtcaaaatctgattatggttggttcacaatattacattcttctgcttgtccattgagatgcttggatgtggtatttcttgtacaaagactccaggtgggacctgagttcgactggatcctagcttggacaatata

SEQ ID NO: 73532 - DNA, 485 bp, Zea mays
  unsure (1)..(485): unsure at all n locations
tagctggtgatgaagctcgaagtcacctcaagccggtaattatctcatacctgatgcttaccttctccttgaaacttgagtttaccttataacactctgttatgtactggacgaagaagctgaagagcaatgatccgaagctttggcggatggtgatgaagtgatgaagctgaagacactgctatgaaaaactctagagaaattcttgaattatccttgtaaaaaatattgtaatttaggaaccagacactattctgtaaatttgtccataccttgtaatatatttttacctttctgtccatgtatgaactgcttcgatgtggacgaaccttgtattttttgagccgaaggcgaanaacaccttcccttcttttcgttcataacgaagcataaatctgcttctttttcctcttgccgaagccttgtcattagagccgaagcaactgtctgtacttctatgatatgatgatgatgatcctacgaat

SEQ ID NO: 73533 - DNA, 470 bp, Zea mays
  unsure (1)..(470): unsure at all n locations
tgacattgtctccctgttggaagccaatgccatccttaattccatggcgtctcccattatagagcatgcttctagcaaatttaaaattttcattttctaagtcatgctcattaatcttagcactaagttgagctatgtgatcattttgttgtttaattaaagctaggtgatcatgaataacatcaacattaatatctctacatctagtgcaaatagtaacatgctcaatggtagatgtagagggtttgcaaacatttagttcatcaatcttagcatgtaaaaaggcattctcattcttaagattggaaatagaaatattgcaaacatttaagtctttagccttagcaattaattgttcattctcaattntaatgctagagagtgatgcattcaacttgtcaatcttagtaattaaactagcattatcatttctaagactaacaatngaatcatcacaagcatctaactta

SEQ ID NO: 73534 - DNA, 458 bp, Zea mays
  unsure (1)..(458): unsure at all n locations
agcttcgaatntaattctgttatttttgcttcagcatccactaataatccttcggctgttttagctcgaggtctttcttctcaatggcagcagattgctcctttattttgttttctaaattttaaattataacttcttgccttttatcctctaagtcttgctgcatttttaatgccttgctcaaaagtatactctgtggacaaatagccttcgntagaaaatattctcgttaccacaaattataagagttagacacaaaatgtttaccttaaaattagaatagaacaaactgccgacaatatgttgtcgacggtagcggctgatatccgcttcaagcttcgggaagccgatactctttgataaagtaccaacaaccttcgcaccagtttggtctcgtatgcagcctaacccttcatcatcaataccactgaagagaagcgccccccgccggacccaca

SEQ ID NO: 73535 - DNA, 449 bp, Zea mays
  unsure (1)..(449): unsure at all n locations
tataacaagaggatagcggcaagagctcgtccatatgttatgatagaaggggagttgtacaaacatggtgtttgtgctccgttgctcaaatgtttatccagaaccgaaggtatatagttaatgaaagaaatacatgcaggcctgtgtggatctcacatcggacctaggccgttacttggaaaaattttccgccaagggttttattggccgaaggcagcctcggatgcagcagaattggtccaaaagtgcgaaggttgtcagaaatgtgcaagagatcaaaaacaaccttcgtccttaacacagctcatacaacccacttggccattgcaaaggtggtgccttgacttgttaggtccgttaccaccggcccaagggaacctgagatatgttgtagtagctgtggaatatttntctaaatggattgaggcgaagcctttatccacaataac

SEQ ID NO: 73536 - DNA, 455 bp, Zea mays
  unsure (1)..(455): unsure at all n locations
gctgtgaagattcttcatcccaacatgtgctagtcggcaatgccagagccagcccatgttagtcttagcaattaagcaagtgtcgagttcagccctattgaaatcaactaggtatagctgaccctctaacactctcttaaatgctactgaatcatcacttcttctaaagacagtgacacctacatcagtaaatagacagttgtagcccattttgcatagttgagaaacagaaagcaatctgtagtctaaagaatccataagaaaaacattggaaatagaatggttaggtgatatagcaattttaccaaaacctttgaccaaaccttgatttccatccccgaatgtgatagctcgttgggtatcttggtttttctcgtaagagaacatctttttctcccctgtcatgtgggttgtgcacccgctatcgatgatccaacttgagcccncggatgcat

SEQ ID NO: 73537 - DNA, 359 bp, Zea mays
  unsure (1)..(359): unsure at all n locations
ctataagaaacaaaggacataattctgtttcagagttttgtgtttctactctcaaaagaaggcttgagcctatgtggctggtgggggatagatgtctcatgggtcctcatggacactgaaacatatcataggtcgcatgacgggcttcctactgagtcgtcctatgggatgggtcaccaggatgtagccaactcaggcgagtgtgatccaagctgatgaagaccgacgttcgagttaagtgtcaacgaagcacgaatgtgtcangtgatgcagttacaagcaaccgaaaggctatgcattcagcgataactcgggcagctatgcgatgaagactctgaatatgcacggatacaatctgc

SEQ ID NO: 73538 - DNA, 463 bp, Zea mays
  unsure (1)..(463): unsure at all n locations
agcttgctacaaggacccgtgtgccaaacagactatgcggnacgtcataccaagagtacaacgacgtacaaccctatagacgacgtcgggaggactacaccatccaagggcaaccggccgagcaccctccagtagaatacaagtccgcattgtaaagtcctaccttagaactataaaagggcaggaccactttctttctagggacacaagcacacttgttgtaacaatctccaagcaatactacgattgacactacactatagtaaggtgcgagtccgaaccagtataaccccttgtctcagatttctcgttgagtcccagtgattcaccattcggagtgagtctgtgctagcaccttctaccgaacacaaatctcattgtcccttggtttccgcgacaactatgttaaaatcactatanggtactaagtgctacttatgatgctggactagggctacatctc

SEQ ID NO: 73539 - DNA, 461 bp, Zea mays
  unsure (1)..(461): unsure at all n locations
tacggacactataaatactaagcttcttagggagaacacattntgagactaaccaatgttcattttgagaaagacagggtctgtagcgcatgtcaagcaggaaagaaagttggaacccaccatccacacaagaatataatgacaacggacaggccactgaagctactccacatggatctattcggcccgatagcttacataagcatcgactggagtaagtattgtctaataattgtggatgattattctcgcttcacttgggtattctttttgcaggaaaaatcacaaacccaagaaactttgaagggattcttgagacgagctcaaaatgaattcggattgagaatcaaaaagataaggagcgacaatgggacgaagtttaagaactctcaaattgaaggctttcttgaggatgagggcatcaagcatgagttctcttcttcctactacacctcaacaaa

SEQ ID NO: 73540 - DNA, 406 bp, Zea mays
  unsure (1)..(406): unsure at all n locations
ctgctccggatctatgccaaacacacatatatataagaattttacaccataattccaatctgatgctatcatgatcgttctaataatataaatacccaaactaaattacatgaatacaactacaataagtaaaacaaatggtttagaagaattctcatagtttttagttctcagggagttgacactccctactaatcatcgttagatcaccagcacaaggatatcgctccctcttgttctccctcttgtgcgctcaaggaccaagtgctatctgcaagttggttctttgtcactccagcactctgtaggaaatggtgacgcctaagaggggtgaattagtacttctaaaaattatctctaaacttggccacanaataatcccaagaacaaaacatatgcaaataac

SEQ ID NO: 73541 - DNA, 501 bp, Zea mays
  unsure (1)..(501): unsure at all n locations
ttacggacactatgaatactaagcttctnagggagaacacgtgataggtctaaccaatgttcatttcgaanaagatagaccttgtgcagctggtcaagcagggaaacaggtgggaggctctcatcacaccaaaaatgtgatgacaacatcaagacccctggagctgctacatatggacctcttcagacccgtcgcctatctgagcataggaggaagtaagtatggtctagttatcgttgatgacttttcccgcttcacttgggtgttctttttgcaggataagtctgaaacccaagggaccctcaagcgcttcatcaggagagctcaaaatgagtttgagctcaaggtgaagaagataaggagcgacaacgggtccgagttcaagaaccttcaagtggaggagttccttgaggaggaagggatcaagcacgagttctccgctccctacacaccacagcataatggtgtggtagagaggaagaacaggacgctaatcgatat

SEQ ID NO: 73542 - DNA, 442 bp, Zea mays
  unsure (1)..(442): unsure at all n locations
tgtggcgccctcgggtgtcttgttgtagccgaagcaccaagtctccaacttggaagcctcggggccgaatccttcgggcgtgatagcgtcgcagagactgctgatactgcgctaagtgcagtaaggctatgtcccgagcctcttccagctggtccaatgaatcctctcggctggtttggttgttttggtcgtcgtatgcctttgccctcggggaaccgtattctaagtctatgggtaggatgcaggggcgtcgtagtttcttggcatgtcgaggtggttgtctctgtcgtgcccttcctgatcgatgtggaagcactcgcgagttgggtcgtaacccttgtcatcaaggttgtggtcgtcgtcagagtcgccggagaggcagcagtcacatgcggacatgaagtctccatggccctggatcangagttcggaaaatccaact

SEQ ID NO: 73543 - DNA, 407 bp, Zea mays
  unsure (1)..(407): unsure at all n locations
agcttctagagggagagcacattttatgattaacaaatgttcattttgagaaagacaggattngtagcgcatgccaagcagggaagcaagttggtacccatcatccacacaagaacatcatgacgaccgacaggccacttgagctactccacatggatctattcggcacgattgcttacataagcatcggcgggagtaagtactgtcttgtaatagtggatgattattatcgcttcacttgggtattcttttagcaagaaaaatctcaaacccaagcgaccttaaagggattcttgagacgggctcaaaatgagttcggcttaaggatcaagaaaataagaagcgacatcgggacggaagtcaagaactctcanattgaatgcttacttgaggaggatggcatcaag

SEQ ID NO: 73544 - DNA, 328 bp, Zea mays
ggtggcgccctcgggcgtcttgccgcaggcgaagtacctagtctcccacctagaagcctcggggccgaacccctcaggcgtggtagcgttgcggagactgctgataccgtgccgagtgtagtatggccacgtcccgagcctcttcgagctggtccagtgagtcttctcggctggtctggtttcttcggtcgtcgtacgcctttgtcctcggggaaccgtattctaagtctgtgggcaagatagcctcggccctagagactagaaagaacggcgagaaacctgtggctcggcgtggcgtcgtcctcagactccagaccaccgagggtag

SEQ ID NO: 73545 - DNA, 430 bp, Zea mays
  unsure (1)..(430): unsure at all n locations
agcttcgaattaattctgttatntttgcttcagcatccactaataagccttcggctgtntgtagctcgaggtctttcttctcaatggcagcagattgctcctttattttgttntctaaatattcaattataacttcttgccttttatcctctaaatcttgttgcatttttaacgccttgctcaacagcatgctctgtgcacaaatagccttcgttagaaaatattttcgtaccacaagtaataagagttagacacaaaatgtttaccttgaaattagaatagaataaactaccgacaataagctgtcgacgatagcggctgatatccgcttcaagcttcaggaagccgatactcttcgatagagaccggcaaccttcgcaccggtttggtctcgtatacagcctaacccttcatcatcaataccaccaaa

SEQ ID NO: 73546 - DNA, 369 bp, Zea mays
  unsure (1)..(369): unsure at all n locations
tgtggaggaccagatcatcgaagcttatatgtttctggatgagaagtggtcacccaagttcccgtgatgaagcactagaagactaatcaaggaaggaatccatgtgggagtttgcaagagaaaggtttgcgtgttggcatcaatgcttcctcaataagctagctgccaagcgaaacctagaagactgaagatgatctttgagtagccagaatcagcgtttgtaatcagcaaccggatgctcctgaaaggccagattntgttgaagctccatctcctcgaagagtctgcaaagtgaagatatgtagctgaagtaaagctatacccataacccttctaagccaaatctcgaggacaagattccttttaagt

SEQ ID NO: 73547 - DNA, 454 bp, Zea mays
  unsure (1)..(454): unsure at all n locations
agcttaatgatgaactggctagtcttaatgctcaacttaagactaacaagaatgattntgataagctaaaatttgcaagggatgcctacacaattggtagacacccctcaattaaggatggacttggcttcaagagagaagctaagaacttaacaagccataaggctcccattcccgccaaggagaaagggaaggcccctatggctactagtgctaaaaggaaccatgcatttttgtatcatgatagaagacaaactagaaatgtaagtcatgatgcttatgattcatatgtttatgattctcatgccatgtctgctcctagttcctcttatgtgtatgatagaaatgttactaggagaaatgttgttcctaaaagaaatgctattcatcatgtgcctagaaggaatgttattcatgctcctatgaaaatagcanatgaaccttctacaattta

SEQ ID NO: 73548 - DNA, 478 bp, Zea mays
  unsure (1)..(478): unsure at all n locations
gttattggctcttattgtctctattggtcaaaagtggcttcttgtggggagaagtgttgattatgggaaataaggggagttngtgaaattcttgatcaatctcttttggaatgactctctttatgcctcaacatgtgggtttgacataaaaatagagatttgagtttgatttggaaaaacaaaccaagtggtggcaaaggatgatccatatatgccaaaattgaatcaaaaccaatttgagtttttatttgaagtgattttgcacttgttctagttgctttatgttgtgttggcataaatcaccaaaaagggggagattgaaagggaaatgtgcccttgggccatttctaagtattntggtgattgagtgcaaacacaagtgcttaaatgtgaaaatatgcccatggatgaacaaagtgcaaatcacaagtaaaggtatgtttctaagccttagtacattggttttgtgtactaatat

SEQ ID NO: 73549 - DNA, 439 bp, Zea mays
tctaaagggagaacacgtgataggtctaaccaatgttactttctaaaaagatagaccttgtgcagcttgtcaagcaggtaaacaggtgggaggagcgcatcacagcaagaatgtgatgaccacatcaagacccctggagctgctacatatggacctcttcggacccgtcgcctatctaagcataggaggaagtaagtatggtctagttattgttgatgacttttcccgcttcacttgggtgttctttttgcaggataagtttgaaacccaagggaccctcgagcgcttcctaaggagagctcaaaatgagtttgagctcaaggtgaagaagataaggagcgacaacgggtccgagttcaagaaccttcaagtggaggagtttcttgaggaggaagggatcaagcacgagttcttcgcttcctacacaccacaacaaaat

SEQ ID NO: 73550 - DNA, 483 bp, Zea mays
  unsure (1)..(483): unsure at all n locations
gagtcacctgaggcatgcagcttgtcccacgtagcttcagagctggtactatacttctcccagactgcgcttatcatatcgcgaacagcttcattctgaggccgaaggtccctgtgaatgtattatacttggaaagcatgttagtcgtgtttttgaggaccttcaaaagacgaaggcccccaacaagtattaataatgtctgatcatgatcatctgatgagaatgttgatattctaatgattcaatatgattattcatgttctctctatgttccatgtgttcctactctctattattattacatattgagatgatgaaggtatgtccttcatgacctttgtctgaagatcattatatcctataggggataatgcttcgaaggacgaacgtctataaccattaacatttcgtgtcgccttgttcttaattcatagcatntaagaacaagtgaccaacattggcgcccaccttcggtgaactcac

SEQ ID NO: 73551 - DNA, 470 bp, Zea mays
  unsure (1)..(470): unsure at all n locations
agcttaggtgctaaanaataatctatgtgatgtgcttctaatcaatcaaagtgtatgcatatgatgaggagacctatgggggaggttaaggagagataaataggggggagattagggttccaaacctcgggttggaattttgggatgttacaaacctaccccacttaaaggaatctcgccctcgagaatcagacggtgtttgagaaaaaggtaggggtattccctcctcaaagagtcctcactttcccaggtagcttcctcttctccttctctgctccactgaactttacagagtntcacttctgagttgcgggtctttcggactgctgagtcaagaatctttattggcttttctcagtactggagatctttctgaaatctggatggctctgcctcgatgtggntctctggtacttgcaggcacttgcggagctgggacacatgaaacacattgtggatatctgacatgg

SEQ ID NO: 73552 - DNA, 407 bp, Zea mays
aggacctatgaaactaagctttctgagaaagggacttccttcttcacactatggatggtttattgacagacgcccaaaccgaagttgctagattacatgatgaaatcctacgtatatcagaaagactcgaacgataatggaagaattttgttgcgaggctcgaagccgaagtcgagaaacgctcacatcgacgaaaatgcttataagaacttcacaatattcgcttgaacttctgcaaccgctgcgtgcaacgtgtaacacaggttcttaacgtatatggagccatctctgaaaaatttgaaccttcagttgaagacttgcccagcaccttcaagcatattgaaagcgaagctgatgtgcttgacaaaccaataactgggcatggcgacttatgtgccctgctggct

SEQ ID NO: 73553 - DNA, 441 bp, Zea mays
agcttagccaaaataactcagatgtggccccaaatctttccttgatctatgaacccttagagaaagtcagatttctgaatttctgaatttcagacctcttcccaaagatcatctgcgttctctgctttttgaaactcaaagccaggagatccaaatatcaaagtcgtgccaaattcccttgaacacatcctggagtagtttgaactcaaaccaaattcatttggcatggttttggcgcagcttgacctcgggaccaggcattctgacactagcaccttggtgacgctacaactccctgtccctagcctaaaaccgcgcgacgtccatacacaaaagacaaagcttggtcaggtgaacaaatccttcacaacgatcttgccccaattcacgacggacaatcactcgggcccgtgccagagatcttaacttcgtcatgctact

SEQ ID NO: 73554 - DNA, 469 bp, Zea mays
  unsure (1)..(469): unsure at all n locations
ctaagcttggatttaccaattgaaagagcacaatctctacttatgatatttccatgaaatatcttaaaagagattgtattagtaacacaagcaatagtttcctatttagcaacctctagtatatgaatgacaagaaggttactaaaataaggaaacctcatgatatgaactaaattacccttacgagcatcatgcataacatcaattgtaaaaaagatgaaagtagcatgattatttaattaagtttacatggcaagtttaattcatagcatggtgagtgattaatggagaagactcaaaaccaatttaaacaagaatgaatacatcacatagtattggttcgatcttctttgaatgttgaatggcacactccattngggaaacacattctcatgtngtgagaatacataaacacttagatagaaacattagtctcacaactctagtcatatagataattccccatttg

SEQ ID NO: 73555 - DNA, 454 bp, Zea mays
  unsure (1)..(454): unsure at all n locations
agcttcttcagaagatggatgaatgcatcctggctgattatgatttccgccaaagaagagaagaagcatacaggttttctgagatgaccaggggctttggatgaagaattcaccctaggcatgtcagatcgattcataatctcaacccaagtgatgacaaaggaggtcagtctcaaaggcatcaacgtagctctcaatctttagggccaccagccccaaggggtagaggcggcagaaacttcggaggaagatacagaaatcagcctagaagactatattgcttattctgcggtgaagacaagggtcacaccacaagaacatgccaagtcacaattcanaagcaaaaggagattgctgaagctgaagcacgacagaatcagccgaagcaggtcctacacactgctttatgctattnctcctatgtcccagagtatgtaggtaatcaacagcctac

SEQ ID NO: 73556 - DNA, 449 bp, Zea mays
  unsure (1)..(449): unsure at all n locations
tgggtacactacgacttcatcttcttcagggtgtggacaagtcttctccccttcgtcggccctcacaacggacaaataccgganataccttcctctcatgttgacaagatgattctctttgatagttgatttaccataaactgaatggcttggtcgccaggggcgatcttcggagtcttcaccaccgctgtccacatcataactgtcgctgtcaccagtatcctcagacaaaccttctagaatctccttggtgattttttctgtgttggtcttcgacatcgctataagaaaccccaagtttttctcttcgtcaagactcagcttcatctcagcagcagccttcttatctgcagacatcttcggaaacactaaaaaactgttttcaaagccgaagcttcaaaactaatagctcagcaaatcttagtgcacanaagctaaaaattgagtga

SEQ ID NO: 73557 - DNA, 414 bp, Zea mays
cagctcgtctcttagactagaagttcgcagtatcgccaaaatgagagagtaccccagagaggcagcagctgatgaaaaatatagctcttctgtccaaatggtgtcactgcaatagataccggatcttggtcaatgggttaacaacagacaattcttatgaaaagatgtacccattgtgatagagcctaccaactgtgatatatggcactccagaaccatgaattcatggcaaggagcccatagatgtgccacaggccagtgtattcgtagtatgtcttgtgagtttctggccgtagaggaagcttataatatagcaagaggaagaacgaaagccacccattatattgcacaacgagagtaagagcggagagagctgcagattaaggctcctgataatgaaagcgcataggcatt

SEQ ID NO: 73558 - DNA, 426 bp, Zea mays
tgacaatgaggaaatggcgctcgtcatcaagagcttccgtcatatcctcaagcaaaggagagggaaagactacaagtcccgctccaagaaagtttgctacaagtgtggtaagcccggtcattttattgctaaatgtcccatatctagtgacagtgaccgaggcgacgacaagaaggggagaagaaaggagaagaagaggtactacaagaagaagggcggtgatgcccatgtttgtcgggaatgggattccgacgaaagctcaagcgactcctccgacgacgaggacgctgccaacatcgccgtcaccaagggactcctcttccccaacgtcggccacaagtgcctcatggcaaaggacggcaaacggaaaaaggtaaatctaactcctcactaaatatgaatctctagtgatgaaatgctagtgat

SEQ ID NO: 73559 - DNA, 463 bp, Zea mays
  unsure (1)..(463): unsure at all n locations
agcttctaaccatggatcaatgtggagttgatatcttccttttgcccttagaatatcaatcacagtttttgagctcaaatttggcttgcggagtaactaagctggtggtttntatgcatatgtgctaatgaatatataatatatactgtttctaaagtgatacaatatgacgaattaagatcacactnttttatgcattatgtcatatgtgaattactaaacctttaatttttcttgaatctcaaatttatcaacacttggcttaccgcagctggcgacacgggtaagtgctgctgctgagttcaattcttttgttctttctatttcactggtttactgggagaattntcttaccctggtaaacagcactcatgtcgtgccttgtgtactacgcaattcacagatccagagaagggtgcgcaagaaagacacgactcaatttaataaattcaagatatgctcc

SEQ ID NO: 73560 - DNA, 414 bp, Zea mays
agcttattgataggaccatatattgagtatttgttttgaaagggatatacggtcaaaccttttcctaaattattgtggtggttgaattgcccaacacagacatttggactaactagtttgctctagaatataagttctacaggtgccaaagtttcaacacaaaccaataaaaagatccgagttatggttcaaaagagaggagcaaaagaaaccgaagaggaccctggtctggcgcaccggacagtgtccggtgcaccagggtgaatcgacctccaactcttcaccttcgggtttctccaggcgcactccgctataattcaccggactgtccggtgcgccactagcctgtccagtgcaccaagcggagcaacggctatcagtgcaagggtcgaccgcacagtgccctaacaaagc

SEQ ID NO: 73561 - DNA, 483 bp, Zea mays
tactcctccctgggaggggccattcatcatcgccaagattttgaagcccggaacatacaagctggacaacaatcaaggcgaggtctacaacaacgcttggaacatctgacagctacgtcgcttttacccttaatatgttttcaagtcgttcatttacctcgttttctatacatacacaaataaagtctaaccgtcaaggaagggtcagccttgcctcggcaaagcccgaccctccctcgggggctagaaggggggaaccccctctgcgtaaaaattttcctcggaaaaagtctttctgccagaacatctttcgcgcttttcgactgcttcgatagcgggatcctgaaaacgacggagtacaagtaagcggcaaggccgaccgagccgagggactcctacgcctccaggatacggatacctcactcatcaccttctgtgataagtaactcacgctcggataagcgattcttgtgaccgaacaag

SEQ ID NO: 73562 - DNA, 420 bp, Zea mays
  unsure (1)..(420): unsure at all n locations
agctttctagattgtgaaaaagtgcattcatatgaattatgaaactcacgttatgtttgttctactggggctgttcctgtttgcctgacaaaaatgagcgggtctgttcactggtaggtttcatcaagtaattggccgaattggctcttccaactatggagatttctgtagagggataaacgttcttactgctagtataatttcatgatttttggttgagtggtatgtgagatatcgtaatttgaagttaactacgctgctgtctaaaacagattcagtcagttatcttgtcagatgttttttagaacttatagatagcagaatttaattatccattaaataccgaaantgtagggtattttgtgtatatacctctagattatttgtttgatatcaccactgtcattattttaaagatac

SEQ ID NO: 73563 - DNA, 434 bp, Zea mays
  unsure (1)..(434): unsure at all n locations
ntccatgttgtgcttgaacattctaatccgagcccgcatgtgaccgtcacaagttggtgttcttctacagtccgaatccagcatgttcaaatccttttccctttcggtcttctccctggttcctaagcaaaacaagagtgcatgggtctctatggtataaatatgatggacatgtactcaagagtgtaatcacctgatggttgagttgacgagcacgagcgcgagtaatgggaccagaaattggtacttgtattggcatagatgtatcagtagtgtggatgtcttcatcattctccccttcttgcatttaagtcgtcctcaactcaagctcaacttcctctcccaagtagggccttaaatctgcaatattaaatgtggggctaaccccanagtctataggcagatctagcctatatgcatttgcccgtaatttc

SEQ ID NO: 73564 - DNA, 445 bp, Zea mays
  unsure (1)..(445): unsure at all n locations
tgcagcttaaggataggagactacttatcngtttnaaagatcggaaccatatacaaatccatgtggaggccattcttaatcaagtgaaggtaaactatcacattntntcagttgccatgtagtaatagtacactatcacaattcttttccaattgttatgcagaagagatttctttaccctgcccgcatggaaacatgggtgctgcgaacaattggagagagatggaggcaacacaagtccaatttgaaatccatctattttgacccacataagagtcacgatgctaataatagtaatgctcctgatggtgtattagctgatcagtgggttgcgcttgtcaataattggatgacccctatagcacaggtacattactatagncatgattatcatttcgttatttatctgatgaaccatctaatttactcttgctcctatataccc

SEQ ID NO: 73565 - DNA, 416 bp, Zea mays
  unsure (1)..(416): unsure at all n locations
taggctctcagctctcaagcttccacagcaatccaacacactgtggagtagggtattacgcttcggcggcccaaaccactctaaatcctcgtgtgtccttgtgctcggtgatcgcttangaggacaggcaaaacgcttaagcccccctcctcatcttaggatttagggtgggtgcactccaccacccgggcggagaattccctctctgacatttggcgcgccaggtagggggctaggcattaggtttttgcttgtttcctcactcagcatgatggtgcaaatcgttgagcaccatgccgagacttcaacagatttcctggtggaggaagaagttgtttcttccacaccacaggtttccaatcgcccagtgccgggcactgctgctgtgcacgctgcacggcagcatataactatgc

SEQ ID NO: 73566 - DNA, 453 bp, Zea mays
  unsure (1)..(453): unsure at all n locations
agcttaccttgattacaacagaccatcttattcacccncccctctaggtgctctcaagtacttaacatgtgaagtaaaagtttggcataaagatccactactagtaagctnttctgcaaaaatgagtctttgaaatttgataagctttaccttgattcccaacaaaccagcatacccttgagagtctnttcgttagtcgggtaagtcttgctgagtaattgtgtactcaggaatttattccatgttgtttttcacgttataattctgttctattgtggatggtgctaagtgccgatgggctcgaccttcttatataagtacatcccactatagcttctttattgaggattatcacttaagctagcatgtattntaagacttataaatggtgtatacatttcaatgtgtaantcgtttgaatcactntctttaggaatcactccgatgattgat

SEQ ID NO: 73567 - DNA, 429 bp, Zea mays
  unsure (1)..(429): unsure at all n locations
ctgtacaggtaaatgacactatagcagtgttcttcatacttcttatgcncaacaataagttggtgaatgactcggccatgttactacactggaactcatatctccatccacctaagtcgtgagctctcgtgcacttctccaaatccggcatcaatccattcaaccaatctctaccttcggcatatgttgcgactttgagcttttctaactcttctctaaagaacttgtcttcgagctgtcgacatgtctcctggaaaagctcaaagttatncttgacaccatccttacgcagaagattctcaacaaggtgtcgagtacaccatctgtgatgcaaaggaggcgacccatcgatctgctcacggaccgcgttgagtagttcttggtgccgatctgaattacaccaacttgccgtcctgtgccaaccacatg

SEQ ID NO: 73568 - DNA, 430 bp, Zea mays
  unsure (1)..(430): unsure at all n locations
agcttccncaacacgctgaggatatgtatatctcggatgtcagggcacaagaagattgccccagcagcgaacatttgtagctccaagtgctatattcattatgtccctgggcccacatgtcggggctcaataccttagtgcatgccccccttcaactataaaaggggaggcatgcggcgttacaagacagatccaatcttaggctcactcagacgctcacaagttcatacaagctctcaagcaatacatcacatagtggagtagggtgttacgctccggcggcccgaaccactctaaatccttgtgtgttcttatgtttcttcccattttccaactaacaagcaaaacacttaggcccctcctcatcttatgaattagggcgggtgcactctgccacccggccgaagatttcctctccgacatttggcgt

SEQ ID NO: 73569 - DNA, 504 bp, Zea mays
ctattacggacctataaaactcagcttctaaagggagaacacgtgataggtcttactcttgttctattcgaaaaagatagaccttgtgcagcttgtcaagcagggaaacaggtgggaggagcgcatcacagcaagaatgtgatgaccacttcaagacccctggagctgctgcatatggacctcttcggacccgtcgcctatctaagcataggggggagtaagtatggtttagttattggtgatgacttttcccgcttcacttgggtgttctttttgcaggataagtctgaaacccaaggaaccctcaagcgcttcctcatgagagctcaaaatgagtttgagctcacagtgaagaagataaggagcgacaacgggtccgaattcaagaaccttcaagtggaggagttccttgaagaagaagggatcaagcacgagttctccgctccctacacaccacagcaaaatggtgtggtagagaggaagaacaggacgctcattgacatg

SEQ ID NO: 73570 - DNA, 464 bp, Zea mays
  unsure (1)..(464): unsure at all n locations
agctnggtccggtgaacaaatccttgcagtgatcttgcccaaattcgcgaagatttgctcccaatcggcgcttgaacaggggcagaggcaacgggaacacgtgttcgaccgcggctgacacccctggttcacgcccgttcgcgcaccgcgccttcccagtgcacgtccgcgcgcactcgccggtccacgaccgtccgtgcaccgcgccgtgcctataaagcctccccaggcgcgccccacttcgccccgcactcaccctcaccggccagccaccgttccttagctccggcgagcttatttccgcccgccattgccgccagagcttctgccgccgtggcagctcactccagccaccctccagcccagccagtgcttcggctagctccgccagtagcccgtgaagcttgccaagccctcggacccgaccggacttcaccggaggcccgagatcaccctcaccggac

SEQ ID NO: 73571 - DNA, 491 bp, Zea mays
  unsure (1)..(491): unsure at all n locations
tctanagggagagcacattntaggattaacaaatgttcattttgttaaagacaggatttgtagcgcatgccaagcagggaagcaagttgctgctcatcatccacacaagaacatcatgacgaatgacaggccactggagctcctacacatggatctattcggcccgattgcttacataagcatcggcggaagtatgtactgtctagttattgtggatgattattctcgcttcacttgggtgttctttttgcaggaaaaaactcatacccaagagatattaaagggattcttgagacgggctcaaaatgagttcggcttaaggatcaagaaaattagaagcgacaatagaacagagttcaagaactctcaaatngaaggcttccttgaggaggagggaatcaagcatgagttctcttctccctacacccccacaacaaaatggtgtagtggagaggaagaatagaactctatttgacatggcaagaaccatg

SEQ ID NO: 73572 - DNA, 421 bp, Zea mays
gcttctccaccatgtcgctgctagccaagttgttgcttctacctacatcaatgatcaaacgacatgaacgctccttaatgacacactattgatgagacaacgtatgtcgctgattctgctctgccttcttcatttgtgcactaagcacacgctgtacaatgaggctctcataatgctctgcatcatctgcaccaatctgttcttcgggcggttccttagtgcctacatcatcagccgcaagcaaagcaagtgtagcttatccaaatcactagcatatgaatacccaccatcgtcttttaccaccaacacacgctgattaggacaataacgctgcacgtgtccatagcccttgcatcgataacacagaacatctacttgtctacctgtggaagctactgaagaggcactacctcgcgggttc

SEQ ID NO: 73573 - DNA, 440 bp, Zea mays
  unsure (1)..(440): unsure at all n locations
acctatgaaactcagctctaagggaacacggaangttgactaacggcttctttaaagatagaccttgtgcagcttgtcaagcaggtaaacaagtgggaggagcgcatcacagcaagaatgtgatgaccacttcaagacccctggagctgctgcatatggacctcttcggacccgtcgcctatctgagcatangagggagtaagtatggtttagttattgttgatgatttttcccgcttcacttgggtgttctttttgcaggataagtctgaaacccaagggaccctcaagcgcttcctcaggagagctcaaaatgagtttgagctcaaggtgaagaagataaggagcgacaacgggtccgaattcaagaacctttcagtggatgaatttcttgaggangaagggatcaagcacgagttcttcgcttcctacacaccacag

SEQ ID NO: 73574 - DNA, 375 bp, Zea mays
  unsure (1)..(375): unsure at all n locations
tgccacaaccagcccatgctagtcttagcaattaagcatgcatctagaccggcctcctcttttgcaaaatcaactcagtaaagtttgacgtctaatacacccttaaaagctagtgaaccatcacttcttctaaagacagacacatctacatttgtgaatagacaattatatcccatattgcataattgactaacagataacaaattatatccaagagactcaactaanaacacattagatatagagtgctcggatgaaatagcaattttacctaacccttttaccttgccttgattcccatcaccgaatattattgaatcttgggaatccttggttttgacgtaggaggtgaacatcttcttcntccccgcatat

SEQ ID NO: 73575 - DNA, 393 bp, Zea mays
  unsure (1)..(393): unsure at all n locations
ccttaaaactcagcttcggagcggtgcggagtttctaggcaaactctgttctatagcctcttcctctgctgccttctcttcaaatcccgaaggttgtgtatcagcaggctctgaaggcccaacttcagcgttggcctggctcattgcagcttcggcttcggtcagttttgttctggcttcaatttgcactttcgaagccttggcaattttccctggagtagagcttgaagcctttaccgtctccagcacatctagtacacttgccatcctttttctcttggggtcgccgcaagacctttttgttccttcggcattgtcactgctgccaaagggcttaaaacttctaatggttttattccttcgattcttggatcctcagttntatcagtcttc

SEQ ID NO: 73576 - DNA, 442 bp, Zea mays
tcctacttattgactgcacaactccagtgtttgagggtccacgtatgtacctgcaagtgggaattatatcttcttccgcatctctagaccataatgaccattcaagctgtactgcagtgataggatggactgcgtgagctcttcggattgttgatgcagatgcttcggataacccaatgtacttaacctttccttcttccactagcttcttgagttcaccaatctagcaacaggaaaaaaagaagaccaactcaactatctaaaaggaaatggttcatggtgttagagtggacacactaaccaattcaatccaaaagtttaatgtcaagggcgccgaatccctaactggtcggaccccggctacgtagttcgtagccccagtcccgtgtcttcttcggtgaggttatacccctctactgcagacttaattagagagggagag

SEQ ID NO: 73577 - DNA, 387 bp, Zea mays
  unsure (1)..(387): unsure at all n locations
agctngaagccatggtaagtagcataggccaataatatgctaattgactcaagcctagctacgggtgcataggtttcaccaaaatccaaaccttcgacttgtgaataccccttggccacgagtcgggctttgttccttgtcaccacaccatgctcgtcttgcttgttgcggaagacccacttggttcctacaacattttgattaggacgtggaactaaatgccatacctcattccttgtgaaattgttgagctcctcttgcatcgccatcacccaatccgcatcttggagtgcttcctctaccctgtgcggctcaatagaggagaccaaagagtaatgctcacaaaaatgtgcaacccgagatcgagtagttacccccttatgaatg

SEQ ID NO: 73578 - DNA, 479 bp, Zea mays
  unsure (1)..(479): unsure at all n locations
tccccgtctccgttcctcactgggcccctccccattcactgctccaactctacgtggaagtccacctaaggctttcttcggttaaaatgaaataaatcccaccatagatttaatccaggtctgcactgagtaaatccatgtcacacccaatcacatagtgagattaaatccactatttaatccatgtatctctcaaagtagttattcttttaatccattaattctaatacaaacttgtgcaatatctttatagatttgttccatacctaatgagctatgcatagaattcatacattctatagtttaaaaaatttccaaatccatgggttataatccatgatgggtttaaccgaataaaaaaattgaataggcttagattattntgggacatggattgtgacatggatttaattctaaaccatgctaatccagagttgngatggtgtacacgaacaaggcctataagtatgacgntgagt

SEQ ID NO: 73579 - DNA, 454 bp, Zea mays
agcttctacgatgcgactcttcgttaatgttcaatcgaagcgaccaagccgcaggcacacgacacgcccacacctataagatggaagacggaaggtcggatgttgtcgctcgatactcaccattcaccataaactaagttggatagacagacgtaactctaccactctagatggatatgggtactcatcgggtacggaatatccgacgagtccaagtatgaatgtggaattgtactcgcccacgggtacgagtattgaagcgagaagtttttagtctaaaagggtcaaatctgggtagcaaactcggtgggtcttcaccaattaccatctctagtgacgtctttgccccccaaaggatccttctcggacatgaggttcaacgattactttgctagtttgttaaataacacaaaactagcccgtcttggtcacgtaagcgtgattggtttttttt

SEQ ID NO: 73580 - DNA, 409 bp, Zea mays
  unsure (1)..(409): unsure at all n locations
tggtgccgatggagaagcanaaatccttganatcttggttgtctaactgcttgccgntgtcaactgttagctcggacggtactccgaagcggcaaacaatattctgccagaagaatttttgggcagtctttgatgtgattgtggaaacagccctcgcttcaatccatttggtgaagtattcgacggctacgaaggcgaacttaaggttcccctgagcggtgggcaggggcccgacaatgtccaggccccagcgctggagaggccatgtatgggcgatcagctttgtatattgcgaggggttgcttgaacgaggagagaacttctggcaggcttcgcaggaccttgtgactcgatttgcggtgcagatcattgcaggccagtaaaacccttgtcggatcaccttggcagc

SEQ ID NO: 73581 - DNA, 416 bp, Zea mays
  unsure (1)..(416): unsure at all n locations
agcttacccatgatgaggcatatggccattttataggtcctcngtcancacgcctacatcagcttggttcttaaatgactcagacggagacactacaccgagactcccttctcgtgtaagtcacccacccgatctcgtctctatcatttaaaacccaaagtttggtacctgacagaggtacacttttcagatggtgaacccatcacagccctgatgaatacaccatcataattgttttctttgtaaaaattcccatccagaatgaagcatcgccttttgttttaaaacaaaacattttgttttctaaagcaaggctaagcatcataaaaatccttttcataaaagaaatgcatccattgtctagcacacaacttctatcacctaatgcatcatataaggtgataaaggtttaaaac

SEQ ID NO: 73582 - DNA, 357 bp, Zea mays
ggtgcgtctcaaggacctggacttcacctcatggaggacctcattgacgtagtagaccgacttctatatggtccagacccctacggttgaccccgggcccttaaggtccatggtggtcggaccaccaccttctcctaggggaacctcctgactcccctgggaatgttgctccgtcctttcgatgaccagcaccgtgctcaccgcctctgtagctgctgcaatgtacaagtacagcaactcccctggctccagagctaccagtattggtagagacacaaggtgctgcttcaactctaggaaggcttgctctgcctccttggtccaagagaatgggccggacttccataagagtttgaa

SEQ ID NO: 73583 - DNA, 425 bp, Zea mays
agcttcggtgatggataagaattttggctgtataacagtgcaaatagcagtaaatgctgtggtaacttcacacctactcgtctgtttatatagtgctgcaggtaagaaggcgaagcggcagggtttttacaccaggcgggcagtaacttgtactcgctgcgcagtggaccgcaaagaccaaacagtgactctgcaaggtgggaccgacacgatctcgggaaatgaatcgtttctcggcaacgagctcagggaaggtgttttttggaccttcggcttcccgaagcttgagaggattttttcacggttcaagctcgttacgaaaaacgatctagcgccgcgaaaggggctactggtgggcccatgcttcgttgcgccgaaggtcttgcgtgaagaggcagcttctgctgaaatcgtccccaggaaat

SEQ ID NO: 73584 - DNA, 381 bp, Zea mays
  unsure (1)..(381): unsure at all n locations
ntattccagtgcacccaggaccacgaagaatacctttatgtttatgtacgaaggttcctgcgtttgagggcacaggcaccaacagtgcccaatgaaattgtcattgaggccatgattaaggggcttcggccgggaccttcagctcaatactttgccaggaagcctcctcaaactttggagaagctgctccagaagatggacgagtatattcgagctgacaatgactttcgccaaagaagggaggaagcattcaggttctctgaaatgaccaggggcttcggaggaagattccatccgaggcacgtcaggtcaattcacaactctactcaaagtgatgatagagggagtcaacagcaaaggccacagtactccttgcaatct

SEQ ID NO: 73585 - DNA, 460 bp, Zea mays
  unsure (1)..(460): unsure at all n locations
agctttactccataccatatattgaattattntaatcaaaatttataattgttttttattcgaaatggctagggaatgttaaaataaaatcatattgtatcttaagcatgatccttcatttgacttgatggtgtgaccttggaaatggttctattaagtactaagttcaaccctcaattgctaaataatattaggtggtcgacttttttgttccaacaaccaagtccaatttttttaaagatgtttctaatttttacaatttgattattattttagctattgttgtataacaaatttcccatgaatatattagatttaagtctttgctaatatatttatgaaaattatatgaatatattatatttaagtctttactaatatatttatgaaaaatatatgtaggaaatttaactttaatttcattttatctaaacaagaaattaatatttaaacttggtca

SEQ ID NO: 73586 - DNA, 494 bp, Zea mays
  unsure (1)..(494): unsure at all n locations
tataaaactcaagcttataacttcccacgtgagcatcgtatagctcgtgtcttatttatacccttatnttcatctccaccaacaataccaacattgtcatcaccagacccatcgccaccaggaacaaactctgggtcttgttcatcatcactttcggcatcttgtatacgagggactttcaaccttaatctcttcctcctttccttcaattcatttttatctaattgctttctcttgttttctacacgaggagagcgacggacagtatgagtgccttgctggcctgtgacattccgatcttgatccattataaaaaacactgaaaaaatgggaatgaaaaaaacatgagggcacaaacacatggtacagatctcataaccaaaaattgctaatcaacanactaaaacacacagttcaaaatatgaacaacaaatagttgcaatacacactaatgctgcacacataccttantactgggacagaattggcacatg

SEQ ID NO: 73587 - DNA, 304 bp, Zea mays
tttgatgttcgcaatactactatttccgatcttagagataaaaatgatatattacatgctcagatcgctgaacttaattcttgcaaccctctacatctaccattgagcatgttactatttgtactacatgtagagatattgatgtcgatgctattcatgatcacatgatcttcattaagcaacaaaatgatcatatagctaaactagatgctaaaattgccgagcacaacttaaaaaatgagaacattaaatgtgctcgtagcatgctttataatgggagacgccctgtcattatagatgacat

SEQ ID NO: 73588 - DNA, 414 bp, Zea mays
  unsure (1)..(414): unsure at all n locations
tgagtcagttctcttgcanaagataattgatgctcatattgataatgagggcatgaaacacattcgtgagaagttaagggctagaaaagccaaatgtttcaaagaagatgatcaaggcattgtatggtttaataaccgcatagtggtgccaaagaatgaagagctccgccagcaaattcttgatgaagcacatcttagccgctattctattcatcctggaagcactaagatgtaccaagacttgaagcaacattactggtggataaagatgaagatcgaaattgcacgctatgtggcgagatgtgacacctgcagacgtgtcaaagccatacatttgaaagttgctggtccattacagtcactaccaataccgacatggaaatgggaagacataagtatggacttcattgtggg

SEQ ID NO: 73589 - DNA, 460 bp, Zea mays
  unsure (1)..(460): unsure at all n locations
agcttatgaagattcttcattccaacatgggctagtcggcggggccagagccaacccaagttagtcttagcaaccaagcaagtgtcgagttcagctctatcaaaatctaccaagtatagctgaccctctaacactcccttaaatgctattgaatcatcacttcttctaaagacagtaacacctacatcagtaaatagacagttgtagcccattttacataattgggatacggaaagcaaattgtaatctaatgaatcaacaagaaaaacatttgaaatggaatggtcaggagatatagcaattntacccaagcctttgaccaaaccttgatttccatccccgaatgtgatcgctctttggggatcttggtttttctcatatgaggagaacatccttttcctccctgtcatgtggttngtgcacccgctgtcgagtatccaactttgacccccggatgcat

SEQ ID NO: 73590 - DNA, 479 bp, Zea mays
  unsure (1)..(479): unsure at all n locations
tattaaatgctttgagtgtggaaaagaatgtcantttgttcacaactgcaaagccaaaccaccaactcctctgccaaagcactcaagaccattttccttcaatgctcattatgttctaagaaaagtagcaaatggaaaagtcaaagttacattcctaggtccaccaagcaagagtagacctagacaaatttgggttgcaaagtccttgattgagaaagtcactggtcctatgcaatatagggctctcaaaactcaagcttgatttgtctgtggatgtaggttaactacaagactggtgggagccattgngttattgacagtggatgcacacaacatatgacaggcaacccacaaatgttcacctcacttgttaagaaatgtgatgaacaagacaaaatcacatttggggacaattcatagggaaaagtaaaggacttggcaggtggcaatttcaatgatctataatttcaatggtcttt

SEQ ID NO: 73591 - DNA, 431 bp, Zea mays
  unsure (1)..(431): unsure at all n locations
agctggtggaggaccatatcatcaaagcttataagtttctggatgagaagtggtcacccaagttttgttgatgaagcaccacaagaccaatcaaggaaggaatccatgtgggagttcgcaagagaaaggtttgcgtgttggcatctatgcttcctcaataagcttgctgccaagcgaaacctagaagcctgaagatgatctttgagtagccagaatcagtgtttgcaatcggcaaccagatgctcctcaaaggccagaattcgttgaagctccatctccccgaagagtttgtaaagtgaagatatgtagctgaagtaaagctatacccataacccttctaagccgaatctcgaggacgagattccttttaagtggtgtagatntgtagcatcccaaaaattcaaatcctataattttctcaaactcgctct

SEQ ID NO: 73592 - DNA, 430 bp, Zea mays
  unsure (1)..(430): unsure at all n locations
tgacagagacgatggtgtntgtaaatcctatatagacggactgtagacggaaaccaacaacaatgcatgcanggctttggaatgtatgttcactttggagatcccgttggaccaactgaaaacgacctcggtcgtgctccgactccgatgccatgagctgaggttactagcgtgttctcgtttgtgaaataagtgttcgtgtgatgggtcgtagttataagtggtttccgaatatatcaggcatttctttctcccgcctttcggtccattcatttgctcatcgcccgccaaatcagtaggcaagtttttttttttggcacttttgctgcatcattgtgcctacacacctgacttaaacgaaatactacagatactggagtaaagctagctatagtgtacatgttagtaaaccactggaatataattagta

SEQ ID NO: 73593 - DNA, 442 bp, Zea mays
  unsure (1)..(442): unsure at all n locations
gcaagcttctcttacctttattccaataacaagatatcgtgaataatgtgatgtattgccacattgtgaactataagaaatgccttgtcttgtgttgttatgatagttttgattaggttgtgttatgtgttcctcttgccttgctatctaggggatgtgtgttcaacccgttttgcctctaactggcaaaaaacttgttgtttgttctactcataaaaagaccacctcaaaatagccttgtgattagcaggtgaaaccccttaaaaaatcacatgcttgtgttagtgttttctatcccttgtgtgtttcacccttgaatttacacttgcatagctggcggcttgtaaatctctatagcttgactgccagatcgacccanacttccttgtacacatgtttatgtcacanaaaatcgtttggtgtctagttgcgcataccatgt

SEQ ID NO: 73594 - DNA, 398 bp, Zea mays
  unsure (1)..(398): unsure at all n locations
ntcccgctcacatcttcggcgctgtatcaaccttcgtattatgcttctcctactgtaattccgactcgggtccgaaggtacctgttcacacattatgctccagaaatactgttaaatcctgtttttgaggaccttcgtaagccgaaggcccccaacagtagcccctcgcaatattaatttgttttaaaataataaatttagattgcgacatggacgaaggctttaagccgaaggtccgaaaaaacatcttccctttgctaaaatagcaacattcactgacaggtggggtctttcaattatcaacgcactgcgcgtataaataagatcataccgcaagctcatttggcacgctctcttgccatctgctcccgctcactcaattnttagcttttgcgcac

SEQ ID NO: 73595 - DNA, 469 bp, Zea mays
  unsure (1)..(469): unsure at all n locations
tcagagtcacctgcggcatgcaagcttctaaagggagatcatgtgttaggactataccgatgtctatttgagaaagacagaccttgtgcagcatgtcaggtaggggaaacaggtgagaagctctcatcacagcaagaatgtgatgacaacatcaagaccactagagcttcttcacatggatctcttccgaccccgtgcctacctcagcatcgggggaagtaagtatggtcttgtaattgtcaatgatttttcccgcttcacttgggtattctttttgcaggataagtcagaaacccaagggaccctanagcgcttcttaaggagagctcataatgaatttgagctaaaggtaaagaagataataagcgacaatgggtccgagactccgagttcaaaaatctacaagttgaagagtatcttgaggaggaaggcatcaagcacgagttctccgctccctacacaccacagc

SEQ ID NO: 73596 - DNA, 462 bp, Zea mays
tctaaagggagaacacgtgatacgtttaactaatgcgctattcttaaagatagaccttgtgcagcttgtcaagcagggaaacaggtgggaggctctcatcacaccaaaaatgtgatgaccacatcaagacccttggagatgcttcatatggacctcttcggacccgtcgcctatctaagtataggaggaagtaagtatggtcttgctatagttgatgattattcccgcttcacttgggtattctttctgcaggataaattcgaaacccaggggaccctcaagcgcttcctcatgagagctcaaaatgagtttgagctcaatgcgaaaaagataaggagcgacaacgggtccgagatcaagaacctttcagtggaggagtctcttgaggaggaacggatcaagcacgaattctccgtctctacacacacaacacaagtgtggtgataggataacaaaccctca

SEQ ID NO: 73597 - DNA, 438 bp, Zea mays
  unsure (1)..(438): unsure at all n locations
agcttctaaagggagagcacattntaggactaacaaatgttcattntgagaaagacaggatttgtagcgcatgccaagccgggaagcaagttggcactcatcatccacacaagaacatcataactagtgacaggccactagagctcctacacatggatttattcggcccgatcgcttacataagcatcggcgggagtaagtattgtctagttattgtggatgattattctcgcttcacttgggtgttctttntgcaggaaaaatctcatacccaagagaccttaaagggattcttgagacgggctcaaaatgagttcggcttaaggatcaagaaaattagaagcgacaacgggacggagttcaagaactctcaaatngaagggcttcttgaggaggagggcatcaagcatgagttctctctcccctacactccacaac

SEQ ID NO: 73598 - DNA, 268 bp, Zea mays
tgttggaagcacgcagctccccgatagcggaatccttggtggactacaacttgccgagtcgagagacttcatcctgagatgcctgcatctcgtggcgagtgatggtctaagtcatacatggagaagcgatggctacactatatgaggttaaggatgtactagcgtcacatgccttacattccagattgtcacgggaagcaacaagtagctgttattcttcctgcaagcaaaaacagtactaaacattgaagcactgagagcaaagcag

SEQ ID NO: 73599 - DNA, 465 bp, Zea mays
  unsure (1)..(465): unsure at all n locations
agcttgtagactaaaggaagaatcatatgcttntcagttttaaccatctntactgccaaacttcgaatatccatgtaactagaaaaggactaaatagagggtgacaaaaagataaaatacctatatataatgggcctgctggagactaagcctgggcaatagcccaccctgcccgggccttggatccgcccatgggcacagcacgagatctatagccaagcgaggtactgttgggcggcgctagggtttggatggggtggagccgtggaggacgagaatgtggctgccatcacaggcttacgggcggcactcatagcaggattgaaataaaatgtcaagtccactgcgacacgcatcaataaaatgtcaggtccactgggacacgcgtcaaattgggagtgtatctaggaggtgacgatagcgtggcagccgaagaagtcgagaattctctctgatttaatagaa

SEQ ID NO: 73600 - DNA, 420 bp, Zea mays
  unsure (1)..(420): unsure at all n locations
tgtgatttatccaatttanaacaagcaccatctcttaacatagattttctatggataaactcaacacaagagatggaattagtagcacaagcactagtttcttatttagcaacccttttatatgtggaagacaagcatgttgctaaaatagagaaacctcataatatggactaaatttcccttgagccctcatgcacaatatattttaaatgacatgaataatatgcatggttgttcaatgaagtctaaagggctgacttaatccatattatggtgagtgtctaataaagaagaatcaaatccaaattaactagatagagaatacgtcacataattntggattgtgcaccatatgataatattcattcatcttccaattagacctttatttcataatcaacaattgatgtatatcctcaa

SEQ ID NO: 73601 - DNA, 427 bp, Zea mays
agcttgacattgcttccctgttggaaacctatgtcatcttttatgtcagggcgtctcccattatagagcatgcttctagcaaatttaaaattttcattttcaatttcatgctcattaatttttgcagttaattgagctatatgatcattttgttgtttaattaaagcaaggtgatcatttatagcatcaacattaacatctctacatctagtgcacatagaaatatgctcgacagtagatgtagagggtctgcaaacatttaattcatctatcttagcatgtaatatggcattctcatttctaagacaggaaatcgaatcattgcaaacatttaactctctaaccttagaaattaaactagcattttcgtttctaaggctagaaatagattcattcaatttatcaatcttagcatttaaactagtat

SEQ ID NO: 73602 - DNA, 443 bp, Zea mays
  unsure (1)..(443): unsure at all n locations
tgtgaaaccaatcacaagtttattgaagaatgatactatatttatttggtcttcanagtgtaatgaagcctttgaaaaattgaaggtattattaaccactgctccggtattggctcaaccggatattgaaaagccctttgatgtttattgtgacacatcangcaatggtctcggctgtgtattaatgcaagatggtcgagtaatagcttatgcttctaggcagttgcaccgacatgaggaacactatcccactcatgatttggagttagctgtagtggttcatgccctanagatctggcgtcattatctgctgnggaatatctgtcacgtctatacagatcataagagcctgaagtatatcttcacccagtcagaattgaacatgagacagaggcgatggctcgagcttattaaagattatngaatggagattcattatcacc

SEQ ID NO: 73603 - DNA, 436 bp, Zea mays
  unsure (1)..(436): unsure at all n locations
agctntataaacaatctaggtcctctccatcacgctacagncagcagagtcagagctcccatcaggcaccttccgttgcaagcaaccagccgtcatgtaaacgcctgttggcactgcggggaccccagtcatttcaaaaacaactgcccccagttgaaggcaccagggccaacctactccaactcggtgaatggccccaaggttccatcagcacccacccccaaggcgctcccctccaacagccagcagagcatgactcagtaccagggcagggcccgggtcaaccacgtcgacgcgcaggaagcccagcaagccccgggagtagtgctcggtgagttcctcgttgaatntactcccgcttctgtgctttttgattcaggagcatcccactcatttatagccgctaagtttgtggagaaacatggcataccctcta

SEQ ID NO: 73604 - DNA, 468 bp, Zea mays
  unsure (1)..(468): unsure at all n locations
tctatagtcgacatagattctcctcgaaccatctttcttgttcacaaataaaactagggcgaataaaacctttntctagtaattcttctatttgtttcttcagttcaattaaatcttcgacatccattcggtaagctctttttgaaatcggtgtagttccaagtaataattcaatagaaaactctatatcacgatcaggtggcatacctggtaattcttccgaaaatatgtctgggtattcacacactattctaatgtgttccaaagatttctcctccagatgagttaccatggctcctgttgtcgctggcatactaacataaacatcaattctttctcctttcggactagttaatgtaaccatccgcttagcacaagatattactccatcatacttggttaagtagtctactccaagtatcacatcgattccactcgattccaagggtatcatctctactagaaagc

SEQ ID NO: 73605 - DNA, 444 bp, Zea mays
  unsure (1)..(444): unsure at all n locations
agcttctagagggagagcacattttgggactatcatatgttcattntgagaaagacaggatttgtagtgcatgccaagcacgacagcaagttttgtcttatcatccacacaagaacatcatgactagtgacaggccactagagctcctacacatggacctattcggcccaatcgcttacataagcatcgacgagagtatgtactgtctagttattgcggatgataattctcgcttcacttgggtgttctttgtgcaggaaaaatcccatacccaagagaccttaaagggattcttgagacgggctcaaaatgagttcggcttaaggatcaagataattataagcgacaacaggacgaagttcaagaactctcaaattgaatgcttccttgaggaggagggcatcaagcatgagttctcttctccctacactccacaacaaaaag

SEQ ID NO: 73606 - DNA, 457 bp, Zea mays
  unsure (1)..(457): unsure at all n locations
nggcaagaccaaataactcaagacccaaaggaagaacatttaaggggagtgaagaaagggttattaaattgtgagctaaaggtacaaagaaaatgaccaggaaatgtcagaagtgtggaattgctgatggtcacaatagtaggacatgtttgtcaatggaggaaaatagacaaaggttggcaagccttgctggacgtaagagaggacgacctccaggatctaggaacaagggtggcagtaaagctcctgattggaatgagacaacaacatctaaaaaacacacaaatgagttcgatagtagtgagtcagacagtgattagaatgttgtatgagatacgattaatttgtttttacaataaaccttgcttgtttggaactgatttatatagaggtggatattgaaatctaataaatggtgcgtatattgcttaataatgttgcgaacttggaactacaa

SEQ ID NO: 73607 - DNA, 414 bp, Zea mays
  unsure (1)..(414): unsure at all n locations
tgtgaaggttcttcatccncacatgtgctaagcggtgatgccacagccagcccatgctagtcttagctattaagcatgcatctagaccggcctcttcttttgcaaaatcaactaaataaagtttgccgtctaatacacccttaaaagctagtgaaccatcacttcttctaaagacagacacatctacatttgtaaatagacagntataccccatgttgcataattgactaacagatagcaaattataaccaagagactcaactaaaaacacattagagatagagtgctcattagaaattgcaattntacctaacccttttaccttgccttgattcccatcaccgaatataattgaatcttgggaatccttattcttgacgtaggaggtgaacattntcttctcccccgtcatat

SEQ ID NO: 73608 - DNA, 361 bp, Zea mays
  unsure (1)..(361): unsure at all n locations
agcttatacatntgaaatagcgaatacatttatggtagtgctcgctttttctatagctgccttgctgaacatgtggacttcttatggccttggcttgctcacccatcacgtacacgtgttatcgaaacgaagcttataccttagtctttgcatttgtgttgtgttcatccgaaggtgttctccgtacccttcctcacttataacatgctatatagtaactgttagattagtgttataagggcctttggaagagaaagtttcctcacagctatgttgtgtgcatatggacaaaaccgacgtgttctcaaaactggtttgttcctttagagcatcttcaacaataaactctanaatagagttc

SEQ ID NO: 73609 - DNA, 459 bp, Zea mays
  unsure (1)..(459): unsure at all n locations
ttngaagaggtcttgagagactggggggatatctgtgctttctccggtgatngagggattgcagctataatggagaaggctggttgtgatcatgttaaagctgcggcccatgctgaagccgccttatccatagacgacacaaaagacccttcggccgaagctactttggtgggcaaaaaattttattccgatatctgggtgaacggtggccgggaattggccaacacaatcataaagaaaaattaaatgaaacccatgaaccccgagagatgctaggcgaaccgaagaagctgctgagcgcgaaaggtgtataggtattgttttttatttttagcttcagcgtttattttctggctttgaactaacagtatgcgtactatagctgaactatcgctgttgcccgagccatacattcccctagccgatctggtcatgaaagaagcactgaatactatgagt

SEQ ID NO: 73610 - DNA, 388 bp, Zea mays
  unsure (1)..(388): unsure at all n locations
agctntgagaactatgcccgtatccaatctttctgagccggaactataagtgctcgccagatgcccccgtttcggtcgaccacgaccagcacccaacataagacttccctagttatttagccaagaccagagccatgatagttctcatggtagcactgttttcccgggtggtcactccatgttccaattaatatgcaataatcttgtttaaccatcgggttaacaacaataaagtaaagttaccatttggaacattaatatcataaacaggagtgtgggggacagatatccctcgggtccactagaagaagtaaaagacctcacgaaagtcccaatggcccaattaatcgtaaggtcattctttcgtgggcctggggagagacaatca

SEQ ID NO: 73611 - DNA, 466 bp, Zea mays
  unsure (1)..(466): unsure at all n locations
ntaaccatattatttggtaagtcttacacttcacatgagtccccacagtaagtgagtgtatccacattattctccacaacttgttgagcgatgaacgtatatgagctcgcccttgctgtactcacattcccccaggtcaaggacagatactacaagatgaggaacatgaaggatgttgtgatgaattcgtgagaggtatagcccgtcgtctcccagtcaactatggttgttgaattgttgtcttcatatgatgtatttatttatctattttatacagaactccattatatattaaagatgtgatattcgtttatttagcatgagtcatcatatgagtgagacttgataccagcacacatttgattcacgtccgggttttgcaccttaattccgagtgtgacacatattttatntataacccaactattatatattttcttctctatattaatcatatatagtacta

SEQ ID NO: 73612 - DNA, 392 bp, Zea mays
agcttgaaggactgcttcggcaggagagcttcctaacgtgaagacttgttcggtccacggagtctctttatccgagcgcgagttacttatctcataaggtgatgagtgaggtatccgtatcccggaggcgtaggagtccctcggctcggtcagccttggctgcttacgtgtactccgtcgtttccaggatccgctttccgaagtagtcaagaggcacgaaagaaatcctgctaaaaagagatccttttccgaggaaaaattcaacgcagagggggtctccccccttttagcccccgagggagggtcgggctttgccgaggctaggccgacccttccttgacgactaaactttgcgcatgtgcgaggtatatggacaacttggaaacatctta

SEQ ID NO: 73613 - DNA, 399 bp, Zea mays
  unsure (1)..(399): unsure at all n locations
tctttttgccgtccttggccatgaggcacttgtggccaatgttggggaagagaagtcccttggtgatggcgatgttggcggcgtcctcgtcggaggaggagtcggaggagctctcgtccgagtcccactcgcggcatacatgggcgtcgccacccttcttcttgtagtatttcttcttctcctttattctccccttcttgtcgtcgcccctgtcactgtcactagaaataggacattttgctataaagtgaccgggcttaccacacttgtagcaaaccttcttggagcggngcttgtaatctttccccctcctttgcttgaggatttggcggaagctcttgatgacgagcgccatttcctcgttgtcgagctttgaggcgttgattggttgtctactcg

SEQ ID NO: 73614 - DNA, 310 bp, Zea mays
  unsure (1)..(310): unsure at all n locations
tcattcccaggnttaacttctccatctcctggcatagtgtattggcagaggtcttcaccgtaagacagtgacaggaaaccttacggctaagtgcatctgccactacattggccttgcccgggtgataatgaatttccaattcatagtccttaataagctcaagccatcgcctttgtctcatgttcaactctgactgggtaaagatatacttcaaacttttatgatctgtataaatgtgacagatattacccagcagataatgacgccagatcttcaggacatgaaccactgcagctagcttcagatcatg

SEQ ID NO: 73615 - DNA, 446 bp, Zea mays
  unsure (1)..(446): unsure at all n locations
acacttagaaaactcagcttctacagggagagcacatcatcgggactaatctattgttctttttntagaacgacagggcccgcagcgcatgtcatgttggaaagcacgttggtgtttatcatatacacaagaacatcatgacgactgatatgccgcttgagctacttcacatggacctattcgacccgatagcttacataagcatcggctggagttagtactgtctagtaattgcggatgagcattctcgcttcacttggtgattctctatacacgataaatctcatacccaagagacntctaagggattcttgagacatgctcaaaatgggttcggcttacggattaagaacactacaagcgacaacgggacggagttcaagaactcacatatagaacgctttcttgagaggagggcatcaagcatgagttctttccccctactc

SEQ ID NO: 73616 - DNA, 415 bp, Zea mays
agcttggcctccagctgtgtttcatgacgactgagtctaatgatgttacgagcagcgggcaagagtccgtggtgattgtgattataattgtaggaataggaattgtgtggttacacaacatagtgaggcgcttgcgatctcattttgtacatcttggaactcgagaggttaaacctcgtgatagtcaactgcatgtattgaaacatatatttatacacatttttttttgcatcctgcgagaattatgactactgcctgggggtgacaacttcttcgctctccgtcaacgtcaacagttgccgcagccgtcgtacgcttctccccgtcgcttcaccgtgaagctcttgacgtgctcgcatgtaggtggcgtcttccactcgacttggcccacatgtaaaaagaaaaccaatataca

SEQ ID NO: 73617 - DNA, 387 bp, Zea mays
  unsure (1)..(387): unsure at all n locations
tctanagggagaacatgtgataggtctaactaatgtaactttctataaagatagaccttgngcagcttgtcaagcaggtaaacaggtgggaagctgtcatcatgccaaaaatgtgatgacaacatcaagacccctggagttacttcatatggacctcttcggacccgtcgcctatctaagcataggaggaagtaagtatggtcttgttatagttgatgatttttcccacttcacttgggtattctttttgcaggataaatctgaaacccaagggaccctcaagcgcttcctaaggagagcccaaaacgagtttgagctcaaagtgaagaagataagaagcgacaatgggtccgagttcaaaaaccttcaagtggaggagtatcttga

SEQ ID NO: 73618 - DNA, 466 bp, Zea mays
  unsure (1)..(466): unsure at all n locations
agctgtgaagattcttcattccaacatgtgctagtctacgatgccagagccagcccatgttagtcttagcaattaagcaagtgtcgagttcagctctatcaaaatctactaagtatagctgaccctctaacactcccttaaatgctattgaatcatcacttcttctaaagacagtaacacctatatctataaaaaggcagntgtagcccattttacataattgcaaaactgaaagcaggttataatctaaagaatctataagaaaaacattggaaatggagtggtcaggagatatagcaattntacccaatcctttgaccaaaccttgatttccatccccgaatgtgatagctcgttggggatcttggtttttctcgtaggaggagaacatcttcttctnccctgtcatatggttggtgcacccgctatcgatgatccaacttgagcccccggatgcataaaccta

SEQ ID NO: 73619 - DNA, 470 bp, Zea mays
  unsure (1)..(470): unsure at all n locations
tgtggcccgagccatcactgaagtgcacctacttgtttttgnttcaatgngntccatgtatctcagctgcggaaatgtgttcgtctacccactgaagtgctaccgtaaccagacattgagatagaaccagacttgtcctatcaagagtaccctatcaaggtattagatcataaggagaggtcaactcgggcaagatcagccaggatgtataaggttcaatggagtcaccattcagcagaagaagctacatgggagactgaggantttctacgctctcgcttccccgactttctgcccaaaggagtcgtgtcgtaaccccaataccccacccncacctgccctgtgaattcaattataagaaaaacttagataacaaggatagtctaaattgttgagttaacttaagaagggatttcttctgaagttgctaagagaatgacattcgaagagctagttacaagagaaactcg

SEQ ID NO: 73620 - DNA, 417 bp, Zea mays
  unsure (1)..(417): unsure at all n locations
agctttatcanatggacgtgaacagtgcctttctcaatgtaccaatcaaggaagaggtctatgttgagcaacctcccggctttgaagacagtgagtatcctaaccatgtctataagctctctaaggcgctttatgggctcaagcaagccccgagagcatggtatgaatgccttagagactttcttattgcaaatggattcaaagtcggaaaagccgatcctactctattcactaaaactcttgaaaatgatttgtttgtatgccaaatctatgttgatgatatcatatttgggtctactaacgaatctacttgtgaagagtttagtaggattatgacacagaaattcgagatgtcaatgatgggggagttgaagtattntctaggattccaagtcaagcaactccaagagggcacct

SEQ ID NO: 73621 - DNA, 399 bp, Zea mays
  unsure (1)..(399): unsure at all n locations
tatgacanactacacatccatttataccagtttgcaagtatatttatgattctttctggaagcagacaaacgaacacaggaatcacatttacacaaggaaatatttgtatcttatgctcttttactctctaccagatgaatcatcatctccgacttccaccgttcgttttttcgacgttgatgtctcattccattgcggggctgcagctatgattttgttccttgaaccaggaggccgtcctcgcttacgtccagataggttagccaatcgaaccctattatcctcgacagttaaacacgtacggctgttgtgaccatcagctatgccacatttctggcatttcctgctcatcttcttagctcctttcgcacccaattttaaaacttggtgctcactac

SEQ ID NO: 73622 - DNA, 414 bp, Zea mays
  unsure (1)..(414): unsure at all n locations
agcttctaaagggagaacacgtgataggtttgactaacgtgcatttcgaaaaagatagaccttgtgcagctngtcaagcaagtaaacaagtgggaggagcgcatcacagcaagaatgtgatgaccacttcaagacctctggagctgctgcatatggacctcttcggacccgtcgtctatctaagcataggagggagtaagtatggtctagttattggtgatgactcttcccgcttcacttgggtgttctttttgcaggataagtctgaaacccaagggaccctcaagcgcttcctcaggagagctcaaaatgagnttgagctctaagtgaagaagataaggagtgacaacggatccgagttcaagaaccttcaagtggaggagttccttgaagaggaagggatcaagcacgagt

SEQ ID NO: 73623 - DNA, 429 bp, Zea mays
  unsure (1)..(429): unsure at all n locations
tcctttgttgcctcgtcctcagtgttgacggacaagcgctctatgtatatgacaattccatagttagtcaattcacgttaagcagtatacaagtgaaccatagaatcagtaatgcacttacatttagctgtgacacaaagctgttgtagtatttctggtcgtccttgtaatctttccaacgagttaagataggcatggtttcccgaataatgatgccagcctctgatgcaaacttggcagcttgaacaggttcatgtggcctttttttgccttcctcaacagctatgggcagtctcctttgcataactttagtcatcctgtccagttgttttcccttggttgctgccctgggtctccttggtgctcgctgtgtaggagctacaaaatataattcgctnttattggaataatgaaattgtttgttcatgc

SEQ ID NO: 73624 - DNA, 434 bp, Zea mays
agcttgtgaagattcttcatcccaacatggtctagtcggcggggccatagccaacccatgttagtcttagcgattaagcaagtgtcgagttcagctctatcaaaatctactaagtatagctgaccctctaacacacccttaaatgctattgaatcatcacttcttctaaagacagtgacacctatatcagtaaatagacaattgtagcccattttgcataattgagaaatggaaagcaaattgtaatctaatgaatctacaagaaaaacattggaaatagaatggtcaggagatatagcaattttacccaatcctttgaccaaaccttggtttccatccccgaatgtgatcgctcgttggggatcttgttttttctcgtaggaggagaacatcttcttctcccctgtcatgtggtttgtgcacccgctgttgat

SEQ ID NO: 73625 - DNA, 444 bp, Zea mays
  unsure (1)..(444): unsure at all n locations
tggacgtganaagtgccttcctcaatgtacttatctaggaagaggtctatgttgagaaacctcccggctatgaagatagtgagtaccctaaccatgtgtataaactctctaaggcgctttatgggctcaagcaagccccaagagcatggtatgaatgactaagagattttcttatcactaatggcttcaaagtcggtaaaactgatcctactctctttactaaaactattgcaaatgatttgtttgtattccaaatttatgttgatgatatcatatttgggtctactaacaaatctacttgtgaagaagttagtaggataatgattcaaaaattcgagatgtctatgatggnggaggtgaagtatntcctcggatttcaagtgaagcaactccaagagggcaccttcatcagccaaaccaagtacactcaagatatacttacca

SEQ ID NO: 73626 - DNA, 368 bp, Zea mays
  unsure (1)..(368): unsure at all n locations
tcgtattgatgttctttntgactagttggtcggagccaaagtgttntccaagatagacctccgctccggctaccatcagatcaagatacgagcaagcgatattccgaagacggctttctcaaccagatatgggctatatgaattcttggtgatgtctttcgggctgactaatgcaccagcatatttcatgtatctgatgaattctgttttcatgcctgaattgacaaatttgtagtggtctcatcgaaatatcttggtgactcgaaaacgaagaaaacatgccggcatttgatgtntacttcacgtctgcagacaccacctttatgccagtgcaaatgagattttgtaaggactcaatcttggccata

SEQ ID NO: 73627 - DNA, 429 bp, Zea mays
  unsure (1)..(429): unsure at all n locations
ntgtaggaggaggagatgatatgaaactctggggtgcttgatggagatataaagaatcatcatgtgcggaaaatcaaggcctacaacatggaggaatgtcaaaggatggtaacacttatacttttaagtgcaagtatcttaaattatcatttcttatatgtcttgtgtagtcacatagaaaagaaagcacttaagatgattttaaaattatgtcaccattctttgaagaaattcctctcatatggtagattgcattttcatcattttcatattatggcaatctacatgctttataattgtgcaaagttcccatggcatgtttttactttaattatcctattattgccatgatctagatatagatagagattccatgctcttaaaggaataaggtgtcatgtaaggaattcanatctttatgacatttat

SEQ ID NO: 73628 - DNA, 393 bp, Zea mays
  unsure (1)..(393): unsure at all n locations
agcttctcctatacgagtgctgttcttctctctgagtgcgaagctgccacatataataacaaaggagcccctggcgtaggtgaaattaatgttgttagatctatcaagtactgtttcagctcttcaaaggccttctgctggattggtccccattgaaagacttcggctgacttcagcacttcgaagaatggtaagtttctctctgctgatctggatatgaatctattgagagatgccaaccttcctgtcaatctttgagcccccttttttgtagttggtggctccatccgaagtatagcttcaattttacttggattggcttcaattccctttgttgaaaccaagcatccaagagatttccccttctttactccgaagacacatttntctgga

SEQ ID NO: 73629 - DNA, 439 bp, Zea mays
  unsure (1)..(439): unsure at all n locations
tctanagagagaacacatnttatgactaaccaatgtttatttgttagagacagggtttgtagcgcatgccaggcagggaagcaggttggagtccaccatccacacatgaacacaatgacgatggacaggtcgcttgagctactccacatggatctattcggcccgatcgcttacataagcatcgacgggagtaagtattgtctagttattgtggatgattattctcgcttcacttgggtattctttttgcaggaaaaatcttagacccaagataccttataaggattcttgagatgggatcaaaatgagttcggattaaggataaaaaagataagaagcgacaatgggacggagttcaacaattcttaaattggaggaattcttgaggaagaagggatcaagcatgagttctcttctctctacacacctcaacaaaatg

SEQ ID NO: 73630 - DNA, 438 bp, Zea mays
  unsure (1)..(438): unsure at all n locations
agcttacccttgattcacctgatgatctattgatatccttcaccacattntcatttcgtatcggccgctacattttaaatctgtcacagtgtcatagcaaaactgcggacatggatggcaacgctagtgcctgtccgctttacatcagtctgcaggtcatttcagacgtccaaaactgactggacatggcacattgtgatgcacaccctctcgacgagagatcagtgttcagcgagcggctgcatcgatcaaatcatgtgaaataaactcagcgaanaaaaaacttttttattttctttntgtcatgatcatcaggtcagttgtctcacctaacgctaccttgcgctagattgaatgcacatggtgatcatagaaggaacaggaagctggcccattccagtcccaggcttcgatccagatcctatcctggatcacgga

SEQ ID NO: 73631 - DNA, 350 bp, Zea mays
tatcacgagacactataacatgctcgagcttccaccagcgcttacaggctcacatctaccaacgtcgattatctgtattactgctgaaacatactcgatctcctaatattttattgatggctgatccatgctgactttgtccttgtaattctacctaaacaaacttgtaccggtccgcactattttactacctggggggggacgatttttacgacgccgacccatgtaatacatgagcgaaatatacccctcataatcttgcgctaaataaagacctcgacgacctgcttcgacattcaaccaattctagggcgccgcaaggctaaacgctagccaacctatcgtgcgac

SEQ ID NO: 73632 - DNA, 271 bp, Zea mays
atgtaatgctcttaatggcgatagaccgggctatcccaccttaataacatcagagacatagaatgaaggatatgaaggatacacctcgctccaattaagctaactagaagtactgattaatcttgactaagacattaaaaggaattcacgggaacaccaaaatggagttaccactgaccttacctatgcttgactctaaaatactatgtctaccacaatgatcttcacgtagcaagatccatccctcactatctaaaataatcattcacca

SEQ ID NO: 73633 - DNA, 413 bp, Zea mays
  unsure (1)..(413): unsure at all n locations
tatcatccctgatgcaccggtgtctccttcctgcgcanttcatatcaaggaacttaaaatcctatacagcttcggatgtcctgtacaactcaaatttaggtgactatttggttattgaaaaaaaaacgactcgcttttccctttcccaaaaatccgtatcatgcatgtgcagatgataaactagtccaagaaaatgatataaccaacaatgccataatattatttcagcacggagcaaatcattacctctacgaatgagaaaggctgcgagtggcacgagcgaagagcccttgcaagactatcgtcctccgaaggcaatatcctggacgaacaaactccacggtatgacaacgcagactggcagcggaggacgtctgaatcaaccactctatcaaatcgagcagatgtgcagc

SEQ ID NO: 73634 - DNA, 476 bp, Zea mays
  unsure (1)..(476): unsure at all n locations
tgtggttggttntggtaattaagaagactagtagactattctatattattagtggtgtgattaagatatgttaaatccacaccatgaaagaaataggcttgaaggtggataaattgatatttttaaaaatggagcaagctcttacatggaaacaagaatcaaagaaacaaaaatcaagttgtgaaggcaaaggtataaatagaaatttaattntactagttaagatgtaatagagcatgtgatcaggttcaggatagataaccatactattaattgggaaactctaattaacaaacatgattatctagtctctaccccttaaacccaccagttaaaaactaagctacgtacaccacacaaattatcccacacactcatgccctagctaaatacacccaacgtattaacttcaaaataatcccactgtcaaaaccaacatactggatcattaattnttctaatctctcttactgaac

SEQ ID NO: 73635 - DNA, 476 bp, Zea mays
  unsure (1)..(476): unsure at all n locations
taattggtggaaaattcttcactgacagctgggaaaatgtctaccgagggatggcccacgaaataataaagaagagcgaaaaatatacttatgatgctatggaagcaacgaaagcagctgaaaaagctgcagaactcgaaaggaggataggtattgcttaatagcttttaactctattttttatttttatgacttcgaactgatttacgttttctacggcagctaactatctcctcccccagagcccttcgagtcactggccgacctagaggcaaaggaatcaacaaaaattattagcatggccgaaaccattatggacgaagccgttacccaactgttgaccgaagctgcagatagagtttgaaagaagaagaatagctattgtataaacatttgtagaatatgaatgtaatatttgctggactaatgcttgaatattnggtgctcatgggttttgaatgtaatatataaatggg

SEQ ID NO: 73636 - DNA, 447 bp, Zea mays
agcttcccatgcacgccaatgctacacagatctcagacgtcagggcataaggagaatgccccagcagcaaacatgagtagcaccaaatactacatctgttatgttcctgggcccacatgtcggggctcagtatccttgtgcatgtcccccttgactataaaaggggaggcatgcaacgttacaagacaggctctctgagacctaaggcagacttcgaacgctcaagcttccacagcaatccaacacatagtggattatggtattacgctctaacgacccgaaccactctaaactctcgcgtgttcatgtgctcggtgatcgcttagctagacaggcaaaatgcttaagccccttcctcatcttatgattaagggcgggtgcactccgccacccggccggagaattccctctccgacatttggtgcgccaggtagggggctaggcatt

SEQ ID NO: 73637 - DNA, 188 bp, Zea mays
  unsure (1)..(188): unsure at all n locations
taaccttgtaacgaggataagctacctttgtttcaaaggtggaaggtccttatgtctctntgaaatccttaaggccccgtttgtttcgttagaattgaattccattctaataatcataatttacacacaaactatttaagttcatatctttgtctattcccatccatcatatttcgcccccactgtat

SEQ ID NO: 73638 - DNA, 430 bp, Zea mays
  unsure (1)..(430): unsure at all n locations
agctnggaggcgtctattgggtgtcgacttgttgtatactcctccttcttttcttccgtcgccttgaatgcaacgggttgagcttcggatggttcgccaagctcgttgattttcctcgagccttctatcatgcactcaaaacttacaaaatgcccgataacttcctcgggggtcattctagtatatctaggattaccacgaatcaattgaacttgagtgggatttagaaaaatgagagatcttaaaataacatttaccacttcgtggtcgtcccacttcttgctcccgaggttgcgcactnggtttaccaaagtcttgagccggttgtacatgtgttgtggctcctcccctttgtgaagccggaaccgaccgagctccccctcgatcgtttcccgcttggtgatcttggtgagctcatctncctcgtgcg

SEQ ID NO: 73639 - DNA, 383 bp, Zea mays
tggcggaaggacagatgtcggagctgtcgagtccttgctgacgttctcttgcttctgtaagggggctgagagccgccgtcgtcatatagcgtgcggtgcgccatcattgcttgtctggcggagcgagccagatgggacgccggtcttgtttcccgtagcctgagttagcttgaggtagggtaatgatggcgccccctattgacttggtcggtccgtgcccaaggttgggcgatgtggaggctcctccgaggtcgaggtcgagtctgtcttccgaggccgaggtcgagtccgagcccctgggtctggcgaggcggagaccgtcggctgaggccagggctgagtccgagccctgtggtcgggcgaagcggagttcgtcgtctttc

SEQ ID NO: 73640 - DNA, 317 bp, Zea mays
  unsure (1)..(317): unsure at all n locations
cacctggaggctcgcatcctcctctgctgtgggcccggnggccactgtcggtaccctgaaactagggtaccccttactactgtataaagacgcagtacccacgcggctatttttagtcatgtggtaaaggagctgtatgtgggaccaggccatgactcgccccagcctcgggcaaatactctgggccagcaacagcacctgaccccaccacatgggcgggtccggtgccgccacgtgtccagagaaagtgacatactctgaggtatcaccagtgagtccgaacccacatgggaaggtgttggacccctgtatatatg

SEQ ID NO: 73641 - DNA, 414 bp, Zea mays
tctgctcacaagatcgacgacacacaactgtcatgctggtcccacagatgcggttatatattatatcgctcaaggcctgactggcgacggcattttggagagaaggccgaggcaaactacacaacactcacacactgtccttctcaaggctgtttgccacttggttcaagaagtccacagtgaacatgtgcaggcagatctacaaaaaataaaataggagagaacagtctttggatggagggagggcgaaagagaaccagaagcgaaggatacaaccatacgttgctccaacagctacggagacgccctgacgactgattcatttccgtagccatagccgcatccattccgctgtactcaaccaccgagagcggtccacccggcctcgttgacgaacacccaacattctcttgc

SEQ ID NO: 73642 - DNA, 425 bp, Zea mays
  unsure (1)..(425): unsure at all n locations
agactgattggngcaattcttgaggatcttctggacctgtgggttaggacccccacacgctttcgctgcgccactctgatcttgtgggttgatgtcgatcgcattatcttcattggggttagcgactaacccccttaacagaagcgcngatatgcacttggtgaagatgttgccgactctgatcttgactgatcaagagaggagttggaggttgccaaatggacatgtgcaagatgaaagggtagcgagaaagtgaagtatagacggattagagagagcagggggagaacccaactacttaactctatggcattcacctaataaactgatgttattgcggaccaangggcacaacacatcaacactcatcacagagatgcaactcagtcatatcacaaagacacaccacacaagcatacaacaac

SEQ ID NO: 73643 - DNA, 469 bp, Zea mays
  unsure (1)..(469): unsure at all n locations
acctatgaaactcagcttagctgantagagtcccttgttggattatccccaggtttagcttctccatctcttgacacacagtgttctcggagatcttcgccataagacagtggcaggaggtcttactactcattgcatctactaccacattggctttgcctgggtgataatggatctccagttcatagtctttaataagctcaagccatcgtctntgcctcatatttaattctgactgggtgaagatgtacttcaaacttttatgatctgtatatatgtgacagatatttcccagcagatagtgacgccaaatcttcagggcatgaaccacagcagctagctccagatcatgagttgggtaatgctcctcatgtcggcgcaactgccttgaagcatacacaattactcggccctcttgcatcagtacacagccgagcccactgccagatgcatcacaatatacatcaaa

SEQ ID NO: 73644 - DNA, 472 bp, Zea mays
  unsure (1)..(472): unsure at all n locations
agctttaatgcacatattgtcccgctttgacatcaaacaccaaaaccatattcaagcaagaacataggatgatgtcaagggacagcanggtgttaaggaggagagacacagtatcaaaactcccccttacttattgagcatatgcactaccaacatttaagtaagatacaaatacgcaaaaagattaccacttccttttgtacctttaccatgttgtagtgtacttcccatcttgagagtatttaatctctcgagagcttctccacacttgtgcctgattctttatcctacaccttttcttggtgctaagacaccagacttagaacaagttatagtattgtgcacaagaagaaacttctattctagtgattaccacaagataccaattgaagcacactaccaaggctaccaattgaaaaatcatcactgtcatagctccatgatatttcaagataagcatctacgatcacca

SEQ ID NO: 73645 - DNA, 483 bp, Zea mays
  unsure (1)..(483): unsure at all n locations
gcttctatagggagaancacatttgggactaacaaatgttcatttttatataagacagggtgtgtagcgcatgtcaggcagggaagcaagttggtgttcatcatccacacaagaacatcataacgactgacaggccacttgagctcctacacatagacctattcgacccgatagcttacataaacatcggcgggagtaagtactgtctagttattgtggatgattattctcgcttcacttgggtattctttntgtaggaaaaatatcatacctaagagaccttaaaaggattcttgagacgggctcaaaatgagttcggcttaagaatcaagaaaattagaagcgacaacgggacggagttcaagaactctcaaattgaaggctttcttgaggaggaggagggcatcaagcatgagttctcttctccctacacgccacaacaaaatggtgtagtggagagaaagaatagaactctgttggcat

SEQ ID NO: 73646 - DNA, 437 bp, Zea mays
  unsure (1)..(437): unsure at all n locations
agcttctgagcagcatgcaggatctaacatgactgacgagtgaggacgagcaaccgaaattntctcacctgaaagaaaccgaactctttccccgcggcgacgatctgttccgccgtcctgtcgggatcatcgccgccgaggtcaactacaggtatcgccgccgcggaagacggcggcgagctcctatgcctctggtgctccgggagcacgtaggactcaggcaccgactggtagacggcgccattggagaggggttcggtcatctccttcggcggccgggtttcttgcttccttcacaagttcagacagatgagcattnttatacagcgatgaacatgagcatctnnttggatccatgatttgaccgcagctcggacgcatccatttgtcgtcgcatacaaagttgacttttctacagcaaattgagtggtctacta

SEQ ID NO: 73647 - DNA, 409 bp, Zea mays
  unsure (1)..(409): unsure at all n locations
gcttctnagggagagcacattntatgactaaccaatgttcattttgagaaagacagggtttgtagcgcatgtcaagtatgaaagcaagttggagtccatcatccacacaagaacatcatgactactgacaggccgctcgagctactccacatggatctattcgacccgatcgcttacataagcatcggcgggagtaagtactgtctagttattgcggatgattattctcgcttcacttgcgtgttctttttgcaggaaaaatcacaaacccaagatacattaaaaggattcttaagacgggctcaaaatgagtttggattaaggataaaaaagattagaagtgattatgggacggagttcaagaattctcaagtcgaaggctttcttgaggaggagggcatcaagcatg

SEQ ID NO: 73648 - DNA, 454 bp, Zea mays
  unsure (1)..(454): unsure at all n locations
agctntataaatggacgtgaagagtgcctttctcaatggaccaatcaaggaggaggtctatgttgagcaacctcccggctntgaagatagtgagtaccctaaccatgtgtataaactctctaaggcgttgtatgggctcaagcaagccccaagagcatggtttgaatgcctaagagatttccttatcactaatggcttcaaagtcggtaaagccgatcctactctctttactaaaactattgcaaatgatttgtttgtatgccaaatttatgttgatgatatcatatttgggtctactaacaaatctacatgcaaagagtttagtaggatcatgattaaaaaattcgagatgtctatgatgggggagttgaagtatttcttaagatntcaagtgaagcaactccaagagggcaccttcatcagccaaacgaagtacattcaaaacatactcacc

SEQ ID NO: 73649 - DNA, 465 bp, Zea mays
  unsure (1)..(465): unsure at all n locations
tgtgattntaccaattgaaagagcacaatctctacttatgaatttccatgaaatatcttanaagagattgtattagtaacacaagcaatagtttcctatttagcaacctctagtatatgaatgacaagaaggttactaaaacaaggaaacctcatgatatgaactaaattacccttacaagcatcatgcataacatcaaatgtaaaaaaagatgaaagtagcatgattatttaattaagtttacatggcaagtttaattcataacatggtgagtgattaatgtagaagactcaaaaccaatttaaacaagaatgaatacttcacatagtattggttcaatcttctttgaatgttgaatggcacactccatttgggacacacattctcatgttgtgaaactacataaatcacttagataaaaacattagtctcacaactctagtcatatagagaaaattccttttg

SEQ ID NO: 73650 - DNA, 446 bp, Zea mays
  unsure (1)..(446): unsure at all n locations
agcttctaaagggagaacacgttatatgtttgactaacgtgcatttcgaaaaagatagaccttgtgcagcttgtcaagcaggtaaacaagtgggaggagcgcatcacggcaagaatgtgatgaccacttcaagacctctggagctgctgcatatggacctcttcggacccgtcgcctatctgagcataggagggagtaagtatggtttagttattgttgatgacttttcccgcttcacttgggtgttctttttgcaggataagtctgaaacccaagggaccctcaagcgcttcctcaggagagctcaaaatgagtttgagctcaaggtgaagaagataaggagcgacaacgggtccgagttcaagaaccttcaagtggaggagttccttgaggaggaanggatcaagcatgagttctccgctccctacacaccacaacanaatggt

SEQ ID NO: 73651 - DNA, 362 bp, Zea mays
tactcctccctgggaggggccgttcatcatcaccaagattttgaagcccgggacatacaagctggccaacgatcaaggcgaggtctacagcaacgcttgtaacatacaatatctacgtcgcttctacccttaagatgtttcgagttgttcatatacctcgttctcttaacatacataaataaagtctaaccgtcaaggaagggtcagccttgcctcggcaaagcccaaccctccctcgggggctagaaggggggaaccccctctgcgtcaaaattttcctcagaaaaagtcttttgccagaacgtctttcgcgcttttcgactgcttcgatagcaggatcctaaaaacgacgagagtacatg

SEQ ID NO: 73652 - DNA, 398 bp, Zea mays
  unsure (1)..(398): unsure at all n locations
cttctgccatgatgtaattgtttctggccgaagagaagataccaagtctgagccacgctcctgactgccttgacgaaggacttggccatgatagcagtgttgccaccatacgatgatatggttgcttcatagctcatgaggaattgcttcaggtcagagtgcccatcatacatggngagatgtggcggcttgtatgaaggtagccatggggtagcctgtagttctgctgccaggggagaagcatcatcgaaagcaaaattaccatggtacagatcatcataccacccatcatncgtgaccggagtttcttgataaagctctctatgttgagggccctcgtcttggtcgcctatgcagatgacgcattcttcagctgttcgtcatcttctttttgagtc

SEQ ID NO: 73653 - DNA, 381 bp, Zea mays
agcttgtgaacagtacacattcttaagggagtattcagcttcagcagaccagccgaagcctatgcttttatgtgaggacatagcagagcagaaggtgctgttaggctctcagttatccgaagagcaggagaaaaccttgataaagctattgttcaataacaaggatgtttttgcatggtcagccaatgatctctgcggagataatagagatgttatcgagcactcactccatgtcgatccattcttcacacccacaaagcaaaggcttcggaagatgtcagatgataaggccgaatgtgctcgcaacgaagtcaaaagactcctcagtgcaggagttatcagagaagtgaagtacccagaatggctggctaacactgttat

SEQ ID NO: 73654 - DNA, 414 bp, Zea mays
  unsure (1)..(414): unsure at all n locations
tgtgaaggttcttcatccctacatgtgctaagcggcgatgccacaaccagcccatgctagtcttagctattaagcatgcatctagactggcctcctcttttgcaaaatcaactaaataaagattgtcgtctaatacacccttgaaagctaatgaaccatcacttcttctaaagacagacacatctacattggtaaatagacaattatatcccatattgcataattgactaacagatagcaaattatatccaagggactcaactaaaaacacattagagatagagtgctcattngaaatagcaatcttgcctaaacctttcactttgccttggttcccatcaccaaatatgattgaatcttgggaatccttatttntgacgtaggaggtgaacatcttcttctcccccgtcatat

SEQ ID NO: 73655 - DNA, 454 bp, Zea mays
  unsure (1)..(454): unsure at all n locations
agcttgagaagatatttccacccggcttcttcaatccaatgcagcatntgattcttcatctcccctatgaggcacgaatggngggccccgtgcagggacgttggtgctatccaatcgagagatgtctaaagactattcgaaagaaatgtagaaataaatgcaaaatcgaggcttccattgcagaggcatacattcttgaggaggtctcaaacttcacaacaacttattatggtgacaaactgccgagcgtgcataatccaccccctcgttacaatgatggcgacaatgaatcgaaccttagcatatttcgaggccaactcggaagcgcaagtggctcgaccaccaagaccttgacacatgaagagtggcggcatatcatgctatacgtatngaccaaccttgaagaggtgacgccatacatggaacaatntcttcatgaattcttgcgtcgatc

SEQ ID NO: 73656 - DNA, 419 bp, Zea mays
tctccaccatgtcgctgctagccaagttggtgcagctacttccatcaatgatcaaacgacatgaacgctccttaatgacacactttgtttgaaacaacgtatgtcgctgattctgctctgccttcttcatttgtgcactaagcacacgctgtacaatgaggctctcataatgctctgcatcatctgcaccaatctgttcttcgggtggttccttagtgcctgcatcatcagccgcaagcaagtaagtgtagcttcatccaaatcactagcagaggaatacccaccatcgtattttaccaccaaaacacgctgattaggacaatcacgctgcacgtgtccatagcccttgcatcgataacacagaacatctcttgttctacccgtggaggctactgaagaggcactacctgctggcttct

SEQ ID NO: 73657 - DNA, 440 bp, Zea mays
  unsure (1)..(440): unsure at all n locations
agcttcttcaccacgtgttcgtagatatcttgaggaagtcgagcaaggcgtcttctccttaattgtctttggttcttgtttccaagcaatttcctttttgaccctacaacttgttgctcattcaaacattcgcctccttttgagtgacaggggttagcacatggtgatatattatccaaatgtgcacttgtgcaagaatgaggttcacatgaatttaagtttgtaattacaacctcatgagcaacatcaagcatgatatagtcatcaactagtttattatgagaatatgacaacatatcatactttccacctagagcaagttattctaaatttatcatttctacttgactcctaagcatagaattttcagttntaagtngagcaacattagaataaacatcatcattatttctttgctcaattaanacttgatcatacca

SEQ ID NO: 73658 - DNA, 412 bp, Zea mays
  unsure (1)..(412): unsure at all n locations
tacaacataattgttccttcttcacaacctctgaaggatattatgaggaaccgagaagctactggaaggattggaaaatgggctgcagagctcaatgaattttgtattgaatatgttcatagatcttcgattcagtcccaggtgttagcagacttcattgctgactggacgccaggggctcaggaggaagaaacaaataaagacgctgaagcatggacagtgttttgcgatgggtcttggggaaccttcggagcgggagcggctgctgtgttggtttcaccttccaaagttaaaacttgctatgcggcaaaacttgattntacttgcacaaataacattgccgagtacgaagctctgcttttaggtcttcggaagttaaaagcaatgggaatcagaagggctatacttaaaa

SEQ ID NO: 73659 - DNA, 417 bp, Zea mays
  unsure (1)..(417): unsure at all n locations
gcttaaaggatactattcaactaaagtaagatgaagttgataagaggccaaggtatgaaaacttcctatccttcagttgttntagtattctatccttagtgggatgtaccatagtataggttaaattcattgcattataaaatgttcaatagtgcatataactttgacatcaactatatgtgtgcactaatttaaaggaatttagtctatccttttgggtttcaagaatgatggttcattttcatccacatataaggatcatcatttgtgaaaccttcccatgtgttttaatgctctcttttctaagtgtttgaacaagggccttccaagtgctttcaagatggattcaaaatctacggatataagagtcttggttatttcaatcattgagtttcaatgggtctcatatcatgtatg

SEQ ID NO: 73660 - DNA, 474 bp, Zea mays
  unsure (1)..(474): unsure at all n locations
ntaacatactcgtactttttgttgacactacatattaaaaatgggatctcattatgttagccttgcatcattgggacattcaacatttccttgagcttcctttgttccaaataaatgtattaatgtggtccttgtccatgatataaatgaatactccctccatccaaattataagtccttctgtcttttctaggtacatagcttttactacgcacctagaatcgtagatatccattatgtctagatgcatagtaaacgttatgtacctagaaaaaccagagcaacttagaatttagaatggagggagtacataactaacttattcttataagaaatgaaaggggctttattattaaccatttggatgatgcattgctatttgagtggcctttgctcttttgntatccgtaattcacactgcttagtgaatgatctaattatatcatatggaacattggtacgttcttgtacagt

SEQ ID NO: 73661 - DNA, 430 bp, Zea mays
gacaatgaggaattggctttaatcatcataagtctttcccacatcctcaagcaatggagggggaaggactacaaaccccgctccaagatagtgtgctacaaatgtggtaagcccggtcattttattgcaaaatgtcctatatctagtgacagtgataggggcgacgacaagaatggaaagaggagagaatagaagaagtactacaagaagaagggcggcgatgcccatgtttgccgggagtgggactccgactagagctccaccgagttctcctccgacgaggacgccgccgacatcgccgtcaccaagggactcctcttccccaacgtcggccacaagtgcctcatggcataggacggcaaaaggaagaaggttatatctacatcctccactaaatatgaatcctctagtgatgataatgctagtgatg

SEQ ID NO: 73662 - DNA, 437 bp, Zea mays
  unsure (1)..(437): unsure at all n locations
tgaaggataattganaaagcaggctccagtatacttcgtcaccgatgttctcagtttatcaaagaaaaactatacagaattggagaaggtgctatatgccgtcttaatggcctccaggaagcttcgacattatttcaagcataccatataattgttccctcatcatagcctttgaaggatattatgagaaacagagaagctactagaaggattggaaagtgggctgtggaactcaacgagttcagcattgattatgtgcatagatcttcgattcagtcccaggcgctaacagacttcatcactgactggacgccaggggctcatgaggaagaagcaagtaaagatgctgaagcttggacagttttttgcgatggctcttgnggaaccttctgggcaagtgccgtcttaattgcaccttccaaagttagaacatgcta

SEQ ID NO: 73663 - DNA, 468 bp, Zea mays
  unsure (1)..(468): unsure at all n locations
agctggttgtctttatctggggacttcattttccttactatgagactactacatgaaatagactttaaaaaaggtaatagtctcaaagtcttagattatagagtaacctccccctgaaagtgtgcatacaagttttgaatgcttgtaggagacatacactttgatttgatatcaagaggggcagattatccataatctgagctttggcacatataagttaaatgataccaattgaagcataccaaatgaagtgttataccacttgaagtatttcacaatatcaattgatgtatcattttcttggaaatgttaggtaagctatgtgtcgtgcttattattttagaccatgtaggtttgctcaagagtatgaattgaaagtgagcgatcctaccatatgaattacctagtatgcatgcaaaaatgaataccaatggtaatactaggcatgaanggtaaactagatacatg

SEQ ID NO: 73664 - DNA, 454 bp, Zea mays
  unsure (1)..(454): unsure at all n locations
ngtgcgtctcaagatacctagtctttgcctcatggaggacctcgctgacgtattataccagcctctgaacggtctggacccctttaactggtcccgggccctcaggctctatgtcttcttgagccatcctttcgacgaccagcaccatgctcaccacctctgcagccactgcaatgtacaagtacagcgactcccctagctccggagctaccagtatcggcagggacacaaggtgttgcttcaactcctggaaggcttgttccacctcttcggtccaagagaatgggccggacttctgcaacagcttgaagaagggtagcgccctctcagccagccttgaaatgaagcagctaagggcggctaatgaccccgtagcttctggacatncttgatacgagccagaggccctatcgcctcgatcgttttgatcttctccggatttgcttcgatgccc

SEQ ID NO: 73665 - DNA, 335 bp, Zea mays
  unsure (1)..(335): unsure at all n locations
atccttaagcaccgcngctgcagctatcaagaaaattatacagaagtgtagaatgtgttgtatgctgncttaatggcctctaagaagcttcngcattattttcaagcattccatataattgttccttcatcacagcctctgaaggatatcatgaggaacagagaagctactggaaggattggaaagtgggctgcggaactcaacgaattcagcattgattatgtgcatagatcctcaattcagtcccaggcgttagcagacttcatcgctgactggacgccaggggctcaagaagaagaagcaaataaagatgccgaagcttggatagtgttctg

SEQ ID NO: 73666 - DNA, 416 bp, Zea mays
  unsure (1)..(416): unsure at all n locations
tcgtcgtctgaaagaaaattaccctgcatgaaatagatgatttcttttctccaatcttcactatatataagggatatgttgaggattgctctttcaagaagctcgaccgaatgtgcttttattgtttcaaaaaatacttccgaaggtatgggcagcccctgngctgctgacttagccaatagatcagcgtattcattttctccacaaggaatatttttgacagagaaaccttcgaaggaagcctcaatccttcggactgtatctagatacctttcaagcttcaggtctcttgctttgtaacttttgtcaatatgaccagaaataacttgagaatcagttttaagaatggcccttctgattcccattgcctttagtttccgaagacccaaaagcagagcttcatactcggcgatgta

SEQ ID NO: 73667 - DNA, 422 bp, Zea mays
  unsure (1)..(422): unsure at all n locations
ctgcaagctgtgaaggttcttcattcccacatgtgctaagcggcgatgccacagccagcccatgctagtcttagcaattaagcatgcatctagaccggcctcttcttttgcaaaatcaactaaataaagtttgccgtctaatacacccttaaaagctaatgaaccatcacttcttctaaagacagacacatctacattagtaaatagacaattatatcccatattacatagttgactaacagatagcaaattatatccaagagactcaactaaaaacacattagagatagagtgctcattggatattgcaatcttgcctaaacctttcaccttgccttgtttcccatcaccgaatatgattgaatcttgggaatccttattcttgacgtaggaggtgaacatcttcttcntccncgtcatat

SEQ ID NO: 73668 - DNA, 440 bp, Zea mays
  unsure (1)..(440): unsure at all n locations
acatcttacatatgatttgtgagatcatgtctctttcattcattgcttaacatacaaaagcggcgtgtatcaagagggtcactgaaaatatccgctaattgatcttccaacctgactccttctaaaatgatatctcctttcacaacatgatctctaaggaagtgatgacggatatcaatgtgctnggtgcgagattgtcgcacatgattattagcaattttaacagcactctcgttgtcacacaacaaaggcaccttttctagaactacgccatagtctagaagagtttgttgtatatataaaatttgtgtgcaacaagcacccgtggcaatgtattccgcttctgcgggtgacaacgcaacactattttgcttttttgatgtccatgatactactgatctcccaagtaaatggcacctctagaagtacttcttctatca

SEQ ID NO: 73669 - DNA, 468 bp, Zea mays
  unsure (1)..(468): unsure at all n locations
tatcaagcctagaaccatatccaagacaacatctgtgattatacggagatttgaatgcatgaagcaatntgtcgataatactcttagcttggcaagtggtagtcgtatatctaataagaagtctctttttcggtctctcactacaggaactggcatggacatcaagagacctttcttgaagcacactgttgatcctaccattcgccctcagcctagaagcaaagtgaaaaatctcatggagattattgagtttttaatgcagttagtatctgatcaaaaaggtatttcaaaggataaaatttccccaaatgacagcctaccttcttatggctttgactcaattgcagtggtccgagcagcacaaaagctctcagaatttcttggtacacctgttggagcaatcgacatctntactgcaagcagcatttcagagctngctaattccttggagaatctggtgcataagtc

SEQ ID NO: 73670 - DNA, 418 bp, Zea mays
  unsure (1)..(418): unsure at all n locations
agcttgtgaaggttcttcatcctcacatgtgctaagcggcgatgccacagccagcccatgcaagtcttagccattaagcatgcatctagaccggcctcttctttggcaaaatcgactaaataaagtttgccgtctaatacacccttaaaagctagtgaaccatcacttcttctaaagacagacacatctatatntgtaaacagacagttatatcccatattgcacaattgactaacagatagtaaattatatcctagtgactctactaaaaacacattagagatagagtgctcattagaaattgcaattttacctaacccttttaccttgccttgattcccatcaccgaatatgattgaatcttgggaatccttattcttgacgtaggaggtgaacatcttcttctcccccgtcatat

SEQ ID NO: 73671 - DNA, 458 bp, Zea mays
  unsure (1)..(458): unsure at all n locations
tgtgttactgggataaaggatttcctttccttttcaagcagcccaatgcatgataacctttacacttggcagaatttgccatgccttcgtgttattttcagccataaagcgcaagatatatctatattcatgctttcggtgtgcatgaaacatttcaaagaaaacaaattccgtaatatggttaatctcagttttatttccaaatcagtatggaaaatatagcttttataaacatgctcctttttattattacaaaaaaaaacagaaacagtgtctgatatgcttcaatcaaacgtaaattgggattctataaaaatacataataacataaatacatataaagcaagcactanacacataaagccatcctatataataaactgcgattngcaagagctaggatgcctatcaagtatagtataggtcttccggtgaagtgcccactaagaagggaacat

SEQ ID NO: 73672 - DNA, 432 bp, Zea mays
  unsure (1)..(432): unsure at all n locations
agctntacaacacggcgaggggtgtgtttggcctcngcggccgcaagaaacacacgctacaagacaatccgatcctgcaggctcggatcctgacgcttgaagggagcagcagcaccctcggcgtcgacaacaccttcggcgaggtccgacctagccttggacggcgacgcggtccgaagatctccactctgaaggacggcgtcatcaccaagcccgggccaaattgccagggtcttctccgggaatccggctcgggcaggcggctcggctagtcaccccgaggcctcggccggctgtccaccgcggacatcagcccgacccgaggcctcggcaggtcaattccggcgtcggtcccgctaacggacgacccggcctggctctggccgaccaggtcttctttccgagccaactctgtctctggtcgcgctgaca

SEQ ID NO: 73673 - DNA, 406 bp, Zea mays
tatgaagattcttcatcccaacgtgggctagtcggcgatgccagagccaacccatgttagtcttagcaaccaagcaagtgttgagttcagctctatcaaaatctaccaagtatagctgaccctctaacactcccttaaatgctattgaatcatcacttcttctaaagacagtaacacctatatcagtaaatagacagttgtagcccatttgacataattgggatacggaaagcaaattgtaatctaaagaatctacaagaaaaacattggaaatagtatggtcaggtgatatagcaattttacccaatcctttgaccaaaccttgatttccatccccgaatgtgatagctcggtggggatcttggtttttctcatatgaagagaacatcttcttctcccctgtcat

SEQ ID NO: 73674 - DNA, 360 bp, Zea mays
  unsure (1)..(360): unsure at all n locations
cacttagcaagggcaaaaggtgttaacacaacaacgctgtccagatttggacagaatcagacttgtgactttaaaatttcataactgaagattcagacatccaaacaaagtgatcttagactttctggaaagctaattaaatgttctacaaattatttgtaaacatcgctggctggtttaacatgtatcaagggtgaaatacactatgaaggctgtgttgtccagaactggacagattcagtcttcagactttaaacatccataacttaatcttcagaccaccaaaaatagtgatccaagactttntggaaagcttggaattgccctacataacttttataatcaccaagaagtgattct

SEQ ID NO: 73675 - DNA, 370 bp, Zea mays
  unsure (1)..(370): unsure at all n locations
tctccnagtatgagggggcttcctggcgaagtactgtattgacggtcctggccgaagcccctagatcatggcctcaatgacaatttcattgggcaccgttggtgcctgtgctctcaaacgcaagaaccttcggacatacgcctgaaggtattcttcgtgatcctgggtgcactgtaacagagcctgagcagtaaccggcttcgtctgaaacccttggaagctagttaacaagaggtccttcagcttctgccatgaagagatcgttcctggtcgaagggaggaataccaggtttgagcaacacttctgacagccataacaaaagatttggccatgaccgcagcattgccaccatatgaagatacttgtgcc

SEQ ID NO: 73676 - DNA, 382 bp, Zea mays
  unsure (1)..(382): unsure at all n locations
agctttgactcgtgcagagtagcgccagtttatnatatcacggtatgcgcgtggatcgctggcgatagttacgtgtaccctccgtggcaagatgctggacggtggtgtctctgtgctatcagttggcgtgtacctgatgtggtcttaacaagcctggtggggaggtgacatatgccacggttaagtgctacatatgtcgggtgatggcagatccttagctgaatttcatcgattctgatcgacgtacctatctggttatgaatacttgttcactgacctacaacctagagtgggatgtgtaccttgtgaataacaaagatggtgtcttgataagattgtgaaattagacctgctgcacacagagtctatttatatttcatct

SEQ ID NO: 73677 - DNA, 413 bp, Zea mays
  unsure (1)..(413): unsure at all n locations
ngcattgcatgtttaaatttcttgtattgcatctanggcttgtctaacctagttgagataaccgccaacaaagcgagtgaaaaagcttaactcgggtcaaacttgacaagtcttagttttaagcttttagcacttaaattcttacttgttatgcaattgttggttcttgaaatatgcatgaggtactacacttagggggagtatttaacactcaaatcactcatgaaaacccctagtgcaagccaaaatgcaaatttcaccatttgcctattttctctaaaaattatctagcctatggcaaaatattntgaanagtatatgagggtgccaatacctgtcccaacaagtgttattttgtgtgattataaagtgggatttggttttggtggaaattagatagaaaaattcaaaaa

SEQ ID NO: 73678 - DNA, 350 bp, Zea mays
  unsure (1)..(350): unsure at all n locations
tccggggagcggaattccggttccctgtcttaattcncgccgagatctacggttcccgcggtgccggtctggcgttcgagagcctcccagttcctgatttggggctctagggtttgcgacgctgcccccggcctaccaccgccatccagctgggattcgtggccccgtgaggttctggacctcgatttcagctcggagtaggtgcgtccagagctcggtcacgaggcccacgactgcttgagctctctgctccgtgttgggtgtaagtccgtacgtgaactacagaccccatgcccggtctgtactgtgaacattatatctggggcgctcgattaggattatggactgtc

SEQ ID NO: 73679 - DNA, 413 bp, Zea mays
aacagaggcgaggaacgcgccgatgggaaaatcggcacagctgtcaaatagatgctcctaaatgaaaagaacggcacatggaacgatatgatacccgacgcggacagggcactgaacacgactgagggcacggcgaccgggtgtactccttttcgccttctatacggatcggaggccacgaccccagaagatataaaacagtgggccgcgtgaacagttccatcagccgtccccgacgtggacgagccaacttcagaggatctcactgacagagaccgagtcttcgccctgcacgccctaaacaaactccaacgcccagacataaagcatggcgcgaccacgcaatcatcccgagggatttcagcgaaggggacctcgtactcgtccctaccactcggacagaagtcaggggc

SEQ ID NO: 73680 - DNA, 451 bp, Zea mays
  unsure (1)..(451): unsure at all n locations
tgctcggcactgcactgttgtaatcatcttctgaatcagtttcttcaacggtagcctgttctgcttcggcagcagggatgtcctccggtgttaccaacccagagcgcttcattgcttccgaaataggaacagtccctcacgatcaacccgagcagtagagtgaactctggccatttgattatgactcacttgaaatttttggtgttgactnttctgttntttccgaagctcttactcttgttccgaagcagaatcacaagcgaagtttcgtctgagcatgatgattaagcttcggctatgactaanaatttggcagcaaaacagtgcaatagcaatgaatgttgtggtaacttcacacctacccgtctgtttatatagtgccgcaggtgggaaggtgaatcagcaaggtctccgacaccgaacaaacagtcacccgcactcactgaacggt

SEQ ID NO: 73681 - DNA, 461 bp, Zea mays
  unsure (1)..(461): unsure at all n locations
agctntcagccgggccatacgacgggcgccgttcccgatctggttctgacccncgactaccatcacaaagtactcgggggaaacaaggccggaactgtggctcgcggactaccggctggcctgccagctgggcggaacggacgatgacaacctcatcatctgcaacctccccctgttcctctccgacgccgcccgggcctggctagagcatctgcctcctgcgcagatctcgaacagggacgacctggtcaaagccttcgccagatacttccagggcacatacgtgcgccctgggaactcctgtgatctcctgaagtgccgccagtagctaggagaatccctgcgggactacatccggcgaatttcgaagcagcgcaccgagctggccaacatcaccgactcagatgtcataggcgccgtcctcgccggcaccacttgccgcgacctggtgagcaagctgg

SEQ ID NO: 73682 - DNA, 430 bp, Zea mays
  unsure (1)..(430): unsure at all n locations
tccaccaatatcgccgtagactgttgaagaccagctgtttatcttcgatgaaattnnttgaattctctgtcttgattaccacatcatccacataagcttccacacgcttgccccagtggtcggctaagcatgtctgaatagctctctgataagtcgctccagcgtttttgaggccgaacgacatggaggtatagcagaaggctccgaacggngtgatgaatgttgttttttcctcgtcttcttttgccaaactaatctgatgatacccagagtagcaatccaagaaagacaacacagaacatccggcggttgaatccaccacctggtctatcctgnggagcccgaagggatcctttggacagtgtttgttgagatctgtatagtcgacgcacatgcgccaatccactttattctntttgagtacaagaat

SEQ ID NO: 73683 - DNA, 307 bp, Zea mays
  unsure (1)..(307): unsure at all n locations
agaggatctgatcacttgtgtgtgtctnngattgaacgcctagctcttgtaagtggttggaagttggaaaacttggatgacttgaatgtggggtggttgggggtatttatagccccaaccatcaaactagccgtgtggtggggctgtctgtcgcatggtgcaccggacagtcctgtgcacaccggacaatgtccggtgcgccagccacgtcaccaggccgttgggtccgacacgtggagctctgcttgctgggcccgcctggatgtcctgtggcatacaccaacatcattgatatattttaattcac

SEQ ID NO: 73684 - DNA, 409 bp, Zea mays
  unsure (1)..(409): unsure at all n locations
ggacctataaatctcagcttcttgaggcggccttcggttcccactgagtaaatntctggttgaggtattaaagatatttcaaatctttcttcatcagattacccccgaagctataatcaggatggggatatttgtctgggctgtaagaagccaggggctggagccgagcgcaaagtgcatctgcaatatgcacgagcttttgtacgagacgaaggctaccgacaaagaacaataccacaacaactntggctactatgggttcattgctcgctctaatgcaagtcacccgatgcccacattccggaaaagatggcctgnggcctggatggaggagtgattttatgttaaaaatgatctaattaaaagggaagacatcaaggaaattatccagcgcccaatctggtctcgc

SEQ ID NO: 73685 - DNA, 467 bp, Zea mays
atcctctgagtcacctgcggctgcagcttctgaaacttccggacagagctttgctagtcttcagttgtaaatacgacggaagatcgccacccatctgggagcgagatagtaagacgaatcccggagttcaaggccaacacaattctgcaccataacattcacttcggtgaccacctggctttcatctaacagccaggctgattcggtcaagtatctcgccaagcactcctcaaagaacttcttctgatcctggatctacatgcccatgtgagaaccatggtttagccaagatagatcgtaactgaactctggaatcttgcagctattaatggctgcaagcagtggctggatccttgatggcaaagaccatccaatgctaggcaagaacatttctgcatatatcctctcattgcttggtctactgatgggagcataaaggaatagaacaagtataaaagaacctcagt

SEQ ID NO: 73686 - DNA, 445 bp, Zea mays
  unsure (1)..(445): unsure at all n locations
ttttctatgtngcactacacctcgcntttatagcacaagttttgatagagttacatacttgcatggacagcagaccctgcctagtagaggtaactactcttattttatcatatattttgtaccgtatgtagactangcctttggcatgtcatatgagtgagtgtcccaccacaacggcaggaaaaggtgtccacatcatcgaatatggtgtagttggtagctgctaaaggtgcacacactttacagtgcatacaaatacccatgtggtctaagggcgtcgtatagtgacatcttttgaccattacacctnctcttgtaacaattgtgataaatggaaccttatgttaatttcttagcgcctatactattganttggtcgagggcgcatatgctatcagagtcatgtttgccaccgtcgtcttggagagagccgaaagatcatatc

SEQ ID NO: 73687 - DNA, 330 bp, Zea mays
  unsure (1)..(330): unsure at all n locations
agcttgccagtacttgtcaaagcaacaccatttaccatcacagcaattgtagaccataccggtaacttggcccttcgcatgctggggactagatatgattggaccttntaagaaagctcaaggaggatacactcatgtactggtagcaatcgacaagttcaccaaatggatagagttcaaacctattgcttccttaacctcagccaaggccgtggaattcatacaagacataatattcagattcggaataccaaacaatatcataactgacttgggatccaacttcacaagtttagaattcttcgacttctgcgagcaaaagggcattca

SEQ ID NO: 73688 - DNA, 452 bp, Zea mays
taccctgtcccattctcagggcatgtggctagataagatagttcttgatcaacaggcctacatacgcatccaatccttaattgacccgggcggaacatcacctgttcctagcccaagtctcgatttaagtatttccatccttaggattgtgtctgttccttaggatgaaagagcatcacagggaactttgcagtaagatcccactattactccaaatgaaaacattcttgcaggtagaagccatcctctcccgggttagatggaggacaacctctatccacaagatctaaacaaggctaagcatttttgtaaatcatattttgatacttcacagaagtatctataagggtatggatatcaaggaaagcaatgcatcaaagggtttccaagcaactcctataaacttaatgcacatttcactagacataagtgtgtgaaaagtatttaaaaac

SEQ ID NO: 73689 - DNA, 361 bp, Zea mays
  unsure (1)..(361): unsure at all n locations
agccccttgatcattgcctcaatgacgatctcattgggaactatatgtgcttgagctctcagcctcaagaaccttcggacatacgcctgcaagtactcctcctggtcctgcgtacactgaaagagaccttgggcagtgaccggcttcgtttgaaaccctgaaagcgggcactaacatatcctttatcttcttccatgacgtaattgtccctggccgaagagaggagtaccaagtttgagctatgctttngactgccatgacgaatgactntgtcatgactgcattattgcccccatatgaggatatggttgcttngtagctcatcaagaatagcttcnggtctgagtgcccgtcatacatg

SEQ ID NO: 73690 - DNA, 358 bp, Zea mays
  unsure (1)..(358): unsure at all n locations
agctcaaccattatggcacccactgcccacatatctatgagatggcgaagtgtagaaatgtccgattacgagctgagttggtccatccatgaatagacaaacactaagccaatagtattttnttaggtttatttttcataccacctgcggaatcatatgcagatgactggagcaagacttctggtgcccgatacctaagacattcaaacatggggattaacaaaagataagacagattcatcttattttggtgtctactgaagagggaacactgctaaccaccgagttgagacatattctgtatatggtggcaatgatgagactacccttgcagaccacatctgctagctttatgaca

SEQ ID NO: 73691 - DNA, 438 bp, Zea mays
  unsure (1)..(438): unsure at all n locations
gcttagaccttacgcccctttctttgattggtgcatangagccttagatggcacacattccagctcatgtatgtcatgagtcgaggcttgaacacataaatagaaaagggtggcctagctacaatgtaccagcaggtatggtggcatgcatgttatgttggcgccattgcatacatgcattacgatgtagtaaatctttttctgggtttatttgtctgtgtacaaggaggtattatctagtggatgctggttactcaattcgcgaaggttacttgccaccatatcggaatcagagacatcacttagaagattttaatcaaacatgagtagagagtgtgcaggaaaagtttaatttccaccactcgagtctacgtaatgtagttgaacgggcttttggactactcaaatcaaggtggcatgtgctacgaggactcccat

SEQ ID NO: 73692 - DNA, 381 bp, Zea mays
  unsure (1)..(381): unsure at all n locations
ctttgaagccatagtgcaagagatacaagacatccttttgtttgtgaantttcagatgtattccctgaagatttacccagatttcctctagagagggatgtagagtttgtgattgagttgaaacctggtacgactcctatttctagaagatcgtaccatatgcccccaatgaattggcagaactaaagacacaattacaagacttgctggggaagggatttatcagaccgagttcatcgccatggggatatccagccatctttgtcaagaagaaggatcaaaccctacgaatgtgtgtggactaccgaccccttaatgaagttaccattaanaacaagtattccattcccaggatcgatcttttatttgatcaacttattg

SEQ ID NO: 73693 - DNA, 463 bp, Zea mays
  unsure (1)..(463): unsure at all n locations
gcttacatctcactctgcagtctgtactattttacgtggtatccacggaccatagtagcctcgacctatgcgttgttgcaaactactccgttttgtttcaaattacaagacattntatcttntttagatacattgcctttactatatatctagacagagtatatctaagtgcttagcaattgctatgaatctagaaaagccaaaacgtaaggagagagtataccaaacaactactacctccattcattaaacgatgtcgtttcagataagtaaaacaagcatagtacaagtttcgctctactgtctaaaccatcatcttttagtgagtggaggcctctccagtcatagataagtgaagttgtgtggctgtcttaagtagtcatttacaaaccttgattacaaacagtcgtgttgggtttgaatgtttggaaatgatacaagtagattttgttcgaaagataca

SEQ ID NO: 73694 - DNA, 479 bp, Zea mays
  unsure (1)..(479): unsure at all n locations
ntanactgaagcananaataattaggattcagaaatacacagaacatgttattcactattctatttgctagttgttagccacttagtctgttacctgaagtcctgaactggccaaacaagtgaagtccttgtctcctgcgatgcgggctgcttctctcctctgcttcttattgacatatataatgctacctgatcttcatatcgttcattattctagccctaaatacacaacaaatttactgattcacgattatgaccataacaatagagctggttagaatacaaaatgcacctaggaacagttcattttaaaaatatgtgaagcctataagcttaaaaaagcagtgattaataattaaatcatgtttctggttggatttctttctaattgttcaacagaaacaattacgtctaagaaacacgtagtagtaatgccgaaggtagtggtcnnncaaatctgtcatgtgtacctaagccct

SEQ ID NO: 73695 - DNA, 456 bp, Zea mays
  unsure (1)..(456): unsure at all n locations
agcttcttcaccatgtgatcactgttatcttgagaaggntgagcagcgcacttcccttttagttgtgtcaagctcatctttagcctctcattttcttctttgagctcttgacatgtatcatcttttgttcctagaaatattagctcaaaggaggatttgcttgtcgacgaacaacaagcattagcacatggtaatatatgtttaaagtgaatacatgtgcatgagtgaggttgttgggattttaagttttctatcacaacctcatgagcaatgtttaacatgatatgatcattcataagattttcatgagaacatagaagcatttcatattgttcttgaaaagctagattttcaattgttagcttttctacttggtccttaagcatggcattcctagttaccaattgagcgacacaatataaagagttatctcgctcaattgacatagtctcatac

SEQ ID NO: 73696 - DNA, 449 bp, Zea mays
  unsure (1)..(449): unsure at all n locations
ntaagctgattacgtacactctgtgtaagacatatctatactggaacatttggtatagaacagtataaagtgggtgacatttagtgcataagtatgctttcaaaaatatatggtgtcctccttcaaaactggaaccaaagatacatgaggcaaacttcatatattgttgagaggctttcatgtgtcagtaatatgaagacaagtaaaaatttgtatcatgaattcatcaactttatgaaataagaaacttatatatcacaattcaccgctaacaattgctcacgaagctgaataacgaattaagtcactgttaaataaattaaatnggacaactttgaaaacatgaagagcataataagcaatttacagagtaaatggacaagtcatgatntgtttacaacaatatggacacacaaatcagtactatttgcacttgatgtgctttaact

SEQ ID NO: 73697 - DNA, 400 bp, Zea mays
  unsure (1)..(400): unsure at all n locations
nttaagctngaaaacgactgcatcactagaaagttgtttctaatatgagtagctagtaagaactgcatacaatgacatctgccgctcaacctcctttcagtgaaatgagtggctatcaggacatcgaattgacagaaacacttctcgtcactgtactcactttcacgtgacttgttcccttccgtttctcttagaactagtaagcagttattcggttttctcgtgtccacgcagaacagaacacacgtacgtcgctgtggaagagctgcattcattcgcatcacatcggtcacccgctggagacagcactgccctgacagggggttggtgaccattacagattcgtgttgctactaccgtaagcagctgctaactctggccttaaaagataaaacacaca

SEQ ID NO: 73698 - DNA, 418 bp, Zea mays
  unsure (1)..(418): unsure at all n locations
atcctcagagtcacctgcggcatcaagcttcggaaacttacgctgcgctcttttagaacgactttntgtagcttcggtgaaactttcactgcaatttttagctctgcattcctgaaggaatatctctttgtagcttcggtattctcgtaagtctgtgacgaaggtatatttcattttgacataaacgaagctagtacaggaaattaaaaaataacaagaaaactacgtttacattgattgttccttattaaaaagaaaacgatagtgaatgtaaaactgtgtcaaaggtacgatatctctcaatatatgtgttntgattctggcacagtactattaactgtgcgagcttcggacccctccctgaaatctcgctgcttatgggtctgttgactcccttctggctgctgacctcgtgagt

SEQ ID NO: 73699 - DNA, 387 bp, Zea mays
  unsure (1)..(387): unsure at all n locations
tcacacctctagactaactcggctgcatcactctttgctgtcagccagnanaaaccagacctaaagaccttcccaaccagagttctggatgctgcgtgtatcccgcactgtccgacatggatctcgtctagcagttgcttcccattagccgaaagaatgcacttcatgaggactcctgttgcaccccttaatgagggtgtagtgagctaactgccttgcgatgcgttctgctgcagctttgtcatccgggtcctcttcattctttatgtatctgatgatgggctccctccagtcattagggtctgactctggctggctcaaaacattgcactcttctgcccgatctaaagaaatactcgggcgtggtagttcttggatgaaaactct

SEQ ID NO: 73700 - DNA, 456 bp, Zea mays
agcttcgtcatctgataacaattaccttgtatgatagatataatttcagtcctctaatcttcactatgtaccggagaaacagtaagcactgctctctccatgagctcaaccgaaggtgcctttattgtttcaaaaaaatacttccgaaggtagggaagcccctgcgccgccgatttggctggtaaatctgcgtgctcattttcacgtcttggaatattcttaacaaaaaaaccttcgaaagaagcctccaaccttcgaaccatatccagatatctttcaagcttcagatctcttgccttgctacttttgtccacatggcctgaaataacttgagaatcagtttttagaatggcccttcttattcccatagcccataacttccgaagccccaacagaagtgcttcgtactcagcaatattatttgtgcaactaaaatcaagcttggctgcataacat

SEQ ID NO: 73701 - DNA, 380 bp, Zea mays
tcttctatccaatggcttcagcacatggaagcatgcaccgttgtggccatgttcatacatttagaaagcgccacttcatcgtcataagaacgcattgctgtacacaagaacaacccagggacattgagtttgggacatgtgagaaattcttaaaataatagagcactaaatataaactcttaccgataagagggactctaagttcattcagtatgtgattgaacaaattagagtttgccaaagtctctggtgccatattgttaagattaacattcaccaacaccaaatcaagggtttgtccgtagatacatatcacaatccctccttctctgcacaaagaacaaactgttaattcaatagtccaatctctatgatgcaca

SEQ ID NO: 73702 - DNA, 168 bp, Zea mays
acatccgttatgttcctgtgcccgcatgtcggggctcagtactcttgtacatgtcccactttagctataaaaggggaggcatgcaacattacaaggcagacccaactcaagctcatgctcgatcgagaggcttagactctcaggtttccacagcaatccaacacacag

SEQ ID NO: 73703 - DNA, 469 bp, Zea mays
tgtactggtattcccttccgattgaaggtacacttgtaattcgacaatgtttctgtttatgccctatcataatatatgattgcttatattgtctttaatattctttatatttcattcctcgctattacttaatgaatgtatgaaggtatgtccttcataaccttcgtccgcaagtcattacatcctaagggaaataatgcttcggggacgaaggactttaacgattaacattttctatgttgccttgttcttaactcatagcatttgagaacaagcccccaacaagcacaatctctggttcttctcttttctgtcgagtacaattttggaaatggcatgaaatgtgatagtactttttcgaggctgacctcatgtaatgcttatcgttctccctcctgcatctgcgcgataatatgaaatcaaaatatgcagtgtatcttgagttttttcctaataaaaatcaacactc

SEQ ID NO: 73704 - DNA, 519 bp, Zea mays
  unsure (1)..(519): unsure at all n locations
aaatgcanattgactcaagcctagctacgggtgcatatggttctccgaaaacaaaccttcgacttgtgaataacccttggccacaagtagggctttgttccttgtcaccacaccatgctcatcttgtttgttgcggaagacccatttggttcctacaacattttggttaggacgtggaactaaatgccatacctcgttcctagtgaagttgttgagctcctcttgcatcgccaccacccaatccanatcttgtagtgcttcctctaccctgtgtggctcaatagaggaaacanaatagtaatgttcacaaaaatgagcaacacgagatcgagtagttacccncttttgaatttcgtcgaggatggtgtacacggngtgatctcgttgtattgcttggtggactctngggtttggcggccttggaacttgtcatctntctcatcttgatcatggcatcntccccttgacattgtctctcttgggtgctcatctctgatctttcttatatctgagctatct

SEQ ID NO: 73705 - DNA, 451 bp, Zea mays
tcttcaccatgtgttcatggttatcttgagaaggttgagcaatgcatttcccttttagttgtgtcaagctccttattagcctctcattttcttctttgagcttttgatatgtatcatcttttgttcctgcaaattctagctcaaaggaagatttgcttgtcgaaggacaacaagcattagcacatgataatgtagtttcaatttgaatacatgtgcatgagtgaggttgttgatattttaagttttctatcacaacctcatgagctacatttaatatgatatgatcatccataagatttttatgagagcttagaagcatatcatatttatcttgaaaagctagattttcaacttttagcttttctacttggtccttaagcaaggtattcctatttactaattgagcgatacaatgtaaagcgttatcttgctcaattgaaatagtttcata

SEQ ID NO: 73706 - DNA, 361 bp, Zea mays
  unsure (1)..(361): unsure at all n locations
acccgcgtcaccggtatactccaatcgtgctcaccggagttcaagaacccgccggcgcacgtggaccgggtaagcccctgcaccgttttcaaattccttgcgcgcatggcctctatgtcatcccgtgaagctcctcgtgcaccctaatcgaactataccgccgtggtttggccggagcatgagccgccgacgacccccgccgcctgcgctcgtggcagngtaactccgaccacctcgaaccgacccgacatcgactgaccgccgaacctccggacgtactgacaccccgcggagcttactgccgcggaagccccaccgctgaaactatgccgcgggtactggttaagccggtcagggagcg

SEQ ID NO: 73707 - DNA, 472 bp, Zea mays
  unsure (1)..(472): unsure at all n locations
tctcctgaacaagcgctgcacttaccgctgagtgcgaatctgtttcatataacaacaaatgagcccctggcgttggtggagttaatgttgttaaatctatcagatattgcttcagttcctcgaaggctttttgttggcttggtccccattgaaagacttcggctgatttcagcacttcgaagaatggtaaatttctttctgctgatctggatataaatctattaagagatgccaacctccctgtcaatctttgggcccccttttttgtagttggtggctccattcgaagtatagcttcaattttacttggattagcttcaattccctttgttgaaaccaagcatccaagaaatttccccttctttactccgaaaatacatctttctggattcaactttatgccagcttgtctgaaactagcgaatgtctcctgcaaatcagcaatgtgattntcctgttttgtgctttttac

SEQ ID NO: 73708 - DNA, 458 bp, Zea mays
  unsure (1)..(458): unsure at all n locations
tccttgcgcccgcacgatcacagatgcattctataatttgttcgtccaccccaccaaagaacatgaaccctggcttggtgccgcagatgatagaataatccttcaactgtgtcatatcttcttcggaaagctggtggccacccacgtgatgtatgtcgtattctgcctcttccgaagagatttctctagctttcttccctttgtctgacgacttcacgaccacctncttactcatagccacatctaatacaagtttgtcattgtcggacatggnggctgtgagatctttgcctttagttgcgatggcagcttcagcattcatagttttggaggcttgcttgcaagctgaggcggggttgtcattgatggagttgtcatatacgtactgtttatccacgctctttgcagtaccgaggatttcttttctataaggtgcagttatccaaggctatactgat

SEQ ID NO: 73709 - DNA, 454 bp, Zea mays
  unsure (1)..(454): unsure at all n locations
atcctaaggggtgatgtgnttagttgagccttgccagtgttatattcatatgcttcttacagtattatatgtgttgcatcatatgaactagtgtttccgctgcgatgcgatgaattattaattggcttctatagtgtaatagatagtcatgtggttaatggtgctttaagattgctttaaattggtatcttagtttaaattggtatcttaaaggtgaatagtggtaggttgatattcctgtgatatatccactaatttgaatggtgtttaactctgattatgtgcatttgtgtgttatagcatcatggtccaccaatttgaatggtgtttaactctgattatgtgcatttgtgtgttatagcatcatggtttgattcttgacacaatgcatcctaaatagtgctaaggtgtagaaatgtttcgaattgcctaagtatgtgcaaattggagtctg

SEQ ID NO: 73710 - DNA, 419 bp, Zea mays
  unsure (1)..(419): unsure at all n locations
gtcttctatctagtggcttggtaaagatatcggctaattggctgtgggtgctcacataagaaattgtgatatcctcctttcggtggtgatctctaagaaagtgataccggatgtctatgtgcttagtgcggctgtgttcaacgaaattatctgccatgcggattgcactctcattatcacataggagagggactttgatcaatttgtagccatagtctctaagggtttgcctcatccatagtaattgcgcacaacaatggcctacggtaatgtactcggcttcggcggtggatagagctactgatatttgtttctctgaagcccaagacaccagtgatcttctcagaaactgacaagtccctgatgtgctctntctattcaatttacatccggcatagtcggcattggaatacccaatt

SEQ ID NO: 73711 - DNA, 415 bp, Zea mays
  unsure (1)..(415): unsure at all n locations
tattacatatgaatgcataagcaaataatgcagtgtcgttgttttatcactgatggccacaagcccacaatgatcagtatgatagctntgtacacttttattttgactagagtttgcttgtcgtatttgttagctatgatgtattgtgtgtctccaggttgcacacaacttgatactctgttagaagaaaattacttagtataaatacatctacaaaattacatcggtatctgttagaagagggaggcatcaaggcattagtcattgtccataagaatgatgtttataacatcctttntttacaaaatctaactaactacacatggtaattatattagagggaagtattaatcaataataatattgttgccttctacctctccaaatcaaggacatgcaaccttcaaccaccatg

SEQ ID NO: 73712 - DNA, 243 bp, Zea mays
tgacggatgttgcttataaccaaacttggtgattcagaccatactattcgagtcctggatcaaaggacaggcttacccaaaagaattctcaatttatagatacatggaaccaccacggaaatgaactcatggaaactcagacttttaaatagaattccccagcttgtagcttcatgtacattgtgagatatgtacaattgttgtaatagaagagtagaccccataccacccccttgcttgaca

SEQ ID NO: 73713 - DNA, 450 bp, Zea mays
  unsure (1)..(450): unsure at all n locations
ntggcattacttncaagcatatcatataatagtgcctttctctatcccctaanagacataatgaggaatagagaagctacatgaaggatcggaaaatgggccatggaacttaacgaattcaccattgattttgtacacagatcctcaattcaatctcaggcgttagcagacttcattgctgattatacgccattggctaatggtgaaaaaacgtcaaatgatgccgaagcatggatggtattttgcgatggatctttggggacctttggcgcaagagcatctgttgtcctagtcgcaccctctaaagtcataacatgttatgcaataaagttagacttcagctgtacaaataacattgccgagtatgaagctctccttttggggcttcggaagctaaaggcaatgggaataagaagggcaatccttataactgattcacaagttatttct

SEQ ID NO: 73714 - DNA, 396 bp, Zea mays
  unsure (1)..(396): unsure at all n locations
ataagcgtttgagtcgntattgtaaactttcatgaagggcacggntgtaaattctcacaggctgtgtcctgcgcctataaatagtgaacagtattcctctactggtcacgcttttggagtattttttgccatcacatcgtctgggaaccaacctttgcaaggcagaggataattgatccaaacttaatatataaggaataaatatcattaccttgatactctattttatgcatttcgatattataacatacagtacaaaactcaacttcgaatcgattatcgtccgcttcgtcagaatcattatcgcgaggaatatgcttgtggacaaggatataaattaacatttatgttgcttgtcttgatatacattgaaacagtcccacagttggtgactta

SEQ ID NO: 73715 - DNA, 481 bp, Zea mays
  unsure (1)..(481): unsure at all n locations
ttacgtgacacttaaaactaagcttctaagggagaacacattttgggactaaccaatgtttattntgttaaatacagggtttgtagagcatgtcaagcagcgaatcaagttggtgttcatcatccacacaagaacatcatgacaaccgacagtccgcttgagctactccacatggatctattcggcccgatcgcttacataagcatcggcgggagtaagtattgtcttgtaattgtggatgattattctcgcttcacttgggtgttctttttgcaggataaatctcaaacccaagagaccttaaagggattcttaagacaggctcaaaatgagttcggcttaaggatcaaaaagattagaagcgacaatgggacggaggtcaagaactctcaaattgaatgctttcttgatgacgaaggcatcaagcatgagttctcttctccctacacacctcaacaaaatggtgtagtggagaggaaga

SEQ ID NO: 73716 - DNA, 403 bp, Zea mays
  unsure (1)..(403): unsure at all n locations
tagtcttatcaattgagcaagtgtcaagttcagctctatcaaaatctaccaggtatagctgaccctctaacactcccttaaatgctatggaatcatcacttcttctaaagacagggacacctacatcagtgaatagacagttgtagcccatttgacataattgagatacggaaagcatatggaatctaatgaatcaacaagaaaacattggaatggagtggcaggggaatacaatttacccaagccttgccaaccttggtttcatccncgaatgtgatcgctctttggggatcttgggttttcccatatcaagagaacattntcttctcccctgtcatgtggtttgtgcatccgctgtcgagtatccaactttgagccccggatgcatanacctacaaaacaa

SEQ ID NO: 73717 - DNA, 403 bp, Zea mays
  unsure (1)..(403): unsure at all n locations
ggcttcgactggggtcgatttttttgctgctgctcgaaactgtgagcgtgatggctgttctgagcattattggccctttcatcgttggcattggatttatgaattgaccggacatgcctgtgatgaagtcttcctccgaagcccctggtcatttaagataacctatacgtgtcctcccttctttggcgaatatcattatcagctcggatgtactcatccatcttctgaaggagcatctccagggtttgtgggggcttcctggcaaaatattgagctgttggtcctggccgaatcccctcgatcatggtctcaatgacaatttcattgggcactgtangcgcttgtgctctcaaacgcagaaaccttcggcatatgcctgaaggtatttctcatggtcttgcgt

SEQ ID NO: 73718 - DNA, 383 bp, Zea mays
  unsure (1)..(383): unsure at all n locations
gtagtcttagcaattaagcatgtgtcgagttcagctctatcaaaatctactaagtatagctgaccctctaacacacccttaaatgctattgaatcatcacttcttctaaagacagtgacacctacatcagtaaagagacagttgtagcccattttgataattgagatacaaaaagcaattgtatctaagaattcaagaaaacatgaaatagaaggcaggagaattcaatttacccaatcttgaccaaccttggttcatccncaatgtatagctcgtggggatcttggtnttctcatggaggaaacattntttctccctgcatgtggttgtgccccgctgcgatatcaacttgacccncgatgataacctacaaacaagttagt

SEQ ID NO: 73719 - DNA, 335 bp, Zea mays
caacaatgccctttgttgatttcataattcatatgtataggtttgagggcatgattgtaatttttacaaactcgtacctcgccactataaataagtgtatagtaccgtgcattgatgacaccttttatggcggtgacgaactgaattgctctacatttgaagatgtttcgtccttttatctcctaattgctttctataaagccaaatgtatagatgtaatttttttgtcaataaaaatgaagaagagtcatattcatgcagttaagatgagttgttatgttttgaccacttcattcattatttacctcattaaccttctacttttatttaatctc

SEQ ID NO: 73720 - DNA, 426 bp, Zea mays
  unsure (1)..(426): unsure at all n locations
cacatcaccaaagctcttactaacacatcaccaaagctcaaactaacacatcaccccttaggataagctctcctctcaggttgagatataagctgtaatgcacatattctcccnctttgacatcaaacaccataaccatattcaagcaagaacatatgatgatgtcaagggacagcagggtgttaaggaggagagacacattatcaaagctcccccttacttattgagcatatgcactaccaacatttaagtaagatacaaatacgcanaaagattactacttcctatngtacctttaccatgttgtagtgtacttcccatcttgagagtatntaatctctcgagagcttctccacacttgtgcctgattctttatcctaaccttttcttggtgctaagacaccaaacttagaacaagttatagta

SEQ ID NO: 73721 - DNA, 412 bp, Zea mays
  unsure (1)..(412): unsure at all n locations
ngatacatatccgaatgtgttgagcangatagcttctgttttcatcagagagtggaaccgacttaaagatgaaaaggctattcagacctcaatagattactatagagttattgtcagatgtaaaggccatgaatgtaattntgtaagggctgtgtcccgtgtctataaatatgtgaacagtatccccgtactgttcacgctgacttggcattcgctttttgcgtcacgtctgtacaatcatttctttccgattgaaggtacacttgttgttcaataatatttttgtttatgttcaataataataaatgattgttcatgttttcctttacattctntatatttcatccttcgtcattatttgaattaattatgaaggtatgtccttcataaccttcgtccgcaagtcattatg

SEQ ID NO: 73722 - DNA, 441 bp, Zea mays
  unsure (1)..(441): unsure at all n locations
gctacactgagactatccaatatgaaatagatcgcaatgcangttttctatcaccattngggtactcaacacctacagtaacatcagcagtagatgctatatgttcaatggaggtattttaatttattacttttctatcttgttctcaatatcataccttgtcttcctctagtgggctcatttgttatgcaaaccaagcatcactttctttngcctctaacaatctatatgttacatgatagtggatnggctcttgcatcaaaatcccaatatgcatcgaggggaaatatttatagaatttgagatggaagggtatcttgacaggttntcttcttactttctgaacttagcatttaaacttatctataatcacagcattatttgtgccgagtagtgcanattccttatttcattngntcaaccattcattactgtatactt

SEQ ID NO: 73723 - DNA, 432 bp, Zea mays
tctgcgcgtcgatccgtcctccgtccgagcatgcgctgctcccttccacgggatcatccctgggaagcgcgtccagcccctcgggcgactcgacctcccagtctgcttcgggacaccctccaacttccgaagggagaccctgacgttcgaagtggtcgggttccgaggaacctaccacgccgtgctatggaggccatgctacgcgaagttcatggccgtccccaactacacctacctgaagctcaagatgccgggccccaacggggtcatcaccgtcggccccacgtacaaacacgcgttcgaatgcgacgtggagtgcgtggagtacgccgaggccctcgccgagtccgatgccctcatctgcgacctcgagaacctctccaaggaggtcccagacgtgaagcgccatgccggcaacttctagccatcgga

SEQ ID NO: 73724 - DNA, 226 bp, Zea mays
  unsure (1)..(226): unsure at all n locations
aattcttcaaaaagcttctcatgtccggaataatctacggtattccggacaatcgacttataattgaaagagatggacttatgcacctgagaattaatcaactangcaaactagttagtccataagaattgtgatggtcgcaagcaccagaatcaaatatagaaaatggtaaggggtcgttcctttaaaatntcccacanagtgtgatatgggagtgtctctatgt

SEQ ID NO: 73725 - DNA, 453 bp, Zea mays
  unsure (1)..(453): unsure at all n locations
taatcagaagccgaatcccacggagctcaatccaatggtttggatcgctgaagcccggcaccatgtgatgcgttacactgctttactgtggcaaagtactagattgactaaatggtaacatattatgatttaaattgattgttttggtgtaactgagttattacttggatcatggcttcgcttttacagcttgccaggggatttataattctaactactggcaagtgaaaacaaaatgtttgtgtagaagaactctggaatttgttttgcaagtgtagtgattagtgtttagtgcctaaagatgttgtggttaacttctgctangaagcgaagcctttactattgaacgcacctgaatcactcgttaatgctaaacatctattggagtacatttccaagacaatcaaaggcaatgaacacacacttgatgcgggtagtggttctgagaataat

SEQ ID NO: 73726 - DNA, 348 bp, Zea mays
  unsure (1)..(348): unsure at all n locations
acgaattgactcaagcctagctacgggtgcataggtttcaccgaaatccaaaccttcgacttgggagtatcccttggccacaagccgagctttgttccttgtcaccacaccatgctcatcttgcttggtgcggaaaacccacttggttcctacaacattntggttaggacgtggaactaaatgccatacctcattcctagtgaagttgttgagctcctcttgcatcgccaccacccaatccaaatcttgtagtgcttcctctaccctgtgtggctcaatagaggaaacanaagagtaatgctcacaaaaatgtgcaacacgagatctagtggttacccccttatgaat

SEQ ID NO: 73727 - DNA, 445 bp, Zea mays
  unsure (1)..(445): unsure at all n locations
ctaagcttctaagggagaacacattntatgattaacaaatgttcattttgagaaagactggatttgtagcgcatgccaagcagggaagcaagttggcactcatcatccgcataagaacataatgacgaccgacaggccgctggagctcctacacatggatctattctgcccgatcgcttacataagcatcggcgggagtaagtactgtctagttattgtggatgactattctcgcttcacttgggtattctttttacaggaaaaatctcaaacccaagagaccttaaaaggattcttgagacgggctcaaatgagttcggcttaaggatcaagaaaataagaagcgacaatggaacggagttcaagaactcacaaattgaaggcttccttgaggaggagggcatcaagcatgagttctcttctccctacacgccacaacaaaatg

SEQ ID NO: 73728 - DNA, 294 bp, Zea mays
ttttgaactcacccatcagatgttatttgcacacgactgtatagggctgatgatgaatggcgcttgcaacgccatacaccaatgagcgaacactcgatgcggcaacgatatagcctccattatcattcatgggatgacactgacaacgcgtttgagttgcttgtcttgcattatgattgccatctcgtattttttatacgacacaaattttttagctgacattttcgtcagggataaacctttatacttctgaatagtccgacatgtgagacccacattgacgcatcttgttac

SEQ ID NO: 73729 - DNA, 472 bp, Zea mays
tattgtctatctacggtgactccattttccttacaatgagactactacatgaaataaacttgaaaaccggtattagtctcaaagacttagattatagagtaaccttcccctgaaagtgtgcatacaagttttgaatacttgtaggagacatgcacttcgatttgatattaagagcggcaaattatttatgatccgagctttggcacaaataagttaaatgataccaattgaaacacaattgaagcattataccacttgtagtatatgtcatatgaaaatatcaattgatgtatcgttttcttaggaatgttaaataagctaagtgttgttcttatcattttaaaccatgtaggtttgctcaagaatatgaatttaaagtgagcaatcctaccatatgatttacctagtatgcatgcatttttaaataaacgtaaataccagttgtagcactatgtatgaatggtaaaactag

SEQ ID NO: 73730 - DNA, 352 bp, Zea mays
  unsure (1)..(352): unsure at all n locations
acaagtgggaggagcgcatcacagcaagaatgtgatgaccacatcaagacccctggagctgctacatatggacctctttggacccgtcgcctatctaagcataggaggaagtaagtatggtctagttattggtgatgacttttcccgcttcacttgggtgttctttntgcaggataagtctgaaacccaagggaccctcaagcgctntctaaggagagctcanaatgaatntgagctcaaggtgaagaagataaggagcgacaatgggtccgagttcaagaaccttcaagtggaggatgttcttgaggangaanggatcaagcacgagttcttcgcccctacacaccacaac

SEQ ID NO: 73731 - DNA, 468 bp, Zea mays
atgaagattcttcatcccaacatgggctagtcgatgatgccagagccaacccatgttagtcttagcaattaagcaagtgtcgagttcagctctatcaaaatctaccaagtatagctgaccctctaacactcccttaaatgctattgaatcatcacttcttctaaagacagtgacacctacatcagtaaaaagacagttgtagcccatttgacataattgggaaacagaaagcaagttgtaatctaatgaatcaacaagaaaaacattggaaatggaatggtcaggtgaaatagcaattttacccatacctttgaccaacccttgatttccatccccgaatgtgatagctcgttggggatctttgtttttctcatatgaagagaacatccttttctccccggtcatgtggtttgtgcacccgctgtcgagtatccaacttgagcccccggatgcataaacctacaaaac

SEQ ID NO: 73732 - DNA, 517 bp, Zea mays
  unsure (1)..(517): unsure at all n locations
tgcagctgagaaacaaagtgaagtatatatgtaccactccttccattntcaaattataagtcgggatagctattctagataattgcttttgctatacaaacctagtagatatatatacattatgtctaacatatagattatatctagatacatattatattaataaagcaaaaccaatgcgaanagtcaggataatttataataagttggaattaagagaataagaaatagtatatacacatgcatgtgttntcatctatctccttgggttaatcacctcaattggtgataatattagagcattaatccggatactataactganacgaaacattactatactatattagttgtgagggtcgtttctttntttctttatatatntatgaggacaagcatatataaatacatactatacactttaaattgctatntggtatataattcatgagtcactttcttttaaaaaaactcacctttagagcatctggtctcgtgtatgtnacactatctgaca

SEQ ID NO: 73733 - DNA, 472 bp, Zea mays
  unsure (1)..(472): unsure at all n locations
ggtgaagattcttcatcccaacatgtgctagtcggcggtgccatatccatcccatgttagtcttagcaattaagaaagtgtcgagttcagctctatcaaaatctaccaagtatagctgaccctctaacactcccttaaatgctattgaatcatcacttcttctaaagacagtgacacctatatcagtgaaaagacagttgtagcccatttgacataattgagatacggaaagcaaattgtaatctaatgaatctacaagaaaaacattggaaatagaatggtcgggtgatatagcaattttaccaagacctttgaccaaaccttgatttccatccccgaatgtgatagctcgttgacgatcttggtttttctcgtatgaggagaacatccttttctcccctgtcatatggtttgtgcacccgctgtcgagtatccaacttgagcccncggatgcatacacctacaaaacaat

SEQ ID NO: 73734 - DNA, 432 bp, Zea mays
gcagatgtatagtgctaagatgggatctccaatgggaccccagttcaccaatccgtcacaatctggacagatcccaaacaccaacgaaacacatgtatagttttgtagtatatttactttaatttacaattataatcatgcatagttctatttggttataaggttctgagaccggacaatgaaaccagatggacattcagtggttgatgcctcctagaggacagattcttcctcctccacaaccaggtatgggatattggctgccaccaccatggggatatcctacacatccaatggggccttggggacgccctccatggctaacacagccacttccatcaccagcggtacgttcctgaatttaatgctagttgatttcaatgctagttgatttccttctaaataaactaagtgtagattgttttatcgtct

SEQ ID NO: 73735 - DNA, 518 bp, Zea mays
  unsure (1)..(518): unsure at all n locations
ggatcttaagcgactgtgctgcagctatgcattcaactagttcattcttatataggaggcaactcatagaaacaatctatgaagacgtcaagatccttatatagaactataagcgatcatctctatcgaagcgtagtatatatacaaagatttcaagcattacttcagttattatgaacctttgtgataattagtgataaaaggagaaattggcccanagatattggagagatatgaagaagagaggatcgtaggtgcaagaatgaagaatagaatgtgatctacattctaagaagcatacaagtagtttggagcatgcttgtgaacatgnttattgcgttntgaaatgtccataacatatgattgcatgcattnggattgaagtgttatcacaagatatgccctagctggtagagtggaagcaaacgtaaaatcctatntcatatgctttctctcatagcatcaacttacatcaaataatatgaagatcacattcttaaatgggaagatcactgatc

SEQ ID NO: 73736 - DNA, 420 bp, Zea mays
ggaactataaaactcagcttgcaaatactcacaaaatctgccacccctgttgtgcagatggaatgcttgtggagcctgtgagagccccacctcataaataggtgtggtgtcccaaacccaaccatctcaagaacccacttgaaacgctacatgatatctctagtgatccccttcctacaacacctcagccacccataaagaccactcccacaaacagattccacataagagagaggcgaggtatcattgtgagtattatgagagggatggtcgtttggctgccttttgctttataaggaagagagatgagaggcagggttttgaggtgaacaggaagaacatgaatcaaccctctcatggtgttcatgatctttgtgttcataggtgtcctgctaggcctagaagtggcttttcctcatg

SEQ ID NO: 73737 - DNA, 403 bp, Zea mays
  unsure (1)..(403): unsure at all n locations
ctactacatggctatttgaaaaatgtcaaacagcagatttcatatttttcgtaagttcttaataacaaaacgttgactatcccaagggtggnggtgttttcaccttggggttatttttgtagggtttttctaagttatccctattntattcaattaanaggtatcctacttattntatactanaatagggtatgatatatntntccagtgaactatattgaataagtatcctaacaaanataggggtgccttctggttcattatttaaatcacattntctattntgcttaaccttaagcatattgtaaaataaaggggaaaaactaacttaatggtgtggacagagagggtttagcattttatntangtaagtangtagatataaacttcttcaaatttttct

SEQ ID NO: 73738 - DNA, 470 bp, Zea mays
  unsure (1)..(470): unsure at all n locations
tgatgaatagccggcttcatttcccacaacataagatgttggtcgaagtttttaaaactttcaaaatatattttcattcgcttatcctcgaggctcttattaaagtaagtgttttcatatgggccatgatgagccaatggttggaaccagatgccaagtgcttctgtaatattcatgaattatcctatcaaacgaaagcaactgggaaagtacaatatcacaataacttcggctgctacaacttcgtgccccgctctgggaccagctaccctgtgcctacatttcagaagaaatggctgggctcttggatgcangagtggttttatgtgaaaaatgatctacaccagagggaggatataaggggcatcattcaacgtcctatatggtctcgctttggcatcaaaagaccttcagtcgcactcgaaaatgatgtgcaagcatgccagatggctgtcaatactatatgcacc

SEQ ID NO: 73739 - DNA, 466 bp, Zea mays
  unsure (1)..(466): unsure at all n locations
cttgattctgaatctctggacacccttggtgggtgataccttaagataaacatgatctcccacctcgaactgtagaggcttccgcctcttgtcatgatagctcttttgcctgtcctgagcagcttctaagttctttgtaataaccctgaccttntcctctgcctcaagtaccaaatctggcccaaatatttccctttctcctgcttgagaccaattcagcggggttctgcatcttctcccatataaagcttcanaaggtgccatctttagactggactggtagctgntattataagaaaactctgccaaagaaagactcttgtcccaatccttttcgtagtgtagtgcacatgcncgcaacatgtcttccaaaatccgggttaccctttctgtctggcatctngttgngatggatgctgacttctatgacatggccaagtgatctgcatgtccaaatcggcccaat

SEQ ID NO: 73740 - DNA, 465 bp, Zea mays
gtaccaaatggacgtgaaaagtgccttcctcaatggaccaatcaaggaggaggtctatgttgagcaacctcccggctttgaagatagtgagtaccctaaccatgtctataaactctctaaggcgctttatgggcttaagcaagccctaagagcatggtatgaatgcctaagagattttcttatcgctaatgacttcaaagtcggaaaagccgatcctactctctttactaaaactattgcaaatgatttgtttgtatgtcaaatttatgttgatgatatcatatttgggtctactaacaaatctacttgtgaagagtttagtaggattatggttcaaaaattcgagatgtctatgatgggggagttaaagtattttctaggctttcaagtcaagcaactccaagagggcaccttcatcagccataccaagtacattcaagacatactcaccaagtttggaatgaa

SEQ ID NO: 73741 - DNA, 466 bp, Zea mays
  unsure (1)..(466): unsure at all n locations
ntatatggcatgaaatgcgggactcctctatgtttggaccatactactagaggaagacagttctttggacctaaacttattcaagaggcagaagaacaagtccgtataattcgagagaatttgatggtggctcataccaggtaaaagagttatgctgataatagaaggaggccactggaatttgaagaacgagattatgtgtacctcaaggtgtcaccacttcgtggaatgaggagattcaaagttaagggcaaattgtcccctcgctatattggaccattcttgatctttatgcgagttggggagatggcataccaacttgagttaccggatagtctatcggatgtgcataacgtgttccacgtatctcaactaaagaagtgtctacgtgttcccgatgaacaactaccaatggaagagcttagtgttcaatgtgatttgacttacacggattacccgatcaata

SEQ ID NO: 73742 - DNA, 474 bp, Zea mays
tgtgtagggttgtatcatcctaaagcatcaaaacgtcttatcaaccctgagtagtataagcgacactagatgcgggtgaagggggcatcgcggaggtagtcccattggcactatgggctggtcctaactccttatagcctcttctacctcgcttccaacctcattggcctccatctctaagtggtgcatgtctaggtggtcattagcttcttcaagttcccgttgcacatcatggagttggttctccaagacatcaatagtgttgtctcggatctccacatgctgctccaaggtggtgatgcgttggctcatcctttccacctgtaggtccttctccaccaactcatatgataagtcgaccacaaagtcttctcggctgtcgaaggtgagcttggtggtttgagcgacgttagcaagatgtgccatagcgtcgctctgcagtgcctgaatgcgatacagcgcactcatgcactg

SEQ ID NO: 73743 - DNA, 51 bp, Zea mays
  unsure (1)..(51): unsure at all n locations
cgacggatcttagcacctgngctgcagctaaaggtaagcctgttttgcctt

SEQ ID NO: 73744 - DNA, 281 bp, Zea mays
  unsure (1)..(281): unsure at all n locations
ctttacatgtnngtaaattgatcatggcgcacatatgatgtgcatctggaagggtgtgacagtatccctaagagctagntagatgtatcttcttatttctgttctaagtgctagttcatgattcaacctatcctctactntacgactattcatcttagcacgattccaatgaaaacatataaaacgaaaaagggtttaacatngagctcatgagaaatggatgttcttgggtaaataactctanatccaactactttgagtacgatcctcaacttaatgat

SEQ ID NO: 73745 - DNA, 486 bp, Zea mays
ttacgtgaactataaaactaagcttgtgaaggttcttcatccctacatgtgctaagcggcgatgccacagccagcccatgctagtcttagctattaagcatgcatctagaccggcctcttcttttgcaaaatcaactaaataaagtttgccgtctaatacacccttaaaagctagtgaaccatcacttattctaaagacggacacatctacatttgtaaatagacagttataccccatgctgcataattgactaacagatagcaaattataaccaagagactttactagaaacacattagagatagagtgctcattagaaattgcaattttacctaacccttttaccttgccttgattcccatcaccgaatacaattgaatcttgggaatccttattcttgacgtaggaggtgaacatcttcttctcccccatcatatggtttgtgcatccgctgtcgataatccagcttgaacccccggatgcat

SEQ ID NO: 73746 - DNA, 366 bp, Zea mays
  unsure (1)..(366): unsure at all n locations
cttagtcttagcattagtctcagacttatttattcttatttagacagggtggatagctatatcctgtgcatttatgattgtcatgatgaactatgttcggtttggatctttgtaatgattggcaccagagtgtgggtatcccctgcattatggtttacctattatgttaataaagctagttatataagtgggaaaccttgtattccactctcctctttatctgagaagctgtgtggtctgtgttggatatcagtgaagatgctcatctgttcagtgctggtgaagaattctattctctttccttatgctgcaagatntgccagatcagttctgatgtgtggttgcattctgcagatgtcacagaac

SEQ ID NO: 73747 - DNA, 428 bp, Zea mays
  unsure (1)..(428): unsure at all n locations
atgatttatccaatttaaaacaagcaccatctcttaacataaattntctatggataaactcaaaacaagagatggcattagtagcacaagcactattttttttatttagaaaccatttatatgaggaaggcaagtgagttgctaaaacagataaacctcataatatggactaagtttgccttgaaccctcatgcacaatatattttgaatgacgtggataatatgcatggttattcaatgaagtctaaagggctgacttaatctatattatggtgagtgtctaattataaaagaatcaaatccaaattaactagatagagaatacgtcacataattttggattggtgaccatatgataatattcattcatctttcaattggacctttatttcataatcaacaactgatgtatatgctcaagtgcttct

SEQ ID NO: 73748 - DNA, 436 bp, Zea mays
  unsure (1)..(436): unsure at all n locations
attatgaggaaccgagaagctactggaatgatnggaanatgggctgtaaagctcaatgaactttgcattgaatatgttcatagatcttcgattcacgcccaggcgttagcagacttcattgctgactggacgccaagggctcatgaggaagaaacatataaagacgccgaagcatggacaatggtttgcgatgggtcttggggaaccttcggagcaggagcggctgctgtgttgatttcaccttccaaagttaaaacttgttatgcagcataacttgattntagttgcacaaataacatcgccgagtatgaagctctgcttttgggtcttcggatattaaaggcaatgggaatcagaagggccatccttaatactgattcccaagntatttctggtcatatngacaaaagttacaaagcaagagacccgaagctcg

SEQ ID NO: 73749 - DNA, 453 bp, Zea mays
tatctatgctatacttgttgcgtccaggaagttgcgcctctattttcaggcacacaaggtcgtggtggtgacctccttcccgttaatggccatcctccacaactctaacgccacaggcaacatcgtcaagtgggccacagagctcgctgagttccaactggacttccagcctcgccacgctatcaagagctaggatctggctgacttcatcgtggaatggaccccttccccgagcgctcctgggagtccggatcccaattcggaccccacacccacggagcccatggtttctgtcttcgtcgagccacactatacgctcttcttcgatggatcttcccgccagcatggtggcagtgccggagtggtcctcatcgacccaagcggagatcaagttaagtacatggtgcaccttgagttcatgccaccaacaacatggcagagtatgaagcactg

SEQ ID NO: 73750 - DNA, 365 bp, Zea mays
  unsure (1)..(365): unsure at all n locations
tcatgtgaaatccttggcacacaccgaggccgccttatcttctgaagatgtaaaagacccctcggatgtagcatgcttcggttgggcgaaatatttcaccgacatctgggaatatggtggccgggagatgtctctagaagtataatgaaatgtgaaaaagtgncaggacgctgaaatgtcaaatgccgtgaaaaatgcggatctgaaggcaataggtttgctactaatttgacttatgttgtattatatgatatggactttttacctttgtacacagacgcctatttatctccaagccgcgaccattggggccccacgcaaggtgatgtaaataaccacggcgaacttatggtatgtgtgtcata

SEQ ID NO: 73751 - DNA, 415 bp, Zea mays
atacatctcgtggatcatataagaatattatggccactatatttacatcatatgtttcatgctggagcgatacctgtgagtattaaaaggttatgtgcgtaatcgcgctcacccagatggcttaatcatggacggatacactacagaatgatgtgattgacagttgtctagattacatcagtgacggaacaatgataggtgtgcctagtcctaaacatgacggtaaactatgtgggagagggagaatgggcaagaaaactcttcgcgttgaggattacaagctagcacatcgtgctcatggtactgtactacaacatcttacgatagccgatccttacatagaggaacacctggatgagctctcgaaagaaaatcacaaccacacagatgactggatcatgatggagcacataca

SEQ ID NO: 73752 - DNA, 317 bp, Zea mays
gagaatacattcgagagcagtaactgagaactggaaaagaagaacacgccctaccccttctgccccctcagagactctacctaaaatctcggacagattctttaggggggaagggtgtaacaccccaggtgttaccatggccatagcacatctatgcattaatgactgtgatcacatgtggaagaaacttgaagagatgagcataagaccttggggaccatgtattaaccaagaatggtaatgaccaatagcattacccaagcatttatgcaattatcaccttgggcaaaagaggattaaaccctatacccttcttg

SEQ ID NO: 73753 - DNA, 450 bp, Zea mays
  unsure (1)..(450): unsure at all n locations
gctgaccccttctatagtgtcttttgccacatgataatcatcttcgtcttcagtcgaagctattgttcttattgaccccgcattagcttcttctggggttgttgtctcatcaccaaataataacttgaatggcgtaaaacctgttgatcttgatacagttgtattgtggctccacaccactttaatcaactcttctggccactttcctctgggctgattaaaaattaacttcattattcctgtcattataataccatttgctcttccgacaagtccatttgattctggatgtctgactgatgcaaaatggatcttcatgccgatttgatcacagaattccttgaaagcttcggcatcaaactgtgttccattgtctatagttatagnctttggtacgccgaatcgacaaacaatgttttgccaaaagaatttctggactgtgactgaagt

SEQ ID NO: 73754 - DNA, 333 bp, Zea mays
  unsure (1)..(333): unsure at all n locations
tggcgctcgtcataatatcttccgccaaatcctcaaacaaaggagggggaaagactacaagtcccgctctatgaaggtttgctacaaatgtggcaagcccgatcattctattgccaaatgtcctatgtctagtgacagtgaccgaggcgacgacaagaacgggagaagataggagaagaagaggtactacaggaagaagggcggcgatgcccatgtntgtcgcgagtgggactccgacgagagctcaagcgactcctccgacgacgaggacgccgtcaacatcgtcgtcaccaaaggacttctcnttctcaacgtctgccacaagtgcctcat

SEQ ID NO: 73755 - DNA, 480 bp, Zea mays
  unsure (1)..(480): unsure at all n locations
taaagaattgcgataacaaggaggaccttcgaattatcaaatattcttcgaagcaacaaatagtcgttctaaggaacgcagagtaagtttgctgaagtcataaaaagccgttccaaagggagcgcagtgtaagttttctgctccaaagtcgttccaaagggaatgcagagcttacagcgaaaagtcaacgctgataccgcctaaagtaaaatgcgaagcgcgaaaagtcaacgcgaataccgctgaaagtaaaaggcgaagaagctcctaagggaggcttacagcgaaaaataaacgctgattccgctgaagtaaaaggcgaagaagctcctaatggaggcttatagcaaaaagttaacgctgattcaaaaaaattatgtgttntatcgcanggatgtgcgtgtgtcttcgggataaataccatcttacatagcataacatcattacatcatttcgcatagcataagcatcatacatcat

SEQ ID NO: 73756 - DNA, 430 bp, Zea mays
  unsure (1)..(430): unsure at all n locations
ttaaagagttntgtgcgcaaatnggcacgaagatccattttgcatttgttaggcatccagagtcaaatggacttgtcgaaagagctaatggcattataatgataggaataatgaacttaatcttcaatcagcccaggggaaagtggccagacgaattaatcaaagtggtgtggagccacaacacaacaatgtcaaggtcaacaggctttacaccattcaaattgatgtttggtgatgaagcaataaccccagaagaagctaaagagggatcaataagaacagtggcttctgcggaggacgaagctgattattctgtggcaaaagatgttatataagggatcaagcttcangttgtggagaatatcaataaatatcaagccgaaacaatataatggcgcgacagaaaagttcggttaataaatatcaagcc

SEQ ID NO: 73757 - DNA, 379 bp, Zea mays
  unsure (1)..(379): unsure at all n locations
ctacctccatcaatgatcaaatgacatgaacgctccttaatgacacactntgtttgaaacaacgtatgtcgctgattctgctctgccttctccatttgtgcactaagcacacgctgtacaatgaggctctcataatgctctgcatcatctgcaccaatctgttcttcgggtggttccttagtgcctgcatcatcagccgcaagcaaagcaagtgtagcttcatccanatcactagcagaagaatacccaccatcgtcttttaccaccataacacgctgattatgacaatcacgctgcacgtgtccatagcccttgcatcgataacacagaacatctcttgtctacccgggaggtactgaaaggcactacctgtggttct

SEQ ID NO: 73758 - DNA, 478 bp, Zea mays
  unsure (1)..(478): unsure at all n locations
tacggaacttatatactcagctgcacacatatctctttngaataccttngatcatatcttctctatatgctatgactaacgtgttttcaagtctatttcaaaccaagtcataggtatattgaaagggaattggagtcttcggcgaagacaaatgcttccactccgtaactcatacttcgccaacactccgagcaactctctcttctttgggggagaaatgagcatcaaagaaaagaacttcatccctgcggaagagagtaaaagctcaaaagcttcgctttctggtataatcttaactcatttattttatgaccaaaggggaagatagcacttagagggctctaatgattccgtttttggcgattcatgccaaaaagggggagaaatgagcccaaagcatattgaccgcaccaccaccaatttcaaaaacttagtgttttcaaaagaagtatttaccaattggtatcctattgtgttc

SEQ ID NO: 73759 - DNA, 469 bp, Zea mays
  unsure (1)..(469): unsure at all n locations
actccccctatatgagtattctnctttagaaagagntttttctcccctttagagatgaagaanaggctcccctgatagagatcttaggaaaaagcatgttgaaaatagaggagcaagacatganttgaaaagactaacttcccttatgcataggtaacagaatatgagttaaccacttatgcatttttagcaacatggaagtatatgatatgaaatatagtctaatcaaatattggagaagacatgtaaatgatactagatgtagtctcaaaagaataccgatgaaattcaatggcgagcttgagagacatgagagttcttggagatnttgcagtggaatattggtgtctttctccggggacctcattntccttancatgagactatcacatgaaatagactgganagggtgtagtctcaaagtattagattatagagtaccctcccctgagatgtgatacaagtttga

SEQ ID NO: 73760 - DNA, 456 bp, Zea mays
  unsure (1)..(456): unsure at all n locations
tcagcatctntacttgcttcttcctcctgagcccctgtcgtccattcagcgatgaagtctgctagcgccggggactgaatcgaagatctatgcacataatcaatgctgaactcgttgagttccgtagcccacttttcaatccttccagtagcttctctgtttctcataatatccttcaaaggctgtgatgaaggaacaattatatggtatgcttgaaaataatgtcgaagcttcctggaggccattaagacggcatacagcaccttctccaattctgtatactttttctttgataaactgagaacttcggagacgaagtatactggagcctgccttttcaattgtccttcaagcttctcctggacaagcgtcgcacttactgcatagtgcgaagctgccacatacagcatcagatgagcccctggcgctggtggaagtaangggtgtaaatctatc

SEQ ID NO: 73761 - DNA, 411 bp, Zea mays
  unsure (1)..(411): unsure at all n locations
tcgaccggatcttaagcgactgngctgcagcttcttctgcatggttaacggcggattatatcaccatagcgtgcgtatcttggcatagtcactgtgtacggtcgcttctctgctccatatcctacctttntgctgtgagttccaagtcaagatatggtcggngtanggagatagagagggaagaagtttgctgtgtcagctatgtccgaactgagacaaaagtggtgtcaagtcgtgtctagcgccctatggtaggtgtcatctctntccagggtgttctanggttatattggcgccactntgtcaatngngtcgaagggttntgaatatnggattaaggtgaacatgtggaatctttgtgcaagggttagttnttgtacttangcaaaaactgaattcttccttgtgctg

SEQ ID NO: 73762 - DNA, 415 bp, Zea mays
  unsure (1)..(415): unsure at all n locations
ntatcatatggacgtgaagagtgccttcctcaatggacccatcaaggaagaggtctatgttgagcaacctaccggctttgaagatagtgagtaccctaaccatgtgtataagctctcaaaggcactttatgggctcaagcaagccccaagagcatggtatgaatgcctgcgagacttccttatcactaatggggatcctactctcttcactaaaactgttgcaaattacttgtttatatgccaaatctatgttgatgatattatatttgggtctactaacaagtcaacttgtgaagagtttagtaggatcatgattcagaaattcgagatgtcaatgatggnggagttgaagtatttccttggatttgaaatcaacaaatccaagatgacaccttcatcacccatacaaagtata

SEQ ID NO: 73763 - DNA, 251 bp, Zea mays
tgacatactatgcatatctcacatattcgcactctagactagcgcacagcatgattcctgaatcgtgtggagcgatacgtgtgtgcttgctaacatatatagaacgatctcactgacagctctacgaactcacacgataagcccctgatcaattattgaatgggcaagccaagcctttgaccactctgcctatacatttttaatcaccgtccgcgtatcacattatactcaagattgctacattatgtata

SEQ ID NO: 73764 - DNA, 243 bp, Zea mays
tacggacacttaaaactaagcttgttgctcacgatactcttagtgctcccgctgtcttttccattatccacacaacatatgtgggaattgcaatgggaagaccaacctcttgcaaaggtgggtccatcgaaaggcctccattggccatcttattcttcttgctacatgttctcctttagacatgtgtgcttgttccttagagaacctctacgatccatcacttcaacatgtgagactctatat

SEQ ID NO: 73765 - DNA, 415 bp, Zea mays
  unsure (1)..(415): unsure at all n locations
caatagcaaagaatgctgtggtaacttcacacttacccgtctgtttatatagtgccgcaggtgggaaggtgaatcgtcaagtcttccgcaccggacgaacagttgcccgcacccactgaatggtgggccacagaacccgagaaggtgaatcgccaggacgcgcgtactcgttgcatggtgggaccatttcacgctcggaatattgtgatcgtttctcggcaacgagcttagggaaggtgtgttcggaccttctgctctccgaagcatgngagactttttcacggatcaagctcgttacgaataacgatctancaccgcgaaggggctactggtgggggtatgcttcgtcgccgaagatcctgtaagaaatacaccttcaccagatgctctcanaagcagtgtcgaagctatcatc

SEQ ID NO: 73766 - DNA, 436 bp, Zea mays
  unsure (1)..(436): unsure at all n locations
tcggcctctccgcttatccattcaataacacccttatggttgcctcgtataaagttatcttcgttggaataagcgtccacattggcgaagctagcctttatcttctccacgtagctcanggatttttcgaagcatctttctttggatgcgcgaagttcttcaactgttttttctaaatagttttttccaatactcactaatatctcggttggcctctgcgagaccacattttccttggcttcggtcaactgtttccgaaggtcttcaatctcaattttttgggcatcagattgatttttgaagctagcttcatcctcctttactttatccaccaatgaaagtagaatcttgtctttttacgtggcttcgtttctcagcctgataacctctgatcgaaggtatggagagctatagtgcaactctcatcttcagcatt

SEQ ID NO: 73767 - DNA, 257 bp, Zea mays
tgcagcttggaaattcttattcctcatgtgctagtcggcgatgccagagccagcccatgttattcttatcaattaagcaagtgtcgagttcaactctatcaaaatctactaagtatagctgaccctctaacactcccttaaatgctactgaatcatcacttcttctaaagacagtgtcggggaccataattaggggtacccccaagactcctaatctcacctgttaaccccatatcacaaagctgcgaagcctgatg

SEQ ID NO: 73768 - DNA, 456 bp, Zea mays
  unsure (1)..(456): unsure at all n locations
tcggctatggttaanaattgtggcagcaaaacagtgcattatcaatgaatgctgtggtaacttcacacctacccgtctgtttatatagtgctgcaggtaagaaggtgaatcgtcaggattttttacaccaagtgaacagttgcttgcactcgctgcgcggtggaccgcatagaccaaatagtaactctgcagggtgggaccactacgcgtccggaaactgaatcgtttctcgacaacgagctcatggaaggtgtttttcggaccttcggcttcccgaagcctaagatacttttttttcacggatcaagctcgttacgaaaaacgatctatcaccgcgaatgggctactgttatgaccatgcttcgtcgccgaatgtcctgctggaagaaacagcttctgctgaagctgtttgtacgcgatgaccgaaggttcctcttcatgaagcttcggaattac

SEQ ID NO: 73769 - DNA, 354 bp, Zea mays
  unsure (1)..(354): unsure at all n locations
gctttcctgtcgagaatctacagtattccgtacagtctaattagaatagttgtagatgaacttatgcacctgtgaaatgatcaactatgcaaactggttagaccataaggtttgtgatggtcgtcaaacaccaaaatcgattataggaaatgttgagactatttccctttcaagcggngtgcgagctcaaaaagggggccagggcgtgcagaggtggccggaaaacgcgcgatgtgggcacctncacggcgggaggatgggagatgtatgaagcggatggactganggtggtgtcgtggccacgagagggattccgaacggcggcaacactgatggaaagggtcaccggcaatg

SEQ ID NO: 73770 - DNA, 457 bp, Zea mays
  unsure (1)..(457): unsure at all n locations
actaagcttctaagggagagcacattntatgactaacaaatgttcattctgagaaagacaggatntgtagcgcatgccaagccgggaagcaagttggcacccatcatccacacaagaacatcatgactagtgacaggccactggaactcctacacatggacctattcggcccgattgcttacataagcatcggcgggagtaagtactgtctaattattgtggatgattattcccgcttcacttgggtgttctttttgcaggaaaaatctcatacccaagagaccttaaagggattcttaagacgggctcaaaatgagttcggcttaaggatcaagaaaataagaagcgacaatgggacgcagttcataaactcataaatagaagactttcttgaggaagaaggcatcaagcatgagttctcttctccctacactccacaacaaaatggtgtagtgga

SEQ ID NO: 73771 - DNA, 437 bp, Zea mays
  unsure (1)..(437): unsure at all n locations
gctcacttacttccagacttccatttttttccggggagttcatatcgatgtgaatttatcatattacttattcgtctcttgatggtgactgtctgttcctaattagaatggatggatgtatgtatgcttgcaatcgcatatataacgatccggttgaagagcccgaggaactcgcaggagaagcccctgagcagcaatcggttggtggaggcaagtgtcccttgacctatctntgtcctattcattctctaattcancctccgctttacacatgtatacctaaggatagactatgctttgttatccatatccttgtttacctatttgggttggattattattgtttagctttaagctattgctcanactctaatcaatgaacatgatgagattatctatgatacgctgtcttcccctctcttgtatgatgctgactt

SEQ ID NO: 73772 - DNA, 471 bp, Zea mays
ttttggtgacgaaggtgctgaaatatctagaagtattctgttttctaatggttagccgcgttcttgaggaccttcagaagatgaatgcccccaacaacagtcacaattatgacaggcacatattcatatctaccagagcatgcatccacttgaacagagatgtgctcgtacaatacaagtatcataaccatagaaataatggtttatgactgctaaaggcagtatgtcatcatcacactaaaccggttcaaggtgaaacacagaaaagaaaacgcagagagcatagatagcagagaaatagtctgtgtaattcttcacccaccatctgtcaaattagaaagcagagataacaaacaacagcataaggagaaaccagatcgatcaaattcccctctatgggagcatgctcttgttccacccttcctgcagatctggaccataacccatattcctcactctccgatatatgga

SEQ ID NO: 73773 - DNA, 381 bp, Zea mays
  unsure (1)..(381): unsure at all n locations
ggagtccatcatccacattagaacataatgacgaccgacaggccactagagctcctgcacatggatctattcggcccgatcgcttacataagcatcggcgggagtaagtactgtctcgttattgtggatgattattctcgcttcacttgggtattctttntacaggaaanatctcanacccaagagactntanagggattcttgagacgggctcanaatgagttcggcttaaggatcaagaagataagaagcgacaacgggacggagttcaagaactcacaaatngaacgctttcttgaggaggatggcataagcatgagttctctctcctacacccacacaaaatggtgagtggagagaagaatcgactctattggacat

SEQ ID NO: 73774 - DNA, 449 bp, Zea mays
ataaatactaagctgagcataaaaaagagttagaattctcaacagctctgttcatatgatcatcttcactgatctccaacacagaccacacagcttctcagataaagaggaaaggagaataatgggtttcccaactatattactaactttattgacatagtatgtataccaatatgcaggggatacccacactctggtgacaatcattacagagatccaaaccatacatagttcatcatgacaaacataaatgcacatgatatagcatactaccctgtctaactaagactaactaaaactgagactaacgctaagactgaagcttctatgtatatatttatttcgtattaattacaagatccaactctaacgatctatggttctagatttatcctggtcttgcaagcgggattgccataagactggtgtacacgctgatgtgagcggta

SEQ ID NO: 73775 - DNA, 429 bp, Zea mays
  unsure (1)..(429): unsure at all n locations
gatcttaagcgactgggctgcagcttcgcttcngcagttcagcaagaacatattttgacaccgttgccggtgtcggcgtctgatggattacatctgttacttgaataattctccgcttttttggcttcacaggactttntgttgccgaagctgccttgtccctctgaataaacttcgtcagttccaatgccagcggacttatcctgataggcaagggttcagtcattaccttcataatctcttctacttcaacagcagaaggagaagcaggagtatcttcttcttggaccggcgtttccggctctggggatagcacttttctcttttttgccgagccaccttcggctcaggatttaactcttcagcactaatgttatcataatctttctttnntctttttgctgtcttgatgacttcttcgtcagtagt

SEQ ID NO: 73776 - DNA, 332 bp, Zea mays
tccatcgatatcgtcgtagactgttgaaaaccagctgttattcttcgatgaaattttccgagttctccgttttgattaccacatcatctacatatgcttccacacgcttgccccagtgatcggctaagcatgtttgaatggctctctgataagtcgctccagcgtttttgatgccgaacgacatggaggtatagcagaaagcaccgaacggagtgatgaacgctgttttttcctcgtcttcctttgccaagctaatctgatgatatccggagtagcaatctatgaaagacagcacagaacatctagtggtggaatctaccacctgatctatc

SEQ ID NO: 73777 - DNA, 449 bp, Zea mays
  unsure (1)..(449): unsure at all n locations
ataactntatcttcaattntccattcaaccaggcactcaaaaatagcttgagctatcactacaccagtgtggtgaggatccaactccacaaagttcagtacacgacattgcaattcccaatttacatctatgtagtgtccaaccatactcatgtattggacattntggttagatgtccacagatcgatagtcaaacttatggattcaatctctctaagagttttctntagaaggtccttttcagattcatacactttcatggcactcattttatagtctttctaccaatactttcatagctggtattcatccatttcatcaagatattaaaccatttgtgctctaccattcgaagtgaatactcatgaacaataatcatcttagcaantcaaattctagtgtgatcatgatcatattcagtgggaataacaacangatgaccatcatca

SEQ ID NO: 73778 - DNA, 459 bp, Zea mays
  unsure (1)..(459): unsure at all n locations
tatgtccgacggcttcagccgtcggaagttggtccgttttctgtattgctcactcggttcctcgcattggtcgggttctcctagctcgcctgtaaaagctttatcatgtcgtcctttgttggttcacttctcttatcctgcttcagttattaactaaacaccacaagtgataaaattgttcgctccatggacattcgggtcatcgcatcgtctggttcttctaactcgcctatataagtttcatgatgtcattctttctcggtttgcttctcttatcgtgcttcagttattagctaagcactgcaagcgacacaactatttgcttcattcccttcttcctggtcggtaatatggatggtgctagatatgctctctatccaataaaatattagatcaaagntatattactcactatctttatatgattagatcgtatctaccaagtcatgcatatggtca

SEQ ID NO: 73779 - DNA, 418 bp, Zea mays
  unsure (1)..(418): unsure at all n locations
tcacactcttcattggtgatactntaaggtacacataatctttgacttgaaagtacaagggttggcgtcgtttgtctgcataatctctttgtcgagcttgtgccttttcaagttatgtacgattcattgaaccttttcttccatctctttcaccatgtcaggcctgaaaaaccacctttctcctgattcagaccaattcaagggggtacggcactgtcgtccatacaatgcttcaaatggtgccatcctaatactttcttgataactatnggtatacgaaaactctaccagtggtaaacattcatcccatctttgtgggaattccagaatgcatgcccgcaacatgtcttcaagggattgattcactctctcaatctgtccacttgtttgagtatgatatgcgaactatggagcaact

SEQ ID NO: 73780 - DNA, 467 bp, Zea mays
tgtaggggttgtgatgtcgccacttgtatcctcttgtttgaatgctcccaaactccatacattgtttaacagctccaagttcctaaataggaaaacaaaacagacttagaagtagacaatgaataagaaaaccaaattgagtactacgcgaattactggttttcctttatgcactttccagattttgtacagaaaattgtaaaggaggaagagaatgggcactaagaatgattagcttcaaaaaaacctgattaagtgtgcatacttggtcaaagcctagcagaagatttgcagacttcaaatctctgtgtataatgttattctagtgcagataatccattccttttgagatattgaacttcaatactgattcttaaaaccaccattactacttgtgtgatctgtatttctagactggaaggtgagaaaacattagacgtgttcataggcattactctgaagatgca

SEQ ID NO: 73781 - DNA, 411 bp, Zea mays
  unsure (1)..(411): unsure at all n locations
gatcttaagcgacgcggatcagctgctaatcttgtaaatgactctaangacgctgagagttcatataacttgtgtattctcactacacctagtattggtaaactaatcataactgatcatactactaccgctaaagaagcacggctttccgaatcggtcgaccatatatacatcccgcccagccccatcccccgaccctgatcctgccacagcgaacgcgaaccggtaagtcccttttcatcccatcgcgaccctaatcgcccgcgcggatgtcgtcgcggaattgcccgctctttacgtgccaaccggcctcaccctgccgtctccgccctcacgccctctaacgcgcggcgaggtcacagacctctcgcgcatcacgctatacgatcttccacgccctcggacctatgt

SEQ ID NO: 73782 - DNA, 447 bp, Zea mays
tatcttggcgtgctgcacgcatttggcttatggaagtatctgtatcactgccatcctgtgatggccggtgggcaacatcaattggtcggaggtgccagtttagagatgcgccgggggcggaagaccgagtatctcgagatacctctcaaggacagcattaaaggttggcgtctggagtggtttataatggacaattatggaaactctcttcctcctcgctcatggagacaggcagacgttcgcactccgagttggactgaatctcccacggaccaagaagtatccgaggcgggcgtgttgcttactgaggttggattactgaaagagagaggtctgactgccgaagccgtggtcacagattttgttttcaaaaacattcatccgctgaaggacatggcctatccggcatatctttaccgatggctggccgactcaactcgagttact

SEQ ID NO: 73783 - DNA, 471 bp, Zea mays
  unsure (1)..(471): unsure at all n locations
aatggaccaatcaaggaggatgtctatgttgagccaacctccggctttgaagacagtgagtatcctaaccatgtatataagctctctaaggcgctntatgggctcaagcaagccccaagagcatggtatgaatgcctaagagatttccttattgctaatggcttcaaagtcggaaaagccgatcctactntattcactaaaactctngacaatngatttgttgatgccaaatttaatgtgatgatattatatntgggtctactaacgaatctacatgtgaagatattagtaggatcatgacacanaaattcgagatgtctatgatggngtagttgaagtattntctaggattccaagtcaagcaactccaagagggcaccttcattagccaaacaaagtatactcaagacattctaaacaagtttggaatgaaggatgccaacccatcatacacccatggaaccaatggca

SEQ ID NO: 73784 - DNA, 410 bp, Zea mays
ttcctggcacaagaggtttaactcggaggggtcgtgttcttgtccttcttccggagctataagttctagaggatcggatccctcttccgcttatcaaacacagataataacaatacatcaaacatagtgactttagcggtgtgtgcaagttcttatactttattattgttgtgccctataattatttagactattttggtgcataaaatattggcatctaaatatatatgtgaaaaatgggaaaaagaaatgggaaaggaaaaagagaaaggatctcccagctagccgggccggtggggggaatttggcccatctggcgcgagcgcgcgcgggcgggcacactttcggaccacttggcctaaccgcgcggggcgacagcggagaacagcgctgcggcgcgggcccgcacg

SEQ ID NO: 73785 - DNA, 226 bp, Zea mays
ctcagtttatcaaagataaactatacagaattggagaaggtgttgtatgttgttttaatggcctccaggaagcttcgacattattttcaagcataccatataattgttccttcatcacagcctttgaaggatattatgagaaacagagaagctactggaagggatggaaagtgggctgcggaactcaatgagttctgcattgattatgtgcatagatcttcgattc

SEQ ID NO: 73786 - DNA, 473 bp, Zea mays
  unsure (1)..(473): unsure at all n locations
tctaaagggagaacacattntgggactaacagatgttcattntgagaaagacagggtttgtagcgcatgtcaggcagcgaagcaagttggtgttcatcatccacacaagaacatcatgacgactgacaggccactcgagctcctacacatggacctattcggcccgatagcttacataagcatcatcgggagtaagtactgtctagttattgtggatgattattctcgcttcacttgagtgttctttttacaggaaaaatctcatacccaagagaccttaaagggattcttgagacgggctcaaaatgagttcggcttaaggatcaaaaagattagaagcgacaacgggacggagttcaagaactcacaaatcgaaggcttccttgaggagganggcatcaagcatgagttctcttctcctacactccacaacaaaatggtgtagtggagaggaagaatagaactctattgga

SEQ ID NO: 73787 - DNA, 369 bp, Zea mays
  unsure (1)..(369): unsure at all n locations
tctggtacacatcacttttcttgggtaacactggcacagaaccaataataaatatgcaatttccatgcttcagtcacacagttccttcagcaattcatgtgtaaaagtactagcaagtgaagagttcaaacttacattgtgtttagttgcctgataatttttctatcgaagntttcatggtaactaacatgctatttttattgaaaaaaatgtgcacacacactctccttgataacactggacagaaccaataaaagatgcatgtttatgcctcagtccacactccttagcaattcatgtgataattactatcaaggaaagagtccaaacttacattgagcttagctgtctgatattnttttcttgaac

SEQ ID NO: 73788 - DNA, 458 bp, Zea mays
  unsure (1)..(458): unsure at all n locations
taanactaagacttgtcaagtgtgacccgagttattctttntcactcgctttattggcggttatctcaactaggttagacaagccctatatgcaatacaagaaatttaaatatgcaatgcaagtgacaacaccatttgacatttcacataaaatttctgagatcaaggatatttagttcattcctcaacatgcaaaagcgggtcttatcaagtggcttagtgaaaatatccgctaattgatcttccgacctcactccttctaaaataatatctcctttagcaacatgatctctaaggaagtgatgacggatatcaatgtgcttggtgcgagagtgttgtacaggattattagcaattntaacagcactctcattatcacacaacataggtactttgtctagaactacaccatagtctagaagaagttgtttcatatataaaatctgtgtgcaacaagc

SEQ ID NO: 73789 - DNA, 390 bp, Zea mays
  unsure (1)..(390): unsure at all n locations
cttagcactgagctgcaacttctctcccacaatggtggtcctgtcttntcctggatctccctcctatcatcgtgcggtactaatgccccagagaagcaccgccccatactntataggcgcaggaggaaatcaaattctttcgccacaggggtgtgattcgggtagcgggatcctagctgaggatgatggtcagatcgatctcgcgcatggaggttacgactgcgcacaaatagcaaagtccgttcgagcatgaagatgtagctgtcatgtctggaccaccagacagcggcgttttcttgtcncgatggatatcaaagctgcaagtggatttgggtgtatgcgtgacactgagtgatcttgactatggatcctatctacccgacgacactg

SEQ ID NO: 73790 - DNA, 453 bp, Zea mays
ttcttgtcggcatgacgaaggtctatgcttgccgattgtgttcgaaactcaaagagtggaagtgagttcaccggaggtgggcgccaatgttggggacttgttctcaaatgctaagagttaagaacaaggcaacataaaaagtgttaaatgttaaagtccttcgtccttcgaagcattatcttccttcggaaataatgaatcccggacgaaggttatgaatgacaagccttcataagtacaattaaatgatgaagaaggattcatacacaatatatgaaaataatataaacactttaaacattgttatcaacttatttttatctgcgttaccgtatcaacaatgacaaattataaatgtacattcggctcgaaggaaagtaagggtacaagcgtgatgcataagcgaatgccaagtcagcgtgaacagtgcgggaatactgttcacctatttat

SEQ ID NO: 73791 - DNA, 419 bp, Zea mays
  unsure (1)..(419): unsure at all n locations
ttctagatgagaagtgcgcacccaagttctattgatgaagcaccagaagaccaatcaagaaaggaatccatgtgggagttcgcaagagaaaggtttgcgtgttggcatcaatgcttcctcaataagctagctgccaagcgaaagccagaagcctgaagatgatctttgagtagccagaattagcgattgcaatcagcaatcagatgctcctcanagggccagatttggtgaagctccatctcctcgaagatgttgcanagntgtgacggaacctcccaagtaattatgcccacctacagttgtccttgtctaacagacatcaaacaccctgtagatgttcctaagtcacttgacangttcggtatcttttcttaccttaccaggaacgtttcacccgtcttgcagacattacagaacat

SEQ ID NO: 73792 - DNA, 399 bp, Zea mays
gagtcaatggaatcatctgtaagtaatttttaagaaatattgggtttgctgagtttgttctttcctttgggctctatttatttatgaattgataacccaacaggtggtgtgagccgaccatgggcggctgatgagcgggaatcatacgatcatgcactggtatttacaaaaaacttgttcaaatagtatttgcaaaaatgttgttctaaaaattattttacattatcttacttgtctatttattgtctttaagtttttttaataaattttagtaggttgtacctctatatttggaacaattgataacaacgagtgaatccatgacgacgtctttcatatgttacctatcttatgtaatgttgtattgtagcttttgaactatgttactttttattatac

SEQ ID NO: 73793 - DNA, 535 bp, Zea mays
  unsure (1)..(535): unsure at all n locations
tcttgagtcacctgaggatgcagcttgttactctgcactacacaacctttctattttgaataggtctaccctcatcgtatgcgtgtgtgtggaaatngaatctgtttatggtatagctattatacttgtatgcaaccatcattggtgtcttggctaaaatttaatctcgtctgatgcttctttacacgtttcttccacctgaatttgatgatgcatgcgattaaagtatatgtgaattccatctcaaataaatctagtaagtttatttcttacttacatgcaacctaagccactcgtgaaaggattgatgttgcatgccggtgatgtctcattattttgaagaccaatngatgatagatagtgagcatgcttgctgcaatggtcattntatcacttcaacnatgcaaaggaagtgtcatgtgatgacaaatatattataacttactccaagtanggcctatattgannaagtgacaaacatattgtggctgaccatgctgtgctaagaacttcatttcaacatcacataattatg

SEQ ID NO: 73794 - DNA, 464 bp, Zea mays
tcagctccatctatattatggattgcttgtgagtcagtccattttccctcggcccttctggcagcttcctgacttccatgaatagcaatgggtccttgatctgaaggtatcttcatgcaaaggtaagcaggatgaagaattgcttcgaaagcattgatggtgccacgaccaataattgcattgtaagggtattccatgtcaacaatgtcaaacacaactttctcagttctggtgttgttgatgaatccgaaggtcactggcatggtgatcttgcccagtgctacaatctgtcttcctccgaagccacagagagggtgtgtagcatcatgaatcttatcttctggctcttgcatttgtctgaaggccttatcaaatataatatcatctgcactgcctgtatcaaccaatacattgtggaccatataccctttgataacgcaagatataaccatagcatcattatg

SEQ ID NO: 73795 - DNA, 319 bp, Zea mays
gacaagaaaagaacaatggtctaaaagcagatctataagacgtaatacaaggaacaggtgctcaccacagttttaccaggtactgaaggctgtccaatcagtactaggcagttaggatctaattccggctactgatatttaaagcatacaagaactagtataatgtctaaatataggaatcactaccaatttgcttttccgaatctgcatcaggtagagataaagctaccgagaatttaaaataaatggaaacacagctgcactagtgaaggacacacgattgcttactggtataacaggatgctcagttgctcacctc

SEQ ID NO: 73796 - DNA, 359 bp, Zea mays
tttggtggttgaatgcccaacacaaatattggactaactagtttgctctaaagtaaatgatatacaagtgcataaaggttcaacacaaaccaataacagattgaagaaagggttcaaaaacaaatgagcataaaaaccttttgtgccctgtctggcgcaccggacagtatccggtgcaccatgttcgtaccatattgaactggccactctcgggtttcttatagcacgctccactataattcatctgactgttcggtgtgccaccgtgactgtctgtgtgccagctgagcaactgctcctttacgcaacggtctactgcaaaagctgaagaatcagatgaacagtgaagaatattgtgc

SEQ ID NO: 73797 - DNA, 396 bp, Zea mays
  unsure (1)..(396): unsure at all n locations
ctatgtggatgacgtggtgatcaagacataatactcanaaaatttcattgaggatntacagctggtcttcaacagtctgcagcgatatcgatggaagctcaatcctgaanaatgtgtcttcggagtaccggctggaaaactgctcatatntattgtcagccaccaatgaattgaagctaacccagaaaagatcaaggctatcatgaggatggaagcaccgcggtcacagaagatagtgctaggcttactggatcatggctgtctaagcagttcatatcgagggtggagaaaaggactaccgtctacaaatgtcaaaaggtggcaaattccagtggacctcagaggctcangaagctctagatgcactgaagaaattcttgacaacaccaccagtgc

SEQ ID NO: 73798 - DNA, 464 bp, Zea mays
  unsure (1)..(464): unsure at all n locations
tgtgaagattcttcattccaacatgggctagtcggtgatgtcctatccgacccatattagtcttagcaattaaacaagtgttgagttcagctgtgttatcattaaaatcaactaaatatagctgaccctctaacactcccttaaatgctattgaatcgtcacttcttctaaatatagtaacacctaaatctgtaaaaagacagttgtaacccattgtgcataattgagaaacagaaagcaaattgtaatataaagaatctacaagaaaaacattggaaatagaatgctcaggtgatatagcaattttaccaagtccttcaaccaaaccttgatttccatccacgaatgtgatagctcgttggagatctttgtttttctcgtaggaagagaacatacttttctcccctgtcatgtggttttgcatacgctangggcagacccggcgggtggtccatatagtccac

SEQ ID NO: 73799 - DNA, 388 bp, Zea mays
  unsure (1)..(388): unsure at all n locations
atagatccctacttgaggttaagtaccctacactatggtcttacttgcaaaatgccataacaatacaacttgcttgaaatatttgcctagcggatgcattctaagtgtatcaaacatatgaaatgttgatgcttatgatgtcatgctgcaattntagtaacagtaacaccaggggtgttacatcctttcccccataaaagaatctcgtcccgagattaaaagtcctagggtaagtagtggaanaggaaatagcttcacgttctatttcctgagtattgggacaaggcaggggtgggtttatggctcacttctttattacaacaattttatacacttgacaaattacatgaagctaaaaagcctgggaaattcttatctaagaagtctt

SEQ ID NO: 73800 - DNA, 453 bp, Zea mays
tgtcacgtcacatgcaacatagcttctcctacgggagatgtttgtcacaccctgttttataatgcataccgaatgcgaaccatgtacatgcctgttggtcacttgttctcaaatactatgaatcaagaacaaggcaacacaattgttaagtattaaagaccttcatcttccgaagcattatctccttatggacataatgatcattagacgaaggtcatgaaggacttgccttcatcatcttatagattaacaagaatgcaaagagatgaaaacatcaagtatataattcattgattcattcgtatttgtattccataaaacatgtatgaataccaatagaatttatattacattgataccttcggcttgctcgaaggtgttgatgcgagggagattaccaatcagcgtgaacagtacgatgctactgttcatctatttataggcacgggacgc

SEQ ID NO: 73801 - DNA, 437 bp, Zea mays
taccgcatttgaagcatgagcgcttcgcctcggctttgtgtcttgctggctgtcccttgcgacctttaagcaccgtcttgaatcttttgatgatgagagccatctcttcatcattaagtgcgaccgcctcaaactgtgccaccttgctaggtagcgcctccttgcttcgtgttgctttgatagcaaggggttgcggctcgttgatcggaccattcaaggcgtcgtccatgtaccttgtctccttaatcatcattcgcccactaacgaatttcccaagaacttcttcgggcgacatcttggtgtacctgagattttcacgtatattgttcaccaaatgaggatcatgaacgtgtaatgaccttatcattatgcggacgacgtcgtggtccgtgcatcgcgtgctaccgtagctacttattttgctgatataggtcttg

SEQ ID NO: 73802 - DNA, 462 bp, Zea mays
  unsure (1)..(462): unsure at all n locations
agtcacttgtgatntacttgatagtcttacaagtgaaccactacctactaactctatttgtgataaatgcaaaatttctctcaatgataacattgctcttgatgaatcaaaaattattggtgagaatgaagtgttagtagatagagtaaacactctaactcatgacctagaaaaggcatatggtggtaaggctaaattggatttcatattgngaagtcaacggtgctctcttaaccgtgaaggtcttggatatgttcccaagaaaggaaagaatgcttttgtaaagcaaaagacattgtttgtgaaagaatgtgacanagtatgtcacaagtgtcacaagaatggacatgttaagaatnaatgtccaagttcaaaatgtatcctcacttgtttgagcatgtatgtcttctatagggtgggcattcgtttntannactcgtcgtttcggttaaaactcagttc

SEQ ID NO: 73803 - DNA, 464 bp, Zea mays
  unsure (1)..(464): unsure at all n locations
tcagacanacgttcaattagttgagtgtagcttcgtctcttactaactgaaatggctagagtgaggtctactgccagagtagcacacgaaggagaaaaagttggagcttctgagatggcccctattttagaaatgatgaaacattctaggttagttgtacaagaaaaacattttgttctaccagaagatgttgttggcaaagctgaaccaactaatgctgaagctgacagtgatgacgaagaagatgatggcattttaagttcgagcaaacctagtcatattgagtttggaaaatccatggttaaagcgaaagatttggttttaatgaagaaattacgatattttggagagaatgatgacgaactagtccggtttcctatggaagaagtgattctagaaccaagaaatgatgaagtcatagttttcataagcttctttatagcaggtctttatttccctttata

SEQ ID NO: 73804 - DNA, 506 bp, Zea mays
  unsure (1)..(506): unsure at all n locations
gcagcttcaatggtctgtattttagatgagtcgtaacanaaaatcaacattgacccaatgttctacagcagcagcaggtaaatattctcttcatatatatttgcgtataagtgtagagatggattaacaactgagtgaatggtactatngcataactgtgcatctgaatcaatctctgattntgtagacaattcttgtctctaatatgtaattgtttgcaatggatcataattgtttgcttggatgtttggctcttctgctggtgctataagaaacctcctaggtggcattgctctcagctattcttctcccaaagtcttggttctggttttcacatatccttctccagctcttcagtacatcacttcagctcagntctgttcatttctcttctgttcagtacatcatttctggctcagttctgtcatcagtacattatntctgctcatcnagttctgtcgatcagttcagttctggtcagccactcnagttgataatttctggta

SEQ ID NO: 73805 - DNA, 437 bp, Zea mays
  unsure (1)..(437): unsure at all n locations
ntgcatgagcaatgcctatcatccttagtcggatggtcataccaagagggtaaaccagtgtctagaaacatacctgagatgtttcgtacactcttgtcctaagaagtgggttttatggttaccattggcagaatattggtataacacatgttaccattccgctctgggcacatctccattcgaggtcctttatggccatgcaccttcacattntggcctaaacactactgactattgtaccataccagttcttcaaagcttcatgcaagagagacaactcatgttacagcaagttaagttacacctacaacgtgctcatgaccggatgaaaaaaataggccgataagggtcatactgagagaacctttactatgggttagcaagtatttttgaaactatagccctaatgtcaatcctcagtggctacccatcctaat

SEQ ID NO: 73806 - DNA, 489 bp, Zea mays
  unsure (1)..(489): unsure at all n locations
atcctgacctgataaccttcccgactagtgttctggatgctgcatgtactccacattgccctgcatggactctctccagaagttgcttcccggtggacgggagaacgcacttcatgaggacgcctgacgcgccccttctatacaataactccccaatgagcgtatagtgagctgattgcctagcaatgcgctctgccgagttcttggcatctnggtcttcttcattctttatatacttaataatcggcccgctccagtcatcagagtctgactcgggttgatctatgatgttgcactcttctgtttgatcctatgagatactcggctgcatgatttcttgacgaagactccgggtgggacctgagttcgaccggatccgagcttggacagtacatcggctgccgtgtccgatctcttttatatgatgaaactcagaccctcgattatcttcagcttcggatacagacagatnttccattgatacttgac

SEQ ID NO: 73807 - DNA, 455 bp, Zea mays
gggaggtgaatcagaaagtttctgaccctcataatcttttattgatccaccaagcttttgttgctcctcaatgatcatctgcaagtatattccttgtgctctaattgttagttgcagttgtctctgaacctgaaaacataacttatttagacaagcaaaagaaagttggcaaggaaaatttagattgatcttgaagctaaaaaggactcataaactacaagcaataagacaaaacaggagaactgccaacaatagattattgacaactaagcattactacaaccatgagaagaaaccactgttaggtgtaacgtgacagttaataagtgaatattgagaatgggccaaaatatcagcttgtagaagtagccccaactaagtatgacttctggtcatagtaggattggctgtaaactaaatgatgtataaacagaaatcttactattataagtaac

SEQ ID NO: 73808 - DNA, 315 bp, Zea mays
  unsure (1)..(315): unsure at all n locations
caaatgtcttatattctcagataattgattaaaatcttgcacacattgctcattntataccttngatcatatctctttcatttggtacaaatgcatatctcttattcttcttgtgccaaagctaagactaatgtgcttccaagagtatttctatacttagtcttgcattgaaagggaaatgtagttatagacaaaggcaaggctttcgctccatattcgtcactatcctttgccctactcatgtatntactntcatatatttntgataaagacatcttgatttctctatttttggcgcttaatgccaaaggggga

SEQ ID NO: 73809 - DNA, 468 bp, Zea mays
ctcagcttatataagagaatggaggcaagaacaagaccatatgtgtttatagaaggggagttatacaaacatggagtctgctctccacttctcaagtgtttatccagaaccaaaggtatagagctgatgaatgaaatacatgcacgtttgtgtggttctcacattgggtctaggcctttaatatggaaggttttcagacaaggattttattggccgaatgcagcttcggatgcagcagatctagttcaaaagtgtgaaaattgtcaaaaatgtgcaaaagaccaaaaacaaccttcatcgctgacccagttaatacagccaacctggccattgcatagatggtgcctatatttgttatgtccacttccaccagcacaaggcaatttaagatatgtcgtggtggctgtagaatatttttccaagtggattgaagcaaagcctttggcacaataacttcggtcacagtct

SEQ ID NO: 73810 - DNA, 449 bp, Zea mays
  unsure (1)..(449): unsure at all n locations
tcactcttctcatccccccattgcctcatggcaaagggagatgctaanggtaaaatcatcaccgatttaaatgatatanatgatgatgatgatatcgatgatgttgatgatgatggctattcatatgatgatcttgttagaatgttaggtgaggccgatgactacatgcacaaagaanaagataaatttaacgccttgagggaattgataaaaacctgcaagtgtcttttgaggagctcaagatctctcacaatgatctcanagataattgtgagaagcttgcggatgctcanaaatcctctattgtgcatgaagttgaggtggtcactaaggatgntggagtcacttgtgacttacttgatagtcttacaagtgaaccactacccactaactctatttgtgatanatgccaaatttctctcaatggatatattgctcttgatgaatca

SEQ ID NO: 73811 - DNA, 317 bp, Zea mays
tgtgtgtggcaacttgagggtcaagcccgggcatttctttatatgaccaagcaaaacaatcacgaaatgccataaggaattctcggtaactttctcgctcctcatgtgtaaggcttgcgcttacaaacgtgggacgtggatcatcctcagccctgagagcacctagagggggggggggacaaaagtgttttctcatattattaatcaactgactttacaaatgccagtggcgtcaagcttataacttggattttacggtgccacaacctgataattatccctattattgcactcgtgagtaaatcgatgaagatgac

SEQ ID NO: 73812 - DNA, 538 bp, Zea mays
  unsure (1)..(538): unsure at all n locations
gcttggaactatgcccgtattcaatcttcctgagccagaactataagcgctngccagatgcccccgttccggtcgaccacgaccaacacccaacataagacttccctagttatttagccaagaccagagccatgatagttctcatggtagcactgttttccgggtggtcactccatgttccaattaatatgcaataatcttgtttaaccatcgggttaacaacaataatgtaaaccttaccatttggaacatcaatatcataagcgggagtgagtgcataaagttaagttgtagcaatagcatagctacttggttaaatcataatcccaggttaaacaaggagtaaggttagaaaggttatctaaataggtaacccgtcaagttatgcatatatatccaaaagagtaaactntattaaatgtattgttngggatcaaacagagtatgcagagggagaagccacttgccttgctactgaaatttgatgtcttcacggatacacttgatctaactatagatcaccactgatatacacaac

SEQ ID NO: 73813 - DNA, 396 bp, Zea mays
tgtttgtcggaatcgaacgaagctctatcttgtaacctgcttcggaggaaaaaagtatcaaagcttcacaagttcatagtctaatggccagagtccgttctaccgccatggttgatcgtgatgggaacgaaactggagcttcggagactgttcccatctccgaagccatgcaacgatccgggctggtggttcctgaagagatccctagtgaagatgcagaacaagcaaaacaagcagttgctgaagtggaagaagaagttattgaggaaactgatcccgaggatgattatcgttttgccatgccgagcaaacccagccacttggactttggaaaatctaccgtttcgaaggctgatctctccaaaatggtaaaatcaggcgtttttaatgaggatc

SEQ ID NO: 73814 - DNA, 425 bp, Zea mays
  unsure (1)..(425): unsure at all n locations
gatcttaagcacctgngctgcagctaagtctagaatcaacgaaggtgcttctcaacgtccgcttcgtcagaaagaagagcttcggagaaaagataaaaggaataagtttttgacttcccaaacttagaatcaaatggcgagaatacgatctactgccaaagttgtacgtgagggagacgaagccgaatgttcagacactgtgcccatctccgaagcaatgcagcgttccggtctactgactacagaagaaatgcctgctgctgaagcangcccaacaactgccgaaggataaataacattgaagtactgactccgaagatactatcaccttgctatgcccagcaagcccagtcacctggaatttgggaaatcaactgtttcaaaagctgacctttcgaagatggtgaaagcaggttatttcaatg

SEQ ID NO: 73815 - DNA, 469 bp, Zea mays
  unsure (1)..(469): unsure at all n locations
ctaagcttgccaatatgacgcataattataccttngatgtcttctcgtgctgataagtcattcttcacataaaaccattctgtcatccaatccccgggccatctcttccgaaaggttggtacgggacagcttgccccggaccgagagacgaatctgtatcagccaaagttgttatggtactgttctttgccccaaggctntgtttcatataataattcatgaacattacagaagcttctggcgtcaggcttcataccttggcttctcgcggcccacacgaagatatttagccttataattgcctcgggagtaagttgatgaagatagacttcgaagattttcaacacctccacgacgaagctgctcaaggggaatcgcaatccagctttcaaaaagcttcgatacaccacaacttcattttcttcaaggtggtggacaagtttttccccttcgtacgacctcacaatgg

SEQ ID NO: 73816 - DNA, 353 bp, Zea mays
  unsure (1)..(353): unsure at all n locations
aactatgcacattnggactaaaagtgtaaaactataatggtaaagcatataaaatcacatggttcacatttgggaagatttacaagccaaaccctaagttttggattcatttgaaaaaggaccccaattgagattgtgggctcaacttggggctaactntgagccttgaactntanactataggtctttgcctatgcaccacatcanagntgtagaccaatcatagtagaacaactttgatatagatgtttgggctnggtaccatagaanatctggagataatanngacctaaagtgctctgtcaagttatctgaatgagacccatggacagtaacaaactggatagaccgca

SEQ ID NO: 73817 - DNA, 480 bp, Zea mays
actaagcttcttagggagaacacgtgataggtttgactaatgtgcatttcttatatgacagactttgtgcagcttgtcaagcatgttaacaagtgggaggagcgcatcacagcatgaatgtgatgaccacttcaagacccctggagctactacatatggacctcttctgacccgtcgcctatctaagcataggaggaagtaagtatggtctagttattgttgatgacttttcccgcttcacttgggtgttctttttgcaggacaagtctgaaacccaatggaccctcaagcgcttcctaatgagagctcaaaatgagtttgagctcaaagtgaaaaagataaggagccacaacgggtccgagttcaagaaccttcaagtggaggagttccttgaggaggaggggatcaagcacgagttctccgctccctacacacctcagcaaaatggtgtggtagagaggaagaacatgacgctcatag

SEQ ID NO: 73818 - DNA, 445 bp, Zea mays
  unsure (1)..(445): unsure at all n locations
acgtgttcgacgcgagctgacattcggtggctctctcatagcacgcccgtgcgcgaaccccgcgcgcncgcggtcgtccgtgaccacgccctcgccacggatataaagcccgccccagtgcccggctgccttncccgtttgctactccgtacctcgcctgacttacccgagccagccattagctccggcgacctccccgcgacccgccagtgccgcccgagagcaaccactatgggcagccnctttcccgtcctnctncgttggatccaagccctcagatagcttgctggtgaggccgcgagacttgctcaagcttgacccggtgacccgcgtcaccggaatagctcaatcgtgctcaccggagttcgagaacccgccggcgcacgtggaccgggtaagcctctgcaccgatttccaattcattgcgtgcatggcctctacatca

SEQ ID NO: 73819 - DNA, 467 bp, Zea mays
  unsure (1)..(467): unsure at all n locations
tactaagcttgggcacaactagcttttccggcgcctctctttattttatgcgcaagaggcttcataggatgatatggcgacccgcccaagaagatctactgcctattttgtggtgaagacaagggccacaatacatagaacgtgtcaaatcaccatccataagcataaagagattgcataatccgaagcccggcaaagtcaaccgaagtatgtcttgcacactgcttcgtgtcattcacccttcatatcagaatatgtgggtaatcatcctgcagcttctgttgcttcggctagtcagccgcaagtttcttgaccacaacttgcacctccaccgtcactacatcctgcctactcacgatgtcagcatccataatggagtcaacagacccatcatcagcgagatttcanggaggggtccgaagctcgcacagttaatagtactgtgccagaataaaacacatatattg

SEQ ID NO: 73820 - DNA, 406 bp, Zea mays
  unsure (1)..(406): unsure at all n locations
gctatgaaattcttattccaacgtggtctattcagcgatgccagagccagcccatgttagtcttagtaattaagcaagtgtcgagttcagctctattaaaatcaactaagtatagttgaccctctaacactcccttaaatgctactgaatcatcacttcttctaaagacaagaacacctatatctgtaaaaagacaattgtagcccattntacataattgagaaacagaaagcaagttataatctatagaatctacaagataaacattagaaatagaatgggcacgtgatataacatatttaccaagtcctttgaccaaaccttgatttccatccncgaatgtgatagctctttggggatcttgagttttttcatatgaagagaacatncttttctccccagtcat

SEQ ID NO: 73821 - DNA, 430 bp, Zea mays
  unsure (1)..(430): unsure at all n locations
tgaaaagttgagaatgtctcgacttcatcttttggtgcagatgttgatagggttgaaaacggtttcggatttttttcggtttttcggatatcgttttcgattttttccgaccgaattcaacgataacggtatttttcgaaatcgaaatcggttatcggaattttacaccgaaatcggtatcgaaatcggtacaaccttttaccgaccgttttcttcggttaccgaatttaatcggaatttaccgattttagatttcggaattttccgaatccgaggatagtaaaaaaaataaaagtatttttaggcccacacttcactatggtctagttattcaggaattgtagagaaagctcgtcatggtgtctttatatagaanaatatgtggctcattctactatgactagacgatgtgggacaaatgctacatgct

SEQ ID NO: 73822 - DNA, 231 bp, Zea mays
  unsure (1)..(231): unsure at all n locations
cacatgataggtttgactaacgttcaattcgaaaaagatagaccttgtgcagcttgtcaagcacgtaaacaagtgggaggagcgcatcacagcaagaatgttatgacaacttcaagacccctggagctgctgcatatggacctcttcngacccgtcgcctatctaagtataggaggaagtaagtatggtctagttattggtgatgactnnttccgcttcacttgggtgttc

SEQ ID NO: 73823 - DNA, 410 bp, Zea mays
  unsure (1)..(410): unsure at all n locations
ccctctacatccaccattgagcatgttactatttgctctatatgtagagatgttaacattgatgttattcatgatcacatggctataattaaacaacaaaatgatcatatagcaaaattagatgctaaaattgccgagcatgagttagaaaatgaaaattttaaatttgcttgtagtatgctctatagtgggagacgccctgtcattaaggatggcattggcttccaacatggaggcaatgtcaaacttaatgcccctcctaaaagattgtcaaactttgttaagggcaaagctcccatgcctcaggataacgagggttacantttataccctgccggttatcccgagcacaaaattaggagaattcactctaggaagtctcactcttgctctaatcatgcttttatgta

SEQ ID NO: 73824 - DNA, 474 bp, Zea mays
  unsure (1)..(474): unsure at all n locations
ggtcttagcactgtgctgcactgatggacccaaaacactttttatatctcaatgcacttatagttctagcaaaataactggagggaaacaggataaattgcatacctgggtggtgttcttaacactcatcattaggactgacagagggcctgtgctaaattcctcctcctctttctttccagcctgctgtagaatgttagaaaagagacagtgttagccatctctgtgtattgacagaggtcagatatgcaacagacacggatgatgctntcatagattctaccaaatagtggatctccctaacttcgtatcactacatctatgcttatgaagacaacgtccataattctggtcagatactcacacccagctcttgaaaagctggtcaaatagcaatctggaactctggatcataccaagaccagaagtgtggatcatttcagggtacagaacatatttgcaactccgagcaca

SEQ ID NO: 73825 - DNA, 467 bp, Zea mays
tcgtcttatgtcacactaaagcaacttgagataccgtctttccatgcacgcacattctgaaatttacaatgcataatgactagaggtccaggttagtcttattatgagaagacaatatgcatggctgcttgcgctgggatcacatgtttttgctggtgcgattagtggtgcaatcatttcattgttttggatccacgatcaattatgcatacacatgttatatgtagtggttaccacactatatatatatactatcccggatcgaaagcttgaagttgactccaactatatatcaccgtggcactttttaggtttgccttctctagctttcatgcatgcatcttcatcctagcttcgagtgaaactataattaggctactcgccatttcgcgttgtgtcctaagacctaatgccgcacacaacctcagcacgtgtggctgctggaaatacctagtactttcttactc

SEQ ID NO: 73826 - DNA, 471 bp, Zea mays
  unsure (1)..(471): unsure at all n locations
ataatctgggtatgaagcacattcgagaataggataaggctggagtaaccaagtgtttcaaagaagacgatcaaggtgtgatattggttaaaaaccgcatagntgtgccaaagaacgaagagctccgccagcaaattctggatgaagcacatcttagtcgttattctattcatcccggaagcactaagatgtatcaagacttanagcaacactactggtggactaagatgaagattganatngcacgctatgtggctaaatgtgacacttgtagacgtgtcaaggccatacacatganaactgctggtccattgcaatctttgccaatcccaacatggaaatgggaagacattagtatggactttattgtgggatacccaggacgaccaaaggatgatttattgggtatagtgatcactcacaagatgccattctactgtaagcactatcataccctatcacatatcatgc

SEQ ID NO: 73827 - DNA, 461 bp, Zea mays
  unsure (1)..(461): unsure at all n locations
ntagacagttaaaggaaaatcatttgaaacaggnggaggaatttcaaattctaaaaatgcttcttgcaatcatattcctatacctttgactatttgcaaaagtttttgaatagatttccaaaggatttgcaaaaacaaaactagtggtgcaaatgtggtccaaaatattaaataaaagaaaggcaatccattgactcttattcatatgcttaaaatcattcacgggtttaaattctaagtaacctatgcacaatcatctcaattgcaaactagttacatttctatacacttcatttgctttggtttgtgttggcatcaatcaccaaaaagggggagattgaaagggaaatggggttaaccatttcctataattaattgtggtggttgacgaccaacacatacacatggactaactagttntgtctagaattcatgtattacaggtgcataatgttcaacac

SEQ ID NO: 73828 - DNA, 393 bp, Zea mays
  unsure (1)..(393): unsure at all n locations
atggtgtgatcttattatgcctttgctctcaacgtcaaccacacaagtcttgtgtaatggacagcctggtttccctatccatcaccaacgtggtctcaggcaaggaatcccctctctcctatgctcttcacattagtcatgggtgtcctcaactctctaatctgcaaggctagtgtggagaatttctacaacctattgctggacatcanaatatgaacatgatttctttntatgcagatgatgtgtcttggttggaagacctcttaatggggatctctgtgtaatcaggacctgttacactgttttggacatatctctggacttcggacaaatctgattaagagctctgcaactcgtattcagtggctcaatgatngacatngccctgactat

SEQ ID NO: 73829 - DNA, 382 bp, Zea mays
tcagctccatctatgttatggattgcttttgagtcagttcaattgccttcggcccttcttgcagcttcctgacttccatgaatagcaatgggtccctgatccgaaggtatcttcatgcaaagataggcaggatgaaggattgcttcgaaggcattgagggtaccacgaccaataattgcattgtaagggtattccatgtcaacaatgtcaaacacaacttgctcagttctagtgttgttgatgaacccgaatgtcactgacatggtgatcttgcccagtgctacaatctgccttcctccgaagccacagagaggatgtgtagcatcatgaatcttatcctctggctcttgcatttgtctgaaggccttataaaatatgatgt

SEQ ID NO: 73830 - DNA, 405 bp, Zea mays
  unsure (1)..(405): unsure at all n locations
gcttcaagctggagcttcgttcgattcctatagtcaagcttcggctatgggtaaaaaatttggcagcaaaacagtgcaaatagcaatgaatgctgtggtaacttcacacctactcgtctgtttatatagtactgcaggtaagaaggcgaagcgccaggatttttacaccaggcggacagccgcttgcactcgctgcgtggtggaccgcagagaccaaacagtaactctgcaaggtgggaccgctacgcgctgggaaactgaatcgtttctcgacaacgagctcagggaatgtctnntttggaccttcngcttcccgaagcttaagagactnttttcacggatcaagctcgttacgaaaaacgatctatcaccgcgaaagtggctactggtgggactatgcttcgt

SEQ ID NO: 73831 - DNA, 473 bp, Zea mays
  unsure (1)..(473): unsure at all n locations
ctaagcttgntttataattgtgaacttgactcttacttgttgaatccaaaacatgctcaccatttgagattcgcacctagcatgtgtaggatgtgtttgaaatcctttgtgcttcactagtatgctatgtggctatgtctcatgctctgagtcattcactatcttgattcagaaattttgtgcttaaaattaaaatcaagataagtgaaaaatgagaaaggttgaagtgggtttgcatttgtcaccacctctatgtatcgagattgtttccatttgcacttttggatgaacttgagcagggtagtggatgattgaaaccgttatctttagcatctgattgcttttctacatatgctacaccaggctaaaaagttagacaatgacaatgcttacaacctcttgctctcacatgcctttcgttgaaactngtaatctgctgcaaatctgataaaccttgaaaatcttcatctggg

SEQ ID NO: 73832 - DNA, 461 bp, Zea mays
  unsure (1)..(461): unsure at all n locations
gacgtgaagagtgccttcctcatcggaccgancaaagaagaggtctatgttgagcaaccttccggctgtgaagatagtgagtaccctaaccatgtctataaactctctaaggcgacttatgggctctagcaagcaccaagagcatggtatgaatacctcancagatcttcttatcactaatggcttccaagttggaaatgccgatcctactgtattcactagaactcttgaacatgactcgtgtgatgccaaattatgttgatatatagtattggtcactaacagtctacatgtaagaattagtngatcatgaacataagtccagatgctatgatggggagtgaacattcttagattcaaggaaacaactcaacgcccttctaaccaacaatatctaagaatctatcagttggataagatccaccatcaacccatggacatggctttacttaccgatgact

SEQ ID NO: 73833 - DNA, 356 bp, Zea mays
  unsure (1)..(356): unsure at all n locations
ttagtgtttccgaatatgtctgttgacaatgaagctgttactgagacgaagctgtctcttgatgatgagaataacttgnggcttcttatatcgatgtcgaatacaaacacggaataaatcaccaaggaaattctggaaggcttgtatgaagatactggtgacagtgacagttttgatgtagatagtggcggcgaagactccgaagatcgcccctggcgaccaagtcatgcggttttcggcaaatcatctatcaaagaataccatcttgccaatatgaggggaatgtatttccgggatctgtccattgtgatggcggacgaatgggaaaagacttgtccacaccctgaagaaaatga

SEQ ID NO: 73834 - DNA, 299 bp, Zea mays
  unsure (1)..(299): unsure at all n locations
actctaacgatctatggntctagatngatcttggtcttgcaggcgggattgccataagactggtgtccacgctgatgtgagcggtacnggtgctgagtcccaacgggagcggtggaaccaccatccaggtgacgacgctccgcgcgctcatcccgcagcatggcgatctcagcacgagccctactcagctcgtctaatgcatggtccagctccgtgtttagcacggcggctatggtgactgtgctgctcaacctatgtatgccctcaccgacaggtgagacaatcacgcctnctgtgct

SEQ ID NO: 73835 - DNA, 434 bp, Zea mays
tagtaataaaagtaataataataaaataatcccaatgctatgcaaatgacaaattgaatttaattccataaattaatcatgtgagtgtccgagctgctcttgaccgtgagcacgactagtataccagttttacactctgcagaggttgcacatctttacccacaagtcgtgttacccatttgccacacggttgatctgaccccatacacctataccaatgaagcgaggcagggtaccactacgaggcctttacaaagttccactagcttcagaaaacctgctacagtttataggaagctccagtgtatggatccctcgcctgaccgccatcgcatcataatcaacccaaggacctccccacactgaccactcccctactggccttgcacccctatcgggtaaggtagtcttccactagctttcctacttaatca

SEQ ID NO: 73836 - DNA, 419 bp, Zea mays
aaattcatggccattccacactattcgtacatgatattgaagatgccgggaccacaaggaatcatcaccgtgcgtgctgacttccaaggcgccacggaatgtttccgagtgaccattcaagcgtgcctcaccaccaaaccaccgacgacttcctccgtgcaggcaaactcaaagcctgagaaagacctcgcgatacctgcgaatgaagctcaagtcgtgacctctatgcggccgactgaggagacaaagagaatcaacctcgggttcgctgatgaacgcaagactgccatcatcagctccagcctggacgacaaataggaaggcgcgctcgtccagtttctgcaagataactgagacgtattcgcatgatagcctgcgaatatgctgggagtcccgagagaactggtcgagcataaact

SEQ ID NO: 73837 - DNA, 452 bp, Zea mays
  unsure (1)..(452): unsure at all n locations
tgagcagtgaccggcttcgtttgaaacccttggtagctgtgttatcaacatatccttcagcttttgccatgaggtgattgttcctggccgaagagaggagtaccaagtttgtgtaacactcttgacagccatgacgaaagactttgccatgactgcagtattgccaccatacgaagatatggttgcttcatacctcatcaagaattgcttcgggtctgaatgaccgtcgtacatggggagctggggtggcttgtaagactggggccaaggtgtagcctgtagttctgttgacagaggagaagtatcatcaaaagcaaaatttccatgatggaaatcttcataccattcgtcctcgttgtagaagccctcctgatgaagctctctgcgcggaggccttcngttctggtcatcttgagcaagatgacgaacttcttcagaagcttcgtctatct

SEQ ID NO: 73838 - DNA, 397 bp, Zea mays
atgctatgcttagctattaagcatgcatctagaccggcctcttcttttgcaaaatcaactaaataaaggttgccgtctaatacacccttaatagctagtgaaccatcacttcttctaaagacagacacatctacatttgaaatagacagttatatcccatatgacataattgactacagatagcaatatatcaaactctctacaaaatacataagaagaagctatagaattgcatttactaccctttcccttgcttgttccatcccgaaatattgatttgggaatctattctgacgaggagtgaacattttttcccgcatatggtggctcgtgcatatcactgaccccgagctacctgaggaattagctggatagaccacctgtggctacagaggaa

SEQ ID NO: 73839 - DNA, 403 bp, Zea mays
  unsure (1)..(403): unsure at all n locations
gcatgtcaagcatggaatcaagctgggactcatcatccacaccataacatcatgacgactcacatgccactggaactcctacacatggatctattctgcccgattgcttacataatcatcggcgggagtaagtactgtctagttattgtggatgattattcacgcttcaactggatattctttttgcaggaaaaatctcatacccaatggaccttatatggaattttgaaacgagctcaaaatgaattcggcttaatgataaagaagattataagcgataacgggacggagttcaagaactctcaaattgaatgcttccttgangatgaaggcattaagcatgagttctcctctccctacaccccgcatcataatggtgtaatggatacgaagaatataactc

SEQ ID NO: 73840 - DNA, 498 bp, Zea mays
  unsure (1)..(498): unsure at all n locations
cttcgatgaagtctccgaattctccggtntgattaccacatcatctacgtaggcctncacacgctcgccccagtgatcggcttagcatgtttgaatggctctctgataagtcgctccagcgtttntgacgccgaacgacatggaagtataacagaaagcaccaaatggagtgatgaacgcttgtttttcctcgtcttccttcgccanactaatctgatggtatccggaatagcaatctatgatagacagcacggaacatgcagcggtggagtccaccacctgatctatcctcgggagcccgaaggggtccttcggacagtgtttgttgagatcagtatagtcgacgcacatgcgccaatccactttattctnnttgagtacaagaacagggttggctaaaccactcgggtgtatacttcttaataatccaccgcgacaagcagctactcgcgtgatgccttctctgcggcgtaacgactacttacgatcgctcgctgg

SEQ ID NO: 73841 - DNA, 422 bp, Zea mays
aacttaagcctctacagatacagttttctgagcttcggtctttgcttacaactttgtaatatggccagaaataacctgggaatcggttgttagaatcgcccttcttatccccattgtctttaacttctgtagcccccaaagcaaagcttcgtattcaacaatattatttgtgcagctgaaatcaagtttcactgcatagcatgttctgactttggaaagtgcaactaaaacagcatctgcacctgtcccgaatgttccccatgaactgtcgcaaaacactgtacaagcttcagcatctgtacttgcttcttcttcttgagcccctggcgtccagtcagcgatgaagtctactaacgcctgtgactggatcgaggatctatgcacataatccatgctgaattcgtgagttcacattccacttt

SEQ ID NO: 73842 - DNA, 369 bp, Zea mays
  unsure (1)..(369): unsure at all n locations
gatctctaagcacctgaggatgcagcttaggtaaggaagtgtttgcttgttctttttagctcttgcgcttggatggctttcttctctctcattattatcttgggatcaaaactcaattgtaaccgaggcaagagacaccaattgtgtggtggtccttgcggngaatgtntgttcccggttgattagataagagaaagctcactcggtccgatggaccgtttgagagagggaaagggttgatagagacccggtctttgtgaccacctcaacggtgagtatggtttcgagaaccgaacctcggtaaacaaatccgcgtgcacactcttattcgcngcgacttgttgtgaccctctctcacagactcgatta

SEQ ID NO: 73843 - DNA, 469 bp, Zea mays
tgacgatgatgagatggcgctcgtcatcaagagcttccgttctatcctatagcataggaaggggaaggactacaagtgccgctccaagaatgtgtgctacaagtgtggtaagctcggtcattttattgctaaatgtcctatatctagtgactgtgaccgatgcgacgacaaaaagggagaagaatgggaaatgataagatactacaagaagaagggcggcgatgcccatgtttgtcgggaatgggattccgacgaaagctcaagcgactcctccgacgacgatgacaccgtcaacatcgccgtcaccaatggactcctcttccacaacgtctgccacaagtgcctcatggcaaaggacggcaaaaagaatgttaaatctaaatcctccactaaatatgaatcctctagtgatgacaatgctagtgatgaggaagataatttgcgttaccttgttgccaaccttaacata

SEQ ID NO: 73844 - DNA, 387 bp, Zea mays
  unsure (1)..(387): unsure at all n locations
ctgcagctgaagtttctcaactgggtatgttntacccctntaatccctatntaggggtaagttccctatccaaggtcctatttgcaaaacactaaaacaatacatcttgtttgaaacttttgcctagtgaatgcactctatgtgtatcaaacatatgcaatgcatatgcttatgatgccatgctcaagttttatgtacagtaacaccaggggtgttacatccttccccccataaaagaatctcgtgccgagattaanagtcctagggtaagtaatggaaaaggaaacgcgacatacttttatttccttatntctggtacaagggcaggggtgagtgtgggggtcactttctttattacacnagttatacagtgctctacaatttaca

SEQ ID NO: 73845 - DNA, 412 bp, Zea mays
  unsure (1)..(412): unsure at all n locations
ngatgccatactcttgtgtgagagagaccaatgacaggtgatgagaactcgctttggtcaagtggggttctgatgagttgctcttaatcgaagcaacgcaagtgtgccatacgtcgtcttctaatttcactagctaatagtactacaatggaatacattgtttgagacaatcagacaactatttgccatgtcgtgccacatgtagctgcatgtctcatcgcacatgctngcagtatggatgattcanggacatctggtagagctcacataactctataaagctaaacagataaaaactgaattgctccgtggcagaagtgaagtgaatctagtctacantttatactagagagtggaagccaaaataacatgctttccgctgctctctcctctctctctccctctacctctc

SEQ ID NO: 73846 - DNA, 395 bp, Zea mays
  unsure (1)..(395): unsure at all n locations
ctgcagctagggtgcttcggcgtgttgtcgtatcctatacaccaaatctcccacttcgaagcctcggtgccgaatncttcgggcgtggtagcatcgtaaagactgctgataccgcgccgagtgtattaaggctacgtcccgagcctcttgcagctggtccagtgaatacttctcggtggcctggttgcttccgtcgtcgtatgtctttgtcctcggagaatcgtattctaagtgcgtgggtaggacgacctcgaccncatagactataaagaacggcgagaaacccgtggcccggctcggcgtcgtcctcagactccanaccaccgagggtagctctnttatccaccgcttgccaaacttattgagggtcgtgtagatcctcaattntagtccct

SEQ ID NO: 73847 - DNA, 397 bp, Zea mays
  unsure (1)..(397): unsure at all n locations
gtcttttcatccagtggcttggtgaagatatcttcttattggttgtgggtgctaacataagcaatttcgatatccgcttttgttggtgatctctcaaaaagagataccggatttctatgtgcttaatgtggttgtgttcaacgggattatccttcatgcggattacactctaattatcacataggagagggactttgctcaacttgttgccatagtccctaatgattagcctcattcaaagtaattgtgcacaacaatgtcctgcagcaatattactcggctnctgcggtggatagagctactgagttttgtttctctgaagcccattacccagtgatcttcccgaaactaacagtccctcatgtgctcttctatcattctacatcggataattgac

SEQ ID NO: 73848 - DNA, 537 bp, Zea mays
  unsure (1)..(537): unsure at all n locations
gcttctctagtgagagtgtatcttgattattgtccagtggctgcanggcagcccctggcaccgtaacaccccaggatccacaaacacccagaatgctactaaactacacatctaacattcatatataaaatttcgatagcatctcgtttgaaaatttgcataaacagggaagcaacaaggtataaataaatatcatgataagataacataatagacattaataatctgctagcaataggaatataaccataatgatatgaactgaattaaccaatgcgcacaactagttaataacaaacatcctttgacaagaagtttctaattaaatcatgactgcgcctangcagcattattatgagagtgaaggtggatgtgctgctacttccccactccccttgatgagtaacaagcacctgcattgagtaatgcaagagtgagatgaaacatctcagcatgcanattggtntgacgatgatattanaccacannattgaataatcaacattntaaaagaaatcacaataagatcagaaatac

SEQ ID NO: 73849 - DNA, 465 bp, Zea mays
tcatgtctgtagctgctgggcgacctgtcctctccatttctctcctctgcctctgacctctcgatctttccctatcaatgcgaatgctgctgctgcatgcatcaaataaagaagcagaatgatcgctagcagctagctagcgtggataccgatgcgggacgagacgacgcacggccatggctagctctgcatgcatgacgatccagctgagtggagctgctgtagtacgtacagtaccattcaagtcaagcagaagctgcttgctttcgtccatgcgtcgagattcaagagcaataaagcttcggcagcagaagcttctgcttgctgcctatgggcgtggctatagtgggtgtgggctggctggctctactcttgcttttagcaataattccatctttgtttatgggcgtacgtacccctatatctatttaccactaaaacttttgtccaacgcagtattcgcat

SEQ ID NO: 73850 - DNA, 333 bp, Zea mays
  unsure (1)..(333): unsure at all n locations
ttcatcagctaacttctaacgccatcggtaggcttagcgtctacatatgggcccttcgaagccagngggtagaaccgtttggcgaaggcttctgccgagtacatgagcttcattatcaaacaaaagctagagaagatgggctgacaaaaacttcagctgctacaatttgcttatcganagatgcgaagctcagtatcactatcgaccaagtggcagctggtggaaactgaatggttatgtcaaagtgatgagaagaaggagngagtggntcaaagcccattagaattaatcttcggagagactagaccccggtgcgacatgaaaccggatagt

SEQ ID NO: 73851 - DNA, 468 bp, Zea mays
  unsure (1)..(468): unsure at all n locations
tgcacttacgaccaaaccgcacccncatgcatatcacattcaatggcttaacaatagtggtaaggtcaaggtaaccaagctggtacgaattaattttgctattggttcatatcgtgatgttgttgactgtgacattgtgcctatgaatgcttgtaatattctgcttggtagaccatggcaatttgatatagattgtatgcatcatggtagatcaaatcaatattctttcatacacaatgataagaaaattattgtgcttcccatgtcccctgatgctattgtgcgtgacgatgttgctaaagctacaaaagctaaaactgagaacaacaagaatagtaaagctgttggtaataataaagatgggataaaattgaaaggacattgcttgcttgcgacaaaatctgatgttaatgaattatttgcttccaattctgttgcctacgctntggtatgcaaggatgctttgat

SEQ ID NO: 73852 - DNA, 545 bp, Zea mays
  unsure (1)..(545): unsure at all n locations
ctgcagctgagtagtcctcttgcaaggatattctatgcccaaaaagataatgagggtatgaaacacattcgtgagaattaagggctggaaaagccaaatgtttcaaagaagatgaacaaggcattgtatggtttattaaccgcatagtggtaccaaagaatgaagagctccgccagcatattcttgatgaagcacatctttgccgctactctattcatcccagaagcactaagatgtaccaagacttgaagcaacattactggtggacaaagatgaagatcgaatatgcacgctatgtggcaagatgtgacacctgcagacgtgtgaaggccatacatttaatagctgtcggtccattacagtcattaccaataccgacatggaaatgggaagacataagtatggactttatcgtgggattgccaggaccganaaggatatgactctatttgggtgaattgttgatcgactacanagattgctcactttctgcgggcangacatatacccggtactacctatgtcgagtngacattgcccgattc

SEQ ID NO: 73853 - DNA, 430 bp, Zea mays
tgccttcgcttcagtctatcacccgcagtacaactgttttgtggaacgcgccaatggataaatcttcacagctgtcaaaaagatgctcctcgacgaataaagggcaagtgggccgatttgttacccgatgcggtctgggcactgaacacgactgattgcagggcaaccgggttcactcctttccgccttctatacggatcggaggccatgaccccacaagaaataaaacatgggtccccacgaacagttccttcagccgtccccgacgtggacgagcccacttcaaaggatctcatcgatggagaccgagtcttcgccctacatgctctatacaaataccaagcccagacaaaagcatggcgcgatcatgcagtcatcccaagggaattcagcgaaggggaccttgtactcgtccgaacagctcggacag

SEQ ID NO: 73854 - DNA, 446 bp, Zea mays
  unsure (1)..(446): unsure at all n locations
gcagctnggaagccatcacaagtttgttgtataatgacatcaagttcaattggtcttctaagtgcaatgaagcctttgagcaattgaagacactattgaccactgctccggtattagctcaaccggacatcactaatacctttgacgtatattgtgatgcatcgggcagtgggctcggctgtgtactgatgcaagagggccgagtgattgcgtatgcttcaaggcagttacgccgacatgaggagcactatccaactcatgatctggagttagctgctggtggtcatgccctatagattnggcgtcactatctgctgngaaatatctgtcatatatatacagatcataaaagtttgaagtacatcttcacccagtcagagttaaatatgaggcanagacgatggcttgagctcatcanagactatgaactggagatccattatcac

SEQ ID NO: 73855 - DNA, 444 bp, Zea mays
gtaagctctgtgacaattaaatcacttcatctagtttcaacaaagatgcattaaagcatgaatggaattttgagaagttaaactagatatgaagcagggatatgcatggacatgctttctcttccttttaaacaagatatgtaaagagagtatagaaaaggaagatttatgtacaagtttaaatgaaaggagatagtttacctttttgtacctttacatatggacgctctcttcattgtgctttgtccttagtcttagatgcttaagacctattcttaatgacaatatatggaaatattgtgcacaagagagagttctacaactagtaatcttttcaagttattgttagcatatatcaaatggatcacaagttgcataaatgtatcatgaattctccttttaacttagtgcatatcaagagagaatatcgatggtagtatatac

SEQ ID NO: 73856 - DNA, 260 bp, Zea mays
  unsure (1)..(260): unsure at all n locations
cttcattccaacatgtgctagacggcggngccagagttagcccatattagtcttatcaattaggcatgcatctagatcggcattctctcttgagaaatcaactaagtagagctggccgtctaatacacncttataagctaatgaaccatcacttcttctaaagacaactacatcaatatttgtaaataaacaattatagcccatatgacataattggcttacagacaacanattgtacccgagcgattctactataaaca

SEQ ID NO: 73857 - DNA, 445 bp, Zea mays
aagttttacccctttatccactatttatggttaagtcctttaaccagggttctatttgcaaaacattaaaacaatacaacttgtttgaaatttttacctagtgaatgcactctatgtgtatcaaacatatgcaatgccaatgctcatgatgccatgctcatgttttatttatagtaacaccatgggtgttatagccatggtgcgaattgcggccgaaggaacgtcatcttcatctacatcatcaagatcaacttgctctcttggagagccattattttcatcaaatacaacatcgatagagacttcaaccaaacccgatgatttgttgaagactctatacgcctttgtatttgagtcataacctaacaaaaacccttctacagctttgggagcaaaattggaattcctacctttcttcactagaatgtaacatttactcccaaat

SEQ ID NO: 73858 - DNA, 324 bp, Zea mays
  unsure (1)..(324): unsure at all n locations
gcatgatatatgcctaccaattataataactttaaagtctcaaccaagaccatgacaactgataacttatgtacaggaggtaaaagaacataatacaaacctctagcaacatctctagctcttcaacgtcattctcaatttcatgcacagtagctgcactggctctgctngctcttgatatttgtgagccaatagttggtgatgcagggaaccattttggtctgacagaaccactgacaggagaagattgccccaccaactttctagacaagtnaagatcagccatatcgtcgtcatcatacaataattggtcaagctcatctc

SEQ ID NO: 73859 - DNA, 426 bp, Zea mays
ctagtcttagcgttattctcggtcttagttagtcttatttagacatggtagtttgctatatcctgtgcatttatgtttgtcatgatgaactatgtttggtttggatctttgtaatgattgtcaccagagtgtgggtataccctgcattgtggtttacatactatgttaataaagctagttatatagttgggaaacccattattctcctttcctctttatctgagaagctgtgtggtctgtgttggagatcagtgaagatgctcatctgttcagtgctgttggagaattctatactcttttctcatgctgcaagctttgacagatcagatctgatgtgtggttgcgttctgcagatgtcagataacatgcgtagaggatgaatgcgtgctcatcatgagcgagccgctccgtatgatgatgtgcccc

SEQ ID NO: 73860 - DNA, 444 bp, Zea mays
tactcagcttataaaatcagtatgaatctgcgataattcccatctattccacaacaactccggacttggtgaacagtatgtgggggtctccactacacaatatctttgatcttgctaggatctaccgcaattcctttagctgacaacacgtgccccataaattgaatttcttccagccacaatgcgcacatgctgaacatggcatatatctgatgttccttgaagcgcgtcaatacaatccgtaaatgctgagcatggtcctcttcattcttaaaatatatcaagatatcgtcaatgaagactaccacgaacttgtccaactcgggcatgaacaccgagttcatcaaattagtgaaatgggcaagagcatttgtgagcccgaaagacattaccaagtattcaaacaatccataccgtgtataaacgcggtcttcggttatcctc

SEQ ID NO: 73861 - DNA, 428 bp, Zea mays
  unsure (1)..(428): unsure at all n locations
aggaggagctagatcaagagatcagaganttggatgctatccaccaacaggtgcaaaggaagatggaaaagatgcttcagctcgccgacctttagaagaagatcgatgaagctgctgaataaatgcgtcacctcacttatgatgaccaagaccgaaggccccaacatagggagcttcgctaagaaaactcattcaatgatgatgaatggtatggtgactntcatcatggcaattntgcttgtgatgatgcttctccctttggagcagaattgcaggttacctcgtggccgccgtcatacaagccatctcagctccccatgtatgacggacactcagacccaaagcaattcctgatgagctacgaagcaaccatatcatcatatggnggcaatactgcagtcatggtgaagtccttcgtcatggcagtc

SEQ ID NO: 73862 - DNA, 462 bp, Zea mays
  unsure (1)..(462): unsure at all n locations
ctaagcttatcgcctgtaccttcaccatgtgtcatcggacctataaattcgtcgtgtccttacccacgtcgtccaaattgactgtgcactgatcttcgcctcccaattacacagctaacggctcactaaccacccctntttgtccaccattgaccgagatcaccatagttccctgggtgcggtcatcattaccgtcgtgaataacccgatcgtggccagacttcctcgggttattccgtgcccgtccaatccctgtttcgatgtgcctttaacctttagttgcttaccatgtcggccaattgcatactactgtcactgaactcctagaacatcacctcgtcgctgggaacatcgccaaggacaccttgcacgtcgacccactctcccacgcccactccgtccaaatttgcgcgtgtaccacacctctggtgagtacctaatgcttgtcgtgcccatcgattg

SEQ ID NO: 73863 - DNA, 287 bp, Zea mays
ttatgccctattcacttatcacgctccatcccgcattacgtacttgaaaccttatgatttaatatccatacactctactatacacttgctgaccttatgggcttgtatcgataacaaatctggtttgccttaactaagtcaatgaacacgatgtgactatatatgataccgtgatcctgactatattgatgatccggcgatactataagcggctgatggtgcttactgagtacctatccgttacgacctgtcctttgagagaccacgctggataacagtgcgtgcac

SEQ ID NO: 73864 - DNA, 383 bp, Zea mays
  unsure (1)..(383): unsure at all n locations
gcttgtgaactatccaaccgcgctcctattctcatctgatcagtagctgcggtagagaaaacgacgactgtgcttaccggcggtggtctatctccggcgaatgggttttggagattggggaggtcctatccaacccgttgatggtcggatggcggtcggtggtggtcggaggcgtcctggtcacgcgcangggctgatgatctcgtgggcggcgaggagcttggcctgtacaaggcgatctatttcaattggatggctcggngaggttcaccagatgatgtataagctgtgcgcacaaggatattggcaatggcgtatctgcttacccgggtcacgtgctccggcgggtggaatgtattcggcgagggcaacttggcgtcttc

SEQ ID NO: 73865 - DNA, 475 bp, Zea mays
  unsure (1)..(475): unsure at all n locations
taatgcacaagccaaaactcacanaggtgaggttgaaaatttacagaaaaaacttgctgaaataaatgagaatttcgaagttgcgaaggcaaagcaagaaataagttaaatggaaaaagccagggtgctgaagaatattgaagaactttgggattctaaagaaaaatgatatgaagtatccatggaatgcgcgaagaagctgatagacagcttcgcataggtgggagcatattcatcagagtaaaaatttatccgtggtgatcccgaatgtgttgtccaatggattggcgaagaggtcgaaggttttgaagaaattctcagcgaccgtggggacttttgtgccttcgccggtgcacgatgggttgcagtaatattggagaaaactggctgtgaacacgttatggatgcaacccatgcagaagctatcttctcatcatacgacacgaatgaaccttcggctgatgcttctttatat

SEQ ID NO: 73866 - DNA, 520 bp, Zea mays
  unsure (1)..(520): unsure at all n locations
atcttgagtcacctgacgctgcagcttcaagcacaatttaaactgaagctgggccttcagagcccaccaaggtaaaacctttggaagccgaagaaacaaaaatggcataggcagccgaataaataaaaatgtcagagccaactttggtagaagaaattgacactgctgcccccgaaacaccttccaaaatatacgattatattgtgcgacacgcttcggngaagaaattatccgaagaagagattnttgaagctaatcactatgccagagaattgaaatatccgaagggggcactagtgttcaatgggacagacgaagatgacttcctatacttgcctccagagaacanagaattatctgtttgccgggagatggctagaagcatggggtttccgaagcttgaagctggactctgcgctatgacgaatgacgatcttgcggatagccttgcatataatagtctgaaggtgtgagaattgtatattggaaattacaatnnntgatcattttttattctata

SEQ ID NO: 73867 - DNA, 473 bp, Zea mays
  unsure (1)..(473): unsure at all n locations
tcaattngactacaaacagtatttaaatattgttttttcaattgagacttgtaatgatttcctatatggccaacataaagcttatatgacaataatctcatttcctattctttaataaagagagatacacaaactcagccaaagtcatgctgagaatgtaactgttaggccttgtttgattattcccattacacatgatttaaacctatccaatcccacttaatccatatggattgagagcgaaccgaacaagcctttaggtggttgtagcttaaaattttgattctgtgtggaccgttggggtgggtgggtccgataacatgttatttaaaggttactgacaagaaatataacatgttagcatgattttcgagttgataacttanaaaacaactgacatcaatataatcttcagcatgtgtaactatatctttcataaatctaaaggcaccaatcttggatggtggatatgg

SEQ ID NO: 73868 - DNA, 318 bp, Zea mays
  unsure (1)..(318): unsure at all n locations
gctacaacattgactcataccttcatggactaanaagtcattctatctttaagtcggtttatactgtcgaagcttcatggaaaggaaccttcggccatctcatgcaaacagcttcagccgaaagccgcttctcccttgaagaccttcggcgacgaagcatagacccaacaaccaccatatcctttgtggcatccgactgccccgacaacatggtgggggccggcgtgctgccgctcatcaccgcccctgttatcgccaacatgcgactacatcacgtgttgatcgacggaggggccggcctcaatgttatcagccatg

SEQ ID NO: 73869 - DNA, 497 bp, Zea mays
  unsure (1)..(497): unsure at all n locations
agctattcgtgacacttataaactaagcttcaaaggtgacatcttcagactagcctgataactattgttatatgagaactcagcataaggtagacttttatcccaactccctccatgctgaatggcacatgctctcaacatatcttccaatacttgattagttctttcggtctgtccatcagtctgagggtgataagctgtactgaaattcaacttcgtgctcatgttctcatganagcttctccaaaatcttgaggtaaactgcgaacctcgatcagacacgatcttctttggtactccatgttaacacacaatccgggccatatataactctgctaactgagaacctttataagtagtcttcacaggaataaagtgagccactttagtcaatctatccacaatcacccatatagcatcatatcctttttgggtgtgatgcantccaataatgaaattcataccaatctcttccattttcactcggtatcttcagt

SEQ ID NO: 73870 - DNA, 409 bp, Zea mays
  unsure (1)..(409): unsure at all n locations
tacagaagttctagaacatgactatgttgcatggaaatacttgagtgaagttttttcttacatattntcacactcctcctcaagcataacttctattaagtgttatactgcagaccatgctaagggggtgtttagaagcaaagtatctttgaagttntgaggtaaaccacggtattggagaataccatagtattnttggtgaaaggtgtttggctacaaggcacaaaactnnntgttgaataccatgtntttgtagatacaatggtatttctggagtatttaaaattctccaacccaagtttttgtctatgactagtcttgcaaatgtatactcaatatacatggttgagataattgtctcaacacgatatgctaaagtgatgtaaaaatactacgttatctcatgaat

SEQ ID NO: 73871 - DNA, 470 bp, Zea mays
taccctgtcctatatccagtgcatatggccagttatgatagtccttgatcatacaggcctacatatacatgcaatccttaattaacctgtgtggagcatcacctgttcctagcccaagtctcgagttaagtacttccatccttaggattgttttgtgttccttatgatgaaaagagcattatagggaactttgcagtaagatcccaccatgctcccaatgaaaatattcttgcaggtagaagccatccttcctcgggataacccctgagctaggcattattgcaaaagatagcctctatccacaagatctaagcagggctaagcatttttgtaaatcatattttgatacttcatcagaagtatctataaaggtatggatattaaggtaggcaatgcatcaaataatttccaagcaattcctataaacttaatgcacatttcactagacttaagtgtataaaaagtctttt

SEQ ID NO: 73872 - DNA, 339 bp, Zea mays
  unsure (1)..(339): unsure at all n locations
aagctagtatcagaccattcgacgctagccttcaacttaagaagntctagaactgacgcagtgaataaactctttgcacaaccctttgattcatcatataaagattattgtgaggcactntctagtcccttcattntagatagccctttctgcgatctcatagaactcaacatttctgggtccatatggcgcaacatctcttcgcaatcaaattcttcanaatcttgattagcatccacataatccactttaccatcaactntatctaanattctgacaactctctcgtcattaccaggcacttcacacggatccaactcaccatgttctgaccatatc

SEQ ID NO: 73873 - DNA, 453 bp, Zea mays
tcaagatggagcttcgttcaattctgacaaacaagcttcggcgatggttaaaaattttggcagcaaaacagtgcaaatagcagtaaatgctgtggtaacttcacacctactcgtctgtttatatagtgccgcatgtaagaaggcgaagcgccataagttttacaccatgcgggcacccgctcgcactcgctgaacggtggaccacagagaccgaacagtaactctgcatggtggggccgctatgcgcagggggagtgaatcgtttctcgacaacgagctcatggaaggtgtttttgagaccttcggcgctccgaagcttaagaaacttttttcacggatcaagctcgttacgaaaaacgatctatcaccgcgaaaggggctactgttgggtctatgcttcgtcgccgaaggtcttatagaaagaagtgatcctcggatgaagctgttcgtata

SEQ ID NO: 73874 - DNA, 419 bp, Zea mays
  unsure (1)..(419): unsure at all n locations
tagtctatcatccgcattccaacggngtcgtggaacgcgccaatgggataatttcacagctgtcaagaagatgctccttgatgaaaaaagggcagatggaccgaattgttacctgaggcagtctgggcactaaacacgactgagtgcagagcgactgggttcactcccttccgccttctatacggatcggaggccatgaccccgcaagaaataaagcatgggtccccgcgaacagttccgtccgccgtccccgacgtggatgagccaacttcaaaggatctcattgacggagaccgagtcttcgcctacaggccctaaacaaataccaagcccagaccatagcatggcgcgaccacacagtcatcccaagggagttcagcgaaggggacctcgtactcgtccgaacagctcggacggag

SEQ ID NO: 73875 - DNA, 472 bp, Zea mays
  unsure (1)..(472): unsure at all n locations
tctaaggcaattgataaagaagatagtgatgatgaatattataaaagtgagagtgatggagatatggctctatttgtaaagaaattcaacaaattcatgaagatgaagagaggtcaacctataagaggccatacatcaagaagaaatgctttcaatgatagaaaatgttttgagtgtggggaacccggtcacattgccatgaattgccctaacaagaagaagaagggaaaagatggagatgataagaagaagaagaaattttacaacaagaagaaagatggcaaagcctacctaattgaatgggattcggatgatagctcgaatgatgatgatgatgatgacacctcatccaagcttaatgtcggaattgccatcaatgaagctccctcacttttctcattcccccattgtctcatggcanagggagacgctnagttaanaatcatcactggattaaatgatatanatgatg

SEQ ID NO: 73876 - DNA, 460 bp, Zea mays
  unsure (1)..(460): unsure at all n locations
ctcgaccggatcttaagcacctgtgctgcagcttctncaggtctgtggtggctttcttgtatatatattgngttgngggtcctggtcggagccncttgatcatggcctcaatgacaatctcgttgggcactgtatgcgcttgagctctcagtcgcaagaaccttcgaacgtacgcttgcaggtactcctcatggtcctgtgtgcactggaataaagcttgggcagtgattggcttcgtttgaaaaccctataatctagtgactagcatgtcctttatcttctgccacgacatatttgtccctggccgaagagaagaataccatgtctaagccacacttctgactgccatgacgaaagacttcgccatgacgccagtattgcccccatacgaggatagtggtgcctcatagctcatcaggaactgctgtggatctgaatgcccatcatacatggngagctg

SEQ ID NO: 73877 - DNA, 465 bp, Zea mays
  unsure (1)..(465): unsure at all n locations
tcgggaaccccatacttctggccatctcccgatagacagattattctttgttgtctacgaggcagtataagaagtcatcttcgtctgtgccattaaacactaatgcccctttcggatacttcagttctcgggcataatgtttagcttcaaaaatctcttcgtcagatagtatttttcccgaagcatgtcgtataatataatcaagaacttcggaaggcgcttcgggagtaggagtggcagctctttcaggcagaatttgttctacagcttcttctttcgctgccttttgtccggtttcctaggatttctccttggcgggctctgaatgcccatcttcggtcttggcctggatctttgtagcttcggcttctgttagctttgtctcagtctgcgcttttgaagcctcgacagttttccctggagtagagcttgaagttnttatcgtctccagcacatctagtacac

SEQ ID NO: 73878 - DNA, 486 bp, Zea mays
  unsure (1)..(486): unsure at all n locations
agcttaccanatggacgtgaagagtgccttcctcaacgaaccaatcaaggaagaagtctatgttgagcaacctcctggctntgaagatagtgagtaccctaaccatgtctataggctctctaaggcgctntatgggctcaagcaagccccaagagcatggtatgaatgccttagagatttccttattgcaaatggcttcaaagtcggcaaggccgatcctactntattcactaaaactctggacaatggattgtttgatgccaaattatgttatgatatcatanttgggctactaacgaactacttggaagaattagtaggatcatgacacanaaattcgagatgtctatgatgggggagttgaagtattttctaggattccaagtcaagcaactcccagagggcaccttcattngtcaactaagatacacaaacattactaccagttgggatgaggatgccagccatcagacaccatggaacaat

SEQ ID NO: 73879 - DNA, 391 bp, Zea mays
ttatggtaaaagtcatgaaatgaccttaagaataaacttgaatcacttttatacccctgggataccagaaaccctaattgaaaccctggaaaaccctgaaaccaaaccctatggacctaagtgtaaaattagtccacttttgggctaaagtgcaaaaaccaagtcaaataagtattttaagttatttgggtcacttatatgagaatttgcaatccaaaacttgagatttggacttaagtgcaaaagtgccccacttaacctttttggggttaagtctggattttagtgacattggctcaactttggggctttgtaacttacaaagtataaggtttttaccctatgtcaccacatcaaagttgaagacccattataggagaacaactttgct

SEQ ID NO: 73880 - DNA, 368 bp, Zea mays
  unsure (1)..(368): unsure at all n locations
acgtcaccctcgtacctgagacgacggtgcagtcagtccccgacgtgacttcatcaccgcccgtcgaccaagaggtaccgaccgattcccatcacacgtcattnggattcagcctcaacccgcctggcggcttcgctttggcgggcgctctcgtagaggcgagcccaaaccccctgtggtttcgtatgcggtcaccttgggaccggctgacggacgtctcgacctacgggccctctgggtccgaggaagacgacgagcccagcttctggtgtgaattctctggacttggcaaccncagtgtcatgcgggacttcatgaccgcatgcgactactacctttccgactgttccgacggtagtcgtagcctc

SEQ ID NO: 73881 - DNA, 449 bp, Zea mays
actgggctcgcaagagtctgtcccgaacttcctgaatgaagtgatcccgctccttcaaaaggtcttcacgcttcctccatgctgcaagttgccaaccgccccgtgccatgcactgctgctgtgcaagttgcacggcaacacacagctgtgcagacatctcatactccatcgagggcttctccagggacattatcggtagccaaggagttgttgcgacaccctctaagctccacggcctcaccatgggccatgaagcaatggcgggacgacatcgaccgactactcggtatgacacattctacttcgatcaggtcaaggacacggtcatctcggcgccaacacgaggcgtcaacatctgtgcgctcactctcagtaatgggcgcacagaccaacgacctccggacagaactcaactgcaagcgtgtgggagaggatgcctgagtatcttt

SEQ ID NO: 73882 - DNA, 364 bp, Zea mays
  unsure (1)..(364): unsure at all n locations
aagtcacctgatgctgcagcttgtgccacctgcgtgtggctccntcttcaaggaatcagagtctccttcgacggagaagccagtccacgctcgccggatctctacccncgcggagacgtggacgggaaacaattaccatcttcgttccttggcacacagtcgttacgtgaccccgtgaagctcaccgtaccctcggattgaaccagttcgccgtggtttggccggtatactcgccgccgacgaggacacccgcctgcacacgtggaccgggcgattccggacacctacgacgccgagccgtacctcgacgtgagcgntagagtcttccngagccgaccacaaccttagncgtgacctcctcggc

SEQ ID NO: 73883 - DNA, 346 bp, Zea mays
  unsure (1)..(346): unsure at all n locations
gggacattnttcatcggagaagtaagcgaattcttggatatataaaggattctcttcacgaagcatgaaaagataggaaggtgttcttttttcgccaaaggctcaaaaaacggtatgtatgcaaagtttcatgcatcataaagaattaaactataaatagattatatattgcatttaaagctacaatatattacacatccttacgtttcaaatgtttctacaatatcattcaatcctctttaagtactatatacgcagcttcgttcaatatttgtgtgacaaccttgtccataatggcttcggacatttttctaatttcgtcaggccccttctggtggtggcccgg

SEQ ID NO: 73884 - DNA, 380 bp, Zea mays
agctttttcatcttctttcaccattctagcagcttgcctactcagaacgctaataaccctttttctttttgccccttcggcacctttgttgagtcgctcataatcagggtattcaaaatttagagcgtccattacccggttcaaccttcgttttggccgggtgccgaaggatgcagtcattaattgatcttcttttttggtataatttcccaaaatttcattgcacattgtctcaatcatttccagccactcttggcaaggctccttgaactatttctcaaacttaaaacgataaggcaatcgaacaagctaaagttttttctttgttccctttagcttcggcatgctccattcacttgacgttggagatgtcctattag

SEQ ID NO: 73885 - DNA, 458 bp, Zea mays
  unsure (1)..(458): unsure at all n locations
tgctttgaaataaatgtaaagtatatgtaattcgcttccgcatttctttatctccgatgttctgtaatgtctgcaagacgggtgaaacgttcctggtgaggtaaggaaagataccgagcttgtcaagtatttcatgggcacctacagggttgtctgaggtccgttggacaatgacaactgttaggtgggcctaattacnttgggagggttccgtcacatttccggtcacgatgtaaactgaccaatttgcaacgagtccggctttggtattttaatctactctgcgtaattagccgaaaccagagccgcttatgtatactcgatttcgccgcctaaacagcgtgccgaagaataaattgaattatatcctcgcacatgattacactcatacgacacacgattcgggttattttgcaccgagtattttagtcgtcgagttaaattaatctgtccgggat

SEQ ID NO: 73886 - DNA, 377 bp, Zea mays
agctagcataaagctgcaccgctgattctcagacatgtgtcaattctattaattatcttatccctatttgattctgctgttactttgtcataaacttacaaccattctgtatgtaaaaaaatgatccttctgtttgtgtttttttcaagtaacattgatcaatgatatgacggttaatttctctagacgttgttatttcattatgatatttgcatttttgaactcttcaagcattagaggattctagttagtttaatatttggtacgacttgcatttaactcggacacaatcttctcatcttgatgatctatatttgatctccttgtttgtgtagcattggctgtactgatattttcttgttgcaagagatgttgta

SEQ ID NO: 73887 - DNA, 506 bp, Zea mays
  unsure (1)..(506): unsure at all n locations
ctaagcttgagaaaaatgcaaatggcagaaatagtgtatcaaatactttcggtgttagttcatatttatacgcctagcacgctgcaacttggaggggcccatctgtcattgattgttgctattctagcaaaggaaaggtgtttttttggaccttcggcttaaggccttcgttcacgtcacagtctgaattcgttattataacaaattaatactgcgagggactactattgggggccttcgtcttccgaaggtcctcaaaaacatgattaacaatgtttcccaaagcataatatatgtacaggaaccttcggacttgggatgaagctgtacacaacatggagagcagggtcagaacgaatgttgaaccaacgccgaagttgtgcacaaagaagcttccgctcaatagcagaaaaaggaaccgacttaaggaggaaaaggtatttagtcctcgacagattgttcttaactcaatactgaatatgaanggcgtgaatgtaattttacac

SEQ ID NO: 73888 - DNA, 391 bp, Zea mays
tcttaataacctgcagcaacaagctggtggctgtagtctgatcccattgtcaacactggtcaaaaacgctcaaggaaattggaatcctattacagacgcatacaactctctcataggatcaacgccagagaggtctacaaaatctctcatgagcaggtgggacagtctcaaaactcaatgttttacattagctggatacatgaaggttgcgcttccacaaaacccaattggcatgactgatgcggataaagctagtggatgtactattatgcatatgttcttcatcaatgtacttcactacatgccaggggttcattacatgcattatatgtttaagctgacatctcttgcggctactcagtttgctgctgatgaaaagaaacccttccat

SEQ ID NO: 73889 - DNA, 494 bp, Zea mays
  unsure (1)..(494): unsure at all n locations
agctcattgaatacctgtgatcatatctcttctatatgctatgactaatgcgtgttcaagtctatttcaaaccaagtcatatgtatattgaaagggaattagagtcttcggcgaagacaaaggcttccactcctgaactcatgcttcgccatcactccgagcaactctctattccttggggagaaatgagcatcaaagaaaaggacttcatccttcgaggagagagtaaaagctcaaaagcaaaaggaccggatttcgtctttggtataatcttaactcatttacttatgaccaaaggggaagaacttacttcaagggctctaatgattccgttttggcgattcatgccaaaaagggggagaaatgatcccaaagcaaaatgaccgcaccaccaccaccaaattcaaaaacttagtgctttccaaaagtctgtatcatttggtatcctatngtgttcaaaagggggagaaagtagtatttcataaatggtatat

SEQ ID NO: 73890 - DNA, 373 bp, Zea mays
agcttgaggcttggagaatcaaatatatgctgttgaattgggtttgtaaggtgttattacttgttctagttgattaacatgtatttttgtcttggcacaaatgtggctttgagctttgaagtaacttggcacgtgtctccaactatgtttgcacgatcgccaagaacacaggaccttggccatgtgaaggttttgcttgaagaattgataaagcgctctactttctcctgcagatggatctttatgcatgtgacttggggatttctacgggattgacactcatgtatgctttacagacccactggagctgtattctttgctcctttgttggaggggagataatagggataagcaggggccttgctcatccttg

SEQ ID NO: 73891 - DNA, 193 bp, Zea mays
aagcaagttggagtccatcatccacacaagaacatcatgacgaccgacaggccgcttgagctactccacatggatctattcggcccgattgcctacataagcatcggcgggagtaagaatggccttggaatagtggatgataatcctcgctccacttgggttttctttttgcaggaaaaattctaaaccccaa

SEQ ID NO: 73892 - DNA, 376 bp, Zea mays
agcttatataatccacttcatcatcactagagtcatcatcacttgaagtagtatacttaggggtatctcgagcgcttacctttttctcctttgccatgaggcaagtatggcgctcgttggggaagagttcgatttgttgaaggctgaagcagcgagtccttcatcgtcggagtcggaagtagagcagtccgaatcccattctttgccaaggtgtgcctcgcccttcgccttcttgtaagccttcttcttctccctcttcccgctcttttcttattcctggtcattagtattatcgggacaatttgctataaaatggcctgtcttaccgcacttgaagcaggagcgctttccctttgctttgttcttgttagggtac

SEQ ID NO: 73893 - DNA, 470 bp, Zea mays
  unsure (1)..(470): unsure at all n locations
tgtgaaggttcttcatccncacatgtgctaagcggcgatgccacagccagcccatgctagtcttagctattaagcatgcatctagaccggcctcttcttttgcaaaatcaactaaataaagtttgccgtctaatacacccttaaaagctagtgaaccatcacttcttctaaagacagacacgtctacatttgtaaatagacagttatatcccatgtgacataattgactaacagatagcaaattatatccaagactctccactaaaaacacattagagatagaatgctcattagaaattgcaattttacctaacccttttaccttgccttgattcccatcaccgaatataattgaatcttgggaatccttattcttgacgtaggaggtgaacatcttcttttcccccgtcatatggtttgtgcatccgctatcaataatccagcttgaacctnncggatgcataaacctg

SEQ ID NO: 73894 - DNA, 376 bp, Zea mays
agcttctccttgtcgtgatgaaccttgacatagaaccactccgacttccagcctgctgcccatttgcttcggtagctgattacaggaaactttgtggttttccgataggtgaagatatagcaacctaagttggcgtgcaatccatcctttctagccttcggatgataatgcagctcgtgaactccgcaaaagctgtccgcaaatggctccactggttggcttcggagtgcccaaatataaacactaagcctaacgatagcgttaggggtcagctggtgaaaatagataccgaacctcttcagtacctctgcaataatcccatgtggggggaatcttaatccagcctttagaaagcttttgaaaataacaatttcat

SEQ ID NO: 73895 - DNA, 383 bp, Zea mays
  unsure (1)..(383): unsure at all n locations
tttgttgggactcattgggaattctgaatttcagaattctgaaattcagaccttgagccatagatcatggatgttcaccttgatgcctaactcgaatcctaatggccccattgacaaatttgtgtctaactaacccctctgtcgtgtgccataagatggcattgggacgcgagccctagacacgacaaaacttgggatttgtctcgggtttgggcagggagacagaccagatttcctggctccatatttctgcaaccagtaggcaaaatcctatgacctccacacaagaatggtagcttgtagggaggagaagatgttttgtgcactgacccaggcgagagcaagctctgatgagcgaccacactcgccagagcttgngcaga

SEQ ID NO: 73896 - DNA, 369 bp, Zea mays
agctttaatatctttaattgcttatatgtggtgctcaagttgtacaagtcatccccggacctcacaagtccctatgcaattgatgcacatatttagggggaggatgagttacaacttgacttccttgagactaacctatttgtttgagtatacttgaagtagtctcgaaggaacaattgaaagggaaagtgaacttggacaaagaaaatagcttccactacattccgatactatgtattttgtcctaagtttcattttgtgttctcattgccttttcgcttccatttgacattttttgtgaggcaatggggttaaaaggggccaaaagttttcccgttttggtgcttaatgccaaagggggagaaatta

SEQ ID NO: 73897 - DNA, 471 bp, Zea mays
ttgtcttgactatgaaggggccctcccacttgggctcctgcttgcccttggactccgtccgagctgttcggacgagtacgaggtccccctcgctgaactccctcgggatgactgcgtggtcgcgccatactttggtctgggcttggtatttgtttatggcctgtatggcgaagacccggtctccgtcaatgagatcttttgaagttggctcgtccacgtcggggacggctgacggaactgtacgcggggacccatgctttatttcttgcggggtcattgccttcgatccgtatagaaggcggaaaggagtgaacccagtcgccctgcactcagttgtgtttagcgcccagactgtctccggtaacaaatcggtccatctacctttttttcatcgaggagcatcttcttgacagctgtgaagattttccattggcgcgctccacgaccccgtggactgcgggtgatatactg

SEQ ID NO: 73898 - DNA, 372 bp, Zea mays
agcttcttcttcattctgatgaaaaccaaaccctttgatcacttcatcaaaacgaatgttccaactccgagatgcttgcttcaacccataaatggatttctgaagtttgcatatctttccagcattgatcggatcaacaaaaccctcgggctgtatcatatacacgtcctcatctaggtttccattaaggaaagctgttttgacatccatctgccaaatctcataatcgaaatatgcggcaatagctagaatgatccgaatagatttaagcatcgctactggcgagaatgtctcgtcatagtcaactccttgaacttgtcgaaaaccctttgcaacaagtcgagccttatagatgtgaacatttccatccat

SEQ ID NO: 73899 - DNA, 501 bp, Zea mays
  unsure (1)..(501): unsure at all n locations
ggatgaaactcgcgttgttgggtgggcccagcacgtcaggccttcacctgagcaacgtgcgtgcggacttgccccagagccgctgtcacgtggacccctgccgttagctggagctgcccacgagcgcgaggactcgccctcataccaccgccatgtgggaccctcttgccagctacttgttcaacctccagtctgataagagggctttgtcctcatccaacaaaacagaatgtgcttgtccgtgtttttcatgaagcctcactagccaatcccaaaatgcccaggatttgcccctataaaatgcgacccattgcccataaagcatcatgtcgagatcccctacctcctagtgtgacaccacaaccaccgcgaaacatgagatggcgaagagaggagaattagccatcgtcgtggtcccgcacctctgtcgttgttctgtgcatgtggtgtgggccaggatgatcgacngatcatgtacaagctctttgtggagtcgtcgag

SEQ ID NO: 73900 - DNA, 322 bp, Zea mays
agcttgcatgacgtgtgggacccaccccccttgttgtatggggaggaccatggaacgtgttggaaaagactcactccgcgcctgctgatgacgcaagtggggagagtctcctttaaaaggaaggtgacccccttggatggcaaccatgtcttcgcactctcctcatgcattgcgccctttcaccttccgagcccccggatggggagcgctcgcgttgctttcgtcttgtcgtcggtggaggaacgcaacttctcggaagatggtacctttcagacatcgattggcttcaaggattttcatcaggcagcccggcttgatcccc

SEQ ID NO: 73901 - DNA, 424 bp, Zea mays
gactattcacaatgagcaatcaagtgtacctctatggaaccactttattttggaaaacccttgaaaacctttgatgtaaaatccaaaagaacattgagtgatatatgtattgggcaagagattattctttattttatagttgagggagacagatggacatatgcaccacaggcatgatataaggcaagcattaatcattttgctatttagaataagtgtgatgctaatctctttctcttggtcatcttatcgaaacacatattgtagaaactcctgatccactacctttatcttagctttgctcgaggttgagcaaaggtctaagcttggggtgttgacgaccatttattcatgatcaaatccatcaatatccatatggacgaggacaaagtgaataagtttactactgagtgagttccataag

SEQ ID NO: 73902 - DNA, 374 bp, Zea mays
agcttgtggaaagacaccgaacctaattgtttgtcttaagtgaagggcaaggtggaacggagggaaaacgggaggaggcgcgcggcgacgggcggcagggctgtctaagtccaagcatgtggaaagacaccgaacctaaagtgcatgtcttgagtgaagggcaaggtggaatggagggaaaacgggaggaggcgcgcggcgacgggcggcagggctgttcggccttgcgtttgggctgaaaacgaggggttcgccatggcgcacgggccgaaaactgaggctcgggcacgaccccgaaaataagctaagtccaagcatgtggaaagacactgaacctaaagtgcatgtcttgagtgaagggcaaggtggaacgg

SEQ ID NO: 73903 - DNA, 441 bp, Zea mays
  unsure (1)..(441): unsure at all n locations
ccgatctgttatatcgaacatgcgtacatattctttctctctaggtatgcatgccagacgtggctctgttctgctggctaagcctctctactgactgtaattctcctggcaacatgcatttgagacaacacgtcagaacaagatcttgtgcatgatgcattaacagatctaccaaatgatatttgtaagggaacactctaaaatctgttatttaaatccaaagttagctgtatcccgactatcagctagctatcacaacccccagtccgtggaataggaataacatcaaatttcntcagctaactatgtgcagatcgataacaaggaccagttataatggttattcaagatgcctaatctattatgcagttcatgatctctaaatgtattcatggttcgcctacgctaattgacgaacactgtcattgagaacatgctggt

SEQ ID NO: 73904 - DNA, 350 bp, Zea mays
acatgtgctaaacggcgaagccacacctagcccatgtaagtcttatcaaataagcatgcatctagaccggccccctcttttgcaaaatcaactaaataaagtttgtcgtctagtacacccttaaaagctaatgaaccatcacaccttctaaagacagacacatctacatttgtgaataaacaattatataccatattgcataattgactaacggataacaaattatatccaagtgactcaactaaaaacacattagaaatagagtgctcggatgaaatagcaatttttcctaaccctttcaccttgccttggttcccatcaccgaatattattgaatcttggggatcctt

SEQ ID NO: 73905 - DNA, 365 bp, Zea mays
caaggcaacataaaatggtaaatgtcaatgcccttcgtccgctgaagcattattcccttaaggatttaatgaacttcggacgaaggttaacgacggtacaattacgaaggataaatctttgtaattgaactctaatagattatataaaataatacgagatatgaagcatcaaagacaaataaattataaatgaataacatcgctttcatattatattagcttagtgtattcaaatattagacacatttgtacctctgccttggcgaagaataattccgagtgcgcgattgcaataatgaatggtgaacagtaatgaatattgtcactattatatgccaagaccaggctgtaagaattacaatatg

SEQ ID NO: 73906 - DNA, 368 bp, Zea mays
agcttctaaagggagagcacattttatgactaaccaatgttcattttgagaaagacaggatttgtatcgcatgccaagcagggaagcaagttggcactcatcatccacacaagaacataatgacgactgacaggccactggagctcctacacatggatctattcggcccgattgcttacataagcatcggcgggagtaagtactgtctagttattgtggatgattattctcgcttcacttgggtattctttttacaggaaaaatctcaaacccaagacaccttaaaaggattcttgagacgagctcaaaatgagttcggcttaaggatcaagaaaataagaagcgacaacgggacggagttcaagaac

SEQ ID NO: 73907 - DNA, 453 bp, Zea mays
  unsure (1)..(453): unsure at all n locations
tgcaagcgtgtggaatggaaagacaaccaatcttatgtgtatgtatggcttgagtgaagggcaaggtggaacggatggaaaactggatgaagcgcgcggcgactggcggcatggctgttcggccttgcgtctgggctgaaaacgaggtgttcgccatggcgcacgggccgaaaacggaggctcgggcacgaactctaaaataagctaagttcaagcatgtggaaagacaccgaacatacagtgtatgtctttggtgaatggcacagtggaacggagggaaaacgacactgaggcactcggcgacgggcggcatggctgttcggccttgcgtttgggctgaaaacgaagcgttcgccatgtctcgcgggcccaaaacaactgttcngccacaggcttgaaataagctaagtcaagcgcgtagaagacaccgaacttatgtgaagtctggctgaa

SEQ ID NO: 73908 - DNA, 382 bp, Zea mays
gagcttgccctcgctgcgcggcggctcggccgcgagagttggagtgcagcgacaaattcgtgagatccccggctctccgctcacgattacccccaggagcaaatccgccaaggtcttgcgcaccgtcctgacccgctcaaggccccagtcgacggtgacgatggatacgcacggcggaacagcggaacggcagaacggtgcccccccccccccccgcggaagcaaggattcgacgcggccacggagctaggaaaagaagcagtgtgctaacgagctccatcgggtcggcagcgccgtttacagtgccttccgcgaatcagccgcaacggcagggtgaatcgtggtcgagatgccaagcaatggaggcgaaagtgacgggaaa

SEQ ID NO: 73909 - DNA, 454 bp, Zea mays
  unsure (1)..(454): unsure at all n locations
agcacaataaatgccaagtggctagaaaggagtctcaacaaaacacaataccacaagagatcaatcacagagatgacacagtggtttatcccgtggttcggccaagaccaacgcttgcctactccacgttgtggcgtcccaacggacgagggttgcaatcaacccctctcaagcggtccaaagacccacttgaataccacggtgtnttgcttgctttttctcaatcccgtttgcgaggaatctccacaacttggagcctctcgcccttacaattgaagttcacaaagaacacagagcaaaggtggaatgagcaacgcacacaagacttcaaaagatcagagcaacaacacgcacacaagttgcaacaagagctcgcaacacaactcaatgagtccacaactcaacaagagctctagatgctatcacaatgaaccaaatgcgtggaatcgatgtc

SEQ ID NO: 73910 - DNA, 379 bp, Zea mays
agcttctaaagggggaacacattttgggactaacatatgttcattttgagaaagacgggatttgtagcgcatgtcatgcagggaagcaagttggtgttcatcatccacacaagaacatcatgacgactgataggccactcgagctcctacacatggacctattcggcccgatagcttacataagcatcggcgggagtaagtactgtctagttattgtggatgactattctcgcttcacttgggtgttctttttacaggaaaaatctcatacccaagaaaccttgaaaggattcttgagacgagctcaaaatgagtttggcttaaggatcaagaaaataagaagcgacaattggacagagttcaagaactcacaaatcga

SEQ ID NO: 73911 - DNA, 399 bp, Zea mays
atgttcatttttaaaaagatagaccttgtgcagcttgtcaagcatggaaacatgtgggaggctctcatcacacctaatatgtgatgacaacgtcaagacccctggagctgctacatatggacctcttcggaacccgcgcctatctgagcatatgaggaagtaagtatggtctagttatcgttgatgacttttcccgcttcagctgggtgttcttcttgcaggataagtctgaaacccaagggaccctcaagcgcttcctcaggagagctcaaaataaagttgagctcaaggtgaagaaaataatgagcgactacgggtccgagttcaagaaccttcaagtggaggagtttcttgaggatgaagggatcaagcacgaattcttcgctccctacacaccac

SEQ ID NO: 73912 - DNA, 377 bp, Zea mays
agctttcatggaataataatatgagggtcaaggatcaagtgagctacagcatcttctcgggctgtcgcagcacaagcacaaggtacgtgcacatctgcacacgaaggcgtgaagcaactttattgggcagcagtaccacttgcaggttcccgaagcaacttggattctggatggagctccagatgttctgcatatacggagtatatatactggctggatccttgggagttatcaggaacagggggcgccacatagcatcacccagcacttgaccaattcttcttttttttatggtctcggcttgattagtttttcacgcatgcaactaaccccatcccgctgtccatcatgcggtctcccgctttcccccagatggg

SEQ ID NO: 73913 - DNA, 529 bp, Zea mays
tctttttcgtaccttaaatactcagctgttatcaatctgctgttagagaaggacaagctaggacaattatggctgcaaactgacattcggttcgttggtctactgagctttgagcaggctagcttaatcctaaagtagacagacgggtaatggcaattatggctgcgagcaacatgaatgaaaccatactaattccttgagcagaaaggagagaggtgacattgaggtcgatgacaagtgttcattaccacgaaatcgttgtgcactatcgatttatggaatattttttgtgccatcgcaacgcataggcaattaactagtatatatgaactggttcagcaagagaagtctggatacagtctagatgaaagtttgggtctgagaagaaatccaaatgttgcagctcttttatggagtgtccgccacagaaagacaagtcaacggcgtgagagcatcaaactcgaacgttctaaatgatttttagcactaacaattacaatttacaacagacaccgtcattcgtcaattc

SEQ ID NO: 73914 - DNA, 374 bp, Zea mays
agcttgaagccaatttcttcactttccgtctagggctttgcttggcattgggcttcgatatagctggtgctttcctggtcttggattaaacctcagctctcctaattccgtctataggtggttcaatcttataagtttagcttaagtacatcgattcaatcctgccccaggcgtacctgagacaaccctttcctcacccgagaattgcatttccgcttcagcttccggcgcatccaactttttctggatctaggcaaggatcctcagtcctatagaaagaaaagaatctaagttcattagattatgcttccttgcccgtgtggaacatgtgtgagcattatgtttttccaacaagtgatccgactggaagaagt

SEQ ID NO: 73915 - DNA, 491 bp, Zea mays
  unsure (1)..(491): unsure at all n locations
ntaagatcataaatataattaagagatcatatctatagatagtcttatagagacagactctntacgaatatcttttgttcctttcatttgtctttaaacacctctcaatagatcacattaatatggtgttgtataagctcttaaaatatctagagaatccgatttactaatgtaatatatgtattttattttataaaaataaaagataataaggtcatgacccgttacaataatccagggacttgcaagaggtgcaaagtatttgaaagtgactactaccagcgcacagtgcagacggtgatccattgcggagatttttgcagcacagcacccaacgccaatccttcgtggtctatactaaattatgcgacggaatctatgaggcatgacggtgacgtggctattggcctaattaaaggcctcgaaaagaaagattgagcatggcaacttgctagagcctactccctgtgctaactattccctgtgctccg

SEQ ID NO: 73916 - DNA, 505 bp, Zea mays
  unsure (1)..(505): unsure at all n locations
ggcatgccaagnccttctgtctcanntctcccagacaagacaagaatatttctctttttgtctgtcnnncgggaagaaacagtacccaaaaaaatcccttctttcttcnccgctgcnncgttagaaacnnactaatggcnncccctnnntcggatanttntnncagcttctggggggcataggggttgaagccttnnctcgttctcttctttatttaagaagaagtcnntttttctccggaagccatggacganatgggatatannttcaatacctttttcttttagaaaagctttgggaagccaggagcgnnngcagttttcttcaaggcaannnactcggctctttatagcncctctntccttctgggctgccttcnnntcttcaatttctgggagggttgggtttnnntcagcagggcttctgtaaggccnnncagcttcggcaccttaacctgtgcttcaactggtcagcttcanancctttagccccgatctttggtttt

SEQ ID NO: 73917 - DNA, 496 bp, Zea mays
  unsure (1)..(496): unsure at all n locations
actcagcttctaagggagaacacattntaggattaacaaatgttcattttgagaaagacagggtgtgtagcgcatgccacgcgggaaagcaagttggaacccaacatccacacaagaacatcatgacgaccgacaggccgcttgagctactccacatggatctattcggcccgattgcttacataagcatcggcgggagtaagtattgtcttgttattgtggatgattattctcgcttcacttgggtattctttttacaggaaaaatctcaaacccaagagaccttatagggattcttgagacgggctcaaaatgagttcggcttaaggatcaagaaaataagaagcgacaacggaacggagttcaagaactctcaagttgaaggctttcttgatgaggagggtatcaagcatgagttctcttctccctacacccctcaacaaaatggggagtggagaagaagaatcgaactctattggacatggcaagaaccatg

SEQ ID NO: 73918 - DNA, 374 bp, Zea mays
agcttcctcccttctttgccagaagtcattgtctgcccggatgtactcatccattttctgaagcaacttctctagagtttggggaggtttcctggcaaagtattgggccgtaggtcctggccgaaaacccttgatcatggcctcaatgacaatttcattgggcactgtgggcgcttgtgctctcagtcgcaagaaccttcgaacatatgcctgcaggtattcctcatggtcttgtgtgcactggaacaaagcttgagctatgactggcttcgtctgaaagccctgaaaactggtaaccagcatgtccttgagcttctgccatgacgtgattgtccctggacgaagagaagagtaccatgtctgggtcacatttc

SEQ ID NO: 73919 - DNA, 492 bp, Zea mays
  unsure (1)..(492): unsure at all n locations
ggggagttatgattntctcaagtctagtcttggaatctgtccagattctgtacagatntcgaaactgaccttgtttgtctaagttaaacttcgaatcagttcttataaattataaagaagtggtagtactttccttaagctttccaacaaattttggatcaccctttttggtgacctataagttaagctacagttgttttaagtggaatctttgaatctatccaaatttggacagcaaagcctttcttatgtcttttgatcttgatatgcattgaattaacctaatatgtttataaatgaaatatagacaattttactagcttcctaaaaagtctaggagcgcctcaattggatgactgagactccaattatggatttttgaagtgagtagttgaattctgtccaagtctggacaaaatttacgtattgcattgtttggcctttctaagtgtcaaatcttgtggtgatgataataccaagggtatagtggac

SEQ ID NO: 73920 - DNA, 376 bp, Zea mays
agcttccttcgaaggattttctgtcaaaaatatccctcgaggacaaaatgagcatgctgatttgctagctaagtcagcagcacaggggctgcccttaccttcggatgtgttcttcgaaacaataaaagcaccttcggtggaacttcttgaaagagcagtcctcaatatatctcctgtttatagcgaagattggagaactgagatcatctcttaccttcagggtaaattcctttcagatgacgaaacttataacaggaggatagaggcaagagctcgtccatatgtcatgatagaaggggagttgtacaagcatggagtttgtgctccattactcaagtgtttatctagaaccgaaggcatagagttgatgaaagaa

SEQ ID NO: 73921 - DNA, 493 bp, Zea mays
  unsure (1)..(493): unsure at all n locations
tctcttggatggctntggcatatgaggctngcacatgttgtgatgagcacactcaagaaggtattaaagaaagacatggttagaggattaaaggatgtggtgttggaaaaagacaagccatgcagtgcatgtcaagctggaaagcaagttgctaatacacatcctactaaagctttcatgtcaacatcaaggccactcgaactacttcatatggatttatttggacctacaaattatgtaagtgctggtggcaacctctactgtctagtgattattgatgacttctcaagatacacttgggtgttctttctccatgacaaatcagaagttgcatctatattcaagaagtttgccaagatagcacataatgaatttgattgcnagatcaagaagattagaagtgataatggcnaagaatttcacaacaccaacattcatgagtactgtgatgaaactgggatcaagcatgaagtatctgcatcatacacacctc

SEQ ID NO: 73922 - DNA, 371 bp, Zea mays
agcttcagacttagtgttagtctcgctcttatttagtcttagatagacagggtagtttgctatatcctgtgcatttatgtttgtcatgatgaactatgattggcttggatctttgtaatgattgtcaccagagtgtgggtatcccctgcattttggtttacatactatgtcaataaagttagttatatagttgggaaaacttttattccactttcctctttatctgagaagctgtgtggtctgtgttggagatcagtgaagatgctcatctgttcagtgctgttgaagaattctattctcttttcttatgctgcaagctttgccagatcagttctgatgtgtggttgcgttctgcagatgtcagagaacag

SEQ ID NO: 73923 - DNA, 466 bp, Zea mays
cgtatccaatctgcttgagcctgtactattatagcctgccagatgcccccgttcctgtcgaccacgaccagcacccaacataagacttccctagttatttaaccaagaccagagccatgatagttctcatggttgcactgttttcccgggtggtcactccatgttccaattaatatgcaataatcttgttaaccatcgggttaacaacaataatgtaaacttaccattttgaaacattaatatcataagcgggaatgacttgcataaagttaaattgtagcaatagcatatctacaaaggtaaagtataattcccaatgttgatcaaagaataatgctggaaaggttatctaaatatgtaaccccgcagattatgcatatatatcccaaagaataaactttattaaatgtattatttgggatcaaacagagtatgcacggggagaagttcacttgccttgcttatt

SEQ ID NO: 73924 - DNA, 368 bp, Zea mays
agcttaaagccatggtaagtagcatattctttttatatgcgaattgattctaccctagctatgggagcataagtttcaccaaaatccaaaccttcgacttgtgaatatcccttggccccaagtaaggctttgttccttgtcaccacaccatgctcattttgcttgttgcggaagacccacttggttcctacaacattttggttaggatgtggaactaaatgccatacctcattcctagtgaagtagttgagctcctcttgcatcgccaccacccaatccgaatcttgaagtgcttcctctatcttgtgtggctcaatagaggaaacaaataagttatgttcacaaaaatgagcaacacgagatctatt

SEQ ID NO: 73925 - DNA, 439 bp, Zea mays
  unsure (1)..(439): unsure at all n locations
ctcaagcttaaacagatctatccgcanaataccaagtggacatactgtttctattctaggctaatcacatgggctgtccacatagctcggcattcttcgaacggccaagcgcggagcgcgactatgacggtggctgcgatcatacaccagtttatggacttggcgtatctgtcacaccatggatactaaaacagcaagggtagcggaatgtctcaccgagggttgatgacatctcaagcgggtctgctccaaaatcagcaaacgcccggcgagcgttacgacttgctgtccaccgtgcttcacaaaacaacgagccggcagcatgcggcttgctggacatttatactaacagccggcgggctccacggataacaacgaggaggaggctcgctgtttgctgaggatggcacacggaaaaaaatggagcatggaggggaga

SEQ ID NO: 73926 - DNA, 374 bp, Zea mays
agcttctgaagttggtattagttcttcctgttgcaactgctggtgttgagagggtcttttcttcaatgaaccacatcaaaagcaagctaagaaataagatgggacaagaattcttgaatggttgtttggctacatttattgaaagaaaattcttcttgcaagccaaggataaagacatcatcgctcgttttcaaaatatgaaggatcgaaaacttgtcttataatgtaagcttccttatcatttagatatttattatcctttatatatttcaaatattggctcttaccactggcattgaagaattttattttttgatcaattttatgcccatctaaaacttgattttgtttgttagatattatatgtatgatat

SEQ ID NO: 73927 - DNA, 494 bp, Zea mays
atggacgtgaagagtgccttcctcaatggtcctatcaaggaagaggtctatgttgagaaacctcccggctttgaagatagtgagtaccctaaccatgtttataaactctctaatgcgctttatgggctcaagcaagccccaagagcatggtatgaatgccttagagatatcctgatcactaatggcttcaaagtcggaaaggccgatcctactctatgcactaaaactcttgacaatgacttgtttgtatgccaaatttatgttgatgatattatatttgggtctactaacgagtctacatgtgaagaaattagtatgatcatgacacaaaaaattcgagatgtctatgatgggggagttgaagtacttcttgggaattcaagtgaagcaactccaagagggcacctttctaagccaaacgaagtatactcaagatattctaaacaagtttgggataatgatgccaaacccatcaagacacccatgggaaccaa

SEQ ID NO: 73928 - DNA, 378 bp, Zea mays
cgcatgcaatcctgcacacatagctcttctgaatacctttgatcatatctctattatacgctatgactaatgtgttttcaagtttatttcaaaccaagtcatacgtatattgaaagggaattggagtcttccgcgaagacaaaggcttccactccgtaactcatacttcgccaccactccgagcaactctcttttctttgggggagaaatgagcatcaaggaaaatgacttcatccttgagggagagagtaaaagctcacacgcaaaaggacttcgtctttggtataatcttaactcacttatttatgaccaaaggggaagattgcacttcaagggctctaatgattccgcttttggcgattcatgccaaaaaggggg

SEQ ID NO: 73929 - DNA, 502 bp, Zea mays
  unsure (1)..(502): unsure at all n locations
tctatagggagaacacagtgtatgactaacatatggtcatntcgagaaagacaggcgttgttgcgcatgccaagcacgaaagcaagttggtgcccatcatccacacaagaacatcatgacgaccgacaggccgcttgagctactccacatggatctattcggcccgattgcttacataagcatcggcgggagtaagtattggcttgtaatagtggatgattattctcgcttcactagtgggttcgttttgcaggaaaaatctcaaacccaagaaaccttacagggattcttgagacgagctcaaaacgagttcggcttaaggatcaagacaattagaagcgacaacgggatggagttcaagaactcacatattgaaggcttccttgaggatgagggcatcaagcatgagttctcttctacctacacgccacaacataatggtttagtggagaggaagaatcgtactttattgaacatggcaaggaccatgcttgatgagtac

SEQ ID NO: 73930 - DNA, 358 bp, Zea mays
agcttgtacaaagtccacttgtttttatattctgagaaacccgacctcgctgcaacatgacacccgaaggttcaacacaacaagcaatgagtgaatttaaaattatttcagagcatatcagcacaagggacttggttcaagagctcttatctttcaaagtttttcccagcttaaaagaatgggaaatgccgaagctacaaggggagaagaaagaaggtgaacttgtacgtttaccttactacttcaagtttaagaaatactttaaagcaccttgccaagagtggttggaaacgattgaagcgatgtgcaatgaaatacttggcaattattctaaaaaagaagatcagttgatgaccgc

SEQ ID NO: 73931 - DNA, 520 bp, Zea mays
  unsure (1)..(520): unsure at all n locations
ttacggacactataaaactcagcttctaagggagaacacattttaggattaacaaatgttcatttngagaaagacaggatntgtagcgcatgccatgcaggatagcaagttggagcccatcatccgcataagaacataatgacgaccgacaggccactggagctcctacacatggatctattcggcccgattgcttacataagcatcggcgggagtaagtactgtctagttattgtggatgattattctcgcttcacttgggtattctttttacaggaaaaatctcaaacccaagagaccttaaagggattcttgagacgggctcaaaataagttcggcttaaggatcaagaaaattagaagcgacaacgggacggagttcaagaattctcaaatcgaaggtttccttgaggaggagggcatcaagcatgagttctcttctccctacacgccacaacaaaatggtgtagtggagaggaagaatcgaactctattagacatggctagaaccatgcttgatg

SEQ ID NO: 73932 - DNA, 375 bp, Zea mays
agctttagatatcctatactgtctgccttctcccggcagacaaatatctccttattgtccggaaggcaatataaaaagtcgtcttcatcagtgccgttgtataccaaggatctctctgggtactttagattcctggcgtattatttagcttcgacaatctgctctttcgacagctgtttccctgaagcatgtcgcacgataaattccagctcttcagcaggcacttcgggagcaggagacttaaatttcttaggagcactttctttttccaaggtcagaggaatagctcataaagatatacctcaataggagctgatggactagcttcgacagtatctagtgttatgccagcttcactagatttctttgggattt

SEQ ID NO: 73933 - DNA, 408 bp, Zea mays
  unsure (1)..(408): unsure at all n locations
ttcgccgacaacttctagggcacatatgtgtgccctaggaactcctaagatctccgaagctgccgccagcagccgggagaatccctctgggactacatccggcgantttcaaagcagcgcaccgagctgcccaacgtcaccgactcagatgtcatcggtgcgttcctcgccagtaccacttgccgcgacctggtgagcaagctgggtcgcaagacccccaccagggcgagcgagctgatggacatcgccaccaagttcgcctctggtcaggaggcggtcgaggccatcttccggaaggacaagcagcctcaatggcgccagccggaagacgttcccgaggcgttcactcatcgcggcaccaagaagaaaggcaagaagaagtcgcaagtgaaacgcgacgccgccgac

SEQ ID NO: 73934 - DNA, 373 bp, Zea mays
agcttcgaaaaaccaacactctttgatagagtgctgataatcttcgctccagttcgatctcgcatacatcgtaaggcttcttcgttaattctgtcgaagagcatcactcctggctggtagccacaggatatagcatactcctgcagctcatctttctcagccttggataattcttgactaattatattttgaaaattgaagcctttttcttccgaaatatcttcggcaatttccttccccttttcaggcactgtggccaggacttcttctgcagcagtagcagtctcctccgcaggcaaatccaagagcactttatcgatagcagacaatgtactctccaggttggtagcttcggcagtcgcagcttcggcag

SEQ ID NO: 73935 - DNA, 493 bp, Zea mays
  unsure (1)..(493): unsure at all n locations
tgtgaaggttcttcatccncacatgtgctaagcggcgatgccacagccagcccatgctagtcttagcaattaagcatgcatctagaccggcctcctcttttgcaaaatcaactaagtaaagtttgccgtctaatacacccttaaaagctagtgaaccatcacttcttctaatgacagacacatctacatttgtgaatagacaattatatcccatattgcataattgactaacagataacaaattatatccaagagactcaactaaaaacacattagatatagagtgctcgaatgaaatagcaattttacctaacccttttaccttgccttgattcccatcaccgaatattattgaatcttggtgtcggggaccataattaggggtaccctcaagacgcctaattctcagctagtaacccccatcagcataaagctgcagaggcctgatgggtgcgattaagtcanggatcagtctgtacgagcgactcgatca

SEQ ID NO: 73936 - DNA, 372 bp, Zea mays
agctttaacccccccgcgagaccatttcccttttctttctaaccataatgaatgcgatatcgaatgtcatacttgatgcatattcactttatttgttcccttgtatgatgtactgtttgtttcccaatttgaatggatgtatgtatgtatgcttgcaatcgcatagagaacgatccggtcgaagagcccgaggaactcgcaggagaagcccctgagcagcagtcgtttggtggaggcaagtgtcccttgacctatctatgtcccaatcattatttaattcacctcccgctttacacatttatgcctaaggattgactagcttctgttatccatgtccttgttcacctatttgggttggatcattactgttta

SEQ ID NO: 73937 - DNA, 500 bp, Zea mays
  unsure (1)..(500): unsure at all n locations
tttgtatcatttggtcgaaggtgttntccttgaggaccttctgttgagataaagaccccaacagtagccccttcgtggtgctagatcgtttttcgtaacgagttcaatccgtgaaaagctcgaaagcttcggaatgtctaaggtccgaaaaacaccttccctgagctcgttgtcgagaaacgattaaaatattccacgcctcgggtgatccaccgctcaaccagtgtaagcggtatgacagtttgccttcttcccctgtagcactatataaacatacgggttggtgacaagttaccacaacatttattgtcatcgcactgttgtgctgttaaaaatttgaaccgtatccgaagctttctgtattgcgattttaaacaagcgctacgtcagcttcgtcttataaagcgtgactactgaaatggcagagtacaatccactgctatggtgtctcgtgagggggacgatgccgaatcgaccgatacaacaccaatattagaagt

SEQ ID NO: 73938 - DNA, 372 bp, Zea mays
agcttgtggcgccctcgggcgtcctgccgcagcctaagtaccaagtctcccacctggaagtctcggagctgaacccctcgggcgtggtagcgtcgcagagactgctaataccgtgccgagtgtagtaaggccatgtcccgagcctcttccagctggtccagtgagtcttctcggctggtctggttgctttggtcgtcgtacgcctttgtcctcagggaaccgtattctaagtctgtgggcaagatatccttggccccattgtggaggacagatatcccccgggtccactaaaagagtaaaagacctcacgaaaggcccaagggcccaataaatcgtaaggtcattctttcgtgggcctggggagggacaatc

SEQ ID NO: 73939 - DNA, 482 bp, Zea mays
  unsure (1)..(482): unsure at all n locations
tgccgtcctncgatccatgctgcggccgggcgtactgatatattactattagtatagtaaggagtatggcaatagtaattaatactataataatgcatgagggcatgagagtatggcagctgggcacacacatcgagctggaatctgaaattcaaaagccgtctactactatctagccctggcttctgactgcagggaggaggagatgggcccagccgccagcgcaaggcattgacctgctagtactatgcaggaggataggataggatagggatgttccgcgcaaggcattttattagtggtttggctgctgctgaatngcctggtacggtgggtgggttcctctgtttttcaacgcgccaaagctgttcacttgtcgtctgtgtctgtcctcgtgcacagcgatccgtcgtcaactcgtcatgcatgtgctcctcgcagcaggtgtggtggacttgttgctcangggcagcangagcacg

SEQ ID NO: 73940 - DNA, 367 bp, Zea mays
agcttgtactagtactgccagttgctactgctacagttgataggattttctctggcatgaagattgtgaaaacaaatttgcgcaaccgcatcggtgatcaatttatgagcgattgttttatttgctacgtggagaaagaagaagtgatgaaagtcacgaatgagtctgtgattcgtcgcttcatgaaaatgcaagaacgccgatttgatgatgattaaaggtgacaattaacatataatgtattttgtctattttgatagttgtgaccatgctaatagtatttatatcgccattttcttttgctactctgttataggcgcacccccctctgttacgctctagcttcgccactggttggggcggcggc

SEQ ID NO: 73941 - DNA, 530 bp, Zea mays
  unsure (1)..(530): unsure at all n locations
tacggacctatnaaactaagcttgtatgactaacataacctaaagtctaaactgaatgcttacttgagttagaagatcatattacctatagcacaaatgtcatgttattctgactattttaggaccaacaaaccatttggaagccaaacaaatccctgttcaatttgcctcagagcaacatataagaaattacatagtcagcttctgaatacgtgcactgctcttaaatgaagaaaactggagccaggcaaaaaaataagtgaaactatacccacaaataacccagtgaaatcataaagctaagggtgcacatggatcggacacaatcgtatatcactaatattacatttgtttccagatttctattcggatttgaatatggatagtatcaactagctatgtcggataggatacaaatggatatcgacatcataaacagaattatttgttctgatatggatgcggtatcggatgttaaacatccagactcaaatacgaacggatctgaactnctctatacaaattctatg

SEQ ID NO: 73942 - DNA, 355 bp, Zea mays
atctattgacttgtgggcccgcctgggtgttctgtgcacaccggacatctactgttccttgtcccgagtgccggagtgggcgcgcctgccatctgcgcgcgcagagcgcgcattaaatgcgccgcaaaaagccgttggcgcggagaaaaccgttgctccggagtcgcaccggacagtccggtgcacaccggacagttcggtgaattatatcggacgagccgttggcttttcccgaagctggcgagttcctgaggccgacctttattggcgcaccggacacaatccggtgtacaccggacactgtccggtgtacaccggacagttcggtgaattatagcgaagtcgcctctggcca

SEQ ID NO: 73943 - DNA, 465 bp, Zea mays
  unsure (1)..(465): unsure at all n locations
agccgaggccagcaganattctgaacagagctgtatatctagctgatcctgcttgatagcagcatagtaacctcacggagagcattacaacgcactgcactcagctctacctaagaacatacaagaaccctcgtacaaaagacgccggcaggtcgcagagtgatgtcagaaacaaagcaactcaagcgacatgggagagttgccaacagatgacgaaaccaatgactgattgttaacgatcgcatgatcatcttgaacctttttttaattcgatatgaagagaactcggataggcagacctactcatcattttcctgaacattttccagaacggtaacttgtacattatgtctactggctgccatttttaatgagcccaggtatctgagaaaagtgaaatgtcaaatatcaagtcaaggcaaggagaaaataaggtggagaaactgcatattttcanaccataag

SEQ ID NO: 73944 - DNA, 376 bp, Zea mays
agctttaaactaaaatttcgatattaccatacattcttgtagcaaatgaatacacttctagagtacaaaatagtgtgataattgatatgattggaatccagatactctacctccatggcagcaacattacacaacaatagggtgacatgaagctggtgttgcttttgaacaactggaaggccgacagctgcaacaaacaaagtaaataataaacaacacttgagggacaacaacaatacactattgaaactaaaaaggggatgctaaaataccgcaccagggtcgagtcttatacctatgctttggcgtagcagcgacatcgtagcccatttgagaatgaccaagacattaccggggtcgaggcttagaacaatgg

SEQ ID NO: 73945 - DNA, 468 bp, Zea mays
  unsure (1)..(468): unsure at all n locations
tctgccatgatgtaattattcctaggcggagagaggtgtaccatgtctgggccacatttcggactgccatgacgaaggactttgccatgacagcggcgttgcctccgtatgaggatattgttgcatcgtagctcatcaagaattgctttgggtccgagtgtccatcgtacatgggcaactggggtggcttgtangattgtggctatgggatagcctgcagttctgctgccaggggagaagcatcatcaaaagtaaagttatcgtgatgaaagtcatcgtaccattcatcttcattgaatgagctctcttgacgaagctccctgtgctgaggacttcagtcctggtcatcttgagtaagatgacacatttcttctgtagcttcatcaatcttcttctgaagatcggccagccgggccatcttctccttcttctttgcacttgctggtggatgacctctaagtccctgat

SEQ ID NO: 73946 - DNA, 371 bp, Zea mays
agcttttacagtatgatgataggtttcatctatcctgagataacttgtctccagcaacgtcctctatatctatcctctatatccgtcctttacagtctactctaaaagatttcatcctctatatatccttcctctccaacaacgtcctctaaatcacgtcctctatacgcaaatacatacattagagacattttttaatttttaatttttgtacatacatatttgtcatactctcaaatgtgttgtacatattttagttttgctaaatcggttgtttaaagtattcaaatggatagagtaacgtttagagaaactctatatatagaggatccaacagcgttctctaaatttagaggattgtttagaggacg

SEQ ID NO: 73947 - DNA, 502 bp, Zea mays
  unsure (1)..(502): unsure at all n locations
taatgcccctaagaaattggtctaatttgtaaggtgtttgctcccatgactcangataacgagggttacattttatatcctgctggttatcctgagcacaagattatgagaattcattctaagaagtctcattctggttctcatcatgcttttatgtataagaataagatctagtgctaggcattctaaccatgttaaaatgcctaaaaataaaatctcctgttgcatcaaatgatcataacatttcatttaagacttttgatgttgcttatgttttaactaacaaatcacgcaaagtagttgccaaatatgttggggctaaacacaagggctcaaaaacttatgtttgggtacccaaggtgcttgtttctaatgtgaaaggacccaagacagtttgggtacctaagagcaaggcctaaacttgttntgtaggtttatgccatccggggctcaagttggatcattgatagcagatgctganagttccctatgcccgggaaca

SEQ ID NO: 73948 - DNA, 369 bp, Zea mays
agcttcgaatttaattctgttattttggcttcagcatccgctaataatccttcggttgtttgaagctcaaagtctttcttctcgatagcaactgattgctcttttatcttgttctctaagttctcaattataactttgtgctttttatcctctaagtcctgttgcatttttaaagccttgctcaacagcatactatgcgaacaaataaccttcattagaaaacatctatgttattaaaaacaataaaagttagagaaaagttgtttactttgaaattggaataaaatagactaccgacaatgtgttgtcgtcggtagcggctgatgtcagcttcgagcttcgggaagccgatactctttgatagagtac

SEQ ID NO: 73949 - DNA, 349 bp, Zea mays
gccattgaatactaaagccccctttgggtatttcagttcccgggcatagtgtttggcttcagcaatttcttcttcagatagtctttttcccgaagcatgtcgaacaataaaagtcagaatcttggacggtgcttcgggagtaggaaatttagcttttttggctacatccttctccacaaccatactagtatccggaaattcttcagctctctgctcagtcgcggcaggctctgcttaacaggcactgagggcccagctttggtttcatcgtgagctgtcacagcttcggcaacctctttttgtaggagcaagagttaatgcccttgttgtttcataacagcggctagca

SEQ ID NO: 73950 - DNA, 367 bp, Zea mays
  unsure (1)..(367): unsure at all n locations
agcttgaaggccaagttaagaggcaggcccctatatattntgtatccgaggttcttagtttatcaaagaaaaattatacagagttggagaaggtactgtatgctgtcttgatggcctccaagaagcttcgacactattttcaagcttacaacataattgttccttcttcacaacctttgaaggatattatgaagaaccgagaagctactggaaggattggaaaatgggctgcagagctcaatgaaatttgtattgattatgttcatagatcttcgattcaatcccaggcgttagcaaactttattgctgactggacgccaagggctcaggaggaagaaacaaataaagacgccgaagcatggacagt

SEQ ID NO: 73951 - DNA, 488 bp, Zea mays
  unsure (1)..(488): unsure at all n locations
ngatagaatacctctcaacacctcattgaaatagcgtcttattggttcaagtgaccactcgtatgagctacgaatcatcctcattttagtgccatgacccactacaagcaaaaagatagcaaccttttcttctactgacacattcaaggtgtcacacataccacacctctcacgtaagatggcgcataggtccgaaaaggatctcttagttatacgcaaactatcatagaaataaacatttgaccctttatacaaattccttagcatttgcttctaaccagctacatctctctggtcttttctgataataatagtccacaatcatgcccatgacagttgcaacaaataaggatgctactctcagcctcttcttcctatgactctctctcatttcctccaaatntgttctaactaattctaagtngttgtgaggcatctacaacagataaaccatacatcataagcacacttgagaaaacatgtgaata

SEQ ID NO: 73952 - DNA, 358 bp, Zea mays
agcttgtgcgtctcaagtacctgtgctttgtctcatggaggacctcgctgacggaatagaccggcttctggatggttcggacccctgcattcattcccgagtactcaaactcctggccttctgtcaacatcgtggtggtcagaccaccaccttctcctaggggaactttatgactcccctagggatgttgtgtcgtactttcgacgaccagcaccatgctcaccgcctctgtagccgctgcaatgtactaatataacggctctcctggctctggagctaccagtattgataaggacacatggtgctgcttcaactcttgaaaggcttgttctgtctctttggtccaagagaatgggtc

SEQ ID NO: 73953 - DNA, 491 bp, Zea mays
  unsure (1)..(491): unsure at all n locations
tcttcaccacgcgcccgtggatatcttgagagagttgatcaatgtgtcttctccttagttgtctttgcttcttgttcccacagaatttcttttgtgaccctaaaacttgttgctcaatcaatgattggctttcttttgagcaacaggggttagcacatggtgatatacacttcaaatgcgcacacgtgcgagaatgaggttcacatgaatttaagtttgcaattataacctcatgagcaacattaagcatgatatggtcatcaactaatttattatgagaatttgacaacatatcatactttttacctagagcacgtttttctaagttcattgtttctacttgactcttaagcatagaattttccgttttaagttgagcaatattagataatgcatcatgactatttctttgctcaattaaaacatattcataccttnggaccaaatcatcatgagagcgccttagcttctcatgttctttggtcatcttc

SEQ ID NO: 73954 - DNA, 379 bp, Zea mays
agcttctaaagggagaacacattttgggactaatgaatgttcattttgagaaagacagggtttgtagcgcatgccaagcaggaaagcaagttggcactcacatccacacaagaacatcatgacgactgacaggccgctcgagttactccacatggatttattcggcccaatagcttatataagcattggcgggagtaagtactgtctagttattgtggatgactattctcgcttcacttgggtattctttttgcaggaaaaatcacaaacccaagagaccttaaagggattctagagaggagctcaaaatgagtttggattaaggatcaaaaagataagaagcgataatgggacggagttcaagaactcacaaatcgag

SEQ ID NO: 73955 - DNA, 454 bp, Zea mays
  unsure (1)..(454): unsure at all n locations
ttaccctgtagtctggactataagttggttacggtaggtgtttcttattcnagtgaccatttccagcatttgcgtaatgaggactctagggagaagcctcgtagtgagaccctggccattcacctcggaagtgaatacgggtctagctaacccggctagaagggaatcgcgactcatgggtaaagatgcgccacctctgcagagtgtaaaactgatatatcagccgtgctcacggttatgagcagcctggactcctcacatgataattgaacttgcagatggaaataaatcgagatccgatgatctgcccatggttttgcttaagtggtttcacttaagtggttttatatactcttatacctttgttaatgggaatacttgggattcacacttattagtaagacaggtgttgttaataatatgttgaccaactaaaatgcttactgctcaacct

SEQ ID NO: 73956 - DNA, 376 bp, Zea mays
agcttaacctaaaaatgggctaatagagattcttctctgcagaagatcatattatatcacacagttgtatattgttcaatgctttgttgtgcttatctcgctccagagtccttgctgttgtgagttcttaaccttcttctatgtgcttgagctccttccactctacagataattgaattttatacttgcctgagtattagtaagtgcactcatcacttacatgacttcataaggtttctctggggatccttatctttcttaacttcaggttcttctattagtaataagaaactggagttcatgtgtgttctctactacatagcacccgctaatggatatggtaaatatgaactatgctgcaggtattttgcacacc

SEQ ID NO: 73957 - DNA, 459 bp, Zea mays
ctaagcttaggacatgttggtaccagcttccaaggctttaaacttattttgtcacaactcatgctctgttccaatgtacgcaagaccacaaagaataccttcatgcatacgtacgaaggttcttgcgactaatggcacaagcgcctacattacccaatgagattgtcattgaggccatgattaatggccttcggccaggacctatggctcagtacttcgctaggaagcccccgcaaactctggagaagctgcttcaaaagatggatgagtacatccgagctgacaatgactttcgccaaagaagggaggaagcttacagattctccgaaatgaccaggggcttcggaggaagaatccatccgaggcatgtcaggtcaatccataactccactcaaagtgatgacaaaggaagtcattctcagaggtcacaatatgcctcacaatctttggggcaacaac

SEQ ID NO: 73958 - DNA, 376 bp, Zea mays
gcaagcttgaagccatggtaagtagcataggcctttattattctatttgactcaagcctagctacggatgcatatgtttcaccaaaatccaaaccttcaacttgggagaatcccttggccacaagtcgagctttgttccttgtcaccacaccatgctcatcttgcttgttgcggaagacccacttggttcctacaacattttgattaggacgtggaaccaaatgccatacctcgttcctagtgaagttgttgagctcctcttgcattgccaccacccaatccgaatcttgtagtgcttcctctaccctatgtggctcaatagaggaaacaaaagagtaatgctcacaaatatgtgcaacccgagatctagtggtta

SEQ ID NO: 73959 - DNA, 420 bp, Zea mays
  unsure (1)..(420): unsure at all n locations
ccagacctaggcctcttgagaagtctattgttgcggagtagagttcgatgtctgagtgaatccgtctccgtcgttcttactgtcccgtcctctctctcccccccgagaaggccttgggcatccccttttatagatacaaggggatggtccagctgtacatatgggggtataactatgtgctaacgtggccggcggagaagtgcttgagccctgtatgaagcgtaactggcggtgcggccctgggtcctactgacgtttctttgccttcatagagagcttgagaacaatcgacgtcatgggcgcatgcagggaaccatcattacctgttgccggagtaatctagatgtgacaccggtcttgttccttcgtagcctgaggcggctagctagaggtagggtaatgatgntgtccctgtaacgt

SEQ ID NO: 73960 - DNA, 486 bp, Zea mays
  unsure (1)..(486): unsure at all n locations
tttaggacctatgatactcagcttatatatgtttcttgcaccttgtgttggctactaactcttttatgcaagaaaagtaacttttggacttagttntgggcttattgcaaatcctagagaaaacatgtgaaaaaggtatgagtcctatacttagtcaattgttttatgagctaactatgtttgcctaagtcatatagggaacccctcaaggaaagccaaaagaagttggagaagttaggctcaaaagagcccaacttggtctggtctggggggcaccggactggtctggtgtgcatcgaaccgggtttgtgccacctagatgaatagtgtgctctcgagattntttctttaaaaatcaccgaatcgtgaacaatgacggtctggagcaccggaccgcctctctaactactctgtagcggccaacggatagctggcgtcaccggatggtcgggtggcgcactggaccggtccaatgcatgtcattta

SEQ ID NO: 73961 - DNA, 381 bp, Zea mays
agcttcatattcaatctgattgttagtgcagcagtattcaatcctaattcatgtttcatgtactagaccatttggtgacaccaaaacatagctgattccctgcccttctttacatacagaaccatcaaaaaataattgccaagtacaagcattaagacatgagatttcctgctctacatcaaccctatgatcagttataaaatcagctataacttgccctttcatagaagataaagattcataaattagatcgtactctatcaaagcaaatgcccactttccgacccaaccactaagaatcggcttctgtaacatatatttaatcacgtctgttagacacactacgatacaagtacttaagagtaaatagtgtctaaactt

SEQ ID NO: 73962 - DNA, 499 bp, Zea mays
  unsure (1)..(499): unsure at all n locations
ntaccatgtagtctggactatgagttggttacggtaggtgtgccttatgcagtttgaccatttccagcatttgcgtaatgaggactctagggagaagcctcgtagtgagaccctggccattcacctcggaagtgaatacgggtctagctaacccgggcaagaagggaatcacgactcatgggtaaagatgtgccacctctgcagagtgtaaaactgatatatcagccgtgctcacggttatgagcagcctggactcctcacatgataattgaacttgaagatggaaataaatcgagatccgatgatctgccaatggtttgcttaagtggtttcacttaaatgtttttgaaatactcttgtacctttgcttagtgggaatacttgggattcacacttattagtaagacatatgttgttaataaaatgttgaccaactaaaatgcttactgctcaacctcagcctcaccttggtagacttgcattnagttttcccccactt

SEQ ID NO: 73963 - DNA, 375 bp, Zea mays
agctttgatacatggattaaacatcgtcatatctctgggtgtcaagagactgatggtatatggagattctctggtagtcatcagccagataaacaaggaatgggattgttcaagtgattcaatgggaaaatactgcgccgccgtccgaaaactggaagataaattcgagggtctggagtttcatcatatagaaagagatcggaacacggcggccgatgtactgtccaaactcggatccggtcggactcaggtcccgcccggggtcttcgtacaagaaattctccagccgagtatctcgacggatcaaatagaagagtgcaacatcatagatcaacccgagtcagactctgacgattggagacagccgattattaa

SEQ ID NO: 73964 - DNA, 477 bp, Zea mays
tctaaagggagaacacgtgataggtgtgactaacgttcttctttataagatagaccttgtgcagcttgtcaagcaggtaaacaagtgggaggagcgcatcacagcaagaatgtgatgaccacttcaagacctctggagctgctgcatatggacctcttcggacccgtcgcctatctaagcataggagggagtaagtatggtctagttattgttgatgacttttcccgcttcacttgggtgttctttttgcaggataagtctgaaacccaagggaccctcaagcgcttcctcaggagagctcaaaatgagtttgagctcaaagtgaagaagataaggagcgacaacggatccgagttcaagaaccttcaagtggaggagttccttgaagaggaaggaatcaagcacgagttctccgctccctacacaccacagcaaaatggtgtggtagagaggaagaacaggacgctcatcgatatg

SEQ ID NO: 73965 - DNA, 375 bp, Zea mays
  unsure (1)..(375): unsure at all n locations
agcttgaanaatatctggatatggttctattagttgaagcttccttcgaaggattttctatcaaaaatatccctcgaggacaaaatgagcatgctgatttgctagctaagtcagcagcacaggggctgcccttaccttcggatgtgttcttcgaaacaataaaagcaccttcggtggaacttcttgaaagagcagtcctcaatatatctcctgtttatagcgaagattggagaactgagatcatctcttgcctacagggtaaattcctttcagatgacgaagtttataacaggaggatagaggtaagagctcgtccatatgtcatgatagaaggggagttgtacaagcatggagtttgtgctccgctactcaagg

SEQ ID NO: 73966 - DNA, 493 bp, Zea mays
  unsure (1)..(493): unsure at all n locations
tanagccatggtaagtagcataagcaagtgatatgtgttttgactcaagcctagctacgggtgcataggtttcaccgaaatccaaacctttgacttgtgaatataccttggccataagtcgggctttgttccttgtcaccacaccatgctcatcttgcttgttgcggaagacccacttggttcctacaacattttggttaggacgtggaactaaatgccatacctcattcctcgtgaaattgttgagctcctcttgcattgccagcacccaatctgaatcttgaagtgcctcctctaccctgtgtggctcaatagaggaaacaaaagagtaatgttcacaaaaatgagcaacacaagatcgagtggttacccccttatgaatgtcgccgaggatggtgttcacggggtgatctcgttggatagcttggtggactcttgngtgtggcggtcttggacccttcgcatcttccttgtcttgatcatgggcatctcc

SEQ ID NO: 73967 - DNA, 367 bp, Zea mays
  unsure (1)..(367): unsure at all n locations
aagntatgttgtnntntagagctaagttttatttatcaggcacaacgaggcgggggacgaagctctatgagcaattggcgcacccatgtagcttcaccaatgccactaaccacaactcgatatttagctttggttaaaaaatttagggcaaaaggagccatgagtgtggtagacatgtcagataaaggaaagaaagattcataaaaaacaacatgtatagaaacgatgatgtagatcgactgaagctcgagacaccgatagcatttgtgttgagaggaatagccgaaaaagacgcataggcggggcgagtttctgaggcgttgtggaggatatgttgggataacaagtgcacccaaaaactcgaaga

SEQ ID NO: 73968 - DNA, 501 bp, Zea mays
  unsure (1)..(501): unsure at all n locations
tcttcttcattctgatgaanaccaagccctttgaccacttcatcaaaacgaatgttccaactccgagatgcttgcttcaagccataaatggatttctgaagtttgcatatctttccagcattgatcggattgacaaaaccctcgggctgtatcatatacacgtcctcatctaggtttccattaaggaaagctgttttgacatccatctgccaaatctcataatcgaaatatgcggcaatagctagaatgatccgaatagatttaagcatcgctactggcgagaatgtctcgtcatagtcaactccttgaacttgttgaaaaccctttgcaacaagtcgagccttatagatgtgaacatttccatccatgtctttcttcttcttatagatccattntgcatttatgggtctaacaccatcaggcgggtcaaccaagttccaaacttgattttctcccatggaatctatctcggatctcatggcgacttgccatttctcggaa

SEQ ID NO: 73969 - DNA, 324 bp, Zea mays
  unsure (1)..(324): unsure at all n locations
tataatntaggaggcctgcgaacgggcctctagctgacctggttagatgactctagcacttcttaggtcctaggttcgactccagtaggaccaaattgctcccattgaatttcaggttgggactaaaaaaagtcactcgctggttcatctggttgtgtgcacatgagacagactaacctatggaggcagatcctcgtgtagccgtataggggctaggagattcaaagcatatgtaaagatctggcctgtagtgggcggactctcatgctgcatggggatcaactttcatggcctttctcggttaggctacgattgagcttcttc

SEQ ID NO: 73970 - DNA, 479 bp, Zea mays
  unsure (1)..(479): unsure at all n locations
tctaataggagaacacgtgatagggttgactaacgtgctattctaataagatagaccctgtgcagcttgttcagcaggtaaacaagtgggaggagcgcatcacagcaagaatgtgatgaccacttcaagacccctggagctgttgcatatggacctctttggacccgtcgcctatctgagcctaggagggagtaagtatggtctagttattgttgatgacttttcccgcttcacttgggggttctttttgcaagataagtctgaaacccaagggaccctcaagcgcttcctcaggagaagctaaaatgagtntgagctcaaggtgaagaagataaggagcgacaacgggtccgagttcaagaaccttcaagtggaagagttccttgaggaggaagggatcaagcacgagttctccgctccctacacaccacagcanaatggtgtggtagagaagaagaacaggacgctaatcgatatgg

SEQ ID NO: 73971 - DNA, 375 bp, Zea mays
agctttttactaagacactaaaagtcattgtattatcaaaatcatcttaccacttaaacttaaccatacctgatttaaaatgatcaagtatgccactaaaaccttcaatagaagggttgactttatatccctaacttaaatcatttcaccttgcattatccttactgaattacataccatagcatagatatctcttattcattgcattcatttaaattgcaacctcgctgacggagagtacgtgctcatccccgagcaaggagttacccaagaataagtccaagagccagctccagagcctgccaccgaggatctccccgcaacctcagcttttgaaggcaagtgttacacccagttctgggggcaaaaccgaat

SEQ ID NO: 73972 - DNA, 451 bp, Zea mays
  unsure (1)..(451): unsure at all n locations
caagcaagtggcacaaacagcgtaccaaatgtggtcagggtgagttcttatttatacgcctggcgcactccaaaatggaggggtcccgttgtcattgacttttgctattctagcaaaggaaggtgttttttggaccttcggcttaaagctttcatccatgacgcagtctgaatttgttatcttaaacaaattaatactgcgaggggctactgttgggggccttcgtcctccgaaggtcctcaaaagtataatttaacaatgtcttccaagcatggcttattntcaggtaccttcggattacacgatgagaagggcgcgatcgtgacgaaggttaccgatacttcgaagctatgcgcanaggagcttcggctcaatcacgggaagaggaaccgacttataagggaaaaggctatccagtcctcacagaattttctataagccaataataaat

SEQ ID NO: 73973 - DNA, 370 bp, Zea mays
agcttgtaatatggttatcaatcctctagatcttcagtagaacattgcattattcttgaaggcaaaaaaaaacatgtcttcttgtgttctccattgtccattgtcccaaccctgaaggtagcaggtgttacttatacaaagacagtgaagtatactattatgttcgtgccagccaaactggtgaatccaactcgttcgttcggtttttttatatatatcaactcgttgggttggattgctggtacaacagaaagttcatggatgtagatatgccctgttagtttttgtgttgacataggtcctgtttgtttaggtttttttagtttctggccaccaaaaactattgctgttaaacgctccatctttttag

SEQ ID NO: 73974 - DNA, 488 bp, Zea mays
  unsure (1)..(488): unsure at all n locations
tatgcaacatcgcttgagatggtgtggacatatccaacgaagacctgaagaggcaccagtgcatatcggaataattaggcgtcccgaaaatgtgaagagaggtagaggtcgaccaactttgacgtggacagaggctgtgaagagagacctgaatgagtggaatattgacaaagagctcgccgcagataggaaggggtggaagtgtgcaattcacgtgccagaaccctgattgatagtttcgcttttcctccttaatcgtttgaccttttcttgtgtccattttagatcttgctggtccttgtgggttttatctcttttatgtgtttccccgtttcgttgttttcggatctcctttgcctttgtttcccttttctgttctttgggggttgagctctgagggtttcatacggngtttcatctctagcctaccccaacgtgcttgggacaaaaaaggctgtgttgttgtttgtgtgtaatggtgagacaaa

SEQ ID NO: 73975 - DNA, 367 bp, Zea mays
  unsure (1)..(367): unsure at all n locations
agcttnttttgatggaacattattttctgatgcccaactgagccattaactggagatgaggtgcttcaacaagtacatgatctagaggggataaacttgtccaaggatcagagtaaaaagagtaagatttcacacagtgagaggggagataattagactaagaagagcatcttttttaaattaccatacttcaaaacacttctgctgaggcataatctagatgtgatgcatatagagaaaaatgtatgtggctgtataattgaaacaattttagatatcaaaggaaaaacaaaggacaacaataattcatgtcttgatttgaaagaaatgaatctaaagccacatctgcatctagttgaagatgggg

SEQ ID NO: 73976 - DNA, 373 bp, Zea mays
attctatcctagctacgggtgcatacgatccagcgaaagctcgaaccttagactcgtgaatatgcctctgccacaagtgctgctgagcttcttggcaccacaccatgctcatgtctcttgatgcggaacacccacttggctcctacaacaatttggctatgacgtggaactagatgccctacctcatacccagcgatagagtcgatctgctcttgcatagccactactccatcggaatcttggagtgcttcctctaccctgtgtggctgagtacaggaaacacactaataatgctgacctgaatgagcaacactagatcgacttgttaccgcccattgaatatcatcgacgatagcgttcacagggtgatcct

SEQ ID NO: 73977 - DNA, 376 bp, Zea mays
agcttcagctccatctatgttgtgtattgcctttgaatctgtccaacttccttcagcgcttctagcaacttcttgacttccgtggacatcaatgggcccttgttccgaaggtatcttcatgcataagtatgctggataaagtattgcttcgaaggcattaagtgtccctcgaccaatgattgcattatatgggtattccatgtcaacaatgtcaaaaacgacttgctcagttcttgtgttgtggacatagtcgaaggtaacttgtattgtgattttgccaagtgccacaatctgccgtcctccgaagccacaaagagggtgtgtagaatcatggatcttgtcctctggttcttgcatctgcttgaaggcctttgca

SEQ ID NO: 73978 - DNA, 404 bp, Zea mays
tatgcgctaaaagctttgcacgatagcagataatgggaacctgcttaaagatgaatagccaaattagacctcgaaaaattactatagatttattgattaatgttaagggcattaaagtaaattctacatgggcttgtgtcctgtgcctataaatagatgaacagtactcccgtactgttcacgctgatctgtacttgcctttgcgtcacgctagtactttcttgccttctacatagctgaaagtactgttgtaattcaatatggtaccatcctttgcatgattatataataaaaatgagtttataatatgatattgactatttatatcgcttcctgatatatcatatgcttcttctctattaacatatactgcgatgatgaagcgtgtccttattatcttgtct

SEQ ID NO: 73979 - DNA, 375 bp, Zea mays
agcttttagaaacccacaaggaaacatgcatacttgtatgcgatgttactgtgttggcactgtacactgctctgtctatttacacggcacacttaatgttcagtagcatttggaagagatgatcgcagtgactgttcaacaaggactgtatgtgccttttgtttaccttttactcctccgcttgcttttttcttctttttttccgaccctcttgatgattactactactcttgcataaggctcgtgtgaagggtatgatcagcacacagcagaattggtttagccaaggccactgtatgtctgtattgacctcactctgcaaaacattcctgctctataaatagtgttggaaagtcgcttattaaaatgttgccc

SEQ ID NO: 73980 - DNA, 507 bp, Zea mays
  unsure (1)..(507): unsure at all n locations
tctgaagaggttcgtcatcttgttcaagatgatcaaagttctttgcctccacgcagagagcttcatcaggaaggcttccacaatgaggatgaatggtatgaagatttccatcatggaaactctgcttttgatgatgcttctcctctctcaacagaattgcaggctacaccttggccacagacttacaagccacctcagcttcccatatatgacggtcactcaaaccctaaacaattcctaatgagctatgaagcaactatatcttcgtacggtggcaatacggtagtcatggcaaaatcctttgtcatggccgtcaggagtgttgctcagacttggtactcttctcttcagccagggacaatcacttcttggcagaaattgaaggatatgctgataactagctctcaagggtttcagacgaagccggtcaccgctcaggctctcttccagtgtactcaagaccatgaagagtaccttcatgcgtattgtccgaanggttctgcgtct

SEQ ID NO: 73981 - DNA, 376 bp, Zea mays
agctttagtcgattaaggggtcaaaccatgttgttttatttctgtgcatgtgtaaattcaagggtaaacactcaagggttagaaaataccaactcaagcatgaatattttttaagaggtttcacttgctaaactcaaggttgtttggagggggtcttttcatgagcagaagagacaacacttttttttgcaaaaagggttgaacatttacaataccacctatatagcaaggcaagagaaacacataacacaacctagcaagacttactaattaggcaagagataaggcatttcttatagttcataacatagcaatacatcacattattcaaaatttcttattattggaataaaggtgagagaagcatgttggtgca

SEQ ID NO: 73982 - DNA, 498 bp, Zea mays
  unsure (1)..(498): unsure at all n locations
tatctcanattcatggggtgggggatgagaaatgattttattcttagtagaatctgtttctactctgtaacttacatgacactcttcgtcttactcctctatagggaaaatatagcacataaatatctccgatatcttgctaataataagataaaaataaattttgtatgaaaccgaattagcttaattgagatatgccaaaattattattattagaatggaattcaattccaatgatccaaatgagacgtaatggtatttaggtatttaactttgtgagattaatactatgtcatgtatgaatttatccctggtataatctttgtgtcccattaaaataagtggaattaaatcgtgtaatctatggagatagattataattaacgaatcataaacctctaaaggtgcgagttcaccctagcacttatggttacctcttggggttatcctgctctttcaactgtgntcatttgattgcatttgtcggtgtatggtctt

SEQ ID NO: 73983 - DNA, 375 bp, Zea mays
agcttgcataggtttctatccgcctaaaagtgtctaagtgactgcttatccctgagcggtggaagcgacactggatacgggtgaaggaggcatcgcggaagtagtcccattggcaccaggggctggtcctagctcctcgggagcctcttctccctcgcttcctgcttcattggcctccatctccaggtggtgcatgtccaagtggtcatttgcttcttcgagttccctctgcacatcgtgaagctgattctccaagacatcaatagtgttgtctcggatctccacctgctgctccaaggtggtgatacgctggctcagcctctccacctgcagatccttctctaccaactcggtggataggtcgaccacaaaatc

SEQ ID NO: 73984 - DNA, 406 bp, Zea mays
  unsure (1)..(406): unsure at all n locations
tcgcgagagagagagagagtgcacccttgaggtgagccgtctgttttagccttctctgcattntctctccttctctgcccctgcctctgggaaggccctgaacatcacctttatagatacaaggagatggtccagctgtacatggggggtgtagctatgtgctaacgtggccggcggagaagtacttgagtcctatataagcgcatcttgcgctgcggcccggggtcttgctgacgtttctttgccttcatagagagttgagaacaaccgacgtcatggacgcatgcagggaaccatcattacctgttaccggagtaatctagatgggacaccagtcttgttccttcgtagcctgaggcagctagctagggtagggtaatgatgtatcccctgtggcgtagtcggt

SEQ ID NO: 73985 - DNA, 377 bp, Zea mays
agcttcacgggtattggtctcttcgccttctttctatctagaggctctcttgaagggacgctttttcttctgaaagttccctgactttttgctccaggctttccacccgggaggttagggaggtgcagtggaaggcgaggtcatcatattggttatcaagggtgtgaaagtatccagccatgtagacaatggtgggatcattctcaataggatctcctcctgatagggcctgagtcttttcctccaggtgggggtattcttgttgctgggtggaaagtagcgaaggggggtttcaatgattactttgttgtagttctgacacagttgttagagggcttttcgggcgacattttggcaagcatctaggaaatggtctc

SEQ ID NO: 73986 - DNA, 457 bp, Zea mays
tcctaggcccagctcccaccaccaccaccgctagcaccttctctgttccgaggccagcaggcagaagggcaccaacacgctcagcagcagcgcaattttcgggaggagtctgaaggtcacatagtcaatagcactgtgcccgaatccaagcacatctactgaagaatatcctacatctggtgcatttttgattttctaccttttttgtatgaaaaacaattcacgaagaattaaattccaatttcatgtaataatattgtactcatatcatcgagtgggatgcttcctcttaacaagattacgaaactacaaaagtcgttcataagggagcgcagagtaagttctgaaactacaaaagtagttcctaaggtagcgcagagtagagtaagttccgaagctacaaaagtcgttcctaagggagcgcagagtaaagtctgaagctcataagtcgttccta

SEQ ID NO: 73987 - DNA, 375 bp, Zea mays
  unsure (1)..(375): unsure at all n locations
agctntgaaaggttggaatatgaacatttttgatgttcatagaaaatggaaaagagaacttaacaaaagaatcaatgatctggatgttaagagtgagattcgcaatttgaatgatattgagagacaaaagagaaagattgtggggttaatctaaagaacattcttatggaggaatctatagaaagacacattgttgaaggagataaaaatactagatagtttcatttaaaagcaaatggcaaaatacgaaggatcaaaatcaataccttgttgaaggatggccaagttgtgaatgatgaggatggtattaatagggtgaccacaaacttttataaagagttgtttggcccccttgtagtactcatatcaatatga

SEQ ID NO: 73988 - DNA, 485 bp, Zea mays
gtagctccatctatgttatggatagcatttgagtctttcttattgccttccgcccttctggcagcttcctgacttccatgtatagcgatgggtccttgattcgaaggtatcttcatgcaaagataggcaggatgaagaattgcttctaaagcattgatggtgccacgaccgataattgcatctgaagggtattccatgtcaacaatgtcaaacacaacttgctcagttctagtgttgttgatgaacccgaaagttactgacatggggatcttgcccaatgctacaatctgtctccctccgaagccacagagaggatgtgtagcatcatgaatcttatcttctggctcttgcatttgtctgaaagccttagcaaatatgatatcagctgcactgcctgtgttcaccaagacattgtggaccagatatcctttgataacacaagagatgaccatggcatacttgtgtgggtaatccttgaactgaat

SEQ ID NO: 73989 - DNA, 373 bp, Zea mays
agctttacttagttgattttgcaaaagaagaggcttgtctagatgcatgcttaattgctaagactagcatgggctggctgtggcatcgccgcttagcacatgtggggatgaagaatcttcacaagcttctaaagggagaacacgtgataggtttgactaacgtacaattcgaaaaagacagaccttgtgcagcttgtcaggcaggtaaacaggtgggaggagcgcatcacagcaagaatgtgatgaccacatcaagacccctggagctgctacatatggacctcttcggacctgtcgcctatctaagcataggagaaagtaagtatggtttagttattgttgatgacttttcccgcttcacttgggtgttctt

SEQ ID NO: 73990 - DNA, 474 bp, Zea mays
  unsure (1)..(474): unsure at all n locations
tatgacatataagttagcataccaaacagccctttattgtgcatataaattacggcttcattacaaaggacgctgatccgcggacatacatttctgttgaatcatctgtgtatatgcatgaatcacgtacatatctgttgaatcatctgtataagaccagctacacgctgtagtaatttagagagacagtcgttccttgtgtcgttaccactgccgatcgatcgatcaacagtttgttttgtacacttagcagtaaatttgcattagctcatcacgtacgctgatggtggccagctaggctaataggctgccagctgtgtcgtcagaccaggtggatattcagaggagttgattagtgcaggactggagctgcgagaggagctggagctgcttgaggatggggctgagcgcctccatgagcttctcgcacgggtggttgtgcacgcnctcgtacgtggtcaccacgatgctcgt

SEQ ID NO: 73991 - DNA, 371 bp, Zea mays
agcttatgaagattcttcatcccaacatgttctatttgcggtgccagagccaacccatgttagtcttatcaattaagcatgtgtcgagttcagctctatcaaaatctaccaagtatagctgaccctctaacacacccttaaatgctattgaatcatcacttcttctaaagacagtgacacctacatcagtaaaaagacagttgtagcccatttgacataattgagatacggaaagcaaattgtaatctaatgaatcaacaagaaaaacattggaaatggaatggtcaggtgatatagcaatcttacccaatcctttgaccaaaccttgatttccatccccgaatgtgatcgctctttggggatcttggttt

SEQ ID NO: 73992 - DNA, 470 bp, Zea mays
  unsure (1)..(470): unsure at all n locations
cttatggcgtgaacttctcttttattggagaagatgatattgtaacaataatttaattattgtatgtaattacacacttctaaaaatgataggctagtaaaatatttgtatgctttcaagaaaaggaaaatgagatggatggtatgtatggtagttgaaataaaaatgatattatatgtgtatggtggggtttagagggattatataggggaaaccgctgtatagggagagagtgtgctgacttggcgtgatagtgggatatatggggtactccctccgttctttttatttgtcacggtttaattcaaaaatgaactagcggacgacacatatttgagaaaaaatctctactactctatatgaacctattgtaggcgttcacaaaagtgcactacggttcttgctcgtgttcgtcctccccacgcgcncttgctcattgcccaaacctgccccgcattagcgccacaaat

SEQ ID NO: 73993 - DNA, 371 bp, Zea mays
agcttctaaagggagaacacattgtgtgactatcatatgtacattttgaaaaagacaggatttgtagctcatgccaagcatggaagcaagttggtgttcatcatccacacaagaacattatgacgactgacaagccacttgagctcctccacatggacctattcggcccgatagcttacataagcatcggcgggagtaagtactgtctagttattgtggatgattattctcgcttcacttgggtattcttttcgcaggaaaaatgtctcacccaagagaccttgaaaggattcttgagacgggctcaaaatgagttcggcttgaggatcaagaaaatattaagcgaccacggaacggagttcaagaactca

SEQ ID NO: 73994 - DNA, 435 bp, Zea mays
  unsure (1)..(435): unsure at all n locations
atctcagccttaacccattnctttgcggatgagcagctttgttatttttaactgcctctttatgttaaatcggaacaggtgcgaacattgcttcaaatttaaattacagccatgttgccgtcatatgtttatgattaattgacagatcttgtggagtgtaaccaccaaaaaagtcctattcaattccagccttggcttgagctaataaatctcacgtctatgtggttcacaggactccacatatttcagctatgcaccatgacaaaacatctgatcttgagattgtggccgacaactttgaagaacacctagaggtacttcggcattgcgaccatgtgctttgtattgtatacagaggataccttagctggcttgatgaagtctacctgacatacatgcacatccttggatgctcgtaaactgttcgttgtaatc

SEQ ID NO: 73995 - DNA, 374 bp, Zea mays
agcttccccttgtcccttcttgtatgaccactaatttaatgcaatgtacatatttttgcaacgcttatctgttgggtttgtttggttgggttgtggctgtgaaaaaagccgctgtgggttgtgagctgtgaaaaaagctacatagggtgtgagctgttaaaaatcctaaaaccgtttggtagaacccactaaaagccgctaaaagttcttccatatatattttcacaattccatttgaaagccgttagaagcaggtccagtggtgctttcaattttgcactgggagaaagtcgcattttagaaaaaaactgccttttggatccagccctttggtttgacttttagggggcaaaagctaaagccaaaagctaaac

SEQ ID NO: 73996 - DNA, 498 bp, Zea mays
  unsure (1)..(498): unsure at all n locations
gcctaacananatcaccaaatgcaaaaatagaaacatactaaccttcaagctgttataagcaagggtgtctgcaagttgatcctttgtcattgcagatagtccaagttcaagtttcggataacccatgttatccatcatctcccgacagacatttatatccttgttgtctggtagacagtaaaggaagtcatcttcgtcgtttcctctatataccaaggacccataggggtatttcaggtccttttgcataatgttgtactttggcagtttactcctctgatagttgtttccccgaagcatgttgaacaatatattctaaatcaccttgagaagatgcttcgagtataggcaatgttggcttttccggaagactttccttcgccagctctactggcttagttcccgaaggtccagcttcaacgtgaataggagaagcgctcgcagcgactacttctctagaccttaattntcttctcaagggctcagtaaaacatgag

SEQ ID NO: 73997 - DNA, 356 bp, Zea mays
agctttaatcgtgtagccatcaatcttcattttgtcggagattgaaagcacccttgtgggttttggtggtttggatgacaattcagctaaaggattgatatgtgttgctaagtattgaacaggcgcttagtgtaaagcttacaggggtcaacacatgagtataagtgtgatggtccaaacactaagatgattatggataaatgacatcacaaaataatgatgatcattttacaagtgggactcggggtgcataactgtaacgccctgaatttggggtataaattttcttattcaatatacaccacatctaggttgtactctcttttgctcttcgtgttctgctcctttctcctatc

SEQ ID NO: 73998 - DNA, 492 bp, Zea mays
tgatcaacggcttactgccgatggaccgttttgtaccgttaagagcaagcggagtcgcgaccaatgaaccaataagaccacgtgatgacatggagtgactgagtgaatcatatcatttacaaatgtgtttattacaagtgccttgatggatgttgatgcttcatcagtggaggagatgaaatgcctaaggcaatagtataacctgtgggccatttcatttcaccagtcaaaagttgtgtagaaaagtgcatgaccaggtttaggataaatggccgtgctattaaaaagagcaaatgtgttgcatatcggtcatctagtgccactgaaatgatttaactatgcatatgttgctaagatcaagtggtgattggaagttgagagaaaaacctttaaatatggttgataatgctaactaagacttcaaggtgtcgatcatcccatatgagatcatttggagttagcatgctgtacaatataaaagttttcaatatg

SEQ ID NO: 73999 - DNA, 369 bp, Zea mays
agcttgagaaggtgtagccccatgttgtatctttagaactttgttgcgtatcatcgtcaccttcttcttcctctttcttgactcatgatccgcatgagggtaatcagggtaaaagaagacaataacaccaaaaatgtgattcaatcgatgtcttttccgtgctgcaaaagcccgatgcaaagctttggcttctggtttgctataatttccaagcatttcattacattttgcctcaatagaatctaaccactcgtcacaaggctccccaatttcatcttcgaacttatacttatagtgatgtctgactagtccaggcttcgcatccgaagcatctttcttagacatcttcgacatttcccactcagcccg

SEQ ID NO: 74000 - DNA, 301 bp, Zea mays
acctggccatcttgcttctcctgtacaagcgccgcactaactgcagagtgagaggctgccacatattagagcaatggaccccctgacgaaggtggagttagtgttgtcaactcgatcaagtattgttttaactcttcgaaagccctatgctgagccggaccccactggaaaacgttggctgacttcaatatttcaaagaatgggagatttctttctgctgatctggatataaatctatttaatgatgtcagccattctgccaaccgttgagcccctttcttcgtatttggcggcttcatcc

SEQ ID NO: 74001 - DNA, 377 bp, Zea mays
agcttagcaaaagaaatttctagaatcaagaatattgagctcatgcctaagtctggtaaaagattgttcatcaagtggcttggtaaagatatcggctaattgatctttagtattaatgtaagaaatctcgatatcccccttttgttggtgatccctaagaaaatgataccgaatggctatgtgcttagtgcggctatgctcgacgggattgtcggccattttaattgcactctcattatcacatagcaaagggactttggttaatttgtaaccgtagtcccgcagggtttgcctcatccaaagcaattgcgcgcaacaatgtcctgcggcaatgtactcggcttcggcggtggaaagagcgaccgaattttgcttct

SEQ ID NO: 74002 - DNA, 506 bp, Zea mays
tctaagggagaacacgtgataggtctagccaatgttactttctaataagatagaccttgtgcagcttgtcaagcaggtaaacaagtgggaggagcgcatcacagcaagaatgtgatgaccacatcaagacccctggagctgctacatatggacctctttggacccgtcgcctatctaagcataggaagaagtaagtatggtctaattattgttgatgacttttcccgcttcacttgggtgttctttttgcaggataagtctgaaacccaagggaccctcaagcgctttctaaggagagctcaaaatgaatttgagctcaaggtgaagaagataaggagcgacaatgggtccgagttcaagaaccttcaagtggaggagtttcttgaggaggaagggatcaagcacgagttcttcgccccctacacaccacaacaaaatggtgtggtagagaggaagaacaggacgctcatcgatatgccatgaccatgcttggagagttcaagacc

SEQ ID NO: 74003 - DNA, 377 bp, Zea mays
agcttgagcaacaaatatcgattgtggtttgcttttttgaaaaaaaatatttctaccaggtttcttcaatccgatgcaacatctacttgttcacctaccatacgaagctaaggtaggaggtcctgtgcagtatagatggatgtatcacatcgaaaggaaactaaagaagctacgtgcaatggttggtaataagagacgagttgaagggtccatcgctgaagaattcaaatacaaagagatagcatcgttcatgggcctgtactttgcagaggaacacaatgtcagtgcccctgcgttggggtatcatgtcgacgagccccctatcagtgatcttgaaatttttcaatggtggggcaaaactgtaggacccatcacaa

SEQ ID NO: 74004 - DNA, 512 bp, Zea mays
ctaagctttttcggcggatgacaaggtgatgcttgccgaatgtgtttatagtctaagaaatggaagtgagttcaccggaggtgggcgccaatgttggggacttgttctcaaatactatgaatcaagaacaaggcaacataagatgttaaatattaaagcccttcgtccttcgaaacattatttccctctgggtataatgaatttcggacgaaagttatgaaggtcataccttcataatcatcataaaagataagaaaagatttatgtataaaatacggaaaataacataattactttaaacattattactaatttatttctattcatttttcttatataaatgatgatatattacaaatgtaccttcggcttgaaggaaagtaagggtacaagcgagatgccaatgccagatcagcgtgaacagtacacgagtactgttcatctatttatatgcacgggacgtagcccgtatgaaattacattaatgccctttatttttatcaataactcta

SEQ ID NO: 74005 - DNA, 376 bp, Zea mays
agcttgtcgtctagtacacccttaaaagctagtgaaccatcacatcttctaaagacagacacatctacatttgtaaacaaacagttatatcccatattgcataattgactaacagatagcaaattatatccaagagactctactaaaaacacattagagatagagtgctcatttgagattgcaattttacctaacccttttaccttgccttgattcccatcaccgaatattattgaatcttgggaatctttgtttttgacgtaggaggtgaacatcttcttctcccccgtcatatggtttgtgcatccgctgtcaataatccagcttgaacccccggatgcataaacctgcaaggcaaatttaggcttgggtctta

SEQ ID NO: 74006 - DNA, 318 bp, Zea mays
ttacatgttcatgatcatgtgaacgggaaactctttcacatatttaacctgtcattattaccaagctggtctatctacacctaccttattacattgatctactacatcttctctagctacaccatctgccagatgtttgttgccattcttccaaggaacccttattccgccggtgcaggagtaggataaaaggcaacattgagcctatgcactggttgctgcagatggttgacatgccgttgtgctacttgaaactccatgggatgagcccgattcaattctttgatcgcctgatcctgaaggcttatgaagctcatg

SEQ ID NO: 74007 - DNA, 376 bp, Zea mays
agctttgaggataagtctagtgttctttgccaaatgtaaaaaggtatttgtcgagtgcctaggacactatgcaaagaatgcaagtctggtagtgttatataatgttgggtgtggtgtaagttatcatattatacaaagctttatactcaaaacatgtaccatataagtacttaaattttagaacgaagaatagtcacacacatgagtgcacatgttagtcataaacttacttatatataacatggtataaagaaaataactatgaaagtgacttgttgattcattgatgtgtctagtgatgttgattgtggtactagcttagagggattgaagctaaaaataatcttctcagaccctaacttactaccaagtagga

SEQ ID NO: 74008 - DNA, 486 bp, Zea mays
  unsure (1)..(486): unsure at all n locations
ngcagcataagaaaagagtatagaattctccaacagcactgattatatgagcatcttcactgatctccaacacagaccacacagcttctcagataaagaggaaaggagaataatgtggttcccaactatataactaactttattgacatagtatgtaaaccaaaatgcaggggatacccacactctggtgacaatcattacaaagatccaaaccaaacatagttcatcacgacaaacataaatgcacaggatatagcaaactaccctgtctaactaaaactaactaagatcgagactaacgctaagactgaagcttccatgtatatatttatttcgtattaattacaagatccaactctaacgatctatggttctaggtttatcttggtctagcaggcgggattgccataagactggtgtccacgctgaggtgagcggtacaggtgctgagtcccaacnggaagcggggaaccaccgttcagaaaa

SEQ ID NO: 74009 - DNA, 380 bp, Zea mays
agcttggtcattttattgctaactgtcccgattatgattgtgatcaggatcaagggaacaagagggagaagaaaaacaactataagaaggcaaagggcgaggcacatcttggcaaggagtgggattcagatttctcctcgtccgactccgacaatgaacgactcgcccccaccgccttcaacaagtcattcctcttccccaacgagcgtcacacatgccttatggcaagggagaagaaggtatgtactcgaaactctacttatgcttcttcaagtgaggacgaatctagtgatgaggatgaaatagattattcatgtttatttaagggcctagatagaaccaaggtagataaaattaatgaattgattgatgccttgaat

SEQ ID NO: 74010 - DNA, 462 bp, Zea mays
tgtgaagattcttcatatcaacatgggctagtcggcgatgcctgagccaacccatattagtcttagcaattaagcaagtgtcgagttcagctctattgaaatcaactaagtatagctgaccctctaacattcccttaaatgctactgaatcatcacttcttctaaagatagtgacacctatatccgtaaaaagacagttgtagcccatattgcataattgagaaacaaaaagcaaattgtaatataaagagtctacaagaaaaacattggaaatggaatggtcaggtgatatagcaattttaccaagtcctttgaccaaaccttgatttccatccccgaatgtgatagctctttggggatcttcgttttttctcgtaggaggagaacatccttttctcccctgtcatgtggctggtgcatccgctatcaatgatccaacttgagcccccggatgcataaacc

SEQ ID NO: 74011 - DNA, 370 bp, Zea mays
agctttccaacaaattttggagcaccctttttggtggtctagggaccaagttacagctgtttgaactatagagtctgaatctgtccaaatctggacagagacgtctgtttgtattaactgactttgatatgtattgaattaacatgaaatatttatagatgaattatagacaattctactagctttctaaaaagtctaggatcaccttatttggatgtctgaaactccagttatgaatttttgaagtaagtaatcgaattatgtccaaatctggacagagtttatgtttagttctgtttgacctttctaaaggtcgaatcttgttgtgatgataataccaaaggtgtagaggactttataagctttccag

SEQ ID NO: 74012 - DNA, 508 bp, Zea mays
ctcagcttttgcatttggctccaagccctggctcctcactgttctgattaatattcccattcttatgattgcttcgggcgtaatttgatgaaggtagacttgatagatctttaaaacctcaaccacaaatttgcttaatggaaaccgaagcccagctttaaaaaagcttcggaagatcacaacttcattctcttcgggagtaggcataatcctctctccgtcatcagcccttacagtagacatgtcccgaaaatatcttcccctcatattgtcgagatgactctgtttaatagttgattttccgaaaactgtatgacttggtcgacagggtcgatcttcggagtcttctccgccactttccacatcataactgtcactaccactggtgtcttcagataaaccttctaaaatctccctagtaatcttctctgtatttgtctttgctatcgatccaataaagccaagattcttctcctcagaaaggctcagcttcgtttagcaacagttt

SEQ ID NO: 74013 - DNA, 373 bp, Zea mays
agctttctcgactaagtcggggacagggccttatggacgggtgaaagtacgcgtaagcggcaaggccgaccgagccgagggattcccacgcctctgggatacggatacctcactcgtcccttccgcgaaaagcagctcttgctcacacaaacatccctgttaccgacgaagtccagatgctcgaaacaggaggaaaaaaggcgcagcttcacaagtgcagcgagggtgttttcttctggcctcggcggccgcaggaagcacacgctacaagatgatcggatcctgcaggctcgggtcttcacgccgaagggagctgtagcaccctcggcatcgacgacgtcttcagcaaagcccgacccagcctcgggcagcg

SEQ ID NO: 74014 - DNA, 467 bp, Zea mays
  unsure (1)..(467): unsure at all n locations
actcagctgctgacgtcgacgtacctgggactccgttcttttatttgtccttcgagnggccgccgctccgcggtgccggcgtggttcacggtggccgccgacgaatgaggagccatttcgaaggctttggcgtccgacgcatcaacgcccagccgcgctgcggtgccgggagctgggggcgtggtggtgtaacataacgccgggctcgagccctcgagcgcgtggtangctgctggcagtggcagtggctgctgtgccatggagatggaggacgtcgcggcggcgcacatcttgttggcctgcaatccgttacgcatatagttctcaagaaatgggcaacgcgatcaaaaaggaagatcatccactacttcatttcatttctagtggtggtggtgaggacgagtacgacgaggaggaaattacgtacgtcgtctctggggacgaagctgtcgtccgcgccgagttct

SEQ ID NO: 74015 - DNA, 365 bp, Zea mays
agctttagttgaccttatatatgtcagtttttatcccaaccaatatggtgtatggctaaagaaatatataaagtacttttaaataaggaacattaaactaagtaatgaaaaccttctaatgagaaaatttatgtatgaaaatggatgcttttattagaaaataatcaaattttctcaaaatgtaaactatttctttgatcataagggaaacatagtcagctaaactcatttgttatagtctttactatatataatatgtggatcatatatatctttaaacacatgcgaaccaagtgtaaagaatagtgagtacaaaatttcgacaactcaactgatgcttttctagagtagaggagtaacacata

SEQ ID NO: 74016 - DNA, 487 bp, Zea mays
gggcgactgtcagttcgacctctagaagcagttcttcttggtcgcatgcgccgatgtgtacgacaagctcccgcgaagccaccacttggacgcggtccaaagcaactgctgtcacacccgggttttatgggcaccaagacccgggcgcgaacataaacaccagatatgctgggaccaagtctcacacatatgatgtatagtggcacaggatcgaatgtcacatctttatatataacaggagttctatactaaataaataattacattataaggagacaacggtccagcaacccaaagttgactgggagacgacggcctagacctctcatgaacacatcgcagcatcctccaagcgcctcatcctgcggtacctgttcttgacctgtgggggtgtgagacagcaagagtgagctcacatacgttcatcgctcaacaagttgtggggaataatgtgtatgaactccccataggtgggagctcatgtgaa

SEQ ID NO: 74017 - DNA, 372 bp, Zea mays
agcttaaggacatgttggttaccagcttcctatgctttcaaacgaagccggtcacagctcaagctctgttccaatgtatgcaagaccacgaagaataccttcaggcatatgtactaaggatcttgcgactaagggcacaatcccctacagagcccaatgagattgtcattgaggccatgattaagggccttcgaccaggacctatggctcattacttcgcaaggaagcccccgcaaactttggagaaactgcttcagaagatggatgagtacatccgagctgacaatgacttccgccaaagaagggaggaagcttacagattctccgaaatgaccaggggcttcggaggaagagtccattcgaggcatgtca

SEQ ID NO: 74018 - DNA, 490 bp, Zea mays
tcatcctccttattcatccaaatctgatgattacccgaataacaattcaaccgactcatgagttctgaataatctgcgcatctacaaaagaatccattcttggtagagggaattcattcttctgacatgccttgttgagatctgtgaaatcaatgcacattctccatttcccattggcttttttcaccatgacagcgttagccaaccactctggatatgttacttctctaataacactgacactgagaagtctctctacttcatttcgtgcacctttggtgttggagacttgtctcaaatgctatgaattaagaacaaggcatcataagagaaggttcaatgattaatatcgcttcgtccttctaagcattatttgccttggaatataacaacttcagaccaagggcattattggcataccttcatcattacggcatatgatagtcgacatgagaaacacatgaatacgaaagatagcatggactttatt

SEQ ID NO: 74019 - DNA, 346 bp, Zea mays
agcttcatgaatatattttgcgaagactacactttctaagatcaatagcgtgtctccttacgacctagcatgatgctcccctttttgggaacattcttctgaaaatcgatattgtgtccccttcttgtgccatatgcagcatgatgtatgatgcttatgctatgcgaaatgatgtgatgatgttatgctatgtaagatggtatttatttcgaaaatacacgcacatccctgcgataaaacacataatctttttgaatcagcgttgacttcttgctataagcctcccttatgagcttcttcgccttttacttcagcggaatcagcgtttatttatcactgtaagcct

SEQ ID NO: 74020 - DNA, 506 bp, Zea mays
  unsure (1)..(506): unsure at all n locations
tcagcatggcccactctttcatagttggaaacactttgatagccaaaaattcctgcactaagtccctagtgccaatatgctctgctataaccctaattcagccaacgcaatttgggttggaccctctagtgtcatattgcacgggggtctggtctctccgaagatcaactccagcggactctgaaccagcttctccttgtcatcgtcaactttgacgtagaaccattcagatttccagccagttagccacttgcttcggtaactaatcacgggaaactttgtagtcttgcggtaggcaaaattgtagcagccgaagttntcatgtaacccatctcctctggccttggtttggtaatgtagctcatgtactcggcaaaaaccttctgcaaacggttccaccccttggcttctgagagcccanatgtaaatgctaatcctaacgatagcgttaggagttagctgatgaaagtagatcccanacttcttcaacacatcaacaatcatct

SEQ ID NO: 74021 - DNA, 369 bp, Zea mays
agcttgtgaagattcttcattccaacttgggccagtcggcgatgccagagccaacccatattagtcttaacaattaagcaagtgtaaagttcagctctattaaaatcaactaagtatagctgaccctctaacacttccttaaatgctactgaatcatcacttcttctaaagacagtaacacctacatctgtaaatagacagttgtagcccatattgcataattgagaaacagaaagcagattgtaatctaaagaatctacaagaaaaacattggaaatagaatggtcaggtgatatagcaattttaccaagtcctttgaccaaaccttgatttacatccccgaatgtgatagcccgttgaggatcttcg

SEQ ID NO: 74022 - DNA, 440 bp, Zea mays
  unsure (1)..(440): unsure at all n locations
atgccagacttatagaaaggatttgatatttattgtgatgcatgtggccaaggattgggatgtgtgctcatgcaagaaggacatgtgatcgcttatgcgtctcgtcagttgcggaaacacgaatngaactaccccactcatgacttggaactagcagcagttgtgcatgcacttaagatctggagacactacgttatgggaactaagtgtcaagtatatacggatcataagagtctgaagtatatatttactcaaaaggatctcaaccttatgcaacgtcgttggttggagctcattaaggattatgatttggagattcactatcacccgggcaaggccgaattggttgcagatgccttgagtcggaaggagcatgttcacaccgcttttgtcgtccagctacccgatgaattagcanaagacttcgagagactcaattt

SEQ ID NO: 74023 - DNA, 368 bp, Zea mays
agcttctaaagggagagcacattttgggactaacaaatgttcattttgagaaagacaggatttgtagcgcatgtcaagtaagaaagcaagttggtgttcatcatccacacaagaacatcatgacgactgataggccgcttgagctactccacatggatctattcggcccgatagcttacataaacatcggtgggagtaagtactgtctagttattgtggatgattattctcgcttcacatgggtgttctttttgcgggataaatctcaaacccaagaaaccttaaagggattcttgagacgggctcaaaatgagttcggcttaaggatcaaaacgattatgagcgacaacgggacggagttcaagaac

SEQ ID NO: 74024 - DNA, 519 bp, Zea mays
  unsure (1)..(519): unsure at all n locations
ttacgtgacactataaaactcagctttatgaaacgattaacaaaatattcttccactgcatatttgcaatcgtcttccctacaatgacatatagtggtcaaaccaaagaaatcgctatgaaaatctcatcatactgatcaaatcaagttgattnttagatattccaattgcctctattttctttgtcaatcatattgacaatcgcatgaggtagaatgataacagtacgtccaacttgaatttgttgtcttttccaacctaaaagatacacactgttagcctagttggtgattctagtcggtagtggcaagttgtgtgagtagtaaagagggaaaacgaactgatcttatatatcgatggtgattctagctggtaggggcaaagaaattatgcgactatactgatacctacctcatctatctcaatccatgttataactaaagtaaaactagatccaatctactatacatatcacctatatacaaatcatctagataaacaattatgcatgacctaact

SEQ ID NO: 74025 - DNA, 373 bp, Zea mays
agcttttgtggaattgggagaggatttgatcactttggtgtgtctagaattgaatgctagagctcttgtaagtggttggaagttggagaacttggattgcttgaatgtggggtggttgggggtatttataaccctaaccaccaaactagccgtttggtggaggctgctgtcgcatggcgcaccaaacagtccggtgcgctaccggacactgtccggtgcgccagccacgtcactaggccgttgggttccgaccgttggagctctgacgtgtgggctcgcctggctgtccggtggtgcaccggacaagtcctgtagactgtccggtgtgccacccgcgcgtgctctgctcctctgcgcgcgctggcgcgcattt

SEQ ID NO: 74026 - DNA, 474 bp, Zea mays
  unsure (1)..(474): unsure at all n locations
gagaaagcagcttcagcttatcagtcgaagcctatgctcttatgtgaggacatagcagagcaaaaggtgctgttaggctctcaattatccgaagagcaggagaaaaccttgataaggtttttgttcaacaacaaagatgtttttgcatggtcagctaatgatctctgcggagtaaatagggatgttattgaacattcgcttaatgttgatccatccttcagagccagaaaacagaggcttcggaaaatgtcagatgataaggccgaaggtgctcgtaacgaagtcaaaagactcctcagtgcaggagtcatcagagaagtaaagtacccagaatggctagctaataccgttatggtaaaaaaggctaatggcaagtggcgaatgtgtattgattntacagaccttaacaaggcttgttcgaggatgaattcccattgccaagatagactctntagttgatgcagcagcttcttc

SEQ ID NO: 74027 - DNA, 376 bp, Zea mays
agcttcgtcatctgaaaggaagttacccttttgtatatagatgatctcagttctccagtcttcactatagataggagatatgttgaggactgctctttcaagaagttcgaccgaaggtgcttttattgtttcgaaaaatacttccgaaggtaagggcagcccctgtgctgctgacttggctaataaatcagcatgttcattttctcctcgaggaatatttttaacagaaaacccttcaaaggaagcctcaatccttcggaccgtgtctaaatatttctcaagcttcggatctcttgctttataacttttgtcaatatgaccagaaataacctgggaatcagttttaagaaccgcccttctaattcccattgccttt

SEQ ID NO: 74028 - DNA, 447 bp, Zea mays
  unsure (1)..(447): unsure at all n locations
tccctgcgcacagcttcggctgtgcaccatccttcgcggttcttggttatcagcccgtccttcgtctggttcatgcttcgtcctgaccgcacttcatgttcgtaattctgagtccgaaggtacctgttcacataatccacttggaaaacattgtcaaatcatgtttttgaggaccttcggaggacgaaggcccccaacagtagcccctcgcaatattaattcgtttgaaataataaattcagattgcgatatgaacgaaggctttatgccgaaggtccgaaaaaacaccttccctttgctagaatagcaacattcaatgacaagtggggtctttcaactttcaacgcatcaagcgtataaatacggccataccgcaaacttattttgcacgctttctggccaaccactcctgctcactcattntntagctcttgtgcactgtgatct

SEQ ID NO: 74029 - DNA, 367 bp, Zea mays
  unsure (1)..(367): unsure at all n locations
agctntaccaaatggacgtgagagagtgcctttctcaatggaccaatcaaggaagaggtctatgatgagcaacttcctggctttgaagatagagagtaccctaaccatgtctataaactctctaaagcgctttatgggctcaagcaagccccaagagcatggtaagaatgccttagggattttcttattactaatgactgggaagttggacaagccgatcctacactcttcactataactcttgaaaatgacttgtttgtatgccaaatttatgtcgacgatatagtatttgggtctactaacgagactgcatgtgaagaatttagcatgatcatgacacaaaaattcgagatgtctatgaaggggg

SEQ ID NO: 74030 - DNA, 429 bp, Zea mays
tcaaagggagaacacgtgataggtctaactaatgttcaattctaaatagatagaccttgtgcagcttgtcaagcaaggaaacaggtgggaggctctcatcacaccaaaaatgtgatgacgacatcaagacccttggagatgctgcatatggacctttttggacccgtcgcctatctgaacatatgaggaagtaagtatggtctaattattgttgatgactattcccgcttcacttgggtgttctttttgcaggataagtctgaaacccaaaggaccctcaaacgctttcttacgagagctcaaaatgagattgagctcaaggtgaagaagataaggagcgacaacaggttcgaattcaagaaccttcaagtggaggaatatcttgaggaggaagggatcaagcacgaatttttcgtttcctaacaccac

SEQ ID NO: 74031 - DNA, 375 bp, Zea mays
  unsure (1)..(375): unsure at all n locations
agcttctctcttttcttctcgttagctttcacataaagccactcaattgtccagccagtaggccatttggtgcggtatccaatcacaaaggccttcgtattttttcgatatgcaaaattatagcacccgaagtttttgtgcagaccatcagctctggacttcgtctgatagtgcagttcgtgcactcgacataacccttcgccattggcacttttaccttggcttcagagagcccatatgtaaatgctaagcctaacaatagcatttagggtcaactagtggagatatatctcanatcttttcaaaatatcccctatcatatcgtacaggggaaccgaagccccaccctgaagaagctcttgaacacaacaacct

SEQ ID NO: 74032 - DNA, 437 bp, Zea mays
tctccttgtcctcatcaaccttgacatagaaccattctgatttccagcctgccggccatttgcttcggtagctaatcacaggaaaccttgcggttttccggtaggcaaaattgtagcaaccgaagttttcgtgaagcccatcttttctggcctttgtttgataatgcaattcatgaactcgacagaaactgtcagcaaagggctccactgcttggcttcggagcgcccaaatataaacgctaagcctaacgatagcattaggagttaactggtgaaggtagatgccaaacctcttcagtatctccgcaacaatctcgtgaagaggaaatcttagcccagcctttaaaaagcttttgaagatgacaacctcgtccttctctggcttcggggtggtttcttctcccccgaagcgaagtagcttcttctgatcttcactg

SEQ ID NO: 74033 - DNA, 374 bp, Zea mays
agcttcataactcccagaggaacctattgttaccttcggatgcccgaggggcttaaaaatgctggaggaagcttcaacagaatgactagcaaggttcttcactctcaaataagcagaaatgtgctaacttatgttgatgacattatagtaaaaagcacaaaacaagagaatcatgttgctgacttgcaagagacatttgccaatttcaggcaagctggtctcaagttgaatctagaaaagtgtgtcttcggagtgaagaagggcaagtttctttgctgtctggtatcaacaaagggtatcgaagctaatccaagcaagatcgaagctatccttcggatggaaccaccaaattcaaaaaaggggctcaacggttg

SEQ ID NO: 74034 - DNA, 421 bp, Zea mays
  unsure (1)..(421): unsure at all n locations
tntaattgttttggtgtttattcattgacccaatgatgtattattgtgaaacactaatcccatgttcatctcaagataaaagtggaataagtccttaatcattattggtgaatcaagcaaaggacctcgattgtgcatctgtctcctcaaaggacagtacctgtgtttcttaagtgcattatcaatatcgctcttaaagctaaatgtcgtgctatctgtccttggagtaattatgctttgaagattgcttgtgttggactcttgttaataattgattaataatttccaagatcgtaatcatgcttgcttaatcatgattgtgtgctttaaaggttatgtcttctgaatcatctaataggtagctcttcattagatatattcaccacaattaactctttttatgttcgtgaattaacatgca

SEQ ID NO: 74035 - DNA, 371 bp, Zea mays
agcttgtgcaggccaatatgttggacgttgtctatctcgcaaaggagtagattgcaccaaccaattcaacacaaaagattaaactgatagaaagaggtggaacctccactcacatcgagtcgtcgagtctctcctgaacctcagaagtggaatagaaacaagtaacaattattttattttaattatgctaactagaattcaaactcacaacttatggctttgatataatattaagttgtatgcaccaaccaatttaatcctaaaacttaagttgacagaagacttctacaatttacttatactatatttcaattccaacaatagcaaggggccctgctggctggcttgctgcctcttgagcatccgcatcg

SEQ ID NO: 74036 - DNA, 507 bp, Zea mays
  unsure (1)..(507): unsure at all n locations
tgtccactctntagcctataaaatggtgcccaacgccctatctacgacacccattctacttccatttcatcagcttcttccttgcttcattcccttccttaactcctcccttgaacaatgtttgggttcttccatttctttgggccacaacgtaatgtcgtcgaagacgaagtcgatgagactttcacgcttgctgcagcttacgaagccgaggccaacaataggcgtagccaccgacgtctcatacctaggaccatgctggaggagagaggctcatcttcatgcattacttcacgtcgagccaacttagcttctgcgactttctgaaggaggtatgatggctttgccattattttacgcaacgtgttgacgccactgggttggccggnttgtgtcactatctccaacagcttacccatacctatatctatattcaaactantttttgttcgtttggcttttaattgtatcggcttctactggttctacactgntntatctctatag

SEQ ID NO: 74037 - DNA, 371 bp, Zea mays
agcttctaaagggagagcacattttaggactaaccaatgttcattttgagaaagacaggatttgtagcgcatgccaggcaggaaagcaagttggagcttatcatccgcataagaacataatgacgaccgacaggccactggagctcctacacatggatctattcggcccgatcgcttacataagcatcggcgggagtaagtactgtctagttattgtggatgattattctcgcttcacttgggtattctttttgcaggaaaaatctcaaacccaagagaccttaaagggattcttgagacggactcaaaatgagttcggcttaaggatcaagagaataagaagcgacaacgggacgaagttcaagaactct

SEQ ID NO: 74038 - DNA, 237 bp, Zea mays
atgaatacctggtcatgccaaaatgacttaaaagaacataaacttggtctataaatgaaggtagtataaactaaaaccaagtttgagtccacaatgagagagagagagagaggatcccctcacttgatgctctctcaaaatgtgcattaagcttggagcaatatcacatgtgaagtttagcacttatgaagatagaaatcacaattaagttaatgagacacgatacacaccgatttt

SEQ ID NO: 74039 - DNA, 372 bp, Zea mays
agcttctaaagggagaacacattttagggctaacaaatgttcattttgagaaagacaggatttgtagcgcatgtcaggcaggaaagcaagttggagcccatcatccacacaagaacatcatgacgaccgacaggccactagagctcctacacatggatctattcggcctgattgcttacataagcatcggcgggagtaagtactgtctagttattgtggatgattattctcgcttcacttgggtattctttttacaggaaaaatctcaaacccaagagaccttaaagggattcttgagacgggctcaaaatgagttcggcttaaggatcaagaaaattagaagcgataacgggacagagtttaagaattctc

SEQ ID NO: 74040 - DNA, 482 bp, Zea mays
tctttgattggtgttctagcctccctcagccccctgttgctcgtatacccgttcgattaagctagactgcaccatatcgtcgtgaacaccttggattacctcggattcatgcaattagttgagggattagggtcgccaggggtagaatttattgtcgaccgagtatgaagcttatcctttgcatattccggccggtacaggctcgctggagagtgtgttcaccgctgtcggtggtcggtgacatgatcttgcgaagaagcaaaaagggaggggcctcggtgcaaatgtcagagacacatgtgaatagtgcgcaaggattcttaattagttatttaaaaggtcggggtcctctatgcgaatcgagcatcgcgggcgcgtttccctgttcatgggctggctcgggttggttgagcccgttactattcattctttcttttcttttctttcctgcaacttaggaatcatggaaatctaaaatgata

SEQ ID NO: 74041 - DNA, 372 bp, Zea mays
agctcgcagcataagacaagagtatttaattcttcaacagcactgaacagatgagcatcttcactgatctccaacacagaccacacagcttctcagataaagaggaaaggagaataatgggtttcccaactatataactaactttattgacatagtatgtaaaccaaaatgcaggggatacccacactctggtgacaatcattacaaagatccaaatcaaacatagttcatcatgacaaacataaatgcacaggatatagcaaactaccctgtctaactaaaactaactaagaccgagactaacgctaagactgaagcttccatgtatatatttatttcgtattaatcacaagatccaactctaacgatcta

SEQ ID NO: 74042 - DNA, 524 bp, Zea mays
tacggaatatgaaactaagcttcgccacaagcacctcgagtcgctcatcggctgctgctaggacgacggcgagatggtcctcgtgtacgactacatggcgcacggcacgctgcgggagcacctgtacaagagcgggaagccggcgctgccgtggcggcagcgccttgagatcaccatcggcgccgcgcggggcctgcactacctccacaccggcgccaagtacaccatcatccaccgcgacgtcaagacgaccaacatcctgttggacgagaactgggtggccaaggtttccgacttcggcttgtccaagaccggcccgactgccatgaaccagacgcacgtcagcaccatggtgaagggcagcttctggtacctcgacccggagtacttcaggcggcagcagctcacggagaagtccgacgtctactcgtacggcgtggtgctcttcgaggtgctctgcgcactgacggcgctgaacctctacctgccgaaggagcaggtcatcctcgccgaccatgccctga

SEQ ID NO: 74043 - DNA, 368 bp, Zea mays
agcttctaaagggagaacacattttgggactaacaaatgttcattttgagaaagacatggtttgtagcgcatgtcaggcagggaagcaagttggtgatcatcatccacacaagaacatcatgacgactaacaggccactcgagctcctacatatggatctattcggcccgatagcttacataagcatcggcgggagtaagtactgtctagttattgtggatgattattctcgcttcacttgggtgttctttttgcaggaaaaatctcatacccaagagaccttaaagggattcttgagacgagctcaaaatgagttcgacctaaggatcaagaaaattagaagcgacaacgggacggagttcaagaac

SEQ ID NO: 74044 - DNA, 467 bp, Zea mays
  unsure (1)..(467): unsure at all n locations
tatcatctatgtggttctggtacaagctctataataggtgggaaaaatatggactttccattgatagagatcgggcggtggaaaaagtaaaaagtcctaacggaaaggtacctggaacctcatatcatgcttggtgtttgatttaatccatgtagtgccttgctaagcttgtattattgtatatatgattgggtcttttggcatcttttcataatgctaattcgctgcattgcttcatcgtactccctcagtttttttatagttgacgttggttagtgtaaaattgcactagctagcgtcaagtgtaaaaaaaaatagaggtagtatttgaatactcttctcttgcggaactatcaggttaccaataatagaaatatactctntgctatttaaatctttagcttctaaattgactaaactctagtaaccttattttagcttatgggatctaaacatgcccttatgca

SEQ ID NO: 74045 - DNA, 367 bp, Zea mays
agcttgcattgcatgtataaattctttgtattgcatctaggacttgtctaacctagttgagataaccgccaataaagcgagtgaaaaagcttaactcgggtcaaacctgacaagtcttaatttttaagcttttagcacttaaaattcttacttttcatgcaattattggttcttgaaatatgcatgaggtactgcacttagggggagtattcaaaactcaaatcactcatgaaaacccctagtgcaaaccaaaatgcaaatttcaccatttgcctattttctctaaaaattatctagcctatggcaaaatattttgaaaagtatatgagggtgccaatacctgtcccaacaagtgttcttttgtgtg

SEQ ID NO: 74046 - DNA, 429 bp, Zea mays
  unsure (1)..(429): unsure at all n locations
tnctaagggagaacacattttaggattaacaaatgttcattntgagaaagacaggatttgtagtgcatgccaagtanggaagcaagttggctctcatcatccacataagaacataatgactaaggatggcaacgggtacatacccgtcgggtagtaccattccatactagtacccatcaaaaaaaattctacccgtcgggttacccatatatactcgcgggtataaaatcttactcatacccgtacccgcgcgggtatttttacccgtcgggtaacccatacccgctaggaaagaattaaattccaatataccaatcactcaaaatattaaataaacatataaaaacaacttcaatttcacatataacagatcatatgattatataacttggtatctaaacaaatgataactagagaaggggttattct

SEQ ID NO: 74047 - DNA, 377 bp, Zea mays
agcttggaatcgagcacacatgcatacactaaacataacatcgggcctagatgcggtaatataaagtaaactaccaattattgaacgataaagtttttgatcaaccatagtacctccttcatctaagtctagatgaccatttgttgccattggagtcttgataggtttagcattttcgaaaccaaacttcttgagcatgtccttcaaatattttgattgacttataaaaattccatctttcaattgtttgatttgaaggccaagaaagaagctcagttctcctatcatagacatttcaaattcttttgacatcatttttccgaactcctcacaaaataattcattagtagatccaaaaataatatcatcaacgtaga

SEQ ID NO: 74048 - DNA, 493 bp, Zea mays
  unsure (1)..(493): unsure at all n locations
tctacttctcattcacccatgtcactaccctgaccgcatcatcgttcacgtagtcaactttgctggaccgggccccaactgaaaaaacatacttatcaattnttgacaggtttcactgacaatatggaagcattttttttccaaagagcttcataaatcttcgacaattttttgaagcatgctcttttcatcagtaagaatttctcttttagcttttccacctcaaaatccttacgtacaatttccatcccttctctaaatttagccactttggctttgtgagtttcagcaacctttttcatttcattttcaagttcattaactcaatgaaaatattgaaaagtttctacttcgagcatagcaatcttgtcatttttggatttggcatcttttagtttcttgtctatctcctcagtgacattgtgaagcctgaattgactttcaattaagtcactggctagagtgctaacatatcttcctttatcattcttat

SEQ ID NO: 74049 - DNA, 371 bp, Zea mays
agcttgcatcataagaagagagtatagaattctttttagcactgaacagatgagcatcttcactgatctcctacacagaccacacagcttcttagataaagaggaaaggagaattatgggtttcccaactatataactaactttattgacataatatgtaaaccaaaatgcaggaaatacccacactctggtgacaatcattacaaagatccaaaccaaccataggtcatcatgacaaacataaatgcacaggatatagcaaactaccctgtctaactaaaactaactaagaccgagactaacgctaagactgaagcttccatgtatatatatttcgtattaattacaagatccaactctaacgatctatg

SEQ ID NO: 74050 - DNA, 504 bp, Zea mays
  unsure (1)..(504): unsure at all n locations
tgtcctccanaacgtcatccaacctctgtccctgctctttggtcatgtggttntcccagtcccccaccttgccttgcctgaagaacgtagacttgccaatgactaaatcgtttccaaaagcgacacctccggtttggtttttctccaggccgctgagcacctcgaagctgcacaggctcgccacctgctcggggactcctcctctctcttccgcctcagtgaacgggtcagagaagaagccggcaagcgtcttgacaaccttcaccgggtctgccacgatctcttcgtacctcaagaacaggatatgctgaggcctctccaagctcgccttccagtactcgaggtagtgctcccagaaggggcccaacggcgagaacccctcgcagaacatgctcaacgcgtcgtcgaggtccacggaggaggaggaggagcctctgcgcagcatgccgttcgcgaagaaccaccacgagacgaaggcgtncttgggatgccggcacacgtaca

SEQ ID NO: 74051 - DNA, 381 bp, Zea mays
tgagcggcgctggaaaccgaaagcagagggatttttggtgaggccaaagaccagccaaacctaggtgagataaccggccagaatgcgacggaaagagcttaaacacgggcgaaagcctgacacgaccctctataaaagccttaaacgcttatgaatcatacctttcatcgcaagaaatggacctcggaaaaccgcaagaagacacgcgccacggggggggcatcaaagagaaactgaacgccggataccccccagggaaaccacaaggcaaacatcgccaatcgaatggtcaggagaaataataactatgccaaggccaaagaccttacaaagggtgtgaggcgcccaagacactgcccaacaggggtccttttgagtgac

SEQ ID NO: 74052 - DNA, 429 bp, Zea mays
  unsure (1)..(429): unsure at all n locations
tgacacaccatttgacatcttanataagatttttgagatcaagtatatttaattcattcctcaacatgcaaaagcgggttttatcaagtggcttagtgaaaatatccgctaattgatcttctgacctcactccttctaaactgatgtctcctttagcaacatgatctctaaggaagtgatgacagataacaatgtgcttggtgcgagagtattgtacaagattattggcaattctaagagcactctcattgtcacacaacaaaggtaccttttctagaactacgccatagtctagaagagtttgtttcatatataaaatttgtgtgcaacaagcacctgcggcaatgtattccgcttcggtggttgacaaggcaacactattttgctttttggatgtccatgatacttgagagcacctagagggggggg

SEQ ID NO: 74053 - DNA, 378 bp, Zea mays
agcttatgaagattcttcatcccaacatgggcttgtcggcggtgccagagccaacccatgttagtcttagcaattaagcaagtgtcgagttcagctctatcaaaatctaccaagtatagctgaccctctaacactcccttaaatgctactgaatcatcacttcttctaaagacagtgacacctacatcagtaaatagacaggtgtagcccatttgacataattgagatacggaaagcaaattgtaatctaatgaatctacaagaaaaacattggaaatagaatggtcaggagatatagcaattttacccaaacctttgaccaaaccttggtttccatccccgaatgtgatagctcgttggggatcatggtttttctca

SEQ ID NO: 74054 - DNA, 441 bp, Zea mays
  unsure (1)..(441): unsure at all n locations
tatctaanaagcttggtggaatttgggattattaattactctctaaaattccagaagcatgggttgtggttattttaaatatcccaaaattccctattggaactaaaaatcatgaaactatttttattaaatactatagaaaattaggagcctagcaaaattggtctgatatttttagcatttttctacaattttctaggaattctctaagtccacaagataaagaaaaaggaaaggatgctacaggattgggctaaaacctggcccgagtcggcccatatgctggcgaaagcgcgcccgcgctgtcggttttgcgcagggaaccctaacggtttgaaattctataaagaatccttcccactattcctctgtctcgctgacacttgcagaaacacgcccacgctttctcctctttctcctctttacatcccgcaatccacg

SEQ ID NO: 74055 - DNA, 365 bp, Zea mays
  unsure (1)..(365): unsure at all n locations
agcttcaagtatgggaagagcacgctctgttgcgaggggagcaggcacctgaacgaacagccattgggcaccacagaaaggggagcgccagccatggagatgctctgccatggggaagaaaggcctcactgtcctttgctggccgtccagcaaagagcacggagctcgcaccaagaggagaacagggagggcgctctgctgcttggcatggacaacagaaagagggaggaagagatgggcgcccttgtggccgaggggaggagttgagctccctgcgctggctgctgctttcctgaacctcgaagaaaaaggcacggagtattgcttgtggcggctangaaaaatgggaggtgggagtgcaaaat

SEQ ID NO: 74056 - DNA, 467 bp, Zea mays
tcggcactatttccaagcttacaacatatttgttccttcatcacaacctctgaaggatattatgaggaatcgagatgctactggaaggattggaaaatgggctgcagagctcaatgacatttgtattgaatatgttcatagatcttcaattcagtcacaggcgctggcagactttattgctgattggacgccagggactcatgaggaggaaacgaataaagacaacgaagcctggacagtgttttgtgatggatcttggggaaccttcggagcaggagcggctgctgtgttggtttcaccttccaaagtcaaaatttgttatgcggcaaagcttgagtttaattgcacaaataacattgctgagtacgaagcattggttctaggtcttcggaagttaaaagcaatgggaatcagaatggccatacttaaaactgattcccaggttgtttcgggtcatattgacaaaa

SEQ ID NO: 74057 - DNA, 376 bp, Zea mays
agcttttattcggtgatgaagaataacacaggaagaagcaagaacatgttcaataaggaccttagctttggcagaagacgaagaggattgtaaaataacaaaagacaccatagaagggaccagacttcaggcaatagatcacttcaataagcatcaagccgaaatagtaaaatggcgagatcggaaggtaagattaaagaatatcaagctaggacacttggtactttggagattggccaacccggacacagtgggaaaacttcagcttaaatgggaaggtcctttcttggtggtatcttcgtcaagacctggatcatacaggttgaaagaaatgggacggcatgacattccaagatcttggaatgcagaggagctt

SEQ ID NO: 74058 - DNA, 505 bp, Zea mays
  unsure (1)..(505): unsure at all n locations
ntaacccctgcgagacctttccncatttctttctaactctggtgaatgcaatatcgcatgtcatattctatgcatgtttaatctacttgttctcttgtatggtgtactggtcgtttcctaatttcaatggatggatatatgtatgtttgcactcgcatagagaacgatccggttgaagagcccgaagaactcgcaggagaagcccctgagcagcagtcggttggtggaggcaagtgtcccttgacctatctctgtcctattcattctttaattcacctcccgcattacacatttatgcctaaggatttactagctttgttatccataaccttgcttacctatttgggttggattattattggttagctntatgctattgctcaactctaatcaatgaacatgatgagnatatctatgatacnctgttttcccccttcttattatgatgtcatacttgtggcctttaagggggctcgaagcggttctcgagtgcctctccgtaagg

SEQ ID NO: 74059 - DNA, 371 bp, Zea mays
agcttttgatgctggtaattagtaccatcctaacataaaatattattactggatttactatacctttttgttgtggcaactaagctagttttgcttcttcccttatattgtccttgcctgcccttgtacggttcatgcacctagagtgatcagtgggttcaaacttcaaaccccgcttcaagtttcctaggatcagagtgtccaccgatttcaaaccctgcttccagtttcccagacatgacctgctctaaaatctgcctgaggacaagctctacactagggttagctccaatgctccattgagcacaatattgttgcggtgcttccacacggtccagtttcccaagatcatagcattcattctcttgatt

SEQ ID NO: 74060 - DNA, 446 bp, Zea mays
  unsure (1)..(446): unsure at all n locations
tcttctataattactaatgactgattcttatnttaacctagcccaacaatccaattgtcgaaacctgtacaagaattggacagaatctgaaactactaaacctatggccatgaagatttagctcaagccaggataagaagttatctataacttttatatataacactttcacagaaaacatgatttactttactaaactagctgtataattaaaactgctcatgcagtcccaaacagcaaacattccatttagttcctatttaactactacattctacatgctcttaatactaagacaaagcactcggttaccttaccattatgagatttagaactcaattcatggattgaaacaatctaactagttctctaacaacattcaaccaacataaggcactccacatatgtactggttaagcacgtctcatacatataacttcatgaac

SEQ ID NO: 74061 - DNA, 374 bp, Zea mays
agcttctccatgtctatatctgtccgatggaccaagcaagttcaaaggaaacggcttctctactgcataaaaaaaccaatccaatgaaaaggttaacgattcctataaattgagaaagaagcatgttcttcatgcccaaaagcggataaagtagatggaacctgttctctaaccttctttttgtagcagatactgcataaagtttacctgccttgtaaggcttttgtaggattaatcaaattttctttttatcgttctatctcagagtatccattcattcgatcttgctatccgctctcaattgaatcccttctctgttgtcgacaggtgtgtccgcatcaggaccagaatcacggtctagtacctccgtactc

SEQ ID NO: 74062 - DNA, 449 bp, Zea mays
  unsure (1)..(449): unsure at all n locations
tcgagaaactaatactcttcgacagagtactgataaccttcgctccagttcggactcggaggcatgctaagctttcatcgtcaataccgccgaagagcaatgctcctggttgatagccgcatgatattgcataatctctcaactcttctttctcagccttagacaacttttgaccaattatgttttgaaaattgaaatccttttcctccgaagtatcttttccagacactgtggccagggtctcttcggcagctatagcagcttcttccgcggccatattcaaaagcattttatccatatcagaaaacgtgccctccagatntgtatcttcggccgttgcagcttcggcagttgcagcttctgcggtgggagcttcggtagctgtagcgtcgacagctcgtgttttgacgccgaggccggcggtggtgttcttcaatggcttaatcaca

SEQ ID NO: 74063 - DNA, 404 bp, Zea mays
cgtacccggatcctctgagtcacctgcggcatcaagcttgaaaggatttgatgctttgattgtttctttggagcgtattctttcgctctaatattgaatgaggaagttgcaatgcttggatggcttgaatggtggtggtcgggggtatttatagccccaaccactattccagtcgttgctgtcgatgggcacaccggacagtccggtggtgcaacggacactgcactgttcactgtccggtgagtgccacgtcaaccgaccgttggggtttggagctgttgaccgttgaagtcttctgtcttcttgtggcaccggactgtacgatggcacaccggacagtctggtgtattctgactttgcagacagacttctgacttctgcgctatagactgccctgtagtcag

SEQ ID NO: 74064 - DNA, 453 bp, Zea mays
  unsure (1)..(453): unsure at all n locations
tggcactcacaaatctgttgctcaattggatagctgttttcttgatgttcaacttaatatttgacctatctctcaaatgtagtccaaccttgaacactatggttccaaaatttagtttcttttggttctttgtctctccagaaaatacttttgcagacccaacatttcgattaaataattaagaatatctattttcttgttttgtctcatcatggctattctcttaccccttgttttcttattttactatctagtgaagctgatgagattcacaagatatgcaatgtcatcggtagtccatatgagcaatcttggcctcaaggattgtcacttgcagaaacaatgaagtatcacgtcccacaggtcaatattcaccaggtccttatctttctggtaccggctcaagttnttttttaataaaacatgtattaacctaggattatgcagctacta

SEQ ID NO: 74065 - DNA, 373 bp, Zea mays
  unsure (1)..(373): unsure at all n locations
agcttactcctccctaggaagggcccttcatcatcgccaagattntgaagcccgggacatacaagctggccaacgatcaaggcgaggtctacaacaacgcttggaacatccaacaactacgtcgcttttacccttaaaatgtttcaagtcgttcatgtatctcgctttctttacatacataaataaagtctaaccatcaaggaaggatcagccttgcctcggcaaagcccgaccctccctcgagggctagaaggggaaccccctctgcgtctaaattttcctcagaaaagtctttactagaacgtctttcgtgcttttcgactgtgtcgataacagaatcctaaaaacgagagagagagaccttgaacggcaa

SEQ ID NO: 74066 - DNA, 501 bp, Zea mays
  unsure (1)..(501): unsure at all n locations
tctcccggacaagcgctgcactcactgcagagtgtgatatctgccacatacagcaacaaaggagcccctggcactggtggagttagcgtcgntaggtttatcagatactgcttcagctcgtcaaaggctttttgctgagctgatccccattgaaagacttcggctgacttcagcacttcaaagaatggtcaatttctctctgctgatctagatatgaatcgattcagagatgctagtcttcctgtcagccgttgagcccccttctttgtacttggcggctccatccgaagaatggcttcgattttatttggattagcttcaatacctttcgttaaaactagacaaccaagaaatttccctttcttcactccgaagacacacttctctggattcagcttcagaccagcttgcctaaaattagcgaatgtctcctgcagatcagcaatgtgattttcttgcttcgtgccttttactatgatatcatcaacatatgttagcacg

SEQ ID NO: 74067 - DNA, 365 bp, Zea mays
agcttctgccttttactctttcgagtaactatagtattatacttctctagattttccatatgggtttcaatatcagcatatattactagttcatgcatctcaggtaaagtagattcatggctagaagtgttatctgtattgtactagatgtatttttataagaaatcgctctaaaaatgtagcatctttagactccataattgtaccaacattcatgttaggtactccaaaatttattattaaatttgttaatctatgttgttaaaagcatatacaagaaatacataatcaacaatatttagtccaaaattttgtttcttgttgattaacacattcactttggccaaacaacctcatgtttgtag

SEQ ID NO: 74068 - DNA, 444 bp, Zea mays
  unsure (1)..(444): unsure at all n locations
tgggaacagtacaaattcagaagggagaaagcagcttcttcagatcagccgaagcccatgctcttatgtgaggacatagcagagcagagggtgttgttgggctctcaattatccgaagaacaggagaaaaccttgataaggtttttgttcaacaacaaagatgtttttgcatggtcagccaatgatcttagcggagttaacagggatgttattgaacactcgctcaatgttgacccatccttcagacccagaaagcagaggcttcggaaaatgtctgatgacaaggccgaaggtgctcgtaatgaagtcaaaagactcctcagtgcaggagttatcagagaagtaaagtacccagaatggctagctaacactgttatggtaaaaaaggccaatggcaaatggcgaatgtgtatcgattntacagatctcaacaaggtctatccg

SEQ ID NO: 74069 - DNA, 370 bp, Zea mays
agcttgcaccccgatatattggaccttttcttatccttgaaagatacggaccagtggcataccgacttcagttacccaaaaccttgtatgtagtacataatgtgttccacgtgtcacaattgaagaagtgtcttcgggttcccgatcgaaccattgacgtaatggatgttgccctataaccagacttgacataatctgagcaccctattcaagtcttggatcaaaaggacagaattacccaaaggaaaactctcaagttttacaagatacagtggaaccagcattcagaagatgaggctacatcggaaacttataactttttagaaaagaatttcccaagctttttagcctcatgtaatttgtaaagtgt

SEQ ID NO: 74070 - DNA, 482 bp, Zea mays
tcagctccatctatgttatggattgcttttgagtcagtccaattaccttcggcccttcttgcagcttcctgacttccatggatagcaatgggtccctgatccgaaggtatcttcatgcaaagataggcaggatgaaggattgcttcgaaggcattgagagtaccacgaccaataattgcattgtaagggtattccatgtcaacaatgtcaaacacaacttgctcagttctagtgttgttgatgaacccgaaggtcactgacatggtgatcttgcccaatgctacaatctgtcttcctccgaagccacagagaggatgtgtagcatcatgaatcttatcttctggctcctgcatctgtctgaaggccttagcaaatatgatgtccgctgcactgcctgtatcaaccaagacattgtggaccagatatcctttgataacgcaagagataaccatggcatcgttgtgtgggtaatctttgagctg

SEQ ID NO: 74071 - DNA, 368 bp, Zea mays
  unsure (1)..(368): unsure at all n locations
atactaagccttatcanatggacgtganaagtgccttcctcaatggactcttcaatgaagaggtctatgttgagcaacctcccggctttgaagacagtgagtatcctaaccatgtctataagctctctaaggcgctctatgggctcaagcaagccccaagagcatggtatgaatgccttagagaatttcttattgctaatagcttcaaagtcggaaaggccgatcctacactctttactaaaactcttgaaaatgactttgttgtatgccaaatttatgttgatgatattatatttgggtctactaacaagtctacatgtgaagagtttagtatgattatgacacagaangtcgagatgtcaatgatg

SEQ ID NO: 74072 - DNA, 362 bp, Zea mays
  unsure (1)..(362): unsure at all n locations
actaagcttgcgaggttcttcatccncacatgtgctaagcggcgatgcctcagccagcccatgctagtcttagcgattaagcatgcatctagaccggnctnctcttttgcaaaatcaactaaataaagtttgccgtctagtacacccttaaaagctagtgaaccatcacatcttctaaagacagacacatctacattattgaatagacaattatatcccatattgcataattgactaacagatagtacaatatatccaagagacttanctaaaaacacattagagatagagtgctcattggatattgcaatcttgcctaaacctttcaccttgccttggttcccatcaccgaatatgaaaga

SEQ ID NO: 74073 - DNA, 389 bp, Zea mays
  unsure (1)..(389): unsure at all n locations
tcctcattaanaccaggcatatacatcactgcaacatagatgtcaggattaatcacctccactntggtctcacgaatagcacctgccacatccttgacagcatctgtcattntagacaacatcagagtgtcctcatcactgagaacactcctcttcctcttattgcctacaccactactaccttctttcatatcctttgttgcctcaccccacattttggcaccatcatcaactgacttaccactcttgtcctcatcaagtgaatcagtcttaacagagctagtagcaccctcacacggagatcctaaagcttcatttgaacccatagcatacttcccagttgctaatcctgtcccaaatatagtcatcatctccttatagntctctat

SEQ ID NO: 74074 - DNA, 413 bp, Zea mays
  unsure (1)..(413): unsure at all n locations
ngacaacgaggaaatggtgctcatcatcaagagcttctgccatatcctcaagcaaaggaaggggaaagatataaaccccgttccaagaaagtgtgctacaaatgtggtaagcccggtcatttcattgctaaatgtccactatctagtgacagtgacagggataacgacaagaaggggaagaggagagaaaagaagaagtaccacaagaagaggggcggcgatgcccaggtatgtcgcgaatgggactccgatgagagctctagcgactcttcctccgacgaggacgccgccaacatcgtcgtcaccaaaggcctcctcttccccaacgtcggccacaagtgcctcatggcaaaggatggcaaaaggaagaaaggtaaatcaaaatccttcactaaatatgaaacctctagtga

SEQ ID NO: 74075 - DNA, 388 bp, Zea mays
  unsure (1)..(388): unsure at all n locations
ntgtacacacttgaggcggngctggttgataactnntttatacaactgaccttccactattgcgaatacatgactntggtattttagtcttttgatctcggattgatctatggggtggtaacgaccttgcagatacaacattactagggcccgtcaatctttggtcatgatgagactgatcattctttggtcgtcgtcgggctgcctcactactcgggcctctattacctaatagaatacaccagagggcatggggtcgcctttagctgctaccttcgccaaagcgtcgacttcttcattcttgcttctgtcgatgtgttatagcgtaaaacctcanaattgcttctctagactacggctgataagtattggaggaggactaactctc

SEQ ID NO: 74076 - DNA, 342 bp, Zea mays
  unsure (1)..(342): unsure at all n locations
ggcagagggcgccagggcttctgtggaaggtttggagatcagccaagaaaaatttactgcctattctgtggtgaagacaanggccataccaccaagatgtgccacgttaccatccagaagcagaaggagatagcagtaaccatattgcaacatagtcatccgaagcaggtcatgcatactgcttcgtatcattcgccttatattccagaatatgtaggcaaccaccttgtagcttctgttgcttctgcaagccaaccccaagcatcttggcaacagcctccaccggcaccgccgacgcaacgaggacagcagccagaatggagtcagcacaatcaccttcag

SEQ ID NO: 74077 - DNA, 405 bp, Zea mays
  unsure (1)..(405): unsure at all n locations
ntaagatgccaacatctttggacatccttcgaacattccaatggtacatctgtaatcagctataactaaaagaagatgaacaaaggaataaaattaagatgcatttattttaccattctttttatgcatgtccgtacatcttaatctccttccattaatctgtctcttcttcacgagtggattaaactgaagaagatcttatcactttaatggtgttgccctatttttggttcttattaggaacctcaacaggtgtatatatatactgccatatagggatgaaaacagtcaaaatcaatatcgtatatatgaaaacgattgtcagtcgatcacgaattcactcggtttcataattaatctacttatcagcgattataatatgatatcgatagatatttgaaattc

SEQ ID NO: 74078 - DNA, 324 bp, Zea mays
accgtgctgagttgcggcagagagggaaccacggtgagctagactgagaccaccggattacctggactcgatctaactcaaagtctggagctgtgcagcacgcgtcttcagtgcacgcgtcgaacagcaacgctatggcgtctgggaactccaccacgcacctgtgcacgaagtagtcgttcgcgcggcggcacacgtagttgaactgcaccaggtcgccctcccgcacctcggtcgccttctcctcgacgacatcttcaaaagtcagatcaagatgcgagcgcaattctttcatgagccatcagaagtcagaaacatagctca

SEQ ID NO: 74079 - DNA, 369 bp, Zea mays
gcattgtaaagcttctagatatgtctatgtgactaatgatgagggtgaattggtagttacgaaggtcgcagctaagcaacttcgtcggttgcctatcattcctcggctttcaaggctgttcctcaacaaggaaatagctctgcatatgacgtggccaaagaatggtgtacgtctcgtcactgatccagacataatggtccatccgtcggacggtgatgcgtggaaggcatttgacgagtttgatcccgaatttgcaaacgaccctatgagtgtacggcttggtctatcgacggacggattcacacctttcaataccagtgcaagcccttactcgtgttggcctgtcttcattgtgccatataatctttc

SEQ ID NO: 74080 - DNA, 386 bp, Zea mays
  unsure (1)..(386): unsure at all n locations
ntntgaaagctggactgcgatttcccttgagtagcttctttgtggaggtactgaaaatattcgaagtctacctccatcaacttacccccgaggcaattataaggctaaatatcttcgtgtgggccgtgagaagccaaggtctgaagcctgatgcaaaaagtttctgcaatatacacgaattatcatacgaaacanaaccttggggtaaggaacagtatcacaatatatttggctgctacaatttcgtttctcggtccgggtcaagctgtctcgtgccgacctttcggaagagatggcccggcgactggatgacagaatggttttatgtgaagaatgatttgacagcgcgagaagatatcaaaggtataattatgcgcnctatttgc

SEQ ID NO: 74081 - DNA, 410 bp, Zea mays
  unsure (1)..(410): unsure at all n locations
ntatctncttaactcagcgtatgtgactctcttaccanataatgctgaggctgtggaggtaaaagacttcagaccgattagtttaattcacagttttgccaagattctcaccaagattctggccaataagcttgctgcaatcctccctactttggtctcccccaatcagagggcattcatcaagggaagaagtattcatgacaattttatgatggttagagaaactgcaaaagcgattcacaggcagaaaattcctagaatcttgctgaagttagacattggcaaggccttcgnactcagttcgtggcctttccttctttgagttctggaacatgtgggaattggctattcttgcgtaatttaattgctaagctattgtgttcttctctactcgagtgctaagtaatggg

SEQ ID NO: 74082 - DNA, 353 bp, Zea mays
  unsure (1)..(353): unsure at all n locations
cggattgtggccaaatgtgtacgcgcattatctctggcaagtgggacaacattngcatcaggggcttctcgaagccggacttgcagcaaaaattgtaacagacgccagacaaatcggaggagggggttacgatactgagcccccttggcttatataaactacactcatcgtccggtcgagtccatcgtccttgcaagcctccataaaagccagccgtagggccatagctcctctcccgtttcaattctctgttgagccaagtcgtgtggttgagagcccgtcgttgtcgggagataagttgtgaggggtagaaggtcaggtgctataactttgccgatgctttgggttcgtcg

SEQ ID NO: 74083 - DNA, 360 bp, Zea mays
tcatttccatctatgttatggatagctgttgaatctatccagtttccttcatcttttctagcagcttcctgactgccatgaatagcaatgggtccttgttctgaaggtatcttcatgcatagatatgctggatgaagtattgcttcgaaggcgttgagtgtcccacgaccaatgattgcattgtatgggtattctatgtcaacaatatcaaacacaacatgttcagtccttgtgttgtggacaaatccgaaggtcactggcattgtgatcttgccaagtgctacgatctgccttcctccgaagccacaaagagggtgtgtagcatcatggatcttatcctatggctcttgcatttgtctg

SEQ ID NO: 74084 - DNA, 407 bp, Zea mays
  unsure (1)..(407): unsure at all n locations
gttanggattacaccgtggaactacaccttcttacccttgtacatgaactccatccattttgcagtccagtgtatggacatatgaccaagaccctccaaccagaccattcctagtataaggccataaccatccaatggtaagaacatgaaatcaatacaaaaagttattccctcacatagccattgacagtttggtacccatttttaacaccacaaatagtacccatcaactactttgactttaataggtctgatcaaattctgcactcctttcactacttccatcagatgggtacccataaaactattcgagctacctgaaaccaccaataccaacacctgttgacaatgatatgaggtccataaacagttagttctattgtttcactacaacttactggtgccat

SEQ ID NO: 74085 - DNA, 424 bp, Zea mays
  unsure (1)..(424): unsure at all n locations
tcgacgcagacaggggcttgagcatcataatgaacctttcaccgattgttcgatcgcgtcggtcacgcgacggagataggtcgggctataacgcgcatagtgcttttgcgttgtgcgatcgtcgtcatggcccagcatttgcgccagttccgacatgggaatcccggcttcggctgcccagaccgagccggtatgccggagcgtgtaaggcgtcgcatggacaccgctcctttcggacgcggcctgaaacgccttcttgatactcttcacgcgctcgccgccgcgttcgatcacatggattgacgtgcgggcctggtaggcgcgctgcaacgcgccgagcagctcgtcgccgatcgcgacgatggtccggcgctttgccgtgcggacatggnccggcggggtataatcgatcttgccgcgatga

SEQ ID NO: 74086 - DNA, 406 bp, Zea mays
  unsure (1)..(406): unsure at all n locations
tatgaagattcttcatcccaacatgggctagtcggcggtgccatagccaacccatgttagtcttagcaattaagcatgtgtcgagttcagctctatcaaaatctactaagtatagctgaccctctaacacacccttaaatgctattgaatcatcacttcttctaaagacagtgacacctacatcagtaaagagacaggtgtagcccattttgcataattgagatacagaaagcaaattgtaatctaatgaatctacaagaaaaacattggaaatagaatggtcaggagatatagcaattntacccaatcctttgaccaaatctttggttccatccccgaatgtgatcgctcgttggggatctatggttttctcgtaggaggagaacatccttttcttccctgtcat

SEQ ID NO: 74087 - DNA, 355 bp, Zea mays
  unsure (1)..(355): unsure at all n locations
ccacatgtgctaagcgtttattccacagccagcccatgctagtcttagctattaagcatgcatctagaccggcttcttcttttgcaaaatcaactaaataaaagttggtgtctaatacacccttaaacgctagtgaaccatcacttcttctaaagacagacacatctacatttgtaaatagacagatatatcccatattgcataattgactaaccgatagcaaattatatccaagagactctactaaaaacacattagagatagagtgctcattagaaattgcaattntacctaacccttttaccttgccttgattcccatcaccgaatataattgaatcttgggaatccttatt

SEQ ID NO: 74088 - DNA, 321 bp, Zea mays
ctcagctcagtctggcacaccggactgtccggtggtgcaccggacagtgtccggtgcgccaggctgacttggcgcgaagtggccgctctcgggaattcgccgacggcgtacggctaaaattcactggactgtccggtgtgcaccggactgtccggtgagccaacggtcggtcgggccaacggtcggccgcggaatctgcgcgcgacacgtggccgggccaacggtcggaagggggcaccggacatgtccggtgcgccaacagctctctggccgcaacggtcggcttcgccatttaatgaatgaaatcgggcaccggacact

SEQ ID NO: 74089 - DNA, 472 bp, Zea mays
  unsure (1)..(472): unsure at all n locations
taaagccatggtaagtaccataggcaagtagtatacgaattgattcaagcctagctacgggtgcataggtttcaccgaaatccaaaccttcgacttgtgaatatcccttggccacaagtcgggctttgttccttgtcaccacaccatgctcgtcttgcttgttgcggaaaacccacttggttcctacaacatnttgattaggacgtggaaccaaatgccatatctcattcctagtgaagttgttgagctcctcttgcatcgccactacccaatccgaatcttgaagtgcttcctctactctgtgtggctcaatagaggaaacaaacgagtaatgctcacaaaaatgtgcaacacgagatctagtggttacccccttatgaatgtcgccaaggatggtgtcgacggagtgatcttgttggatagtttgtggactcttggtgtggcgacttggtctcatcctcttgctttgata

SEQ ID NO: 74090 - DNA, 375 bp, Zea mays
  unsure (1)..(375): unsure at all n locations
actcagcttctaagggagaacacatnttgtgactaacaaatgttcantttgagaaagacaggatttgtagcgcatgtcaagcagggaagcaagttggtgttcatcatccacacaagaacatcatgacgactgacaggccactcgagctcctacacatggacctattcngcccgatagcttacataagcatcggcgggagtaagtactgtctagttattgtggatgattattctcgcttcactcgggtgttctttttgcaggaaaaatctcatacccaagagaccttaaagggattcttgagacgggctcaaaatgagttcggcttaaggatcaaanagattagaagcgataacgggacggagttcaagaactcac

SEQ ID NO: 74091 - DNA, 375 bp, Zea mays
  unsure (1)..(375): unsure at all n locations
tagtgcccctaagaaattatctaactgtattaatggcaaagctccaatagctcaagataatgagggttacattntatatcctgctggttatcccgagcacaagattaggagaattcattctaggaagtctcactctagctctcatcatgctttttatttataagagtgaggcatctagttctaggcaattcactcatgttaaattgcctaagaagaaaactcctattgcatcaaatgaacctaatatttcatttaagaccttngatgcatcttatgtgctcactaacaaatcaagcaaagtagttgccaaatatgttgggggcaaacacaaggggtcaaaaaattgtgtttggtacccaacgtgcttgtttctat

SEQ ID NO: 74092 - DNA, 167 bp, Zea mays
acatactgacgacggacatgccactcgagctcctctcatggacctattcggctgatcgctacataagcgtcgcgggaggagtattgtctattatataggatgttattctcgatgacttgagattcttgtggcagataaatccccttcgcagataccttataggattc

SEQ ID NO: 74093 - DNA, 381 bp, Zea mays
  unsure (1)..(381): unsure at all n locations
gganagcaggaattcanaaaaaaagaacaagaagatacagacagatgatggcatctttggtgtttaatagggtccagaggagcagataaaacggagaaatggaaccacatctttggacttttgtcatcggattaccatggtaccaaagctaacacaacattctgtttatcacggcagatagttagatggttcagtttggcaatgagccatgaactgatgggcatcgagcataagcataccttttcaagcctatgcaagaagtatgttttgaattgccgaacacctcgtccacttgagttttggtccatatgatgagccttctcgaaagcagctaagcgacctttgtttagatagcgacgatcaacgagtcagaacaacata

SEQ ID NO: 74094 - DNA, 388 bp, Zea mays
aagcttactcatacctcttacactcatttatttatttattgatttagattattcaccattcatttgattaaaacttaaccttcgtctacaaagagatcttcccaagggaatgcttactcgaagacgaaggttgaatatctctcttaatattgtgttgccttgtttttgattgtgtatagcaattgagaacgagtgaccaacaaccattatcttgttttcttcaatctttctcttgggctcttttggtcttgagtcttgggcttgtgcttgatattatgtgatcctctaagtatcctttaagtcttcttttgaagtgttgcatcctttaagcctaagtccacacctctatagcattctgtgagctataatcacaaacacctgaagaaca

SEQ ID NO: 74095 - DNA, 444 bp, Zea mays
  unsure (1)..(444): unsure at all n locations
ctcagctatctgtcgatacggtgcacgaatcgcaacaagagatctaccaccggcgacagctcaccggcgacgagcaggggggtgaatcatgatcttcttcagattggggtctactgtaccatggcagaaccgattcagtcgcctgacagagccttttggagcatggttttctcttaattttgaatgacaactcaactcanactctgcatcaaagttgtaaagcaacataccatctacaatattgccatatgatgctgccacaaaaacccattggatcatgcttgaatctangcttgaagttgatgtcagttcattgttagtctgaaaattcagaccttagcagcctgatagcccaaagttgagcatgattatctctaaatttctcacaagaacatggcttgcccacttcagcaagattgttctcctttgttgctttcaacattg

SEQ ID NO: 74096 - DNA, 398 bp, Zea mays
  unsure (1)..(398): unsure at all n locations
ntgtgccgatggagaaacaaanatccttgagatcttggctgtcttactgcttgtcgttgtcaactgttagctcggacggtactccgaagcggcaaacaatgttttgccagaagaatttctgggcagtctttgatgttattgtagaaacagccctcgcttcgatccatttggtgaagtattcgacggctacgaaggcgaacttgaggttcccctgagcggtgggcaggggcccgacgatgtccaggccccagcgctggagaggccatgtatgggcaatcagctttgtatactgcgaggggctgcctgactgatgagaaaacttctggcaggcttcgcatgaccttgtgtacccgattgcggcgcagatcattgcgggcccagtaaaccctttgcggatc

SEQ ID NO: 74097 - DNA, 138 bp, Zea mays
gctcacgggctcaccaagaagctatcggagtgcttgcatctaacggagggaaactggagaggggttggccacggcggtggcgctcgggcagcactggctgtctgcggggaggccgcccgaggcaatggctatctctgg

SEQ ID NO: 74098 - DNA, 345 bp, Zea mays
  unsure (1)..(345): unsure at all n locations
cgactgtcagttcgacctctaaaagcagtcttacgttgtcgcatgcgccgctgtgtacgacaagctcccgcgaagccgccgcttggacgccgtccagagcagctgcaccgcgctgtccatcgttaagcagggggcctcatggttgtcgccaacgtcgacgactctcgggttgttctggacaccgcattcgacgacgacgccatcacgccgtccagctcatcgtccacctgaagcccaacctgtcacgtaagtcgctactgaccggacatgaattcttgtgcgctgggacgatggacgtngctgacgttgtgtgagtgtcctcgaacatgatgtatgtagtggaat

SEQ ID NO: 74099 - DNA, 408 bp, Zea mays
  unsure (1)..(408): unsure at all n locations
tccttcgaaaggttntctatcaagaatattccacgatgagaaaatgagcacgctgatctactagccaagtcagcggcacaggggctgcccttaccttcggaagtattctttgaaacaataaaagcaccttcggttgaccttcttgaaagagcagtgctcaatatatctcttgtttatagcgaagattggagaactgagatcatgtctttccttcagggcaatttcctctcagatgacgaagcttatcataagagaatagcggcaagagctcgtccatatgtaataatagaaggggagttatacaagcatggagtctgttctccattactcaaatgtttatccagagctgaaggtatagagctgatgaaagaaatacatgcaagcctatgtggatctcacatcggatct

SEQ ID NO: 74100 - DNA, 479 bp, Zea mays
  unsure (1)..(479): unsure at all n locations
ctngaagaaaactccctatgaatagctcattggttgatatccaaatatctcatattctagagtattcgggtgcaaatgctatattttgagaaagggaagccgactctctaaatttgagaagaaatgtgatgaggggtttctactcggatattcatcaaatagtaaggcttatagagttttcaacaagactcatggtattattgaagaagcatatgatgttgagtttgatgaaactaatgggtctcaagatgaaagcgataatcttggtgatgttggtggaactcaattgagaaatgctatgaaaacaatggccattggtgaaataaagccaaaggaagatgatgatgaaaatagtgtggttgtcattccattctcttcaccctaaatgaagatatcatctagcccatttatgatgaaatatggttctcttatcaagaacttacgtcttcggttctctcatcttcactaacattatcaac

SEQ ID NO: 74101 - DNA, 209 bp, Zea mays
tatattctaaaatctaccgtgaagacatagccaatcagataggaaactctgcgttgattatacgtgaggtagaattgaacatgtatatcaccaaattctatataaactagttagggccactaaagatgtcttacctctcgatcgatgaatcaagattatacgatattcctcatgtctcattctaagaaaatgagatattcattgagaga

SEQ ID NO: 74102 - DNA, 411 bp, Zea mays
  unsure (1)..(411): unsure at all n locations
agtgattanagagagtgatgggtgtgttcatttgagctcttgcgctnggattgcttctttttctcattctttcttgtgatcaaactcaatcgtaaccgatgcaagagacaccaattgtgtggtggtccttgtggggactttgtgtcccgtgtgattgagaagagaagctcactcggtctaaaggaccgtttgagagagggaaagggttgaaagagacccggtctttgtgaccacctcaacggggagtatgtttgagagaaccgaacctcggtaaaacaaatccttgtgtctcacttctttcgcttgcgatatttttacgccctctctcggactcgcattatatgtctaacgctaaccccgcttggtagtgtgattaactttgtaaattcagttcgccctattcacccccct

SEQ ID NO: 74103 - DNA, 450 bp, Zea mays
  unsure (1)..(450): unsure at all n locations
cttgtgttcgtcgacaagcagatcttcctttgagctagaatttgcaggaacaaaagatgatacatatcaaaagctcaaagaagagaatgagaggcttaagatgagcttgacacaacttaaagggaagtgcattgctcaaccttttcaagataaccgtgttcacatggtgaagaagcttgagacggagacaaccgtggcatgcactaaattccttgaagaaaatgttaaggacttgaggattgccaagaggagggaacaaaagaataaaatcaatacctcttccaaaagcctcaaccatgcctccatacaaggtaacatgcaaggtaatgatcaagccacacttcacactaagagaggtaaaaagtgtagtgaatgcttttgaaaggggacactcatangtcattgtctcatattaaaatggcttgatattaacaaagatgataaactttg

SEQ ID NO: 74104 - DNA, 348 bp, Zea mays
  unsure (1)..(348): unsure at all n locations
tctaacgggagaacacgcgataggtctaactaatgagactntctataaagatagaccgtgtgcagctggtcaagcaggtaaacaggtgggaagtactcatcatgccaaaaatgtgatgacaacatcaagacccctggagttacttgatatggacctcttcggacccatcgcctatctaagtatatgaggaagtaagtatggtcttgctatagttgatgatttttcccgcttcacttgggtattctttgtgcaggataaatctgaaacccaagggaccctcaagcgcttcctaatgagagcccaaaacgagtttgagctccaagtgaagaagataatgagcgacaatgg

SEQ ID NO: 74105 - DNA, 383 bp, Zea mays
  unsure (1)..(383): unsure at all n locations
actcagcttgcacacatagctcattgaataccttagatcatatcttctttatatgctatgactaatgtngtttcaagtctatttcaaaccaagtcataggtatattgaaagggaattggagtcttcggcgaagacaaaggcttccactccgtaactcatgcttcgctatcactccgagcaactctctattccttgtggagaaatgagcatccaagaaaaggacttcatccttggaggagagagtaaaagctcaaaagcaaaaggaccggatttcgtctttggtataatcttaactcatttacttttgaccaaaggggaagaaattactcagagggctctaatgattcccgctttggcgattcatgccancaagggggagaaat

SEQ ID NO: 74106 - DNA, 423 bp, Zea mays
  unsure (1)..(423): unsure at all n locations
actcagcttgctcaggccttcttctttttctccatagcaagaaccttattggaacactaccccacttaanatgaatgagggtagaactctctaatcttgaggatttggactccttgaagtacctcataacaagggtgttacggggtcttcttctgctgttgctgcttgagcaggctgcggagaaatgactgacacagggttgattctgggagaaccttcttcttatcttctcttcactatcttcttttctcttctcactgcttctttctttctctttgctcttcccactggaggattctatcaaagagtattaccatcatacagaggaggaaatcgaagactatgaaccatgtgcaacagtcttcaacccaagaatcaccatgcattgtgatcttatgggcgagggagtggatatggagttgc

SEQ ID NO: 74107 - DNA, 245 bp, Zea mays
  unsure (1)..(245): unsure at all n locations
ctcgatgctgaatctgtacaccatgcgctgagagaccgtctttgtgtagtnngagngactggtacagcagaagatataaagcgctgccgggacccatttaccatactctgatgactgcaagtacgttcatttagagtgaatgaagctacacagctcaccagttggtccagacatccaatgagcgtacctgttatgtatgaagggcatgtgtagagcacatatacaattggattcggcacttttct

SEQ ID NO: 74108 - DNA, 411 bp, Zea mays
tcaccgtatgaccggaacatcctacacgcaactaggcctatcgatcatgacgggcgcctgaacgctgattagatttagaggcctaagaaccggcctgagccgactactggaacaatccctaccccaaaccgatgctagccgctcggcacatcaccgaaacatccaattaccatgcatggcctatccaggcgaatattaaacagatctttcataaaccaaagactagccatgacggaccagatccgctacgtggggacgcaacgggacgccaccctcgcactagtggacctcacgcgacagaggcaaaacactcgcagtcggcaaacaaaacacgtgtgataacaatcatgttgatgcaatcatctaatttctacgataactagtccatctcgccataaaaacgcttcaata

SEQ ID NO: 74109 - DNA, 344 bp, Zea mays
  unsure (1)..(344): unsure at all n locations
tgtgattgcatctacnggcgcgccagatggatgggatttctcatcggagctcggcgggcagctctgggccgcaccgtgccatggctagccccctccacgctctcaacaccggtaagtaacctgcacacgaatttggtatcttcgccccatcatgtatcaccggttgaatcgtagcttacggcacagaatcatggcaccgtgctctccggcgaggccaccgtcgggtgacgtgaacgcgccaccgctctggagggagggggtcgtgatgtggaagaatgcccngngccgttcgatctaatgggcgaacgcaattaaagcggggactatcgattcggcaattggat

SEQ ID NO: 74110 - DNA, 346 bp, Zea mays
actcagcttgagtcatcattttgcaaggattattgatgctcattatgataatctgggtatgaagcacatacgagagaagataaggctggagtagccaagtgtttcagggaagacgatcaaggtgtgatatggtttaaaaaccgcatagtagtgccaaagaacgaagaactccgccagcacattcttgatgaagcacatcttagtcgttattctattcatcccggaagcactaagatgtagcaagatctaaagcaacattactggtggacaaaaatgaagattgaaattgacgctatgtggcgaagtgtgacacttgcagacgtgtcaaggccatacacatgaaaac

SEQ ID NO: 74111 - DNA, 455 bp, Zea mays
  unsure (1)..(455): unsure at all n locations
ttgctataccaacatcccttgtagaggaatatattgtggttatccttatgaatgcacagctgtaggactccctcgatggctcggctgttgtactaaaagacaagatcaacaccaaanaggtgataatccattagataaaccaaattcatttcacacctagtgcacggtgtttgagcaacaagtccccgttttcccatgaccttcattactcaagaagtgcaacaccctagttttaccaatatcaaattttctctttgaatcccaaaccctaatatatttttctatagaggagataaatctatctcagatattttctagataacattaatcaaggaaaagataaatcattaaaataaatataaaggtaagtggtttgttgcatatcatgttgctgcataagattttgcctattcatatggttttacatgatacatatactgtttcgaaccccttat

SEQ ID NO: 74112 - DNA, 342 bp, Zea mays
aacttctccatggcttgacatatgtgatgtcatgggttctcagcgtaagacaatggtatggagccctgcgaattaatgcatcttgcaccacatttggcttttctgtgtgataatggatttctaaatcataattcttaattagctcaagccatcttctctgcctcatgtatagttctgactgggtaaaaatatactatagagttttatgatctgtatatatatggcagatatttcccagcagataatgacgccattattttagggcatgaaccacatcaacttattccaagtcatgagttggataatgctcctcatgccaacgcaacttgtttgaacatatgc

SEQ ID NO: 74113 - DNA, 441 bp, Zea mays
tcaaataatcattaaccaaaactgacaccaactcatggtaccattagaaaataactatgtcaacaacccaaataaggggcagaagaaccatatagtgttcatataactacctcttaaacttaagtactggaaatgaatcatgggtgccaagcaaaaagtaagagatccagctaaacaactaaaattagaattaaaaatgttgccgaaactactaaaaacacgattcatgagaccatggaatatgaataaataacaacagatgggattggaatgggaccatgaataacaacaacataaccctaacaagtagaggagacatatatagttcatttatgcatacctcttaaacttaagcatcagaaaagaaccatggaatatgaataaataaaatgtaacgagagtccaaagtatggcgaatggatctagacacatagatgtatt

SEQ ID NO: 74114 - DNA, 306 bp, Zea mays
tgcaccccagtatattggtccctttcctatccttgaacaatgtggaccagtagcataccaacttcagttacctgaaaccttgtctgcagtacataatgtgttccacgtgtctcaattgaagaagtgtcttcgggttcccgatcaaaccattgaagtaacggatgttgccttagaaccagacttgacatattccgagcatcctgttcgagtcttggatcaaaaggacagaattacccgaaggaaaactctcaagttttacaagatacagtggaaccaacatacagaagatgatgctacttgggaagc

SEQ ID NO: 74115 - DNA, 376 bp, Zea mays
  unsure (1)..(376): unsure at all n locations
ctatcanatggacgtgaacagtgccttcctcaatggaccaatcaaggaagaggtctatgttgagcaacctcccagctttgaagatagtgagtaccctaaccatgtgtataaactctctaaggcactttatgggctcaagcaagccccaagagcatggtatgaatgccttanggatttccttatcactaatggattcaaagtcggaaaggccgatcctacttgattcactaaaactcttgaaaatgatttgtttgtatggccaaattatgttgatgatattatatttgggtctactaacgaatctacatgtgaagaatttagtaggattatgacacaaaaattcgagatgtctatgatgggggagttgaagtacttc

SEQ ID NO: 74116 - DNA, 342 bp, Zea mays
  unsure (1)..(342): unsure at all n locations
tctacagggagaacacattntaggatgaacgaatgttcattttgttaaagacaggatttgtagcgcatgtcaggcagggaagcaagttggagtccatcatccgcacaagaacatcatgacgaccgacaggccgcttgagctactccacatggatctattctgcccgattgcttacataagcatcggcgggagtaagtattgtcttgtaatagtggatgattattctcgcttcacttgggtattctttttacaggaaaaatctcaaacccaagagaccttaaagggattcttgagacgggctcaaaatgagttcggcttaatgatcaagaaaataagaagcga

SEQ ID NO: 74117 - DNA, 295 bp, Zea mays
ctgtacgaaagctacgctgaacgagagagatgatcttctctcttccgtcgctcctataaacaggagatatgttttcgaccgctctgtcaaaaagtgcgaccgctagtgttcctatcgattcctgctacactctcctaggttacgtcatcccctgtgctgctgacttggctaactaacactcatgttccttatctgctcgacgaatatcttctacatagtacccttctgatgaaccctcaatccttctgaccgcgtgtaaacattgttacagctttagatctcttgctttataact

SEQ ID NO: 74118 - DNA, 399 bp, Zea mays
  unsure (1)..(399): unsure at all n locations
tgtggcgccctcgagcgtcttctcgcagacgaagtaccatattctcccactaggaaagcctcngcagccgaacaccttctggcagtggtaagcgttagcaaggactgtctgataccgacgccgagtgtagtaatggccacgtcccgagcctcttccaactggtccaacgagtcttctcggctggtctgctcgcttaggacgtcgaaagcctttgtcctctgggaaccgcattctaagttcgtgggtaagatagcctctgccccatagactataaagaacggggagaaacccgtggaccggctcgacgtcttctcagactccagaccaccgagggagacttttatccatcgcttgcaaacttgtgagatcgttgaaatcttggtttagtactgaaaaaat

SEQ ID NO: 74119 - DNA, 393 bp, Zea mays
  unsure (1)..(393): unsure at all n locations
tactagctagtcccaatttgccccaaaggctgcgaaatgactttttatntagcatcacgatcagaaacgattgtgttgggcacaccatgcatgcgaacaatttcacgaaagaacaaatcatcaatatgagtagcatcgtcagttttatgacatggtatgaaatgtgccatcttatataatctatcaacaaccacatacacactatcacgtgccttcctagttctaggcaatcccagcacaaaatccatagaaatatcttcccaaggagcactacgaaattgcgagaaaccaccccaaacatgagttttggacctaaagtagtggattgggcatgttcgttgcgaaaaacgaagatataggttcggaggcaaaaactcgtgctttgtatgcacc

SEQ ID NO: 74120 - DNA, 252 bp, Zea mays
gtcaactgttagctctgacggtactccgaagcggcaaacaatggtctgccagaagaatatttgggcagtctttgatgtgattgtggaaacagccctcgcttcaatccatttggtgaagtattcgacggctacgaaagcgaacttaatgttcccctgaacggtggggaggggcccgacaatgttcatgccccagcgctggagaggacatgtatgggcgatcagctttgtatattgcgaggggttgcctgaccg

SEQ ID NO: 74121 - DNA, 352 bp, Zea mays
  unsure (1)..(352): unsure at all n locations
tctgcacactataaacactcacctgtgagggcatgagatccactttagtcanaaccatataaaaacaatatgaacataaaatcggtcgagtcgctgcaatagtatgaaacgtcactttctacatcataaatcttatgtactcttttttattttcctccgtacgtaatctttacgatactcaaattctatccataaccagattctctctataactagattcttagaaaaactcctcataaaaaaactaaaccaaacaggacgcatgtcagacggtggttatggagacgacacgttgattgtgtgtgttagcggtgagaggggtatcgcgagcgagcgagtcattgcggaatgc

SEQ ID NO: 74122 - DNA, 483 bp, Zea mays
  unsure (1)..(483): unsure at all n locations
tcggcttaatcacagaacaggtgaaccaacttagtatgttttaggctattcagtcctcacagatttttctataggtcaatagtaaatgtaaagggcatgattgtacattctcataggttgtgtcctgtgcctataaataagtgaacagtacccccgtactgttcatgctgacttgtactcgcctgtgcgtcacgcttgtacttttaccttctgtcaaagccgaaggtactctttgtaattgatacattacctcgttttacatgagtaaataacgataaatatgttgataatgtcatatgactgtttatgttgtttctcatatgtcatatgcttcatctcttatttatcgtatgccatgatgatgaangtatgtccttcatgaccttccgtctaaagatcattatatcctatagagaataattgttctaaagaccaaaggtattacacttattaatttttgtgccttgtctcaactatacatct

SEQ ID NO: 74123 - DNA, 377 bp, Zea mays
  unsure (1)..(377): unsure at all n locations
gtaatactaaagactcagggaatcgtagcgcgcattagtttataatcgagcgagcgagagcaagtggctagagagcgtaccaaatgagctcgccgtatgctctcatttatacgctcggtgcagtaaaaatngaaagaccccgcctgtcagtgaatgttgctattctagcaaagggaaggtgttttttcggaccttctgcttatagccttcgtccatgtcgcaatctaaacttattattttaacaaattaatattgcgaggggctactgttgggggccttcggcttccgaaggtcctcacaaacatgatttaacaatgtgtttagagtataatgtgtgagcaggtatcttcggactcgtatcatagagggagaagctc

SEQ ID NO: 74124 - DNA, 420 bp, Zea mays
  unsure (1)..(420): unsure at all n locations
ctaactctcgcgagacctttccgcgcctctntctatccatggtaaattcattatcgnatgtgatattctatgcatatttactttatttgttctcttgtatggtgtactgtttgctttctaatttgaatggatggatgtatgtatgcttgcaatcgcatagagaacgatccggttgaagagcccgaggaacccgcaggagaagcccttgagcagcattcggttggtggaggcaagtgtcccttgacctatctttgtcctattcattttttaattcacctnccgctctatacatttatacctaaagattgactagctcttgatatccatatcctttgttacctatttgggttggattattatttgttagctttatgctattgctcaaactctaatcaatgaacatgatgagaatatctatga

SEQ ID NO: 74125 - DNA, 347 bp, Zea mays
  unsure (1)..(347): unsure at all n locations
tcngctccatctatattatgaattgctctggagtcagtccagttaccttcggcccttcttgcggcttcctgacttccatggatagcaatgggtccctgttccgaaggtatcttcatgcaaagataagcaggatgaaggattgcttctaaggcattaagagtaccacgaccaacaattgcattgtaaggatattccatgtcaacaatgtcaaacacaacttgctcagttctagtgttgttgatgaatccgaaggtcactgacatggtgatcttgcccagtgctacaatctgtctttctccgaagccacagagaggatgtgtagcatcatgaatcttatcttctggctc

SEQ ID NO: 74126 - DNA, 423 bp, Zea mays
tggagaaacaaaaatctttgaagtcttggttgtcaaactgcttgccgttgtcaactgttagttcggacggtactccgaagcggcaaacaatgttctgccagaagaatttttgggcagtctttgatgttattgtagagacagctcgcgcctcgatccatttggtgaagtactcgacagcgacgaaggcgaacttaaggttcccctgagcggtgggcaggggcctgacgatgtccaggccccagcgctggagaggccatgtatgggcgaatcagcttgtatactgtgaggggctgcctgaccgaggagaaaacttctggcaggcttcgcaagaccgtgtgacccgatttgcggcgcagatcattgctggccagtataagcccttgcggatcaccttagcagctagggcccttggccctgcgtgtg

SEQ ID NO: 74127 - DNA, 340 bp, Zea mays
  unsure (1)..(340): unsure at all n locations
tgtctaanagaactaaaataaaataaatatataaaatatgtttttgcacatcatgttgaagttctatatgtatatataaattaagggtttgaacttcaaacttgtgttgatttgaaattcaaatagaaaacaaaatagaataaaaaaagaaaagaaaaagcaaacctgcgcatgggccgacttcttccctgcccttggcccacatacacttatccgttccgcggcccaactcccttctttcactcgcggcccagcgatccccgcccacgtacgcacacctgccatgtgggccgcctgggtcagtgaccactacgcctacctcatctctgtcatgtgtgcc

SEQ ID NO: 74128 - DNA, 410 bp, Zea mays
  unsure (1)..(410): unsure at all n locations
tcggcgaccaaatgacccagctcttcgagttctacgaatctgtataccctgagcatctgtttggtgaaggcaagtgtcctctaacctattatgtccaatntactttataattcatcaacccgcataccatgatcaacctaaggattgactagctttgtatttaccttgtccttgattacctnttgggttattattgtttagctttatgctattgctcaactctaatcaatgaacatgatgagaattatcaatgatacgttgtttccctcctttattatgatgttgtatctgtggtattcaaggtggctcgagcggtttctctagtgcctctccgtaagacctgttcgttggatgaccgcccgggaatacagtgcaaccatgatggtggaatggatgccctcatctgataa

SEQ ID NO: 74129 - DNA, 469 bp, Zea mays
  unsure (1)..(469): unsure at all n locations
ttgtatggacgacgatgtagaacacccttaaactggtcataaactgtggaacggtggtttctcacgcctgatttgttatagaaacggaagaaaaagtcccacggataatgctttacctgaaagaaactcaggctcggctgataaactatgcggataagcgacgtccatgattggttttttaagacagtgatcatggattcctgagagtatcaccaatgaatggtgttagtccgcttgacgtaaaaggaaagatggcaccccgatatattggnctgttccccattcttgagcgatgtgggcaagtggcgtacagacttcaattaccagaatcattgtctactgtgcataatgtgttccatgtatctcaattaaagaaatgccttcggattcctcatccaactatatatgcagtggatgttacttggaaccagacttgacttattatgacataccatttcgagtttggatc

SEQ ID NO: 74130 - DNA, 431 bp, Zea mays
tcggtaaataacaacttcattttcctcatgagcaggagcggtgttgtctcctccaaccctcacaatagacatgtcgtgaaaatatctccctctgatggtgtcaatatgactctgtttaatggtcgactttccgaagatggtatggcttggccgctatggccggtcctcagaatcttcatctccactttccacatcataactatcactgtcatcagaatcttcagacaaaccctccattatctccttagtaattttctctgtggtcttttttgccatagactcataaaacccagcaataaaaggatccacaactttcttctcttcatacagcttcttctcctcagttatcttcttctcctcagacatcttcttctcctcactcatcttcttctcctcatacttggagcagacacagtcttaaactgaagctc

SEQ ID NO: 74131 - DNA, 326 bp, Zea mays
  unsure (1)..(326): unsure at all n locations
tctaaagggagaacacgtgataggtctaaccaatgtttatttctaataagatagaccttgtgcagcttgtcaagcagggaaacaggtgggaggctctcatcacaccaaaaatgtgatgacaacatcaagacccctggagctgctacatatggacctcttcggacccgtcgcctatctgagcatatgaggaagtaagtatgggttagttattgttgatgattnttcccgcttcacttgggtattctttttgcaagataagtctgaaacccaagggaccctcaagcgcttcctcatgagagctcaaaatgagtttgagctcaaggtga

SEQ ID NO: 74132 - DNA, 316 bp, Zea mays
  unsure (1)..(316): unsure at all n locations
aatatacaatataatatatatttgcctgattattatgtcctgaacactctgatgggtctctttaagatatgatacactctcaacacagaactcaaagaatccagcatttatcaaatcataatctgtcaaaagatgtcagaaagaataaaatatatggaaaaggaaaggaaaaaaagaatgctaacgactnttggtggcctatttataagcccattaattcagcacaaatccaggttccaccacatccaaacgtttctttaccctaaccttttcagtgctctaacgaaggcacatagccaccgccgtttcttcatct

SEQ ID NO: 74133 - DNA, 391 bp, Zea mays
  unsure (1)..(391): unsure at all n locations
accatagaaactcagctttaaagggagagcacattntaggactaacaaatgttcattttgataaagacaggattngtagcgcatgccaagcatggaagcaagttggtgctcaccatccacataagaacatcatgacgactgacaggccactggagctcctacacatggacctattcggtccgatagcttacataagcatcggcgggagtaagtactgtctagttattgtggatgattactctngtttcacttgggtgttctttttgcaggaaaaatctcatacccaagataccttaaagggattcttgagacggngctcaaacgagttctgcttaaggatcaagaaaattagaagcgacaatgggacaaatgtcaagaactctcaaattga

SEQ ID NO: 74134 - DNA, 423 bp, Zea mays
  unsure (1)..(423): unsure at all n locations
tgtgataagaaagagaactgtggtactcaagntgatcattggatcacttgagaggggttgagtgccaccctcatccattatgacgccacatagtggagtatgcgagaaatttttgcttgaccaaaccacaggctaaaatcgatgtgtcacttgtctaagttactttacgttattgcgattctactgtttctagcactttacttcacttacaatattgctataagtttaatactcaccttatgagagcaattaagtgaagaaattctctcctctcattctcttcattcggacttggttttttatctcactaatttaatattagacaaagattggtttgttgagctatttttttacaggatcacctattcacccccctctatgtgctctcacctcctccctttctttctgttctttgtgctcccc

SEQ ID NO: 74135 - DNA, 421 bp, Zea mays
  unsure (1)..(421): unsure at all n locations
ggccaggcttataccgaggaccctcaccaccggaatatcgaaatcatgctcgccggagttcagaaccccgccggcgcacgtggaccgggtaagccactgcgccattnttcgattcaatgcacagatagcctctacatcaccccgtgaagctcaccgtgccattggattaaactatgtcgccgtggtttggccggctcacccgccgccgacgaggacacccgcctgctcacgtggaccgagcgcttccggccatccccgccgtcgagccgtacatcgttgtgaccgccagaacctcccggagccaaccccgcccctcgccggacctctctcgtcaccggtaagccgcgccacccttttctttcgcgcgggtactgtttaaacctatggaggggaccgtggggagaagaagagaaagccaggg

SEQ ID NO: 74136 - DNA, 252 bp, Zea mays
  unsure (1)..(252): unsure at all n locations
ggccaaatgcaagggagacaagacttgcatttgggtccctaaagctattgtgactaaccttgtaggacccaacaagagttgggtacctaaatcccaacactaatttgtcttgcaggtttatgcatccgggggctcaagctggattatcgacagctggtgcacaaaccacatgacggnggagaagaagatgttcacctcctacgtccagaacaaagattctctagattcattcatattccacgatgggaacca

SEQ ID NO: 74137 - DNA, 419 bp, Zea mays
  unsure (1)..(419): unsure at all n locations
tatgaagattcttcatcccaacatgggctagtcggcgatgccagagccaacccatgttagtcttagcaattaagcaagtgtcgagttcagctctatcaaaatctaccaagtatagctgaccctctaacgctcccttaaatgctattgaatcatcacttcttctaaagacagtgacacctacatcagtaaaaagacagttgtagcccatttgacataattgagatacggaaagcaaattgtaatctaatgaatcaacaagaaaaacattggaaatggaatggtcaggtgatatagcaattntacccaatcctttgacaaaaccttgtgttccatccccgaatgtgatcgctctttggggatcttggttttctcatggaagagaacatctctctccctgcatgtggttggcaccgcatcat

SEQ ID NO: 74138 - DNA, 309 bp, Zea mays
ctcaagccttctctactaagtccgagacagggccggagggacgggtgaatattctcttaagtggcaaggccgactgagccgatggatccccacacctctgggatacagatacctcactcggaccgttcgcgacaagcagctctcgctcacacaaacattcctgttaccgacagagtccatatgctcggaacaggaggataaaagacgcagctatgcgagcgcggcgagggcgagttcctctggcctctgcggccgcagaaagcacacgctacaagatgatctgatcctgcaagctcaggtcgtcacacc

SEQ ID NO: 74139 - DNA, 403 bp, Zea mays
  unsure (1)..(403): unsure at all n locations
tactaagctntgatgataaagccatctcctcattgtcgagcttggtagcatttatgggaagcctactcgatgtagactcttccttcttctcctccgtcgctttgaaggcaacgggttgcacctcgggtgtggaggtggcgcctcgctcgatgatttgtttggagcctttgatcattaactcaaagctcacaaactttcctttcacttcctcgggagacattagtttacatctaggatcaccacgaattaattgaacttgtgtagggttaagaataacgagtgatctaagaataaccttgaccatttcatggtcatcccattttgtgctcccgaggttgcgcacttggttgaccaatgtcttgaaccggttgacatggcttgtgggctctctcctttgttgaac

SEQ ID NO: 74140 - DNA, 430 bp, Zea mays
cgggaaagcttcacagcctctcatagaagctagccaggggctatggcgatgctggaggtctactagataggctggccactgagaccgtgcttgggcagtggtggcgggcggtggcgcttggtttccacagcgaactccggtgatctttggctcgggcggagctttgggtgcacaagtgcatacgacctaagcctctgggggtacttataagcgatggcagagcgaccacgcgcggggcgcgcgctgccgcggtcagtctgcgctcggccggtcatgcaagcaatcgaatgtgtggcatcgctcggtctgatcggtttcaaatgccaattggctcgtgatcttctcagtactctacccaattcctgcacagaaggttttcctttgtgggtactctttgttctcttaccgcacttgagtggattggatctcg

SEQ ID NO: 74141 - DNA, 408 bp, Zea mays
  unsure (1)..(408): unsure at all n locations
tatgaagattcttcattccaacatgtgctagtcggcgatgccatagccagcccatgttagtcttagcaattaagcaagtgtcgagttcagctctatcaaaatctaccaagtatagctgaccctctaacactcccttaaaggctattgaatcatcacttcttctaaagacagtgacaccaatatcagtaaaaagacagttgtagcccatttgacataattgagatacagaaagcaagctgtaatctaatgaatctacaagaaaaacattggaaatagaatggtcaggagatatagcaattttacccaaacctttgaccaaaccttgatttccatccccgaatgtgatcgctcttcgaggatcttggttnttctcataagaagagaacatcttnttctccactgtcatgt

SEQ ID NO: 74142 - DNA, 369 bp, Zea mays
  unsure (1)..(369): unsure at all n locations
nggcgtacagctaacaatctcgtagcctctgaagtaccttccttatatgctcctcatgctcttgctcattctgggaatatataagaatatcatcaatgaacactactacaaacttgtcgaggtagtccatgaacacaatgttcattaagtacatgaagtaagctggcgcattcgtcaaatctaatgacatgaccgtgaactcatacatgccatacttggtgatgaatgctgtcttcagtatatctgagggtcggattctgagctgatggtaacctaacctcagatctatctttgagaacacactggctcctctcaactgtgcgaataaatcttcaattctaagcagggggtacatgttcttgatagtaa

SEQ ID NO: 74143 - DNA, 299 bp, Zea mays
gagaagacgcgactatgggaaatagggggagttcttgaaatctttgatcaatctcgtttggaatgactctctttatgcctcaacatgtgtggttgacatagaaatagagatttgagtttgatttgcaaaaacaaaccaagtggtggcaaatgatgatccatatatgcctaaatcgaatcacaaccaatttgagtttttatttgaagtgattttgcacttgtcctagttgctttatgttgtgttggcataaatcaccacatatggggagattgatatggaatgtgcccttggccaacttc

SEQ ID NO: 74144 - DNA, 469 bp, Zea mays
tcccagtcccagcagtacgtgaccgtggtttccaaatttcttctgagtcggccgcgactctaaccagacacgatataggtttctctagctgtcaagtgaaatatgttgtaatatagatctttaatgtccaaaggatgtgaatatagaatatcgttcaagagaaataaaatatagagaagaaacttttagaagatctctaaacgacaaatataaaagataccattgaagacaacattaaatttccacttgcaatgtgatggtagggtagtcgaggataaaaaaattggtttggtaattgcttggatctcaatccaagcctacatttaaggtatgagaataatggtggttaaaggctaatggttgcgacttgggagcatactatgatactatctatggaggctactttttataaacacatatatatgtcatggcatatattttcatcatgaatagccgtgatgatatctaa

SEQ ID NO: 74145 - DNA, 418 bp, Zea mays
ttatgatctggataaatgtgacagatattacccagcatattatgacgtcaaatcttcagggcatgaaccactgcaactagctctagatcatgagttggataatgctcctcatgtcggcgcaactgccttgaagcatacgctattacttggccttcttgcattaatacgcagccgagaccactgccagatgcgtcacaatacacatcaaatggcttgttaatatccggttgagccaataccggagcagtggttaataatgtcttcaatttctcaaaagcttcattacactttaaagaccaattgaatttagtctcattcttcaatagacttgtgattggcttcacaagtttagaaaaatctggtataaatcggcggtaataaccagccagtccaaggaaacttcggacttgatgaacag

SEQ ID NO: 74146 - DNA, 319 bp, Zea mays
tcacctaaagcttcgacttcgattgtgtcatacttcagcactgtcgatcttcagcttcgtcatcctgtgtatatcaaacagcacactaagaaaagtacaatatttcaaaggagaatgtacaagcaacacacatatattatttaccggcttaagatggcttcgagcttcttcgcctgccattttccgcccgccacttacccagatctgggtcatgaatctatctccgatgcttctggctaagcttgggatatctaacaaatctgaagctaacaggctgaagttaggtctgttcacaatgtttccatgtgtgcagccagcc

SEQ ID NO: 74147 - DNA, 334 bp, Zea mays
  unsure (1)..(334): unsure at all n locations
tgataaactaattatatatccaacaaaaatgccacatcattggatgaacagttcgcgttgttntggcaaagcttggtacgataatcgcctgcttgaatctttattcatgatctaaggacctttatataggtcatatataagtcatatgtatccatctaggactctaactntacaaatcaatctgtatatccctctagaactctaacttaacaaaccagtctgcaatattttagaaaactaattgaacaagaaaacttgtagctacggggacattngagaagtacatgtgtcatggttactagtcacactactgcatccggtaatctttgcattt

SEQ ID NO: 74148 - DNA, 438 bp, Zea mays
  unsure (1)..(438): unsure at all n locations
tctaaagggagaacacgtgataggtctaactaatgtnactttcaaanaagatagaccttgtgcagctagtcaagcaggttaacaggtgggaagctctcatcatgccaaaaatgtgatgacaacatcaagacccctggagttacttcatatggacctcttcggacccgtcgcctatctaagcatatgaggaagtaagtatggtcttggtataaatgatgatatttcccgcttcactcgggtattctttttgcaggataagtctgaaacccaagggaccctcaagcgcgtcctaaggagagctcataatgagtttgagcttaaggtgaagaagataatgagcgacnatgggtccgagttcaagaaccttcaagtggatgagtatcttgaggaggaaggattaaagcacaagttctccggctcctacacaccacagcaaaa

SEQ ID NO: 74149 - DNA, 393 bp, Zea mays
  unsure (1)..(393): unsure at all n locations
ctttattgtctcttattgtctctattgtcaaaagtgggcttcttgtggggagaagtgttgattatgggaaatagggggagtttttgaaatccttgatcaatctcttttggaatgactctctttatgcctcaacatgtgtgtttgacatagaaatagagatttgagtttgattngcaaaaacaaaccaagtggtggcaaaggatgatccatatatgccaaaatggaatcaaaaccaatttaagtgtttatctgaagtggttttgcacttgctctagttgctttatgttgtgttggcataaatcaccaaaaagggggagattgaaagggaaatgtgcccttgggccatctctaagtatattggtgattgagtgtcaacacaagtgcttatatgtg

SEQ ID NO: 74150 - DNA, 459 bp, Zea mays
  unsure (1)..(459): unsure at all n locations
ntagccttcttggaatcatgctggatgtttcagttggagttctattaacaggtaacacatattacattaacatattcagggttaaaacaacacccttccaagttccaactagtgtgttactaaattatagggttggtagtatactatgtggactactgatgcatcttaattctcaactccatgccacttacattnttctgaaagttgtcttatcagcttactgttgcatcttaattcttaacttcacgccactttcatttcttttgtcttaccatctttttgaccatggcctaacttcgtaccttgcagttgctaaagagacagaatgtaatctgtggcgatttatatctattatgcttgctgctggtatgtctgggttccgctggtccatgactcaaaatcttctccaggtttgttattgataatgtttcgcgagtttttattctgacttttaatact

SEQ ID NO: 74151 - DNA, 254 bp, Zea mays
  unsure (1)..(254): unsure at all n locations
gagcccaaagcctcgggtcgggcgaggcggagcttcctgttgcgcccaatgccaaactcgtgggagatcgtgactcaatcctaccctgtngggtggcacattatccagatctgggcgaacagcgcttgttttctgtcagatcggtctattacaagggcaaagagactgcggtcacttccaccttgccgactaaagcacgcgtgtcagaattatgtgtcaagtgatccgcgcattaaatgctcatgcgatatggt

SEQ ID NO: 74152 - DNA, 378 bp, Zea mays
  unsure (1)..(378): unsure at all n locations
ctggatgttctttaggaagtatggatattctcgcagagcataatcattcttctttacgaagcatgaatagaagggaaggtgtntttttcgccgaaggctcaaaaacggtatgtacataaagtttcatgcatcgcanagaactgaattaaaaaataacttacaaattagattcaaaactatacacattaaatattacatacttagttcagcaaatgttacattgatagcctaaaatgtttttacaataactattatgcttccttcagaaacttttctgcagcttcgttaagcaatttgttaacaacttcgtcgacaatagcttcagtcatattgataatttctattgctttctttgtttctgggtcggccagtgggtcg

SEQ ID NO: 74153 - DNA, 447 bp, Zea mays
  unsure (1)..(447): unsure at all n locations
ngcacactgctcgataacttagtaaaaatactagagttgttgataagagnttgtacatttatcttttttagcttatatatttaattatgtaccttagttatgtggtttacctttctagcttagttgatagacaagttgataagtttaaaacctatgttatataaccatttttaagataacaacacacttagtcaaaactatactagctcatagataatntatttattgcataagttttaactaagaaaaattagaggccttattttataaaatagattaccctaattcaccccatcttaggcataattgtccctttagttgatattagaagctagctgctcaattggatattntggcttaacagccattgagccgacgctattcatagagagaaagatggatacctctagtcctncacactttgacatcactaaactcttatattgg

SEQ ID NO: 74154 - DNA, 312 bp, Zea mays
  unsure (1)..(312): unsure at all n locations
cggtacagataanataatctttaacgcgtgtgagaatctttcttgatgntgaccttggtgaaggatgctcatataatgtatgttcttctcttgttagtggcacgcacaaaaatggacataccttgattttggtttttcgcccatgtgaacagtttatctgtctcatgtagttgtaaccaatcttctctaatagattccatgtagccattggcgaagattatgtaatcatatgcccaccacaccttataacaccaaatgagttggtggccttcattatttggtgaaagatctaccagtgactgtattacaact

SEQ ID NO: 74155 - DNA, 332 bp, Zea mays
acctggccgaagcccctggatcatggcctcgatgacaatttcattaggcaccgttggtgcctgtgcccttagacgcaagaaccttcggacatatgcctgaaggtattcttcgtgatcctgagtgcactggaacagagcctgagcagtgaccggcttcgtctgaaatccttgaaagctggttaacaacaaatccttcagattctgccatgaagtgattgttcctggtcgaagggaggaataccaggtttgagcaacacttctgacagccataacgaaagatttgtgcatgactgaagcattgccaccatacgaagacactgttgcttcgtagc

SEQ ID NO: 74156 - DNA, 393 bp, Zea mays
  unsure (1)..(393): unsure at all n locations
tccncttccgcgcgggctggtggagcgcatcttcctctattcattcggggagaagggtgttcgccggctttggagaaagggcaaaccccacgtatgtggggtcggccgtttgtggtgccgtcagctgccgcgtgtctggctccccagactgtgtgctctggtgccgcctccggcgctgccttttgccgctggggcggagcgtggctgcctgtccatcgcacgggcgactgccgcgccgtgcgcgggttggccacatccatgggttcttccgcaccaccggtcgcaccgggagggtgtacaagacgtcgtacgccgtgggggcggtggcggcattcttagatggtcttgtcctcactcccgcagtgaggatgggagcgaagaccttcttgtgca

SEQ ID NO: 74157 - DNA, 420 bp, Zea mays
tcttcgcatataagagcttgatggtagtaagttgggtcttggtaataattgggacagaaaattcaaagatctgtgaagctagtatcataccatccggcgctagccttcaacttaagaagttctagaactgtatgcagtttaataaactctgtgtcactaccctttgattcatcatataaaagatcttttgaggcactattcagacccttcattttagatagccctttctgcgatcccacagaactcaacatttctggttccatatggcgcaacatctcttcgcaatcaaattcttcaatatcttgattagcatccacataatccactttaccatcaactttaagatctaagattccgacaactctttcggcattaccaggcacttcacacggagtcaactcaccatgttctgaccatatc

SEQ ID NO: 74158 - DNA, 326 bp, Zea mays
  unsure (1)..(326): unsure at all n locations
nggacagggtactgcgatggtggatagggaaccttctgtacaggagcagctactgttctagttacaccttccaaagtcataacatgttatacgagtcagatatagtttagttgtacaaattataatggccgaatacgaagcactctttgtggggcttatgaagttataggcaatgggaataagaaaggctatttttaaaactgattctcaagtcatttctggccatgtttataaaattagcaaggctagagatcccaagcttgtaaaatatcttgatacatttcgaaatgtggaggctgcttacaagagttctttgtcaaaacatt

SEQ ID NO: 74159 - DNA, 341 bp, Zea mays
  unsure (1)..(341): unsure at all n locations
tcagcttgtcagcatattttggtacccatcgctagatgtgtccatcaaggttagncaacaaagatctaggaacccaaaagtcctttgtgttagcacttggtaaactcattacctttctagcacaagttgcaattttgggttgcctagttacatgtgaaataattgacaagctagaagttgagtagttaccaatgggacaatccttgcattgatgtcccttctttcggcatatgtagcaaaagcgatcttcaagtcttgaggatttcttctttccttgtttcttgcttgctacaagggtagttaatattttcttttctaacactattgccttttgttcaaat

SEQ ID NO: 74160 - DNA, 340 bp, Zea mays
  unsure (1)..(340): unsure at all n locations
ttgcattaacatgcgattaaatatcttcttctatcttctgcctgagatgctatcaacataatggtgcattatatacttgagcagctactatgcactttcattttctctatgtatttcctggcgtggcatctggtacttactctgctaactatatcacaaatggaatngacgcgatccatggagatgcatgtatctgtactcactcaatctnctattccacagtgtgtgtgtgtgcccgcctatttggtgactaggtccttcctcttttagggtaacaataaaaaagcggctataaacttctgttggctcgatggggccccaaaatgttaattactgctct

SEQ ID NO: 74161 - DNA, 263 bp, Zea mays
gggaacaaacaagagaagaagaagcactactagaatgccaacggcgaaacacatatcggaaaggagcgagactcggactgcttcctctccgaactcgacaatgaaggactcaccgacactgcccttcacaagtcatctctcttccccaacgagcggtatacttgccttatggcaagggagaacaaggtgagcactccagaaaacacttatgtctcctctagtgaggatgaatccaccgatgaagacgaaattgattattcatg

SEQ ID NO: 74162 - DNA, 336 bp, Zea mays
agcttctgcgcgtcgatccgtcctccgtccgagcaggctctgcgcccttccacgggatcatccctgggaagcgcgtccagcccctcgggcgactcgacctcccagtctgcttcgggacaccctccaacttccgaagggagaccctgacgttcgaagtggtcgggttccgaggaacctaccacgccgtgctagggaggccatgctacgcgaagttcatggccgttcccaactacacctacctgaagctcaagatgccgggccccaacggggccatcaccgtcggccccacgtacaaacacgcgttcgaatacgacgtggagtgcgtggagtacgccg

SEQ ID NO: 74163 - DNA, 399 bp, Zea mays
  unsure (1)..(399): unsure at all n locations
agcttaaagccatggtaagtagcataggccaataatatacgaattgattcaagcctagctacaggtgcataggtttcaccgaaatccaaaccttcgacttgagagtattctttggccacaagtcgagctttgttccttgtcaccacaccatgctcatcttgcttgttgcggaaaacccatttggttcctacaacattttgattaggacgtggaactaaatgccatacctcattcctagtgaagttgttgagctcctcttgcatcgccaccacccaatccgaatcttgcagtgcttcctctaccctgtgtggntcaatggaggaaacaaacgagtaatgttcacaaaaatgtgcaatacgagatctagtggttacccccttatgaatgtcgccaagaatg

SEQ ID NO: 74164 - DNA, 431 bp, Zea mays
agcttaaagccatggtaagtagcataggcctataatatgctaattgactcaagcctaactacgggtgcataagtttcaccgaaatccaaaccttcgacttgggagtatcccttggccacaagtcgagctttgttccttgtcaccacaccatgctcatcttgcttgttgcggaagacccatttggttcctacaacattttggttaggacgtggaaccaaatgccatacctcatttctagtgaagttgttgagctcctcttgcatcgccaccacccaatccgaatcttggagagcttcctctaccttgtgtggctcaatagaggaaacaaaagagtaatgttcacaaaaatgagcaacccgagatctagtagttacccccttatgaatgtcgccgaggatggtgtcgacggggtgatctcgttgtattgcttg

SEQ ID NO: 74165 - DNA, 451 bp, Zea mays
  unsure (1)..(451): unsure at all n locations
agcttagcaagtgcaagttctgaaccagctattttctattcttgtgtcacattataaaccaagaggggttagctatggatccaaagaaggtagcagcgattctggactataaagcactgaaagacgtctgaggaatcaagagtttcattggaatggccggttactatcgacgtttcattgaaggtttctccaagattgccaggccaatgatatccttgttggcgaagaaggttgagttcaagtggaccctagcatgggtaggcattggtattgctatacttggttttgggcattgagataactattacacttgttcattctttattactgttctattcttgttcatgataagacaactatgttaattggaacatcgagcttaacttgagaaacacgtgccaccacaagggtggaatgggacacccttggctgactaactagganagctagt

SEQ ID NO: 74166 - DNA, 87 bp, Zea mays
agccaccacacggcagtcaccaaacactcacggagaccgccacagctgccgaccacacactgcgggaaaccatgtcacaacatagac

SEQ ID NO: 74167 - DNA, 460 bp, Zea mays
  unsure (1)..(460): unsure at all n locations
gcttaaacaattctatataatatagattgctctctctaagcatgtgctntgagaggaatacaaatttttggtcttaaatgccaagtgcacataattaagttaatgagattgtgtctatatcataaagaatgtgaagtgcattgtgtcatagtataagtgtgatgctcatgacagtttaagcacttatgaaagcatgttataaacatctcaagtattcacccttaaggaattcaaagaggcttaaggaccatccacctttcgaacaaaggcagcttatcctcgttacaagggtaagctttaagctccttgacaataaaattacttcacccagtttaaacaaagatgtaagaatgaatgtttgagaagttaaactatgtatgaagcanggttaatgcatgaacatgctttctcttccttttanacatngatatgcagtaatgtangaagatttatgtacatg

SEQ ID NO: 74168 - DNA, 456 bp, Zea mays
  unsure (1)..(456): unsure at all n locations
agcttcttctggacaagtgctttacttactcttgagtgcgaagctgccacatataataacaaaggagcccctggcgtacgtggagttaatgctgttagatctattaaatactgtttcagctcttcaaaggccttctgctggattggcccccattggaagacttcgactgacttcagcacttcaaagaatggtaagtttctctctgctgatctggatatgaatctattgagagatgccaaccttcctgtcaatctttgagcccccttttttgtagttggtggctccatccgaagtatagcttcaattttacttggattagcttcaattccctttgttgaaaccaagcatccaagaaatttccccttcttttctctgaagacgcattnttctggattcaactttaagccagcttgtctgaaactggcgaacgtctnctgcaaatcagcaatatgattt

SEQ ID NO: 74169 - DNA, 457 bp, Zea mays
  unsure (1)..(457): unsure at all n locations
agctttatcaaatggacgtgaatagtgccttttctaatggaccgatcaaggaggaggtctatgttgagcaacctcccggctttgaagacagtgagtaccctaaccatgtttataggctctctaaggcgctttatgggctcaagcaagccccaagagcatggtatgaatgccttagagatttccttattgctaatggcttcaaagtcggcaaagccgatcctactctattcactaaaactcttgacaacgatttgtttgtatgccaaatttatgttgatgatatcatatttgggtctactaacgaatctacatgtgaagaatttagtaggatcatgacacagaaattcgagatgtcgatgatggnggagttgaagtattttctatgaattccaagtaagcaactccgagagggcaccttcattagccaaacaaagtacactcaagacatcctaaccaa

SEQ ID NO: 74170 - DNA, 364 bp, Zea mays
  unsure (1)..(364): unsure at all n locations
ttgcgttcctcgatacgacactatcttcttcggcacaccatgaaggcagactatccgtgacatatataactcagctagcgtcgctccggtgtatgttgtcttcacaggtatgaaatgggccacctttgntaagccgtccacaaccacccagatggaatcataaccggccccggtacgaggtatgccaactataaaatacattccgatctcatcccactttcactgangaatccgcaaatgctgcaacaatgcggngggcctttgatgctctgcnttgttctctgacgctatcgcaatggcacatattctgcgatcttctttcatgcctacaacaaaccttcttttaaatctggtcatctttcac

SEQ ID NO: 74171 - DNA, 328 bp, Zea mays
gagaaagacaggatttgcatcgcatgccaagcacgaaagcaagttggcactcatcatccgcataagaacataatgacgaccgacaggccactggagctactacacatggatctattcggcccgatcgcttacataagcatcggcaggagtaagtactgtctagatattgtggatgattattctcgcttcacttgggtattctctttacaagataaatctcacacccaagacatcttaaagggattcttgagacgggctcaaaatgagttccgcttatcgatcaagaatattagaagcgacaaccgaccggagatcaagaactctctaa

SEQ ID NO: 74172 - DNA, 262 bp, Zea mays
acatctatcacatttaccattcttttcctttatggggtcaccattggaaccttttggaatattgctgctccaatatttattgcccgacttaaaattgttgaggtctttatcttactcacatttttcgcttcttccattgtttctgacgatggtgcttcggccatctctgcaatttctggcaaaaatgagtggcccgtcatcttcaacggccgaaagagctcctgcagtatactcacgcaccgaagctggttcaatatggcgt

SEQ ID NO: 74173 - DNA, 368 bp, Zea mays
accgagcagcagctggatcagtaataaccggctttttttttttacaactactagcttgccaccaaactgcagaggagagatcgaaacaatcaggtccttcattttttactaccgatgaacccccctttacggcctcaatacactactgctcccacatgataatcaaattacaaaataccctttgttaattctcatcggcactttaattaattcaattccgtgacggaaaagcccagtcctgaccgaacgacaagaagaagacagccctgagagccggaccttttaatgcatgacccagggtgaagaatacaatgctatccccaaaagtcagactcgaaatcgtgcaggccaaaaagacttgcaaaagt

SEQ ID NO: 74174 - DNA, 414 bp, Zea mays
  unsure (1)..(414): unsure at all n locations
cctgcagctgcagcttaaggcacaaagaagggatgattattctttttatngcacttgggaaccttcggtcagaggtcatcacactgagaaatgaagcctttgaaaaagataagattctgctttccttaatagatagactaaaagtcagcgaagctaggcttaatgcacaagccgaaattcacaaagccaaagttgaggatctaaagaaaaaacttgccgaaatgaatgaaaantttgaagtcgcgaacgcaaacaagagataagttaatggacaagttcaaggctaaaaaagaatgttgaagagctttgtgattccagggaacagtgttataaaaaattcttagattgcgcgaagaagctaaaagatagctttgcaaaggtaggggtgtattcctcataacagaaatgtatttg

SEQ ID NO: 74175 - DNA, 448 bp, Zea mays
  unsure (1)..(448): unsure at all n locations
agcttgacaacgaggagangactcttatcattaagagttttcgccaaatcctcaaacaaaggaaggggaaggactacaaaccccgttccaagagggtgtgctataagtgtggtaagtccggtcactttattgcaaaatgtccatgtacaagtgacagtgacagggacgacaacaagaaagggaagaagaaaatggagaagaaaaagtattacaagaagaagggtggcgaagcgctcatggggcgggaatgggactctgacgagagctccatcgactcctcttctgacaaggacgccaccaacatcgtcatcaacaaagggcttctcttcccaacgtcgaccacaagtgcctaatggctaaggacgacaagaagaagaagtacattctagagatacccctaaatacactacatncgatgatgagggtagctctagtgatgataatgatg

SEQ ID NO: 74176 - DNA, 250 bp, Zea mays
acctgaggcatgcaagcttctgctatgatgaagaatatcggcagctattcacttctttatgcaaagaacgctgggggaacttcacacccacctgtttgtttatatagagctgcaggtacgaaggccaagccgcggaactgttacaccatgcgcgcagtaactcatacccgctgcgcagaggaacgtaaggagtaaacaataactctgcaaggtgggaccgacacgcgctcggaagtcgatcggttttccc

SEQ ID NO: 74177 - DNA, 399 bp, Zea mays
  unsure (1)..(399): unsure at all n locations
agcttaacggttactctacgcttctttttgtgttataacgatattganaatnccacagcaggaggccttgcagcgtttggtgagaggtacctaataatctaactactgctagctagctagctagcatatacgtaactagtaaacatatattcctctccaggcgttagatgtttttttttctttctaaaacagatctaataatcacaacttgcgtggatcgcatcgctcgaccgaaggatgcaatgcaatgcaaccactcactactcgcagaagctagctagccgaccgaatcgaaggaaagaaaaggagcgagcaagagtggcccgccgtcgcaaaattttctgtgcacgcacaccaaccccccaggcaacaactattcgtctatgaccgtctaccatg

SEQ ID NO: 74178 - DNA, 401 bp, Zea mays
  unsure (1)..(401): unsure at all n locations
agcttgatcaccggatntaaagtctcgttattattcacaccaaggtattgggtgaggccatcgacaacccaacgatgtggaacttgtggcataaaatccacctgccagtgatgatattggtgtcgaaagtatgtgggacaagatcccacgtgttgttggacatcaaggtgtcatactcatctttcatcatgcgccaccaatgtggatcggtgaggacattgcgatatgtctttggaacgggtgagaggaccgtcgcactgaacgcggctggcatgcagaagccagacttgtcgtggatagccatccattggcgagggggcgacaccaggcggaagccggattggtgcataagccatgggctgtgaaggtganggtgttgtctggatgggagcatgtgcaac

SEQ ID NO: 74179 - DNA, 394 bp, Zea mays
caagagcaacaaagaaacactagagatcctctctcaagtcctaaaacactagaattaaatttgggacttcgatcggattggtggctctgatttgtgtcttggagtgatgcactatgctcttgtattgaatggagagtgatgaatgcttggatggttggagtggaggtggttggggggtatttatagccctcaaccaccaaaacaaccgttgggggtggctgctatctatgggcgcaccaaacagttcggtggccagccacgtcacccaaccgttatggttctggtggtctctaccattggagctttgtcttctagtggcaccggacagttcggtgccgcaccggacatgcacttgtcactggccagtgcgcctttggtggctgctctgacttct

SEQ ID NO: 74180 - DNA, 413 bp, Zea mays
cgacgagctctgcgcgcgctcccgagtgcccctggttgtgcctatgaccatgcgacgccgtgagccgcgcccgcgcctataaaaccccagcgacctcgaccgtactcttctgcacacgctggacctcaccggagcccaaacccaccggcgtttgcccttacacggcgtgtccgcgggcggccgatccccctgccaccgtagaccggacagtcgaacccttcccagccccgtccaaccctcagaaaagactgtgcacacctcggtggaagctcccgagtgaggaatcgaagtttgcttcgccggagaggccagtccacggtcgccggactccacccgaccgccggcgagcgtagaccgggtaatcctctgctccattcctcgattccttgcgcgcacagcctctacatcacccc

SEQ ID NO: 74181 - DNA, 423 bp, Zea mays
  unsure (1)..(423): unsure at all n locations
agctntgcactgagatcttgttttctcgttcgaactgctcagactggcggagaagcttcgtgttcagttctgatatttntgcttcagcttccgccagtaaaccttcggctgcctggagctcaaagttctttttctcaaaagcatctgattgttcctttattttgttttccaaatttccaattataacttcatgctttttatcttcaagatcttgctgcatttgcaaggctttgctcaatagcatactctacacaaacacaaccttcgtcagacatgtttttattagaagcaataaaagttaagggacaagtcatttaccttgaagttggagtaaaataaactaccaacgacatgttgtcgtcggtagcggctgatgtctgtttctagcttcnggaatccaatactcttggacaaagtactgat

SEQ ID NO: 74182 - DNA, 453 bp, Zea mays
  unsure (1)..(453): unsure at all n locations
agctcttggctcttattgtctctattgtcttaagttgcgctcctttggggagaagtattgattatgggatttacggngagtttttgaaatctttgatcaatctcgtttggaatgactctctttangcctcaacatgtgtggntgacataaaaatagagatttgagtttgatttgcaaaaacaaaccaagtggtggcaaaggatgatccatatatgccaaaattgaatcaaaaccaatttgagtttttatttgaagtgattntgcacttgttctagttgctttatgtggtgttggcataaatcaccaaaaagggggagattgaaagggaaatgtgccttcgggccatttctaagtattttggtgattaagtgccaacacaagtgcttaaatgtaaatcaatgcccatggatgaacaaagtgcatatcttcaacanaggtatgtttctaagtctt

SEQ ID NO: 74183 - DNA, 463 bp, Zea mays
agcttcgggaaaccgacactcttcgatagagtgccgattatctttgccccggtgcgatcgtgaatgcatcctaaggatccttgctacaggaatatgggatcgctccttgctggtagccacaggatatcccatattcctgtagctcattcttttcggccttggataattcttgacctaccaggttccgaaggtcaaagtccctttcttttgaagcagcatcaacaatctttatccctttgtcaggcaatgtggccatgaccttctctgtagccacagttgtctcttccacggtcatatccgagataattttattaatccatgacagtgtactctcaaggttggcagcttcggcggcagctgcagcttcggcaatggcctcggcgcttgcaataggtgggtatttggatgccgaggccagcagtggtgcccgctcgatggcttgcatgacagtaacaattcttcg

SEQ ID NO: 74184 - DNA, 296 bp, Zea mays
agctgaacggagtaaaccctggtgaccttgatacaactgtgttgtggctccaaaccacctttaatagctcgtctggccactttgccttatcctgattggaaaatgacttcattattctagttattatgattccatttgccctttctaccaatacatttgacatcggatgccttactgatgcaaaatgtatttttgtaccaatttgactacaaaaggttttgaaagtgtccgcatccaactgagttccattatcgatggtgatagccttcggcactccgaagcgacaaatgatgttt

SEQ ID NO: 74185 - DNA, 380 bp, Zea mays
agcaagcttatcaaatggatgtaaaagcgcatatttaaatggttttataaatgaacttggatatgttgagcaaccacccgagtttgaagaccctagatatcctaaccatgcttacaggttgtccaaggcgctatatgggctaaagcaagctccaagggcttggtatgagcgtctatccgacttcctcatcgaaaagggcttcaagatcgggaccggcgacacaaccttattcacaaagaagcataacagtgatattttcatttgtcaagtatgtgttgatgacataatctttggctcgacaaatgattatcattgcaaggaaattggtgaagtgatgtcgaaagagttcgagatgtctatgattggtgagctgacgtact

SEQ ID NO: 74186 - DNA, 425 bp, Zea mays
  unsure (1)..(425): unsure at all n locations
agcttacccatgacgaggcatgtgactagttaaagggttctctatcatcaagcctacatcgacaaggtccttaatcgactcagacggagacactacaccgagactctcttctcgtgcaagtcacccgcccggtctcagctttatcatttcaaacctaaagtttggtacctggcagaggtacatcttttccaatgttgaacccatcatggccatgatggatccaccatcaagttttttgtttttgaaaacatcccacccactttgaagcatcatcttttggtcaaaacaaatgttttgtttttctaaagcaaagctaagcataagaaaaaccttttgtaaattagggattgaggagaagtaatcaaattccaaggaaggaaatgcagcaattggtttagcacacaactnctatcacctaatgcatc

SEQ ID NO: 74187 - DNA, 444 bp, Zea mays
  unsure (1)..(444): unsure at all n locations
agctttccagaaaagtatggatcactctttttggtggtctgaatatttagntatgaatgtttaatataggaagactgaatctgtccaaatctggacagcaaagccttctagtgtcttttatccttagttaaatattgaatcaccttgaaatgtttataaatgatatgtagaaaaatttattacctttccagaaaatctacgatcaattggtttggatgtttgaacctttagttgtaaatttttgaaactgcaagtctgaatctgtccaaatctggacagagctactggtgttgcacaattcgacctttgctaagtgttaattgtgttgtgatgatgacaataccaaagttgtagacactttttaagctntccaaaaactcctagtttgatattnttggactaataatngaaaagttatgatcaaaacangtgacttatgtattg

SEQ ID NO: 74188 - DNA, 450 bp, Zea mays
  unsure (1)..(450): unsure at all n locations
agcttgtcaaaatctggaaatgcttctctgggtataatgattggactgttctgtggttggattgaatggaatntatcagttcagaagttagtactttgttaaagcgaggatgccacttcttctaaagcaagtgaatggagtatgagttggatgattgattcaagtttctgtttgatgtgatgactcttgactcatggtcactgtattatgaactttactatataaactcaaacatttgaaattgctataacctgtaatctggtgatagcaatttttgtttgggtcatcttggtagcagaataattaatgttccgtcaatcggaccgcgcgaggatgcacatttattagtgtttaatggaataactggttntgactcgaaaacttatgggtaacataacattgggttttggctgggtggtcgacaatcatcanatggccaggatacccaat

SEQ ID NO: 74189 - DNA, 426 bp, Zea mays
  unsure (1)..(426): unsure at all n locations
agctcttccttatcgacatcaatcttgacttataaccattccgatttccaccctgctgcccatttgcttcggtagctgatcacaggatacttcgtagttttccgataagcaaaattatagcaaccaaaattctcatgtaatccatcttttctagcctttgtctgatagtgcaattcgtgaacccggcaaaagctgtccgcaaacagttccaccgcctggcttcggagtgcccagatataaacattgagcctaacgatagcgttgggggtcagctggtgaaaatagattccaaaattctttaatatctctgcaataatcccatgaagggggaatcttaatccagcctttaggaagctctttgaaataacaatttcatctttttccggctttggggtagtctcttcttccncgaagcgtaatagcttc

SEQ ID NO: 74190 - DNA, 431 bp, Zea mays
  unsure (1)..(431): unsure at all n locations
ngcttgacaacaccatntgacatcttacattaaatttctgagaacaagaatatttagttcattcctcaacatgcaaaagcgggtcttatcaagtggcttaatgaaaatatccgctaatttatcttccgacctcactccttctaaaataatatctcctttagcaacatgatctctaaggaagtgatgacggatatcaatgtgcttggagcgagagtgtcgtacaggattattatcaattttaacagcactctcattatcacacaacaaaggtaccttttctagaactacgccatagtctagaagagtttgtctcatatacaaaatttgtgtgcaacaagcacctgcagcaatgtattccgcttcggcagatgacaaggcaancactattngctttttggatgtccatgaaactagtgatctaccaagcagat

SEQ ID NO: 74191 - DNA, 380 bp, Zea mays
agctttatcaaatggacgtgaagagtgctttttctaatggaccgatcaaggaggaggtctatgttgagcaacctcccggctatgaagacagtgagtaccctaaccatgtttataggctctctaaggcgctttatgggctcaagcaagccccaagagcatggtatgaatgccttaaagatatccttattgctaatggcttcaaagtcggcaaagccgatcctactttattcactaaaactcttgacaatgatttgtttgtatgccaaatttatgttgatgatattatatttgggtctactaacgaatctacatgtgaagaatttagtacgatcatgacaaagaaattcgagatgtcgatgatgggggagttgaaatatttc

SEQ ID NO: 74192 - DNA, 440 bp, Zea mays
atgcagcttatttctgaatgtgttaagctgtttgtatatggctggggctaaacagctagcaaggtttggtcttcctgctattatgagtagggtctagattgtggtcaagtgttctgtttgccctacgggcattgtactttggtcctcttggacctttttcctctcttaatataatgacgtgcagtcctcctgcgcgttcgagaaaaaaaacatgatgttaacaaggattaatagcagagttggacaatcctgtcaagacttccaaaagaaaatgctaattgtgaacactactagttgtcatgtagtagcatattaaataaaaggaagaatagtaccgtctctatgtccaagataggcgtgtcagcattaacagcctgcacacttatccctttcatcaaatggatgccaaatttcaagcccattccatgaaccttactggc

SEQ ID NO: 74193 - DNA, 437 bp, Zea mays
agcttaaagccatggtaagtagcataggcaatgtaaatgctaattgactcaagcctagctacaggtgcataggtttcaccgaaatccaaacctttgacttgtgaatatcccttggccacaagtcgggctttgttccttgtcaccaccccatgctcatcttgcttgttgcggaaaacccacttggttcctacaacattttgattaggatgtggaactaaatgtcatacctcattcctagtgaagttgttgaactcctcttgcatcgccaccacccaatccgaatcttgaagtgcttcctctaccttatgtggctcaatagaggaaacaaaagagtaatgttcacaaaaatgagcaacacgagatcgagtagttaccctcttttgaatatcgccgaggatggtgttcacggcgtgatctcgatgaattgcttgatggac

SEQ ID NO: 74194 - DNA, 464 bp, Zea mays
agcttctaaagggagatcatgtgttaggacttatcgatgtctgttttgagaaagacagatcttgtgcagcatgtcaggcaggaaaacatgtgggaagcactcatcacaacaagaatgtgatgacaacatcaagaccactggagcttcttcacatggatctttttggacccgttgcctaccttagtatcgggggaagtaagtatggtcttgttattgttgatgatttttcccgcttcacttgggtgttctttttgcaggataaatcagaaacccaagggaccctaaagtgctttctaaggagggctcaaaacgaatttgagctcaaggtgaaaaagataagaagcgacaatgggtccgagttcaagaatctacaagtggaggagtatcttgaggaggaaggcatcaagcacgagttctccgctctctacacaccacagcaaaactgtgtggtagagatgaagaat

SEQ ID NO: 74195 - DNA, 407 bp, Zea mays
  unsure (1)..(407): unsure at all n locations
agcttgccacctcgaaccataagaactcggttctgtagttttccggagttccgaaggtgaccggcatgtagatgtgtcctagtggatattctccctcagtcggcacaatgccaaagaaaggagtgtctgactcatggagctctttgaggggaactcccaagccttggagcatccgaggaaggtgacgttgatgctgcttcccccgtccactagtacctttttaccctgctttctcggatcactggatcgacgaggagcgggtatttttttgggtggtcgaagttgagccactgatccgtccgagtgaaggtgatcaggtgttcggaccatcgatacggggagggaggtccaacggcngccaccaatatctgacgggtcgtgagcttttgttgccttttgctttcttg

SEQ ID NO: 74196 - DNA, 383 bp, Zea mays
agcttaatgcccccctaaaagaatgctgtctttttaagggcaaagctcccatgcctcaggataacgagggttacattctataccccgccggttatcccgagcgcaaaattaggagaattcactctaagaagtctcactctggctctcgtcatgcttttatgtataagagtgaggcatctagttctatgcgatcaacccatactaaattgcctaggaagaaaactcctattgcatcaaatgaatctaatatttcatttaagacttttgatgcatcttatgtgctaactaacaaatcatgcaaagtagttgccaaatatgttgggggcaaacacaaggggtcaaagacttgtgtttgggtacccaaggtgcttgtttctaatgtg

SEQ ID NO: 74197 - DNA, 395 bp, Zea mays
ttagcgatcaaggctaagtgatgtctacaaagctgttggacaatacaatgcccttgtcgccttgcgcccaggctttctcaagccttgcgcctgctccgttgaattgcttaccgatgctagtcttcgtcacagaaatttcgatggcggttgcccataaaagacgcagtctctgctgttgttcccaatggtctaaacaaggcggctccttgttccacgcagcggcgaaacctgactgaacaaacaagagaggtttagtccatgtaattgagctctaaacactgataaacaataccaaaaatattattgtttattcaataccaaaatacgagaataacgtgtataaaggcaacgttggaagataaatctctgactacactatatacttattacttatt

SEQ ID NO: 74198 - DNA, 442 bp, Zea mays
agcttctaaagggagaacactttgattgttttacttacgcgcatttacgaaaagatagaccttgtgcagcttgtcaagcaggtaaacaagtgggaggagcacatcacagcaagaacgtgatgaccacttcaagacccctggagctgctgcatatggacctcttcggacctgtcgcctatctgagcataggagggagtaagtatggtctagttattgtagatgatttttcccgcttcacttgggtgttctttttgcaggataagtctgaaacccaagggaccctcaagcgcttccttaggagagctcaaaatgagtttgagctcaaggtgaagaagataaggagcgacaacgggtccgaattcaagaaccttcaagtggaggagttccttgaagaagaaaggatcaagcacgaattcttccgtcctacacacacaacaaaatg

SEQ ID NO: 74199 - DNA, 211 bp, Zea mays
  unsure (1)..(211): unsure at all n locations
agctttaacggtcgaatccaactgcagttattatcttgagggggcaccggactgtccggtgtgcaccagactgtccggtgtgcaccggacttgtcggtgcgccatctaacagacagaactcccaacggtcacatttggtggnttntattcaataagttatacataacgataattttatattcttattgtactcttcaacgtctttttctat

SEQ ID NO: 74200 - DNA, 381 bp, Zea mays
agcttagagttagacgaagatactttatgtttgtttagaatattactattactcattcaatactgccttcgactatacttcctgtcccccatgttaatggtctttgtaggggtaagtcttgcctcgattattccttccccagaccccactcattgtagataatattaaggtctgtctcttatattattaagttgtatgcttgattgtggaacccactgaatgcatgatctgctagaaattgtgctagtatatgtgcccatgtattgaccctgatgatgttaccatctatatctcatatcatactcgtttgtgttcgccaagaggagctgtaggggaaggattcttgacaatcgcatgagatgatgagaatgtaccctggcg

SEQ ID NO: 74201 - DNA, 446 bp, Zea mays
  unsure (1)..(446): unsure at all n locations
gcttgccttcgccttcgtatatcattcactatccaacagcgncgnggagcgcgccaacgggcatatattttcacacgcccataaagaaacatgcgtcctcgacaacaagaagggcaaatgggccgacctgttacctgaagcggtctgggcgctgaacacgactgagtgccggacgactgggttcactcctttccgcctgctatatggatcggaggccatgaccccgcaagaactaaaccatgggtgaccatggacaataacttcagccgtccccgacgtagacgagccaacctcgaaggacctcatcgacggagaccgtgtcttcgccctacaggccctcaacaaataccaagctcaaacaaaagcatggcgcgaccacacagtcgtcccgagagaattcaacgaaggagacctcgtactcatcctgacaactcggacagagtcac

SEQ ID NO: 74202 - DNA, 425 bp, Zea mays
  unsure (1)..(425): unsure at all n locations
cagcttaaacatatatgagggatcgttctacttataacatcgcacgcaaggaantatatgccacatatacaagtagaacaataagaatggcattcacacaacagttgtgattcggtatggcttgttttcacatggtgatctccatctccaataatctggccatcacgatgatctccatctccatgatatagggatgccatccttcaggtgatgagtccttcaagacctatctaacgtatgctggtaaacaaaatacatatacgctttggatcatcacatgttgacacgcaggtcattacattaaattaggacaatacatgtggctccagccgtattggccttggcacgacacgcaggtcatgaataaatttgtaacatgcatcacatacacataatagccataccggacacatgtcctgcaaaac

SEQ ID NO: 74203 - DNA, 312 bp, Zea mays
agcttgaagaactgaagtcaaacatggcggctttagggttcgattctatctcagcaatggcagcgggcgagactcaacatttacggttgaccttacaacgtctcattgcataggtaatctgcaatggcaccttgacaacatttttcttatccttcacgttcactgatttcatgtctactaatcattcttattgtctgttcaacggtgatgctgacaggttaccatcacacagctctggagatacttgaccagctggaagaaatatgtatgctaccacctctatcatatgagcatatttatatatcacgctgc

SEQ ID NO: 74204 - DNA, 440 bp, Zea mays
agcttgccagtacttgtcaaagcaacaacatctaccagtttatcaactgcagaccataccagtaacttggccattcgcatgctggggactggatatgattggacctttcaagaaagcctcaggaggatacactcatgtactggtagcaatcgacaaaatcactaaatggatagaattcaaacccattgcttctttaacctcagccaaggcccgggaattcatacaagacataatattcagattcggaataccgaacagtatcataattgacctatgatccaacttcacaagttcagagttcttcgatttctgcgagcaaaagagcattcagatcaagtatgcttcggtagcacacacaagagccaacgggcaggttgaacgagctaacgggatgatattggaggcactcacgaaaaacgtcttctatataaatgaaaagt

SEQ ID NO: 74205 - DNA, 417 bp, Zea mays
agcttaaagccatggtgagtagcataggctaataatatgctatatgactcaagcctagctacgggtgcataggtttcaccgaaatccaaaccttcgacttgggagtatcctttggccacaagtcgagctttgttccttgtcaccacaccatgctcgtcttgcttgttgcggaagacccatttggttcctacaacattttggttaggacgtggaactaaatgccatacctcgttccttgtgaaattgttgagctcttcttgcattgccatcacccaatccgaatcttgaagtgcttcctctaccctgtgtggctcaatagaggaaacaaaagagtaatgctcacaaatatgtgcaacacgagatcgagtggttacccccttatgaatgtcgccgaggatggtgtcgacggcgtgatct

SEQ ID NO: 74206 - DNA, 233 bp, Zea mays
atgcttgatgaaaaattgcttccaaagcattgagagctccgccactcatgattgcgttataaggggtttccattacaacatatgtcaaacacacttgttcaggccatgtgttagttaataattcgaaagatactggcattgtgatcttttaagtgctacaatctgccttccttctaaaccacaaaggagatgtgtggaacatggatcttgacttcaggctcttgcatatatct

SEQ ID NO: 74207 - DNA, 432 bp, Zea mays
  unsure (1)..(432): unsure at all n locations
agcttaacaacagggttaatagcctcatgtgttttgcattatttaagttcattctcaacaagaagattgtcatgatcaaatttaatttgagtatagtcttccttgatcttaactagtctattttgcaactccctattagcttcatttaatttgtcatatttctccttagcatcttttagggagttcgtgagctcatttacagttgatgacatagttntattttcttcttttatttcatcactagcctttataactatgtcatacttggcatttaaagattcatttttcattttcagcctatcacatttagcttttgatttctaatgatttgagtatattctttaagtaagtcagctaactcatcatatgaaggtgaagcanattcttcatcactatcactatcactatcatcatcaatattaatatcatttt

SEQ ID NO: 74208 - DNA, 453 bp, Zea mays
  unsure (1)..(453): unsure at all n locations
gcttataagtccactatactctcggtattattcttacagcaagaattgacacttagaaaggtcaaacaatgctaaacgtaaattctgtccagacttggactagaatcaactactcaattcaaaaatccataattggagtctcagtcatccaattcaggtgctctcagactttntagaaagctagtagaattgtctataattcatttataaacatatctggttaattcaatgcatatcaaggtcaaaagacatgagaaaggctctgctatccaaatttacacagattcagagatcacacttaagacagccgtaactttacttatagatcatccaaagggtgatccanagtttgttgaagagattaagaaaggtactacaacttatttataatttataataaggtattcgaagtttaaatcgcgcaaacaaggtcagtttcgaaatctgtacaga

SEQ ID NO: 74209 - DNA, 454 bp, Zea mays
  unsure (1)..(454): unsure at all n locations
ttagagcgacctgaggcatgcaagcttctaaagggagaacacgttatacgttttacttatgttcatttcgaaaaagatagaccttgtgcagcttgtcaagcagggaaacaggtgggaggctctcatcacacctaatatgtgatgacaacatcaagacccctggagctgctacataaggaccttttcggacccttcgcctatctaagcataagaggaagcaagtatggtttaattaatgttgatgactttttccgcttcacttgggtgttcttttgcaggataagtctgaaacccaaggaacccttaagcgcttcctcaggagagctcaaaatgagtttgatctcaacgtgaataatataaggagccggaaccggtctgagttcaagaaccttcaagtggaggagtttcttgagatgaanggatcaagacgagttctcgctcctacacaccacac

SEQ ID NO: 74210 - DNA, 411 bp, Zea mays
  unsure (1)..(411): unsure at all n locations
agcttgggaaggttcttcatccctacatgttctaagcggcgatgccacagccggcccatgctagtcttagctattaagcatgcatctagaccggcctcttcttttgcaaaatcaactaagtaaagtttgccgtctaatacacccttaaaagctagtgaaccatcacttctcctaaagacagacacatctatgtttgggaataaacaattgtattgcataattgactaacagatagtaaattatatcccagagactcaactaaaaacacattanaaatagagtgctcatttgagattgcaattntacctaacccttttaccttgccttagttcccatcaccgaaaattattgaatcttgggaattcttattcttgacgtaggaggtgaacatcttcttctcccccgtcatat

SEQ ID NO: 74211 - DNA, 442 bp, Zea mays
  unsure (1)..(442): unsure at all n locations
agcttgccttcgcctcagtatatcacccactatctaacaacgtcgnggagcgcgccaacggcaagatttttactgtcatcaagaaaatgcttctcgacgacaagaagggtaaatgcgctgacctgctacctgaagcagtctgggcgctgaacacgaccgaatgccgggcgactggattcactccttttcgcctgctatacggatcggaggccatgaccccgcaggaaatcaaacatgggtcaccacggacaagcgcttcagccgtccccgacgtagacgaaccaacctccaaagacctcatcgacggagaccgtgtcttcgccctgcaggctctcaataaataccaagctcaaacgaaggcctggcgcgaccacacagtcgtcccaaaagaattcgtcgaaggggacctcgtactcgtccgggacaactcgacagagtcacg

SEQ ID NO: 74212 - DNA, 464 bp, Zea mays
  unsure (1)..(464): unsure at all n locations
atccttaaatcgactgcggcatgcaagcttcgtcttgaccatgctcttgtatattctaacctgattccgaagatacctgctcgcatacttggaaaacattgtcaaatcatgtttttgaggaccttcggaagccgaaggcccccaacaagtccttaggacgaccattctagtctaggttagcggtcctacagtcagcaaggctctgataccacttatgtcacacccggntttggaaggcaaaccgaatgcgaaccatgtacatgccaggatcagaaacacacgtacacagcgattacataattggacatcatcacacaatgctcaaaataaatagcggaaaggtacttgattacatcaagatgtccaagacatccacagagtctattacataaccattgtctttaacataattatcnaagtgcggaaatacgaaacgtagatgctaagcctacacaggcagctga

SEQ ID NO: 74213 - DNA, 468 bp, Zea mays
  unsure (1)..(468): unsure at all n locations
agcttgaggaagaaagaactgcaacaagggtcaaactccgcgttattgaagctcctaaggcaatgagtgaagcaatcaacatgaacaaagaanaaggtaaagattcaagtagtcatgttgtttgcacagatcatctatctatgttatccaagagcaaaaagagaagaggaaaaaggaggtgcttcaaatgcaatgagtcaagccaccttattgcttcttgtccatacaaagacaaggatgaagggatgaggagatgttttggatgcaacgataaggaccatatgatcacgtcatgtccactcctgaagaatcaaagatgtgcatcctccaaggtgaccctcactaagaaaaaagacaaatagcaagcgtcatgttaggttgagcgacgtttctgctacatgtgtggtgagcatggtcatctatctaaggtatgtaagaagggtaacgttcctaagcaagtaaatttat

SEQ ID NO: 74214 - DNA, 410 bp, Zea mays
  unsure (1)..(410): unsure at all n locations
agctngngaagattcttcatcccgacatgagtcagtcggttatgccagaaccaacccatatgggtcttatcnattaagcaagtgtctagctcagcattgttatcattaaaatcaaccaaatatagctgaccatctaacactcccataaaagctattgaatcatcacttgttctaaagacagtgacaccaatatcagtaatagacagttgtagcccagtttacacaattgagaaactaaaagcaaattgtaatctatagaatctacaagaaaaacatctggaaaggaatggttatgagatatatgcaatttacccaaacctttaaccaaaccttgatttccatccgcgaatgtaaacgttctttgcggatctttatttttctcatatgaggagaacatccctttctcccct

SEQ ID NO: 74215 - DNA, 430 bp, Zea mays
agcttatacagtaacacaggtgccaatcatttcaagtcttttccatggtccgagataactctatttcacaaagctgacggaagaaatatctcaactctgaaagcgctagccagacatgctcaaggacatagcctctaaccatcgtaggaagaatccgctcaatccatatgtggaagtcatgactcttcatccctaagactcgcatagtagataagttcacccccctactcaggttagctgcatacccatcagggaacatcaacatcttgatccactgaagtacctccttcctctgggccctgcttaggacgaaatcggccttatgccttctccatgtctttccgccacttagcggcttcatctcttggttgggtctatcacataacgctgtcagatccactcttgcctttacgttattctttgacttatc

SEQ ID NO: 74216 - DNA, 441 bp, Zea mays
agcttatacacaagcctaactaatctttcttataacttttatcccctctagccataggaactcctagaatactcctcatcacctacaacaacatgagttcaaaaaccctgagtacgaagtgtactttcgcaagtcttacccgactaatgaaaaatgactctcaaggatatgttggttaaataagaatcaaggaaaaggctttagcaagaatcaacttagatacttttgcagaaatagcttactaaagtgagtccttactttcaatattgtaatgccagaataaatataaatagactctagttgcatctagtctagcttcaccatctcatcgatacaacattaatttattcataatgtttacatcctgacttatgttgcatgtcagagatcaacgctccactgggcggggatagtacggctatctgaatctatttactcagc

SEQ ID NO: 74217 - DNA, 441 bp, Zea mays
  unsure (1)..(441): unsure at all n locations
tggatgtcatatgtgcctttcttaatggaccaatcaaggaagaggtctatgttgagcaacctcccggctctgaagatagtgagtaccctaactattgttacaaactctctaaggtgctttatgggctcaagcaagccccaagagcatggtatgaatgcctaagagatnttcttatcactaacggcttcaaagtcggaaaggccgatcctactctattcactaaaacccttgacaatggtttgtttgtatgccaaatttatgttgatgatattatatgtgggtctactaacgaatctacctgtgaggaatttagtatgatcatgacacataaattcgagatgtcgatgatgggggagttgaagtacttcttgggattcaagtgaagcaacccaagagggcaccttcatcagccaaacagaatacattcaagacatacttacc

SEQ ID NO: 74218 - DNA, 445 bp, Zea mays
  unsure (1)..(445): unsure at all n locations
agcttaaagccatggtgagtagcatacgcctataatatacgaattgactcaagcctagctacgggtgcataggtttcaccgaaatccaaaccttcgactggggagtattctttggccacaagtcgagctttgttccttgtcaccacaccatgctcgtcttgcttgttgcggaagacccatttggttcctacaacatttttattaggacgtggaactaaatgccatacctcattccttgtgaagttgttgagctcctcttgcatcgccaccacccaatccgaatcttgaagtgcttcctctacccagtgtggctcaatagaggaaacaaaagagtaatgctcacaanaatgtgcaacacgagatctagtagttaccctcttatgaatgtcgccgaggatggtgtcgacggggtgatctcattggatcgctnggtggactcttgggt

SEQ ID NO: 74219 - DNA, 409 bp, Zea mays
  unsure (1)..(409): unsure at all n locations
agctggtggcatggtttaatgatatacacacttacgcagttggattgcaaaatgagggagagagatgggctccaaagcctaagacctttctagagaaggcaaaggaaagggcaaacacacagactgttgattgttttgacttacagtcagggacatatgaggtattccttcaagctgttactacttctgacggcgagtcacaagagtcgaggaagcatgtggttgtccttaatgacttgtcatgtacttgtggcgcacccaggcaataccattttccatgttctcatctaatcgcagctgctcgagctcgtaactttgacttagagaggaggatacctcaagagtttactattgataaactagtgttgacttgtgaaagggaattangcttacacctagtccctatcta

SEQ ID NO: 74220 - DNA, 385 bp, Zea mays
  unsure (1)..(385): unsure at all n locations
agctngccttcgcctcagtgtaccaccccctatccaacggagtcgtggaacgcgccaacggcaaaattttcacagccatcaagaaaatgctcctcgacgacaaanaaggcaagtggcccaacctgttacccgaagtggtctgggcgctgaacacaactgagtgcanggcgactgggttcaccccttttcgccttctatacggatcggaggctatgactccgcaagaaaaaaacatgggtcaccacgaacagtcgtgtctgccgtcctcaacgtagacgagcctacttcgaaggacctcatctacggagaccgcgtcttcgccctacaggctctaaacaaataccaagcttatacaaaagcatggcgcaaccacacagtcattccg

SEQ ID NO: 74221 - DNA, 78 bp, Zea mays
cttaggtatgtcttggccaaactgggttacctgtgagaccttctgtaactcgacccccgattttttggtaaaatatga

SEQ ID NO: 74222 - DNA, 372 bp, Zea mays
  unsure (1)..(372): unsure at all n locations
tcttcatccccacatgtgtttagcggcgatgccacagccagcccatgctagtcttagctattaagcatgcatctagaccggcctcttcttttggaaaatctactaaataaaggttgacgtctaatacacccttaaaagctagggaaccatcacttcttctaaagacagacacatctacatttgtaaatagacagttatatcccatattgcataattgactcacagatagcagattatatccaagagactcaactaaaaacacattagatatggagtgctcattagaaattgcaattttacctaaaccttttaccttgccttgattcccatcaccgaatataattgaatctggggaacctntattcttgacgt

SEQ ID NO: 74223 - DNA, 348 bp, Zea mays
  unsure (1)..(348): unsure at all n locations
aattctcatataaaaaatgaaaagtttatgctgatctgtacagcaccgtttataaaatgtttaacatatgatattacctatttttattattaactttctacacacattgttctgagtgtcgtgggttgcccctggcctacctatgcaaacaaacctgaccactttggttaaaaccggtgcaaaacagctttatattatngtcaggtaccaggttaacctttcaagaatgaccaaatttatcccaagaaaaaagtacaactgaacaaaactttcaacttcactcaactttatccctgtggtctgtggagtgcgctcaactgtttcagcttcatacctgtggagtgcgct

SEQ ID NO: 74224 - DNA, 459 bp, Zea mays
  unsure (1)..(459): unsure at all n locations
agcttgacaatgaggaaatggcactcgtcatctagagcttncgccaaatcctcaagcaaaggagagggaaagactacaagtcccgctccaagaaggtttgctacaaatgtggtaagcccggtcattntattgctaaatgtcctatatcaagtgacagtgaccgaggcgacgacaagaaggggagaagaaaggagaagaagaggtactacaagaagaagggtggcgatgcccatgtntgtcgggagtgggactccgacgaaagctctagcgactcctccgacgacgaggacgccgccaacatcgccgtcaccaagggacttctcttncccaacgtcggccacaagtgcctcatggcaaaggacgggcaacggaagaaggtaaatctaactcctccactcaatatgagtcttctagtgatgataatgctagtgatgagganggataattgcataccctttt

SEQ ID NO: 74225 - DNA, 336 bp, Zea mays
  unsure (1)..(336): unsure at all n locations
agcttcaaaacgctctatcaagcgactgaatcatatgctttatggttcagnaaacccgaaaggattagaacgcctgcgcggtttgctcaccggcgacggattcctccgccgtgattccggtcaccggcgtttggattcgtgcaccggacttgtggatagcgccgtggggataaaatatctgttgcaccgctggactggaagctaccccgatcggccacgacacccctccccttggctaaccgcccgcgagaaagtgcttatcatcgactgacgtctctcagacgtgtgccgcgtgggtacactctattaccgtggcgcgngaccttctctgaactc

SEQ ID NO: 74226 - DNA, 448 bp, Zea mays
  unsure (1)..(448): unsure at all n locations
agcttaccgcatntgaagcatgagcgcttccgctnggcttttgtcttgcttggntgtcccttgcgacctttaagcaccgtcttgaatctttngatgatgagagccatctcttcatcattgagtccagccgcctcaaactgtgccaccctgctaggtagtgcctccttgatgcgccttgtcttcttcttcctcccgtcttttcttttgtggcccgagcctgagtcggtgggcttgtcattatttggctcgttgacgaaggactccttcttcttgtcgttgatcaccatccccttgcctttaggatccatctcttcgggcgggtagtccctttcttgaagagaacgactctgataccaattgagagcacctagagggggggtgaatangtgatcctgtgaaacttaaacttatagccacaaaaacttgttaagtgttaacacaataatcg

SEQ ID NO: 74227 - DNA, 353 bp, Zea mays
  unsure (1)..(353): unsure at all n locations
acctgcngcatgcaagcgttccatgttgtgcgtgaacattccaattctaacccttttctgaccgtggngaccgtcacaagttggtgttcttctgcagaccgaatccagcatgttcaaatccttttacctttcgggaatctctctgtgtgctaagcaaaacaagagtccacgggtccccatggtctaaatatgatggacatgaactcaagagcgttattatctcgttgttgagctgattaacaccaactgcgaagaatgggaccaccacattggactttgtttcgcgttgatgtatcagaagtgtggacgtcgttatcattctaccctttttgcattgagtcgcctccactcaa

SEQ ID NO: 74228 - DNA, 397 bp, Zea mays
  unsure (1)..(397): unsure at all n locations
actcaagcctagctacgggtgcatangtntcaccgaagtccaaaccttcgacttgggagtatcccttggccacaagtcgaactttgttccttgtcaccacaccatgctcatcttgcttgttgcggaagacccatttggttcctacaacattntgattaggacgtggaactaaatgccatacctcattcctagtaaagttgttgagctcctcttgcatcgccaccacccaatccgaatcttgaagcgcttcctctaccctgtgtggctcaatagaggaaacanacgagtaatgttcacaaaaatgtgcaacccgagatctagtagctacctccttatgaatatctccgaggatggtatcgacggggtgatcacgttggattgcttgtggactcttggt

SEQ ID NO: 74229 - DNA, 437 bp, Zea mays
  unsure (1)..(437): unsure at all n locations
caagctggctttgctttattctcctctatcatgttaannnagcgataccctgagaaacaatctagcggtgacatgacagcgcaccctgctggtgaatctttgtgagctatttgtttatcttgatagtgacaatgtggtggcctataaatatgattttgatatcttaaattggtggcatgaacataaactaacctatccagttctttcgattatggcatatgagcgaagtcgtctcagcggctcagcctgagctcctgcctttccttcctcttcagctgctggtggcataatgtcaacgctaacagatattgtgcttaaaatatcacaatctcatctagagctgataaaccaacttatattggattatgtgtagtatctgaattccaagaatgcatagtaaaccaaacgcgcgccccagtcatcgtcattgaaccata

SEQ ID NO: 74230 - DNA, 418 bp, Zea mays
  unsure (1)..(418): unsure at all n locations
agnctgggaaggttcttcatcctcacatgttcttagcggcgatgccacagccagcccatgctagtcttagcaattaagcatgcatctagaccggccttctcttttgcaaaatcaactaaataaagtttgccgtctaatacacccttaaaagctagtgaaccatcacttcttctaaagacatacacatctacatttgtaaatagacaattatatcccatattgcataattgactaacagataacaagttatatgcaagagactcaactaaaaacacattagagatagagtgctcatttgaaatagcaattttacctaatccttttaccttgccttgattcccatcaccgaatattattgaatctttggaatcctttgttttgacgtaggaggtgaacatcttcttctnccccgtcatat

SEQ ID NO: 74231 - DNA, 394 bp, Zea mays
atcttatcaagtgagctcttctactcatccttcttttcgtcattgggagacctctaggacaagatattatcaaaataataaatgctacgtagaagtcaaacagccacgcggaaatcagctctgcataactcccgaagaggctgcttcacattagcatgtgagacatacttttgcttcatgtttatacctctctaaggctgtgtggtactagcataaataccctactatgtatacgatataagacaacttttgagaatctaaaaacagaacccttatgtttagctgtgtgctaacaaatattgagagtgatctctacccatttgctcttgtgaattacttcacgggattgcagaagcggtggcttcatatgctcccaagtggtgctcctactccc

SEQ ID NO: 74232 - DNA, 408 bp, Zea mays
  unsure (1)..(408): unsure at all n locations
agctgtcaccacaacaactcatcgtctctcttctttgacgacgagccaaccgtgcctggggaagaaccccctcagcgagaagctcgtcgacggaggaaccaacgccggaatgttcggcgacatcatgaatctggagaacaagacctggcgcagcctgtatctcgagatgagatctcagaggtgggagacactccttacgaacgagtcttcagggaaaggataactcccgccgacgtgatcgtcggtaggctcaagagcaagatgaacaggatgcgaggctacgccgagagaaccctctcttcgcacgaaacctgaaccctgactttgcccgcgccatgaacacaccaagtgaggtcggnggagtattggctcggatagctaatggtctcccccgggactcagacgctg

SEQ ID NO: 74233 - DNA, 452 bp, Zea mays
  unsure (1)..(452): unsure at all n locations
agcttgtacatatgatttacaaatgacacatgggtagtattgtcttctatctntatcatcttgacaacagaatcttgtgaacaccatctttcagccttgtttgactcttgtcttcatcttcccatattggtatgacaaagctaatgccttcatccttttcttgatttattccgaaggtgtctactgccgaagcacctacaacacttagatatgtatcggtaaatagtggttaactatgcttttgaggaccttcgaaacacgaaggcccccaacacttatgtaactaaataatgattattatatattgttttgaatatagattcttaataaaaatatattccatgtgtcatataatgaaattaagacatagttacttgttcattatcttgtggcatgaaagtcacttaacgcatatatcatagctcttcataaataggtggttaacaatatga

SEQ ID NO: 74234 - DNA, 411 bp, Zea mays
  unsure (1)..(411): unsure at all n locations
agctngtaacccctactgtcagcacccctgttctagataatataagcctcatccctcgtcttgtgttccatcttgcatcaacccatctaggcaggggcacgcggcacaaaattcactagtcggtgcggttgagggtcctccgggtccgaaacaccgacagttagcgcgccaggtagggggcgctgcgtgttgataatactttcccgttgagttccagatggacaatctccagcagcctcttcagcccgggacggtgctccgctttgggagcctcgagttcatgtctcccgatggcagctacgacatggtactcctccctccacagcacgacaacaacggcggtcgtcggctcgcccggcggatgcgaactcggcgacgacatctccccgtggcggaagaacactcgggtca

SEQ ID NO: 74235 - DNA, 459 bp, Zea mays
agcttatcaccgcgcctgtaagccgtgcgacgtggcctgaccaccggtgttgcgggggaaactccggtgacctctgttatgccacgccgtggctcattactgtgtggtggtaatcatggcacacttatgattacaatctttgagccattgcaccagtgaacgccacgatgaagccaccagtgctctcccctctctccggtcgccagcgagtcaatccaaattcacgagccaccgcccccggatcctataaattaagcgtgccatcagctccgctaggtagtctagcatccagcgcacccactcgtgtctcagatcgtccaccagagctccctaatttgaaatttcccccaaatcagtccagaacaccgcgtgtgtgagctcgccatggccagctctccacaggtccgatcatgctctccttgctcttgtttagcagtcttgtgtgcttatgatgctttc

SEQ ID NO: 74236 - DNA, 371 bp, Zea mays
  unsure (1)..(371): unsure at all n locations
agcttctatanaagatggacgagtacatcagagccgactattactttcggcaaagaagtgaagaagcctgcagatactctaagatgaccaggggctacagaggaataatacttccgaggcatggcagaacgaatcataatcccagttcaagcgaaaacaggggaaatcatgctcaaggcattaacacaactcccaatcattaggaacacatcaaagcttcctcatgccaccaaccccaagaggcagaagagggagaagcttcggaggaagattcatctcgcaaccaagaaggttgttntgcttgttctatggagaatataaggggcatacaactaggacatgccaagtcatgatacataacaaaaggaaat

SEQ ID NO: 74237 - DNA, 411 bp, Zea mays
agcttataacaagaggatagaggcaagagctcgtccatatgttatgatagaaggggagttgtacaaacatggagtttgtgctccgctgctcaaatgcttatccagaaccgaaggtatagagttaatgaaagaaatacatgcaggcctgtgtggatctcacatcggatctaggccgttacttggaaaaattttccgccaagggttttattggccgaaggcagcttctgatgcagcagaattggttcaaaagtgcgaaggttgtcagaaatgtgcaagggatcaaaaacaaccttcgtgcttaacacagctcatacaacccacttggccattgcaaaggtggggccttgacttgttaggtccgttaccaccggcccaagggaacctgagatatgttgtagtagctgtggaata

SEQ ID NO: 74238 - DNA, 288 bp, Zea mays
agcttgttatcaatatgatggcaaataacgttccttgcgttgcggagtatttgttgcgcgtatgtggtggaaccgcagtcacatattgtgaaggcgacatccctccttcctacgatgtatgcgtgccttatagtgtgagtgaccatgatctttgcaatctaataaactttgtttctcccaatttaaccaaaatatgtctgattccaccttctctactttgaaggcggatactgtcaacacggaacgactgggtggatatgataaaagcttagactatctatccttttc

SEQ ID NO: 74239 - DNA, 406 bp, Zea mays
  unsure (1)..(406): unsure at all n locations
ctggtcgaagtcctaagaaccttcaaaatttaccttcatcagcttactcccgaaactattatcaaaggggggatctttatatgggccatgaggagccattggacttgagccaaatgcaaaatgtttctgcaacatccatgagctgtcttatgatatgaaagctaccggaaaagagcaatatcacaacaacttcagttgttatagcttcgtgccttcgctctgaggtgagctacccagttcccacatttcggaagagatggtccgaggcatggatgcaggaatgtgtctacgtgaagaatgacctaagtgaaagggaggatattaaggggaatattcaacatcctatatggtcttgcttcggcattaagagaccatccactgcccttgngaatgatatacaagcatg

SEQ ID NO: 74240 - DNA, 446 bp, Zea mays
agaccggacttaagcacgagatgcactaacccgaaacaagttttttcaatgctaagccactacgggcatagtcaccaatcaaacttcgatatgtatttcccttggccacaagtcgggctttgttccttgtcaccacaccatgctcgtcttgcttgttgcggaacacccacttggttcctacaacattatgattaggacgtggaaccaaatgccatacctcattcctagtgaagttgttgagctcctcttgcatcgccaccacccaatccgaatattgaagtgcttcctctaccctgtgtggctcaatagaggaaaaaaagagtaatgctcacaaaaatgtgcaacccgagatctagtggttacccccttatgtatgtcgccgaggatggtgtcgatggagtgatctcattggatggcttggtggacactagagtgtggcagccttg

SEQ ID NO: 74241 - DNA, 396 bp, Zea mays
  unsure (1)..(396): unsure at all n locations
agcttcgcgagagagggaactgatcctatgtctctcgagaggtctaaaactgtggagagagcgttttgccttgaagtgagccatccgagttagcctttttttgcgtgccttgggaaggccctatgcatctccttttatagatacaaggaggtgatccagctgtacatatgggggtgtaactatgtgctaacgtggtcggtggagaagtgcttgagccctgtataagcgtagctggcggtgcggccctaggtcctgctgacgtttctttgccttcataaggacctgagggcggtcgacgtcatgggtgcatgccgggaatcatcattacctgctattggagtaatatgatgtgacaccggtcttgttcctttgtagcctaaggtggctagtangggg

SEQ ID NO: 74242 - DNA, 418 bp, Zea mays
  unsure (1)..(418): unsure at all n locations
cagccttagagcttanaacatctttatactncttattatgtgggccaactctaaactctaccgcacctcatatttctctagatcttaaaactgagtgttccaaaatttataagggatccaaacaaacatgacctctagagtcttaaacatatggtctaaagcttagacctataattgtagcccacctatattatatctttatatgctcaaactgagattaagtgctctacagttctaaaatttagatgagatgctaactacctcttaggaccactttataaccganagatcttatagaaatcatgtagaaatttcataagacaacgcatgaagagtatactcacacacatattcagtgacgtttggaacttgtggatcatggatctgtggcgttcgcttgagataaaagcagctgcac

SEQ ID NO: 74243 - DNA, 448 bp, Zea mays
  unsure (1)..(448): unsure at all n locations
agcttttataaggggcatacttgttattcttcacgggctgcgtcctgtgcctataaatagtgaacagtattccattactgcggacgcattcgagtaattgcaatcgcatcttccggaattcaaccttttgccaaggcaaaggtattattgtatttaataactcaatatattaagtagatacaatgtaattcgtctatggtgtatatatcccttttataccttttggtttatattatcttataatttttactggaaatttattacgaagatttaagcttcgtaattatgctcttatcagccttcgtccaaggcccattatcctcaagggaataatgtntcatggacgaangacattgacacttaacactntatgttgccttgttcttaattcatagcagttgagaacaagtccncaacacttaccctntacaaaagtggacaatctctt

SEQ ID NO: 74244 - DNA, 389 bp, Zea mays
taaagtataaactggactatttgaaaacacgccacgaactataatctgataattgaaaacgggacgctttctatgaaatgcatgctttatatggacataatcttttttgaagattacgttggcatgggtgtaacacctgtcattctgttgctgatcggttacttaaaaattagcaatacttgacgcatacatactcacgctctagcaggcagaaatttttaattaattccaacggaaagaccttgatttgaatctggattttctggccaataaacaataatgtaaactatgtgaaacataacaaataatatatatattactctattacaaacctaatgtgaacatctctgtgtacaacagcttcaccacgtgtagacactctggtcccg

SEQ ID NO: 74245 - DNA, 429 bp, Zea mays
agctaggttggttctgcgtccatgcgttgttccttgcatatgagatcttctagattgggcttgacttccaggctaccggtgtctcccagacatgcatttagctgagcagattctttcttccaatcttccagaaagtttgctcccttaatcccaaagggttttctgctgagggcgtcagctaccacgttggcctttccggggtggtagtggatttcgaggtcataatctttgatcaattcgagccaccttctttgacagaggttgaggtccggctgcgtgaaaatgtactttagactcttgtgatcagtgaagatgtggcatttgttcccaatcagatagtgcctccaaatttttagggcgtgcactatggctgccaattccagatcgtgggtaggatagttctgttcgtgcggcttgagtaaacgagat

SEQ ID NO: 74246 - DNA, 469 bp, Zea mays
  unsure (1)..(469): unsure at all n locations
nntaaccccncgcgagaccctntcccgtttctttctaactcataatgaatgcgatatcgaatgtcatacttgatgcatatttactntatttgttcccttgtatgatgtactgtttgtttcccaatttgaatggatgaatgtatgtatgcttgcaatcgcatagagaacgatccggtcggagaacctgaagaactcgcaggagaagcccctgagcagcagtcggttggtggaggcaagtgtcccttgacctatctctgtcctattcattctttaattcatctcccgctttacacatttatgcctaaggattgactagctttntgttatccctgtccttgtttacctatttgggttggattattattatttagctctatgctattgctcaactctaattaatgaacatgatgagattatctatgatacgctcgtttcccctctcttatgttgatgttatacttgtggtctt

SEQ ID NO: 74247 - DNA, 429 bp, Zea mays
agcttataacaagcgaatagaggcaagatcttgttcatatgttataatagaaggggagttgtacaagcatggagtctgttctccactactcaaatgtttatctagagccgaaggtatagaattgatgaaggaaatacacgcaggcctgtgtggatctcacattggatctaagcctttgctgggaaaagtttttcgtcaaggattttattggccaaaggcaacttcggatgcagcggaattagtccaaaagtgcgaaggctgtcagaaatgtgcaagagatcaaaaacaaccttcgtctttaacctagttaatacaacccacttggccattgcaaaggtggggccttgatttgttaggtccgctaccaccagcacaagggaacttaagatatgttgtagtggcagtggtaatattttctaaatggatcga

SEQ ID NO: 74248 - DNA, 393 bp, Zea mays
  unsure (1)..(393): unsure at all n locations
ngaagccatggtaagtagcataggctaataatatacgaatggactcaagcctagctacgggtgcataggtttcaccaaaatccaaaccttcgacttgagaatatgccttggccacaagtcgggctttgttccttgtcaccacaccatgctcatcttgtttgttgcggaagacccatttggttcctacaacattttgattaagacgtggaactaaatgccatacctcgtttctagtgaaattgttgagctcctcttgcatcgccatcacccaatccaaatcttggagtgcttcctctaccctgtgtggctcaatagaggaaacaaaagagtaatgctcacaaaaatgtgcaacacgagatctagtgggtacccccttatgaatgtcaccgagga

SEQ ID NO: 74249 - DNA, 399 bp, Zea mays
  unsure (1)..(399): unsure at all n locations
agcttgtatcccctactacaagcaccctggtgcaagataatacaagcctcatcctccctctgctggaagtagggccttcttagcccgaaccaagataaaccttgtgtttcatcttgcatcaatccatccgggcagggacacgcagcataaaatntactagtcggttgagggtcccccgggtccaaaacaccgacaaagtgatactgaatggctatgtgtttagtgcggctgtgctcaacgggattatccgccatgcggattgcactctcattatcacataggagaggaacttttgttaatttgtaaccatagtccctaagggtttgcctcatccaaagcaattgcgcgcaacaatgtcctgcgataatatactcagcttctgcggtaaaaagagctacg

SEQ ID NO: 74250 - DNA, 461 bp, Zea mays
  unsure (1)..(461): unsure at all n locations
tatgaagattcttcatcccaacatgggctagtcggcggtgccagagccaacccatgttagtcttagcaattaagcaagtgtcgagttcagctctatcaaaatctaccaagtatagttgaccctctaacactcccttaaatgctattgaatcatcacttcttctaaagacagtgacacctacatcagtgaatagacagttgtagcccatttgacataattgagaaacggaaagcaaattgtaatctaatgaatctacaagaaaaacattggaaatagaatggtcaggagatatagcaattttacccaatcctttgaccaaaccttgatttccgtccctgaaagtgatagctcgttggggatcttggttnttctcataggaggagaacatcttcttctcccatgtcatgtagtttgtgcacccgctgtcgatgatccaactngagcccctcgatgcataaacc

SEQ ID NO: 74251 - DNA, 433 bp, Zea mays
agcttgccaatacttgtcaaagcaacagtatatgtcatcacagcaactgcagaccataccagtaacctggcctttcgcgtgctggggactggatatgattggacctttcaagaaagctcaagggggatatactcatgtattggtggcgattgacaaattcactaaatggatagagttcaagcccattgcttatttaacctctgctaaggctgtggaattcatacaagacataatattcagattcgggataccaaacaacatcatcaccgacttaggatccaacttcaccagttcagaattcctcgacttctgcgagcaaaagagcattcagatcaagtacgcatctgtagcacatccaagagccaacgggcaggttgagcgagccaacggaatgatattggaggcactcaagaaaagggtcttcgataagaat

SEQ ID NO: 74252 - DNA, 446 bp, Zea mays
tactcagcttctaagggagaacacgtgataggtttgactaacgttcaattcgtaaaagatagaccttgtgcagcttgtcaagcaggtaaacaggtgggaggagcgcatcacagcaagaatgtgatgaccacctcaagaccactggagctgctgcatatggacctcttcggacccgtcgcctatctgagtataggaggaagtaagtatggtctagttattgttgatgacttttcccgcttcacttgggtgttctttttgcaggataagtccgaaacccaagggaccctcaagcgcttcctcaggagagctcaaaatgagtttgagctcaaagtgaagaagataaggagcgacaatgggtccgagttcaagaaccttcaagtggaggagttccttgaagaggaagggatcaagcacgagttctccgctccctacacaccacagcaaaa

SEQ ID NO: 74253 - DNA, 430 bp, Zea mays
agcttccactccactccatcgaattattcatccttcgtcgtcgttccacaccgctctccaatttggtataatcttcactcctatattatttaccaaaggggagaaagtttgaaaaagggcttatattttactcacaagtatctgtttttggcgattcctgccaaagggggagaaagtattagcccaaagcaaaaggaccgcaccaccaccaaattcaaaaatttgtagtctttcattttgtattaaagaagtttttcaatcgatatcttatttttgatataatttcaaattggtatgacctcttcaaaattaatatataaaaccctcttgaaaactaagaggagaattttattgaggggaagttttgtttagtaaaaggaaaagcatttgaaacagggggagaaaatctcaaatcttgaaaatacttctc

SEQ ID NO: 74254 - DNA, 372 bp, Zea mays
  unsure (1)..(372): unsure at all n locations
ntaccaaatggacgtaaagagtgccttcctcaatggaccaatcaaggaagaggtctatgttgagcaacctccaggctttgaagatagtgagtaccctaactatgtgtataagctctcaaaggcgctttatgggctcaagcaagccccaagagcacggtatgaatgcattcgagacttccttatcactaatggcttcaaagtcggtaaagccgatcctactctctttactaaaactattgcaaaagatttgtttgtatgccaaatttgtgttgatgatatcatatttgggtctactaacaaatctacttgtgaagagtttagtaggatcatggttcanaaattcgagatgtctatgatgggggagttgaagta

SEQ ID NO: 74255 - DNA, 425 bp, Zea mays
  unsure (1)..(425): unsure at all n locations
agcttgctaaaagtcttttcatctatgtgcttagtgaagatatcggctaattggttgtgtgtgctaacataagcaatttcgatatcccccttttgttggtgatttctcaaaaagtgataccggatatctatgtgtttagtgcagatgtgttcaacgggattatccgccatgcggattgcactatcattatcacataggagagggactttgctcaacttgtagccatagtccctaagggtttgcctcatccaaagtaattgtgcacaataatgtcctgcagcaatatactcggcttcgacggtggatagagctactgagttttgtttctttgaagcccaagacaccagggatcttcccagaaactgacaagtccctgatgtgctcttcctatcaattntacatccggcataatcggcatcggaata

SEQ ID NO: 74256 - DNA, 452 bp, Zea mays
ctatcaaatggacgtgaagagtgtcttcctcattggacttatcaaagaagaggtctatgttgagcaacctcccggctttgaagatagtgagtacccgaaccatgtgtataaactctctaaggcgctgtatgggctaaagcaagccccaagagcatggtatgaatgccttatagatttccttatcactaatggattcaaagtcggaaaagccgatcctacactcttcactaaaactcttgaaaaagacttgtttgtatgccaaatctatactactccattaacttagtaatgtcagcgtacacactccgtagcccgctcgcgtgcctgcgttaacgatgaggtccaacgcacacagtgacccttgccacgcttgagcaagttgacgcggcttccgtcgagatcttgcccacgcccgagcaaacatacacggatctctgcgactctgagaatta

SEQ ID NO: 74257 - DNA, 425 bp, Zea mays
  unsure (1)..(425): unsure at all n locations
agctntggctntaagagcacatttttattatttccgaagagatgtctcaagataagaaagttgttgctgagacaaagctgagcgaggaggagaagctttctgaggagaagactgctggctttattgaatcaatagcaaagacaaatacagaagagattactagggagattttagaaggcttatctgaagacaccggtgacagcgacagttatgatgtggaaagtgggggcgaagactccgaagatcgaccctggcgaccaagtcatgcatttttcagaaaatcaactattaaatagagtcatcttgataatatgaggggaagatattttcgagatatgtctattgtgagggctgacaacggagacatgactgctcctgttcccgaagagaatgaagtcgtgatcttccgaagctttttcaaagct

SEQ ID NO: 74258 - DNA, 427 bp, Zea mays
ttaccaatttatctgctaaaacacgtatcacactttctatgattacatgaggggcaatcgtagatttcttggtggtggcctatctggttatgatcttttgtcaaatcgccattcacgaactttcccataggtcaactcatcctatgggaaatttacaagagtgaaatttactgttttggggaggctaatgaagttaaagaattgtgtgctaacatttttacttgtcctattggcagtcttcctatgaaatatcttggagttccaattgataacaaaaaatagcaaaaatatctggtgctctatggaggaaaaaatggaaaaaagacttgctggttggcaaggaagattcttgagtttgggtggtagattgactctattaaatagttgtcttactaatggtcctctttatatgttatccatttatcct

SEQ ID NO: 74259 - DNA, 426 bp, Zea mays
agcttcatgcaattgctgccaaaaatgacactacaacacatgtagccttttatgacgaataccccatgacaatgaagattttcatcattggctattttgttttatgacgtttttttgtggcaaggcaactttatgatgaatttatgcaagcgttactaatagcattgagaaaacgtcacaacactagtcaatcgtcgtatcgtaacgaacatcttgttgccataagatactagaagtaaacatcataactatatgacagttctatatcgtcataaatattataaataattaatggtttaaaatatccgttgtagttattaataaaaatcaatatatatgttgaaaattggctatgatttttaactggcgaccatattatgctacaaaatcgagggaaaaaattctctaaaggattcgaactcccaa

SEQ ID NO: 74260 - DNA, 448 bp, Zea mays
  unsure (1)..(448): unsure at all n locations
ntctcaacctttcttggtgcttaatgattatacttcaatgtttataattggcccaagccatgattntaatattttcatacccttttccccattttcttgaattttgctcatagggctcacttagggtttttattagggttgcaacattattacctttttgatagactcatttgttttgatcatgatacttttaagtataggcttggtggattcttcattcttaagtcaatttgatgctcatgctcaatttggttcacataaaatgatggttcttggtttagcactttgagagaaaccctatgtgacactggggtgtcccagccttccccccttaaaggaatctcgtcctgagattcgggccagagtcctcccggtgtgaagcgaagggtgagacttaaagaatattgttattattagggcaaaactgctcttcgaatgtcattctctt

SEQ ID NO: 74261 - DNA, 417 bp, Zea mays
  unsure (1)..(417): unsure at all n locations
agcttctgtgccaaaaatcacagaaagtttattgatggttatttagttgtgattttctaaagcttaatgccaaaaggcactttctactgccttgttatttgaacaatgtcaaacaacagagttcatatttttcctatgtttctaataacaaaacataaattatcccaaggtttggggtgttttcactatgaggttatttttctagggtttttctaagttttccttattttcttaaaataaaaggtatcccaattattttgtactaaaccagagtataatagatttttctagtgaattatactgaataagtagactaacaaaaatatgggggctccctggttctttatttaaattacctttcctattntctttaattntaagcacaatgtgaaataaatggcaaactctaccttaatg

SEQ ID NO: 74262 - DNA, 437 bp, Zea mays
tatcaacactcagcagcagcttgccgaggctaatgagcacctgtatatgcatcaccaggaaatccaggacatggaggccaacgaggatgtcgacatctagggaggagaggagccttcctccagcttggacactactggctcagggagaccaccttcccccgagtcgagtgttgcctcgttcgctcactatgtcgtagggatagagttagaagtcggtgatggtaggactcctcgaagctagcttagcttttgcacccttggggtactaggctagatagagttgagtcttttgggatattgatgtaatcgcgataaactcttttggaagcatggctgatgaatgatgtcagtcttaatttaagaagggaaattatgccatgtgaaatcttttatgattatgcaagaatctatcagtttcgccttttgactctttcatc

SEQ ID NO: 74263 - DNA, 384 bp, Zea mays
agcttctaaagggagaacacattttatgattaacaaatgttcattttgagaaagacaggatttgtagcgcatgccaggcagggaagcaagttggagtccatcatccacacaagaacatcatgactaccgaaaggccgcttgagctactccacatggatctattcggcccgattgcttacataagcatcggcgggagtaagcattgtcttgtaataatggatgattattctcgcttcacttgggtattcttcttacaggaaaaatcttaaacccaatagaccttaaagggattcttgagacgggctcaaaatgagttcgccctaaggatcaagaaaataagaagcgacaacagaacggagttcaagaactctcaaattgaaagct

SEQ ID NO: 74264 - DNA, 413 bp, Zea mays
ttaccttgaatccttttaaatccagcatacccttgagagtcttttctttagttggggaagtcatgctgagtacttgcgtacttagggttttattccctttgttgatgtaggttacgagtcactttgattgtgattgatgttaagtgtcggggggctcgaccttcttatataagtatatcccattttcagcttatttattgaggattgtcacttaagctagcatgtgtcttcaaagttacaaatattttataacacttcaaattgtaattcttttgaacccatttttaatcactccgatgatgtataatgaaatcatgatgtaacttgtaatcattttgtaataaagaatttagttccgctgcaattattggtgtgtgatttgcgttacttaattttgcgatcttggttgtaag

SEQ ID NO: 74265 - DNA, 412 bp, Zea mays
agcttgagcagagactgtcttcgtctgttacccttggaagctagttattagcatatccttcaacttctgccaagaagtgattgtccctggccgaaaggaagagtaccaggtctgagcaacactcttgacagccatgacaaaggattttgccatgactgcagtattgccaccatacgaagatatggttgcctcgtagctcatcaagaattgcttcgggtctgtatgaccgtcatacatgggtaactggggtggcttgtaagactggggccatggtgtagcctgcaattctgttgagaggggagaagcatcatcgaaagcaaagtttccatgatggaaatcttcataccagtcgtcctcattgtggaagccttcctgatggagctctctgcgaggaggccttctgctctgatca

SEQ ID NO: 74266 - DNA, 386 bp, Zea mays
tctcctgaacaagtgctgcacttaccgctgagtgcgaagctgccacatataataacataggagcccctggcgtaggtggagttaatgttgttagaattatcaaatactgcttcagctcttcgaaggccttctgctggattggtccccattgaaagacttctgctgacttcagcacttcaaagaatggtaagtttctctctgctgatctagatatgaatctgttgagagacgccagccttcctgtcaatctttgagcccccttttttgtacttggtggttccattcgaagtatagcttcgattttgcttggattaacctcgattccctttgttgagactatgcaaccgagaaatttccccttctttactccaaagacacaattttct

SEQ ID NO: 74267 - DNA, 422 bp, Zea mays
  unsure (1)..(422): unsure at all n locations
agcttggttggaggaaaaattntcaccgtcacctgagaaaatggtggccgggagatggctcaagaaattataaggaaaagcgaaaaaggtattcatgacgctagaaaagtagcagaggccgctgagaaaagtgcggatctcgaggggcgaataggtattgactactagctnttgactttatgttgtaactttatgatttcgaacttgtttgcaccttgtaacacgaccgcactatctcctcccccagagcccaccgagcctttggcgaacccgaaaccgaagagagatgatgaaattagaaaaatggtcgaagcgattatggataaagttgttgatcaactactaaacgaagctgcagaagtagtcttaagagaagattagctgttattgtaaagacatttggaatgtagtacttgctggac

SEQ ID NO: 74268 - DNA, 460 bp, Zea mays
  unsure (1)..(460): unsure at all n locations
tattcatcanaaccaaatcttctgcctttacattggattttccaaactcaatgtggctaggcttgctcgaactcaaaatgccttcatcctcttcatcatcactagcatcttcagcaacaacctcttcagcttcgacaacgacaacatctttcgttggagcagactcatcttcttctcggacaactagcccagaatgtttcaatgtttctgaaatgggggttgtctcagtagcttcggtttcttccccttcgtttgttagtcagcaaagggcataactagattccagcccaattaaataagagatcacaattaataataaaaacccacgatgcaatgcaaatgacagattgagtttagttccataaattaatcatgtgagggtccgagccgctcattaccctgagcacgactgatataccagttttacactctgcagaggttgcgtatctttacccacaag

SEQ ID NO: 74269 - DNA, 432 bp, Zea mays
  unsure (1)..(432): unsure at all n locations
agcttcggcttccccgcttatccaatcaataacaccctcggggtcacctcgaatgaaattctcttcggaagaataagcacccactctggcaaagctggttttcaattttcttacgcaatccaaggatttctcgaagatggattcatgaagctcctcaacatttttctccagcctagtgttcgaccatttacttatttctcgactagcttttgcaacttcaaaattttcattagcttcggcaagctttttccgatggtcttcaacttcggctttataagcttcggattgagcgttaaattttgcttcaccttccttcactttatccaccaatgaaagtagaattttatccttctccaaggcttcatttctcagcttgataacttctgatcgaaggttgtcgagggctatcacgcagctntcatcttcagcatt

SEQ ID NO: 74270 - DNA, 454 bp, Zea mays
  unsure (1)..(454): unsure at all n locations
agccaatacttgtcaaagcaacagcatatgccagcacagtaactgcagaccataccagtaacctggcctttcgcatgttggggactggatatgattgggcctttcaagaaagcccaaggggatatactcatgtactggtggcgattgacaaattcactaaatggatagagttcaagcccattgcttctttaacctctgctaaggctgtggaattcatacaagacataatattcagattcgggataccaaacagcatcatcaccgacttatgatccaacttcaccagttcagaattcttcgacttctgcgaacaaaagagcattcagatcaagtacgcatctgtagcacatccaatagccaacgggcaggttgagcgagccaatggaatgatattggaggcactcangaaaaatgtcttcgattagagataaaaattcgcaagagagtggataag

SEQ ID NO: 74271 - DNA, 389 bp, Zea mays
agcttgatacagtgccgaaagtgttgagtatgatatcttcggcgtaacagcaaagagtggaaccgacttaaagatgaaaaggctattcatacctcgatagactactatagagttattatcaaatgtaaagggcatgaatgtaattttagtagggctgtgtcccgtgtctataaataggtgaacagtattcccgtactgttcacgctgacttggcatttgcttttgcgtcacactcgtattttcatctccttctcaagccgaaggtacatttataattcgatattgtttctatttctctataatgatataataaagttaaatggataatgctatatgattattcatgctatcttctatgtttcatatgcttcgtcttttattaatgaata

SEQ ID NO: 74272 - DNA, 467 bp, Zea mays
  unsure (1)..(467): unsure at all n locations
ntctaaagctctctatgggcttaagcaagccccacgctcttggttcgaaaggcttanggatttcttgctttccagagactttaaaattgggaaggttgacactaccctattcactaaaagaattggtaaagatttatttgtttgtcaaatttatgttgatgatattatttttggatctactaatgaattgttttgtaaggaatttggaaaaatgatgtcaaaagaatttgaaatgtctatgataggagaattgagcttctttcttggtcttcaaatcaaacaattgaaagatggaatctttataagctaatcaaaatatttgaaggacatgctcaagaagtttggcttatagaatgcaaagcctatcaagactcctatggcaacaaatggtcatctagacttagatgagggaggtactatggtcgatcaaaaactttttcgctcaataattgggagtttgctttaca

SEQ ID NO: 74273 - DNA, 357 bp, Zea mays
ggaaaggcgggcccgaaaaggctgcaacatactcgaaccatcttagccggttaaaacttatgttaggactttcaccttcttctttgaaatttgcaccttgtcttacttgtgctgtttgatatatacacgatgacgaagctgaaaattgacaatgctgaagtttgacaaaactgaagacgaagccttaactgaagcttaaaattgcttataatgtgctttcctgcaaaaattcttagagaaactcttgtaatatagatatggagctacttatgtaaatgtgtacataccttggaatatattttggttcctttaaccgcatccacgctgtgtttggtgggacgaaacttatgctttgag

SEQ ID NO: 74274 - DNA, 465 bp, Zea mays
tgttcctgaaatcatcagattaagaagcaaccgatgggttgaatattggatggaaatcaagaaaatgaagagaatgaatacaacatcaatgagattaatgttactaattaaactaataggtctgcaatttctgcatacacttttattacgtgttttattgctaaaggtcacagaaaccattttgcaatgcacgctttccttttccatggcataaccaattccaataagtcaccttaccctgtcatacgaactcacagactcattctccaacccacaacacgaaacattcaatccattggtattcctctactggaggcaccaactaatcagcgattgcccctaaatctatgaaatctctcgtagcaccagtctcttgataccaattcacagcacagtcgttatgcactcgtgtagcacccaccagagcactaatttccactgctccctataactacatggacttat

SEQ ID NO: 74275 - DNA, 372 bp, Zea mays
  unsure (1)..(372): unsure at all n locations
agcttgtgctacattaattccctttacatttgtgaagttaaaaataccagtttttttaaaaatataattatattatttatatttttatatcctttctcttcttctcattttcaaaaaccctattttcaaatttagggtttaatcaagcttcaaataattattaccttattatttttatcctcattgttntaattaatgcacanacatataaaactccaacaaaatgcactttcttttattttagcatatgggttaattaaatcatccctgatttatgtatcctatttcataagccaattagccccccaaatggtgaaatccccttttccttggtttcaaattgaatataccaaaccccccccctaaaaaaat

SEQ ID NO: 74276 - DNA, 471 bp, Zea mays
  unsure (1)..(471): unsure at all n locations
tcaagccggcgtcaccctcaagcgcannttttgaatttctatttggccaccaaaatgctgtttttttcatttggcttgttgctcagaacagatgctggacagcagatagactcgccaagagaggattaaatcacccaaacaaatgccccttatgtgatcaggatgctgaatctataaatcatctggttgtctcatgtgtctttgccagggttttctggtataagttgctaagaaagtttggtatgcacttcttagctcctcagccaggtgctacctccctttttggattggtgggaaaatgcctcagaaattgttaatgggctctccaagaagggtctcaattcccttatcatcttgggagcttggctgatctggcttcatcggaatagatgtgtttttgacaatgggtctcctagcctgcctttaatcctcaagcagtttgaaaatgaaaggagtgtgtgggtggctgct

SEQ ID NO: 74277 - DNA, 422 bp, Zea mays
agcttctggaaaccaatactcttctacttagtaccgataaccttcgctccggttcggtctcggagacagcctaagctttcatcgtccacaccgtcgaagagtagcgcccctggttcatacccacaggatatggcatagtctctcaactcttttttctcagccttcgacaattgttgtccaattaagtttttaaaggtgaaattttcttcttctgaagaatctttggctatttccttctctttctcaggcattgtggccatggtttctttggtggctgcagcagcttcttctgcggccatgttcagaagtattttatcaatattagagagtgcactttctaaatttgcatcatcagctgttgcagcttcagtaggtgctgcttcggcagctgtagtgctctcgacagctggtgtctttggcgc

SEQ ID NO: 74278 - DNA, 391 bp, Zea mays
tgccagagcttgaaccgaggacccctgccaccttaattgcgcaatcgtgctcgccggagttcggagccccgccggcgcacgtggaccgggtgagtctctgcgccattttccaattcactgcatgcatggtctctacgtcacctcagggagctcccgtgccattggattgaccggaatagctgtggataggacgaaacagtcgccgccgacgagttcacccgcctgcgcacgtggaccggccgattccgaccaccaccgtcgtcgagccgtacctcgctgtgaccgcaagaacctcccggagccaaccccggccctcgccggacctctctcgcctgcggtaagccgcgcacgcctatttacttccgcgggtactgttttcataaggggaggg

SEQ ID NO: 74279 - DNA, 427 bp, Zea mays
agcttgtagtctgtgttaaggttaatactgtattcatcaatatttccgtattggccaatacttctgaatgtctctgcgtaaggattttcccttagcaagtttgctaatttggtcatcacattctgatctttagctttgaagacttcgtcacgcgcaagacgcattcgatgcgataaaagaggatcatcatcgtagaagtacaactccatgtgttttggatcactttctcgacgaccaaaagagtgtatccggtgatatacctgaccatgtgctttgaatgtataaacaacatctcttgaacttgcaagattttggtcatactcgcagttgaatgtggtgaatgaaaagtgaccattaaaaaacctagtgttatccaaaaaatgttgtgaatcagcgtccctagttgtgtacaacaggtgaagctctt

SEQ ID NO: 74280 - DNA, 457 bp, Zea mays
  unsure (1)..(457): unsure at all n locations
nntaagctcttgacaataaaattacttcaccctgtttatacaaagagtaagaatgaatgtttgagaagttaaactaggtatgaagcagggtttaatgcatgaacatgctttctcttccttttatacaagatatgcaaggaatgtaggaagatttaggtacatgtatgaataaaattgaatagttttacccttttgtacctttacatagtgatgctctcttcattgtgctttgtccttagtcttattgaattcgcctaagacctataatcaagacaatgtatgaaaatattttgcacaagagagagttctacaactagtgatccttctctaagtcattgttttagatatcaagtagatcacaaattgcataaatatatcatgaattatccttttaacttagtgcatatcaagatagatgtcgattgaaataccaattgacatcaggttgaaattacat

SEQ ID NO: 74281 - DNA, 415 bp, Zea mays
agcttgccaatacttgtcaaagtttattatctgccagcacagcaactgcagaccataccagtgacttggcctttcacatgctggggactggatatgattggaccttttaagaaagctcaagggggatacactcatgtattggtggcgattgacaaattcactaaatggatagagttcaagcccattgcctctttaacctctgctaaggccgtggaattcatacaagacataatattcagatttgggataccaaacagcatcataactgacttaggatccaacttcacaagttcagaattcttcgacttctgcgagcaaaagagcattcagatcaagtatgcatctgtagcacatccaagagccaacggacaggttgagcgagccaacggaatgatattggaggcactcatgaaaa

SEQ ID NO: 74282 - DNA, 461 bp, Zea mays
  unsure (1)..(461): unsure at all n locations
tgtccctttcaattcattcattcatgagaacaacaatgtttcaggctgtaatatggtagttcggtgacaagacaacagataaagaaatgagttgttaacagggaaaagaagatagaaacaagacacaaagaaaaaccgaatgtcatgtcaaaatttattacagtataaaacacaaaacgtagctaatttaagaattaccatgtgtcacctgttttgtttggtgagtgtatgggcctatgtgtattgccttgttatcgattataacacacctaaatcacaagcaaataggcgattacaaaaatctgcacaaaccaaaccagagtatgataggcctgataggccaaagaacatactaacgtgaaatagcaaataaaaaaaatcgagcctagtactcttactctatctgttccaaaatgcaatctatntatgtttgttctaagtcaaacttctcttgatttgac

SEQ ID NO: 74283 - DNA, 387 bp, Zea mays
  unsure (1)..(387): unsure at all n locations
agctntgacttaaaagacacattattgttcatttggatcatgattgtctcttgagcatattttcaacaccacttacgtatgaagaaggcctataacattggcccttgcaaaggaatccttgtgaggttaacttaattcataaaacaaatattctacttctaacaattagatcttaagattataattagttgtacaaaatttaagttagggtgttacaatatagccacatactaataaagacaaggacaatacttggcttggtacctttgccatatatctaagagcttgtattttcagtgctctggcacagagctgaaaaacttctcgtgacatgccttactagtagctaactattccaaccacttttgatttaaaagttcggatttg

SEQ ID NO: 74284 - DNA, 486 bp, Zea mays
  unsure (1)..(486): unsure at all n locations
tattacggaactataaaactaagctanacaggtttaaatctctaaagttctcctttatttatttatttattaaataaataaaacatacacctacattagttcatattcaatcctaaaaattagagtgtgcagacagtaagtgaaaccattttatttaaacagagaataattctatgaacattttgcaatttgaaccactaaatttggagttcatatgcaaaagttatgaaataaacaagtttgggaattcaaaatatgaaattagggctaattctgtgaatatttaaaagtccagggctaaatctgcaagattacaggggtctgcgcgcgaaaaccagggacggcgggttgatttcctaaaactagggggtttcttaagaaaaacagccacgcgaaggggtatcaggtgaatctaaccgttggatcagaaaccgacggccgagattagatcttgcggcgatggcacgcgcgctggcgggtgagcgc

SEQ ID NO: 74285 - DNA, 434 bp, Zea mays
agcttgacaatgaggagatggctctcgttatcaagagcttccgccaaatcctcaaacaaaggagggggaaagactacaagtcccgctccaagaaggtttgctacaaatgtggtaagctcggtcattttattgctaaatgtcctatatcaagtgacagtgaccgaggcgacgactagaaggggagaagaaaggagaagaagaggtattacaagaagaagggcggcgatgcccatgtttgtcgggagtgggactccgacgagagctcgagcgactcctccgacgacgaggacgccgccaacatcgccgtcaccaagggacttctcttccccaacgtcggccacaagtgcctcatggcaaaggacggcaaaaagaaggttaaatctaaatcctccactaaatatgaatcctctagtgatgataatgctagtgatgag

SEQ ID NO: 74286 - DNA, 468 bp, Zea mays
  unsure (1)..(468): unsure at all n locations
tgtgaagattcttgatcccaacatgggctagtcggcgatgccaaagccaacccatattagtcttagcaattaagcaaatgtcgagttcagctctattgaaatcaactaagtatagctgaccctctatcactcccttaaatgctactgaatcgtcacttcttctaaagacagtaacacctatatccgtaaaaagacagttgtaacccattttgcataattgagaaactgaaagcaagttgtaatctaaagaatctataagaaaaacattagaaatagaatggtcaggtgatatagcaattttaccaagtcctttgaccaaaccttgatttccgtccccgaatgtgatagctcgttggggatcttggtttttctcataggagaacatactnttctcccgagtcatgtggtttgtgcacccgctatcaatgatccaacttgagcccccggatgcataaacctacaaaacaa

SEQ ID NO: 74287 - DNA, 419 bp, Zea mays
  unsure (1)..(419): unsure at all n locations
agcttcccccagtgcttacaggctcacttcgccaaacggcgaggacctagagcactcctggaacgtcgacaaccttcgcaaattttttgtttgacccatttagggccgatttcgcccttgtaattcgccacaaacaatcttgtaccggcccgcactcttttcctcccggggggtgaggtttttaacgaggcggagccatgtaatatacgtgagaaaaaatcccccacaaaagcatgtcgaaaaaagaccgcaacaacggtcttcggcattcgaccaattcgaagtcaccgcgaggctaagcgctagccaccctcgcgtgcgaccaatccgcgcagaagtcgcctaagggtgcagccggacttagcacaacaagtgcgcaaaanacgaagtctatcgcgaagactatccgcgcagaagtc

SEQ ID NO: 74288 - DNA, 360 bp, Zea mays
  unsure (1)..(360): unsure at all n locations
tggtatggaactagtgtaaaatacatttggttttcgttgtgtggcaactagcatgccgtatgtaattcgtaaaccaaaatggtacatcagctctgtggtttgatgtccaatagcttaatgtatttctgcaagagttgttgaaaatgttttgccgcggtaagaggttaatgaaaactttatctcgaaatacaaactacttgtatcgntgttcaattaataatatgtgttcatgctagattgtacgtgcctttcttcttatttgattttgtcgagttcactaatgctagagattcattngatttcttgttttgatctctgtatcttgcattgtggtacagggcggatgacgatgtcactgat

SEQ ID NO: 74289 - DNA, 218 bp, Zea mays
  unsure (1)..(218): unsure at all n locations
agcttgtgaacagtacaaattcataatgttataaagcagcttcagcagaccagccgaagcctatgctcttatgtgaggacataacagaacagaaggtgctgttaggctctcaattatccgaagagcaagagaaaaccttgataagggttttgttcaataacaaggatggttttgcatggtcagccaatgatctctgcggangtaatagagatgttatc

SEQ ID NO: 74290 - DNA, 363 bp, Zea mays
  unsure (1)..(363): unsure at all n locations
tatcatgcattccatctttgatgtgcacgatcgtgttttgtacttganatngattcatagagtggcaacgatgctgctgctcagtaacacaacagaacacttggcatgtataagttcttcccattacatgtcttgattcgtccttctaaaagaatatattgtagcatttttctcatgccaactatgcctcaagctgagaattagtagcatgctacgcaaattattctacgaattatttctatgtgttgcttgtattcatatagtgcactaacattttatcgaataatttgtgcgcccctgccttttcctccctcctcccccgccacataacggagcttcaattttgtcggacgctgcgccata

SEQ ID NO: 74291 - DNA, 431 bp, Zea mays
  unsure (1)..(431): unsure at all n locations
agctngaatagcacaagataagtgagagtgtggatgtttacccgacatatgaagctgagagcctgagacataattttaaattgaactgtgtaaagaattaaggaatacctgaaattctattcgacctagaacagaatatatgaaattagagtagtttgcttagaaacgtggacaatctttatgaacgagaggaggctctaaacaagtaatttgtgtgttaaacattgtttcgtttagttaaaatatgtcccattcagaaaactatatatgactttcatgttacaagaatgagactttaataaggttagaaacaattcaacctgcaaagtatgcccaccacgttgaggtcctcctccctgcgagcacctcctttagcaatatcttgtccacgcgagcagaggtatataaggtagacattgaanaagagttat

SEQ ID NO: 74292 - DNA, 423 bp, Zea mays
  unsure (1)..(423): unsure at all n locations
nntgacatcggtttgtcgcggagtgtgcagtgagacaaaccaaacttggcgccggtctatctcctaacctagggcgtatcctcccttggaactcacatgaaataggtagctctaggtgcagggaagagatctttcacagtcgacatggcgagattcgtacgcttggccgctcagcagagcgaagaacacgggcagaagcaacgcgccacgtgttcgacgcgttctgccgcgccagagcacgcccgcgcgcgccctcgcgagccccgcgccgcgcccgagccaaagccagcgccctggtccgcgtccgcgcctataaaagcctcccgagcgtcgaccttacccgttcgcacccacccgaccctcgccggagtttgtttcgccgtcgttggcccgtgcgcagncgtccgcggtcacccagtcccc

SEQ ID NO: 74293 - DNA, 428 bp, Zea mays
  unsure (1)..(428): unsure at all n locations
agctntaaaactaaagactcagggaatcttagcgcgcaagagctaaaaattgagtaagcgggagtggttggccagaaagcgtgcaaaatgagtttgcggtatggccatatttatacgctcggtgcgttgaaagttgaaagaccccacttgtcattgaatgttgctattctagcaaagggaangtgttttttctgaccttcggcgtaaagccttcgtccatatcgcaatctaaatttattatttcaaacaaattaatattgcgaggggctactgttggggaccttcggcgtccgaaggtcctcaaaaacaggatttaacagtatttctgtagtacaatgtgtaaacaggtactctcggactaaagtcggcattgcagcaaaccgaaataatacaaagcttgatacagtgccgaatgtgttgagcaggaa

SEQ ID NO: 74294 - DNA, 439 bp, Zea mays
tcggcctgcggaggccgaaggttgaaatgaatgaagctgccgatgaatgccagagagccttcggagttatttgttcttttattggaacgagagatttggtccaagagcacattgccttcagagtatggccgctcgcggaaaaatgggaaatgccgcaagagaccataaaggaggctaacgaaggtggacttatcaggctgaagtatactttcaagttcggagataaattcgttgagccagatgatgactggctaaaaagcattgaaaatgtaagtgatgaactacttggggcttattcgaaggccgaagatactgcattatcagcagccttcggaggtcggaaaaagaaaagactgaaccgagtgtttgacgcaatcgggttcgtctaccctgactattcgtatcccattcgagggcagaaaagaaaaggcgcgacttc

SEQ ID NO: 74295 - DNA, 451 bp, Zea mays
  unsure (1)..(451): unsure at all n locations
ttgntccagtgcacacaggaccaagagtacctccagacttatgtctaaatgttcctgcgattgagagcccatgcgcctacagtgcccaacgagattgtcattgaggccatgatcaaggggctcataccaggaccaatggtacaatattttgcaaggaagccaccgcaaaccttggagaagcttctccaaaaaatggatgaatatatcagagctgacaatgattttcggcaaagaatggaagaagcttattgaaagggaaataggcttacaccttttcctaattgattttggtcggtgaattgcccaacacaaacaattgaactaactaagttgctctagattataagttntacaggtgccaaaggttcacaattgaccaatataatgaccaagaaagggttcaaacatagagagcataagacaaccgaagcgtgccctggtctggcgtacc

SEQ ID NO: 74296 - DNA, 434 bp, Zea mays
  unsure (1)..(434): unsure at all n locations
agcttctaaagggagaacacattntaagactaactcttgttcattttgagaaagacaggatttgtagcgcatgccaagccgggaagcaagttggcactcatcatccacacaagaacatcatgactagtgacaggccactggagctcctacacatggacctattcggcccgatcgcttacataagcatcggcgggagtaagtactgtctagttattgaggatgattattctcgcttcacttgggtattctttttacaggaaaaatctcatacccaagagaccttaaagggattcttaatacgggctcaaaatgagttcggcttgaggatcaagaaaattagaagcgacaacgggacggagttcaagaactctcaaattgaaggcttccttgaggaggagggcatcaagcatgagttctcttctccctacacccca

SEQ ID NO: 74297 - DNA, 456 bp, Zea mays
  unsure (1)..(456): unsure at all n locations
ntaccaaatggacgtgaagagtgccttcctcaacggaccgatcaaggaggaggtctatgtcgagcaacctcccggctttgaagatagtaagtaccctaaccatgtctataggctctctaaggcgctttatgggctcaagcaagccccaagagcatggtatgaatgccttagagatttccttattgctaatggcttcaaagtcggcaaggcagatcctactttattcactaaaactcttgacaaagatttgtttgtatgccaaatttatgttgatgatatcatatttgggtctactaacgaatctacatgtgaagaatttagtaggatcatgacaaagaaattcgagatgtcgattatgggggagttgaagtattttctaggattccaagtcaagcaactccaagagggcaccttcattagccaaacgaagtatactcaagacattctaagcaagtt

SEQ ID NO: 74298 - DNA, 422 bp, Zea mays
agcttcagctccatctatgttatggattgtctttgagtctgtccagtttccttcggcccttctggcagcttcctgacttccatgaatagcaatgggtccttggttcgaaggtatcttcatgcaaagatatgctggatgaagaattgcttcgaaggcattgagagtaccacgaccaatgattgcattgtaagggtattccatgtcaacaatatcgaacacaacttgttcagtccttgtgttgttgataaatccgaaggttactggcattgtgatttttccgagtgctacaatctgccttccttcgaagccacaaaggggatgtgtggcatcatggattttgtcttcgggctcttgcatctgtttgaaggccttagcaaatatgatattagctgcactgcctgtaccaaccaaaacattatgga

SEQ ID NO: 74299 - DNA, 478 bp, Zea mays
  unsure (1)..(478): unsure at all n locations
actcagcttctatccatagcaaccaatgaggaagacaaaggagggcacaccattgctttntctctttctgcggctaaggaaggcaaaggcggctacgactgataggctaaggtaaggtaataatcggcaggattccctcttatgttaatatatagggaccatcggattcaccgagggctgtgccgagcctctctgagttaaatctaggagcaggcttggtcacttcgaattccgcacgcacgggtgccgcaacggacgacccgtgggccgtcacgtcccatcacattaactcctgcgtgtgggtcgcatgtcctgtccggctgacgcaaggcaatgtgcgccgcttcacctccccgggtaagcgcatgaaaaggtgtgcctctctctcctttaccattcctccataggtagcaaggaagggacagtctctcaaactttcttccccgcgaaggaaataagacgaggccacttactgatc

SEQ ID NO: 74300 - DNA, 358 bp, Zea mays
  unsure (1)..(358): unsure at all n locations
agctntgtgtggaatatgggagatgattttatctcttgaatgtgtctagaattgaatgcctagctcttgtaagtggttggaagtgtgaacacttggatgcaatgaatggtgggtggttgggggtatttatagccccaaccaccaaactatccgtttggtggggctggctgtcgtatggtgcaccggacagtccggcgcacaccatacatgtccggtgcgccagccatgtcaccaaagccgttgggttctgaccattggagctctgtcttctgggcccgcctggatgttcggtggcgcaccctacatgtactgtatagtgtccggtgcgccaccatgggctgtccttccttctgcgcgc

SEQ ID NO: 74301 - DNA, 419 bp, Zea mays
  unsure (1)..(419): unsure at all n locations
acggaactataaaactcagcttatcgatttanagacacgttttcgcagaatagcttactagtagtggatccttatgccaaacttttacttcacaaattaagtatttttcctgaatttagatttgcctaatctagagcattcacttgtcctacactagcttcattttagcagctttagtttcacttgttatctacgatgcagggcagtgatccagtcttcatatccgagaagtaacggcgatccgaatcgattaatactcagctgaggatctccaaccacacgatatatgtagcacttaacccttgcatatgtcaactcgcccacgggtttctcaagaccagaacgggttcacgcgacccgagagcacagcactccaccatccagccattggccttggtggacacgttacttctcccatg

SEQ ID NO: 74302 - DNA, 427 bp, Zea mays
agcttctccaccatgtcgctgctagccatgttgttgcagctacctccatcaatgatcaaacgacatgaacgctccttaatgacacactttgtttgaaacaacgtatgtcgctgattctgctctgccttctccatttgtgcactaagcacacgctgtacaatgtggctctcataatgctctgcatcatctgcaccaatctgttcttcgggtggttccttagtgcctacatcatcagccgcaagcaaagcaagtgtagcttcatccaaatcactagcagaggaatacccaccatcgtcttttaccaccaaaacacgctgattaggacaataacgctgcacgtgtccatagcccttgcatcgataacacagaacatctcttgttctacctgtggaagctactgaagaggcactacctgcgggtttctggg

SEQ ID NO: 74303 - DNA, 459 bp, Zea mays
  unsure (1)..(459): unsure at all n locations
tctcanatttcgaatggacgacggatgtggtcttggcttattgtacatccaacctcggtccattacctatccctgtgttgattaacgtcaatatctagatgtcacatgaaaaaataaatgttcatgatagtgaaacaagatcatatcgagatgtacctagcacatgagacaaattttttttaaaatatccctaattaattgaatttaatccctaaatcatgaacgaattaatatgcatgaaaatgaaacaagattgcagcaatataggtaccttgaggtgagacaactctttataaaaaatctttaaattaattagatcaactacaagtccaaatgctggaattcctgaggttttcttcaattctggtctatattacaaaattgaggcaaaaaatcgtatccaaatgagaaagaaaacacacggagatcattatatgcataaactcttgaaatcaagcc

SEQ ID NO: 74304 - DNA, 440 bp, Zea mays
tcttcagaagatggatgagtacatccggactgataatgatttccgtcagagagaggaagaagcttataggttttctgagatgactaggggcttcggaggacaaatccaccctatgcatgtcagatcaatacataactccagtcagagtgatgatagaggaagtcagcttcaaaggccacaacatagttcacaatcctcagggcacaacaaagctctttcaggccaccagtcccaacgggcaaaggcggtaggtgtgggggatagatatcccccgggtccactaaaagagtaaaagacctcacgaaaggcccaagggcccaataaatcgtaaggtcattctttcgtgggcctggggagggacaattagcaaagcaaatcgacatgaggccggattgatgccagcccggacgacccacaacgtcgagcgagcgaccacaaca

SEQ ID NO: 74305 - DNA, 421 bp, Zea mays
agcttgagaggagcgttttcagtaagagttattgctgagtttctagacctttgagaagctttagaaggcagggtgctacagccctaggggtataagactggcatatatggaagtttgctgcttcaagtttcttttctataggttcagcagttcagcttatagtgctctctttacaggaacaattgagtttgaaccggctgaaagggtatggaagtcttgggctcctagaaagtgcaaatttttcatttgggtagttgagcatgacagatgttggacagccgatagactcgccaagcgaggtctcgaccatccagagaggtacttgttgtgtgatcaggctgttgaatcgatcaaccgttagctagttgggtgcgtctttgccaaacaattttggcttgagctcgtgaagattggatgctgg

SEQ ID NO: 74306 - DNA, 428 bp, Zea mays
  unsure (1)..(428): unsure at all n locations
tgngaagagaatgagaaggcataagcagataacaagtatgttgccaagttgtgttctctagttctttcacatatctagtcacttttgcatcttatagcaactattagttgtcatggtaaccttttttcttcattttttatctgagctaaattattctccaaacatctaaacacttaaacattctaagaaaatgcttatgtatttttttcattgatgtgcctaaaccctcgatcttttgtgactcagtggtacaccatgtttaagtgagcaagtaggtattaagaaaaaacatactatcaagcatgagcacaagcatatgatggccatgccttcatgttgttggatgatttcattagaaattatgtgtatctggtaacaaaaataaatcacaaaaccacacataatcaactaactaatccatatgtcac

SEQ ID NO: 74307 - DNA, 432 bp, Zea mays
agcttgtagacctgctcacactatctctaccgcaccgaagacgacttgccaccgcgtgccgctcgccatccgccaccggaacacaaggaccggccatcccgagccaccatcacacaatccgagcctgaggatagcaatcaagaaaaacaagaaaaatatagaatggctatttaaatatatgtgaccttggtacagtagaagattatagaatgactatttaaataagcaaaacaagaaaaatttagaaaatcataggaaattacccttgaaaagataaaccccaacctttgggaatgactgctctagtgctaaaaagaccctaagaaaatttctaaatctgttgtttgacacttttaaaagggcaagctagttgtaggtgtcttcctagccaaaaatttaacaaaatcttagataaaagaccactaagtatca

SEQ ID NO: 74308 - DNA, 462 bp, Zea mays
  unsure (1)..(462): unsure at all n locations
tgcactccggtacattggtccttttcctatccttgaaagatatggaccagtggcataccgactccagttacccaaaacattgtctgttgtgcataatgtgttccacgtatctcaattcaagaagtgtttttcggttccagatcgaaccgttgaagtgacagatgttgccttataaccagacttgacatacttagaacatcctattcgagtcttggatcaaaaggacaggattacccgaaggagaactctcaagtttttcaagatacagtggaaccaacacacggaagatgaagatacttgggaaactctagactttntagataagaatttccgaggctttttagcttcatgtaaattgcaaaatatgtacacttgttgtaataacggaataaaccccataccacccctgccttgtaccaaaaataaggaaataaagatatgatgtgtttccttttccattac

SEQ ID NO: 74309 - DNA, 421 bp, Zea mays
  unsure (1)..(421): unsure at all n locations
agcttggaggcgtcgattggttgtctacttggtgtanactcctccttcttctcctccgttgccttgaatgcaacgggttgggcttcggatgtggtggcatcgtcaagctcgttgatcttcctcgagccttcgatcatgcactcaaaacttacaaaattcccgataacttcctcgggggtcattttggtatatctaggattgccacggattaattgaacttgagtagggttaaggaaaataagtgatcttagaataaccttaaccacctcgtggtcatcccactttacgctcccgaggttgcgcgcttggttcaccaaggtcttgagccgattgtacatgtgttgtggctcctcccctttgcgaagccggaaccgaccgagctccccctcaatcgtttcccgcttggtgatcttggtgagct

SEQ ID NO: 74310 - DNA, 435 bp, Zea mays
  unsure (1)..(435): unsure at all n locations
tcagcgactggggctgcagcactgcatccgctggaccttaaccaggagaccgtctctctccgggaggcccgaaaccagaagaggaaggctgtcagcccgacgattcatgaggatgaactagaccaagagatcagggacatggagatgctacatcaacaggtgcagaggaagaaggagaagatggccaggctagctgagctgcagaggcagatagacgaagcttctgaagaagtccgtcatcttacccacgatgagcagaaccgaaggcctcaacaaaaagaccttcatcaggagggcttcttcaatgaagatgactggtatgataattntcatcatggaaattttggtttcgacgatgcttctcctctgtccgctgagctgcaggctacaccttggccttcgtcctataagccaccccagcnttcccatgtcgat

SEQ ID NO: 74311 - DNA, 424 bp, Zea mays
  unsure (1)..(424): unsure at all n locations
agcttctggcaaattgggcctgtgcgttagtgtctccagagcggaagcaaacaggcgtgagaaaatcggtatgggacgctggtatatggctgaagaacaaataaacaaaggagaaagaaaaaaaacagaagaggatgtgggaggggatatggggcatgcatgtgctggctttggagagcatgcagccaagtgatcacgtcatggctgaggtgaggcttcaccctttatttatttttgtttcctcttcttcttttctttttattatttctctattttctgttttcatattccaatcttaattttaaatcaggtttaaattcaaatttcgaattaaatgtaaatggagttcagacttcaaatctatttagatgcacaaccaaaaactctagcatgtaatattattggttgtctttntttatatcaa

SEQ ID NO: 74312 - DNA, 363 bp, Zea mays
  unsure (1)..(363): unsure at all n locations
ntatcaaatggacataaaaagtgccttcctcaacggaccaatcaaggaagaggtctatgttgagcaacctcccggctttgaagatagtgagtatcctaaccatgtgtataaactctctaaggcgatttatgggctcaagcaagccccaagagcatggtatgaatgcctaagagattttcttataactaatggcttcaaagtcggaaaggccgatcctactttattcactaaaactcttgacaatgatttgtttgtatgctaaatttatgttgatgatattatatttgggtctactaacgaatctacatgtgaggaatttagtaggatcatgacacagaaattcgagatatcgatgatgggaga

SEQ ID NO: 74313 - DNA, 427 bp, Zea mays
agcttgcacacatagctcatttgaatacctttgatcatatctcttttatatgctatgactaatgtgctttcaagtttatttcaaaccaagtcataagtatattgaaagggaattggagtcttcggcgaagacaaaggcttccactccgtaactcatacttcgccaccactccgaacaactctctcttctttgggggagaaatgagcatcaaggaaaaggacttcctccttgggggagagagtaaaagctcaaacgcaaaaggatttcgtctttggtataatcttaactcacttatttatgaccaaaggggaagattgcacttcaagggctctaatgattccgtttttggcgattcatgccaaaaagggggagaaatgagcccaaagcaaaaggaccgcaccaccaccaccaaattcaaaaacttagt

SEQ ID NO: 74314 - DNA, 468 bp, Zea mays
tgcaagagacacctaaatgtgtggtgatccttgcggtgtcttagtgacccgtgagattaagaagaagcactcaaccgatctaagtgaccgattgagagaggaaaagggttgggatagacccggcctttgtggcctcctcaacggggactagtgaaagggaaatgtgcccttgggccatttctaagtattttggtgattaagtgccaacacaaatggtctaagtgttaaactgtgccaaatggtgaatgaagtgcaaatcaacacaaaggtatgattctagacttagtacattgttttttgtgtactaacatatttgtctaagtgctagaatcagagaaaagacaaaaggaaaaaggacttggctgtgcagccaagactctgcgcagtcttggtgcaccggacagtgtccggtgcgccaggctggctttggtcaaactagccgctctcgggatttcgtcggcggcgtac

SEQ ID NO: 74315 - DNA, 430 bp, Zea mays
  unsure (1)..(430): unsure at all n locations
agcttcctcgtcccattccatccggcacgaggaatagaagatcagaccacattgccatctctacctctagctgtagaccacgaccatccgcaacatccgctggtctagcgtgtcgcccacatgtaggggtgataatgagctctaaattttacaatataagatttaagaatcaggtaggattagaatcagaccatatttctattcatttttaaactaaaatttatttagggtcctaccatttcgtgaagaagcatttgtatggcgatacattaccacccctacccacaccacttatcacccacccaccaaaaccaccattgcccgatcattctcacgacaccaattcgtatgctgcacatagaatcttcacatgcaattntaaaattgatttagtagtttggcaaagaaccgcanaatttgttaggtgttc

SEQ ID NO: 74316 - DNA, 430 bp, Zea mays
  unsure (1)..(430): unsure at all n locations
ntctcgactaagtcggagatagggcctcatggacgggcgaaagtacgcgtaagcggcaaggccgaccgagccgagggactcccacgcctctgggatacggatacctcactcgtcaccttccgcgagaagcaactctcgcccacgcaaatatccctgttaccgacggaaagtccagatgctcgaaataagaggaaagaagacgcggctttacaatgcagcgagggtgtgttttctggcctcggcgaccgcagaaggcacacgctacaagacaatctgatcctgcaggctcgggtcttcacgctgaagggggccgtaacaccctcggcatcgacgacgtcttcagcaaggtccgacccagcctcggatggcgacgcggtccagggacttctccgggaatccggcccgagcaggcggctcggccggctacccc

SEQ ID NO: 74317 - DNA, 417 bp, Zea mays
  unsure (1)..(417): unsure at all n locations
agctngcagagaagttgttactcagtggcaaagttattttagagataaangaatgagacagaataactgttgtgaatgtttattgtccatttgatcatctgcaagttgtcttccaatatattatcacctcaaaaatcctgtgggaaaaataatgtcggcgtttcgagaccggggggtccctaagccgacgagtgaatgtcgccgcatgccccagcctagatgggtcgacgcgaggccgagcgcgaaggggggaagtgaggtggccggagacaggcgtgagagaggtggaaatcccgcggccttcgtgttcgtcccgcgcccaggtcaagtgcgctngcagtatggggttacaagcgtccacgcaggagagggagcgagcggcttcaagcgagcgcctgtctcgtccctcgtcccgcg

SEQ ID NO: 74318 - DNA, 459 bp, Zea mays
tcttgataatcttgtgagaaatggagggtggagagatactagcacagcatgagcatttttcccaatcccagagcagcttttaagacccctggccttctcctgaagtctagcactccttttgacctcagtgtcgacaatgattggctatttcttcctgttgacggattcagcaggtaagggggactgtggctccacatgggaatcctgactaggagggggcaggcacttggagggaatcttgatcgagacagtttccatgctgggctcaacgaaggcagagatagcaccagacaataaaaatttcttggcccattcaaaggagtccggcctcaacagcaagcccatgaagaaagcagcccacacctttggaacaagaactaagtctgagttggtggggaacaaatcagcccaagaagaaaggcgctttctagccaggtagtcttcatatgcaagatcatg

SEQ ID NO: 74319 - DNA, 434 bp, Zea mays
agcttgtggcgccctcaagcgtcttgttttattttaagtaccaagtctcccacttggaagcctcgaggccgaacccttcgggcgtggtagcgtcgcagagactgctggtaccacgccgagtgtaataaggctacgtcccgagcctcttccagctagtccaatgaatcctctcggctggtctggttgttttggtcgtcgtatgcctttttccttggggaaccgtattccaagttcgtgggtaagatggcctcggccccatagactaggaaaaatggcgagaaactcgtgacctggctcggcgtcgtcctcagactccaaactaccgagggtagctcttttatccaccgcttgccgaacttgttgaggtcgttgtaaatcctcggttttagtccctacaaaatcatgccattggcgcgctccacctgcagggggag

SEQ ID NO: 74320 - DNA, 462 bp, Zea mays
ggacctataaaactcagcttattttcttgtcacctgaacaccactccccgatggatttggaaggatgggaggatggagtgcgtagaagttcccaatagcagctgctgccgttctgaagcactctttctcatcatcccaggtaacctattttaagattgaaattactaaaagaatcagggttgccagaacgaggactgcatcatccaaaaaaatgccacgagggaggcttatcagggctcaaacaaagaaacaagttaaataataacttatgttcagatacttatataggaaaagctaattaaatttcattagctgaaacagttatgcaatgaatcacttgccatctcgatagtgagtgtatagtctagcactctaattccacgatccaattttaaagtagcacacataatgaacttgacttaataagagaaaacctacatcattccccatagtcaaaacaaa

SEQ ID NO: 74321 - DNA, 437 bp, Zea mays
  unsure (1)..(437): unsure at all n locations
agcttggtcattntattgctaactgtccttaaaatgatagtgaccaggagcaagggaaaaatgggaagagagagaacaagatggtttacaagaaggccaaaggcgaagcacaccttggaaaggagtgggattcggattgctcttcgtccgactccgacgacgaaagactcgccaccactgccttcaacaaatcggctctcttccccaacgagcatcacacttgcctcatggcaagggaaaagaaagtaatcactcataatgctaatacttatgattcttctagtgatgatgaatctagtgaggatgaaattgattactctagtttattcaagggattggatagaactaagatagctaagattaatgagttgattgatgccttaaatgaaaaggatagaatcttagagaaacaagaagaccttttatatgaagaacat

SEQ ID NO: 74322 - DNA, 433 bp, Zea mays
  unsure (1)..(433): unsure at all n locations
ntacctagttgcatttgcacaagaagaggccggtctatttgcatgctcaatggctaagacttgcatgggctggctgtggcatcgccgcttagcacatgtggggatgaataattattatatgcttctaatgggagaacatgtgataggtctaactaatgttcatttcgaaaaagatagaccttgtgcagcttgtcaagcagggaaacaagtgggaggctctcatcacaccaaaaatgtgatgacaacatcaagacccctggagctgctacatatggacctcttcggacccgtcgcctatctgagcataggaggaaagtagtatggtctagctattggtgatgacttttcccgcttcatttgggtgtctttttgacgataagtctgaaaccaagggaccttaagcgcttctaagagagctcatatgagtttgact

SEQ ID NO: 74323 - DNA, 419 bp, Zea mays
agcttgtgaaggttcttcatccttacatgtgctaaacggcgatgccacagccagcccatgcaagtcttagcaattaagcatgcatctagatcggcctcctcttttgcaaaatcaactaaataaagtttgtcgtctagtacacccttaaaagctagtgaaccatcacaccttctaacgacagacacatctacatttgtgaataaacaattatatcccatattgcataattgactaacggataacaaattatatccaagtgactcaactaaaaacacattagaaatagagtgctcggatgaaatagcaatcttccctaaccctttcaccttgccttggttcccatcaccgaatatgattgaatcttgggaatccttgttcttgacgtaagaggtgaacatcttcttctcccccgtcatgtg

SEQ ID NO: 74324 - DNA, 431 bp, Zea mays
tctaaagggagaacacattgtaggattaacaattgttcattctgagaaagacaggatttgtagcgcatgccaagcagggaagcaagttggagcccatcatccacacaagaacatcataacgaccgacaggccactggagctcctacacatggatctattcggcccgattgcttacataagcatcggcgggagtaagtactgtctagatattgcggatgattattctcgcttcacttgggtattctttttacaggaaaaatctcaaacccaagagaccttaaaaggattcttgagacgggctcaaaatgagttcggcttaaggatcaagaaaataagaagcgacaacgggacagagttcaagaactctcagattgaaggctttcttgaggaagagggcattaagcatgagttctcttcttcctacacccctc

SEQ ID NO: 74325 - DNA, 426 bp, Zea mays
agcttggcttgaccacacgagagcatcctcacccttatcacattcaatggtttaacaacagcggtaagttcaaggtaacaaaaacagcaagggtgcatttttctattgcctcttaccatgactttgctgatttcgatgtggtgactatggatgcttgctctcttttactgggacgtccttgggagtttcatactgatgctattcaccatggtagatctaataaatatactttcatgcataagggaaagaaaattgtgttgcttcctatgactcccactgaaattgtccactttgaacatgagaaaaagactaatgctaagcaaaaaggtgttttgaactctgaaaatcagcaacctattaagttaaaaactcctactttgctagccactagatctgatcttgatgagttacatgcctctgttggac

SEQ ID NO: 74326 - DNA, 356 bp, Zea mays
  unsure (1)..(356): unsure at all n locations
ntgtgtggagttgggagagggattgatctctctggtgttctttgtaatgaatgctagctcttgtaatgtggttggaagctggaaaacttggatgacttgaatgtgggggtggttggggtatttatagccccaaccaccaaactagtcgtttggtggaggctgctgtcgcatggcgcaccggacagtccggtgcgccagccacgtcaccaggccgttgggttccgaccgttggagctctgacgtgtgggcccgcctggctgtccggtggtgcaccggataggccctgtatgctgtctggtgtgcccccgcgcgtgctcttacttctgcgcgcgcgccagtgtaattaatgcgcctgc

SEQ ID NO: 74327 - DNA, 431 bp, Zea mays
agcttacataagaataagatttgaagcttttattttgaattagaatgctccccctaaatatgtgcttacttcaagaacctaattttggcctcagacgccaatttgcacatacttaggcaattcgaaacatttctccaccttagcactttttaggatgcaatgtgtcaagattcaaaccatgatgctataacacacaaatgcgcataatcagagttaaacaccacacaggaatatcaacctaccactattcatcattaagataccaattcaaactaataccaatttaaactaagacactaatttaagacaatcttaaagcaccattaaccacatgactatctattacactatagaagccaaataattcatcgcagcggaaacactagtccatatgagcaacacatataatattgtaagaaacatacgattat

SEQ ID NO: 74328 - DNA, 453 bp, Zea mays
aggacattcctgagatatagaaaggattttcttcacgaagcatgaagagaagggaaggcgctttttcgccgaaggctcaaaaagcggtatgtatgcaaaggttcatgcatcgtaaagaattaaactataaatagattatatattacatttaaagttacaatatattacacatctttacgcttcaaatgtttctataatagcatttaatcctctttaagtactatctctgcaacttcgttcaatagttggatgacaaccttgtccataatggcttcagccatttttctaatttcatcgtcacccttcgggtgggggcccggaaatgtctcatcaggttctgggggaagaaaagatacggctatattactattacaaaccgagagcagagtctggaattataaattacagcataataaaaaccactaattaatacctaattgcccttcggggtct

SEQ ID NO: 74329 - DNA, 419 bp, Zea mays
agcttctgctttttgggtcgcatcgaatggtttatccccaggctgtgttcgattatggctcggctgactccgaccagatcgagggcagaccaggcgaagacatctttattcttggccaggcagcagagaagtttctcttcttcaagtgacgtgaggtcttcgctgatagttacagtctgcttgggcgtggcctgatcgagggggacagtcttggtcccgtcttggcactgcaactgtgccttgtcgtgctgcttgtcggttgggctagccggcgcaaggacttcgcgctgggtcgtgagacagtgtacatttctctgaccgggcacgaagtcccgctctatgttgcgcgccgtctgctggttgccgtatattgtgatggcgcccagcgggcctggtatcttcatacataggtacaaccc

SEQ ID NO: 74330 - DNA, 446 bp, Zea mays
  unsure (1)..(446): unsure at all n locations
tcggcatgacggcaganaagaggaaccgacttatagatgtatagccaaattagacctcgaagaattattatagagttattgataaatgtaaagggcattaatgtaattctacacgggctgcgtcccgcgcctataaatagatgaacagtactctcgtactgttcacgctgacttagcattcgctttttgtatcacgcctgtacctttgctttccgtcaattcgaaggtacatttataatttgttattacaaatatgataatgcaaataaaaacaagttgatgataatatttgtattattattcgtatttcatgtatgaattctttnttatcatctatcgagctcacgaagggtttttccttcataaccttcatccaaaattcattatatccaaagggacctaatgtctttgaagacgaaagactttaacatttaacancttttatg

SEQ ID NO: 74331 - DNA, 433 bp, Zea mays
  unsure (1)..(433): unsure at all n locations
agcttcacccaaacattgtgagcaattattattttgggcaaaggaggctaaaccctagacccttaaagcactagacttccaagcaagagattagtgggcaagctaatcaaatggccaattcttgtttctgatccttaaccaagatttaagtacactaatgtatctacaaaaaacagtaaaggaatcattacaaaaaggccccttaaagaccccaaatccattccttaagtagagagcacactagagctctctaatcttctctaagtccaaaataaaccctagtttaaagatcaggcgtgttcacttagtaaatggcgccaaaaccacttggtctgaataccaaaaaggagccaaactacctaagtaacccactgaaaanaattgaacccgagccaaattcgttggacacgaaattgataccactttgtctcgg

SEQ ID NO: 74332 - DNA, 430 bp, Zea mays
ctgtcgtgaagaaagcataatgaggatgaacctaccgttatctacaaagccgaatatctgcacacccttgacatacactttgatgaccttttctcccattgcaaccacctaaactcccgggtagaaagcctatagcaacgaatcaaggacctgaaggaagagaatgcagccctccaaaactgtcttgagatggcagaaagcgatgaagccaacactctgtgtacggctgttgttacgattgataaacactgagtgttcctattgaaaagcagttgagctttttcagctgagttgaacttcttctgttgagttgatctttttagctgagctgaacttcttcaattgagttgagattcttcacatgagttgaacttcttcagttgaatcgagctttgtcaactgaagtaaactttaacttcaactgtgaaac

SEQ ID NO: 74333 - DNA, 422 bp, Zea mays
  unsure (1)..(422): unsure at all n locations
agcttgagttntcgccattggaactatttcttcgtttttcgcaacaaacatgcccaatccactactttaggtccaaaacaaattgtttgtggtggtttcacgcaatttcgttgccgcacgtcacccgttcagaaaacgggtgttggggtgcatacaaagcactagttttttttccaccggaaccatttctttttttttcgcaacgaacatgcccattccactactttaggtccaaaactcatgtttggggtggtttctcgcaatttcgttgccgcacgtcacccattccgaaaacgggtgtcgaggtgcatacaaagcacgagtcttcgccaccggaactatttcttctttttttgcaacgaacatgccctattcactactttatgtccaaaactcatgtttgggtggtttcgcgcaatttc

SEQ ID NO: 74334 - DNA, 396 bp, Zea mays
  unsure (1)..(396): unsure at all n locations
ntccagaatgtatntaaacttccaaatcggacatgatatgtatccgtggtggcaaaaacgaaccagagatgtttatggtgatggtggatctcgtggtgaccaaaacatggtagaactcaaaactctaaaggaataaactaagaccagcaactcgacacaaccgatgcaaccaaaaactcaacaagccctagctaagtagtactagtaaatgctcaatggtttataggattgcggtaaaactaatctactatttttttggctttttctggactataggagataagaaaacagcgaagaaaagtaaatctctcaccgataaaccttgctctgattaccaactgatgtgcacccgttgggtgattgcccgatctttcgatgagagggtgcggaataact

SEQ ID NO: 74335 - DNA, 425 bp, Zea mays
agcttgagccaattcttctgcaaaagattattgatgcccaaagaagtgataagggtatgaaacatattcatgagaaaataaaagccgataaagcaagttgttttagaaaggatgatcaaggcataatatggtttaataaccgcatagttgtgcccaggaatgacgaagtccgccagcaaattttagatgaagctcatcttagtcgatattccattcaccccgggagcactaagatgtatcaagttttaaaacaacattattggtggatgaagatgaagatcaaaattgcacgcttcgtggcgatatgtgacacctgtagacgtgtcaaagccatacatatgaagactgctggtccattgcaatctttacccatcccgacttggaaatgggaggacattaccatggacttcattgtgggattaccc

SEQ ID NO: 74336 - DNA, 407 bp, Zea mays
tacgcggccacggcaagaacgaactggaggctgaatgctccatggagataagaacggaagctgttaagcggttagaaaatcaaaggaagagacaaacgtgcgggagttgctcagtgccttgagaaaaatcccggcaacggatgaagataggagtggctgaaaggatattttcctagatgttcttttatttttcttttcttctctctttttttaaagagaattgcaaatattttggatcatgatttttagcgatgtacactgggtcgacacgctatacggctacacatttctttctatgaatcagcgaactaaattaatcactaattactcgctttcagttctaattacacttgtctggtttggttccgacttgaaactattttcgtcgaattcatatctggtattta

SEQ ID NO: 74337 - DNA, 430 bp, Zea mays
agcttatgtcaagtctgcaatggagtgttattgtatggatgtgactgtgcaagtaggatgatttatatcagaaaaaaatggggagattcagcaaggcatttgacatagtgattgccctaatatggattttttttttgttctaggggattccgtccttagtaaccgggaactgggaacttggccacgttcctcgttccgggaacgttcgttccgttctgggaacgtgggaacaatcttgttccagtagtgttaaatcctagtttttgtagcgttccgcgtaccacgttcccgttcctcgatcccatcgatccgggaacctggttactaagttccgtcagtgaaattagatgtcagtcaaatatgccaataccttttatttagaaaagggaatattgttaatattccagcttctgcatcgaccatcgataga

SEQ ID NO: 74338 - DNA, 482 bp, Zea mays
gacactataaaactcagcttggaatggcttgccgaagctacagaagctgcagggttgttgcccacatattctgctatgtagggagaatggcacgaagcagtatgtaggacctgcttcggctgattctgacgggcttgtgcttcggggatctctttttgtttttgaatggtgatctggcatgttcttgtcgtgtggcccttgtctccaccatagaataagcaatagatttttctgggctgatccccatatctacctccgaagcccctgccgcctctgccccttggagctggtggcctgaagaagctttgctgctgccctgaagactgtgagctgtgttgtggcctctgaaactagcctcctttgtcatcattctgactggagctgtggattgatctgatatgcctagggtggactcttcctccgaagcccctagtcatctcagaaaaacctgtagcttcctcccttctttggcggaagtcatt

SEQ ID NO: 74339 - DNA, 433 bp, Zea mays
agcttaatgccacaaaacttgattaggagttcttacaataaagccaagtggctagagaggagttcttgcaaaacataataaccacaaggagatcaacacagagaggcacagtggtttatcccgtggttcggccaagtccaacacttgcctactccacgttgtggcgtccaacggacgagggttgcactcaacccctctcaagcggtccaaagacccacttgaataccacggtgttttgctttgtttcactatgtcccgcttgcgaggaatctccacaacttggagcctctcgcccttacaatttgattatcacaaagaagcacggaagtaaggttgggatgagcaacacacacaagacacaaaatcagagcaacaatatgcagacaagtcacaacacgagctctcaacacaagctctagttgctatcaaaaag

SEQ ID NO: 74340 - DNA, 435 bp, Zea mays
agcttgttataagtatagaagaaaactgttgagggaagttccgaagcagaggcaggtaaagacccttcggcgcccagcagaggaaacactcataagaagcgtcgaatgatgaacatgatgagggccatccttgacacccctcctccagtgattcaaaaggaaattactcttgccatagctgacgaaggtgtccaacaagctgagaacagtggtggtccccttggtacaactatgttaggaatcgatagactcattgcgaacgttgcgcctgggaagaatactgaggggcagttgttgtagagacttcaacatcaaagggaaagagaaccgaggaagcctcttcggaagatagaggcttctatctttggcacctaagcgagcaacaacttttcaaagaggatatatccggactgaaagaaattgttataccttgcg

SEQ ID NO: 74341 - DNA, 458 bp, Zea mays
tgactgagacggcgatcacgacgaaggataagatgatcacgaagctatatgcagaagagcttcggcatcacagcgggaaggggaaaccgacttaaagatgaaaagccaaactagacctcgaagaattactatagggttattgataaatgtaaaggacattaatgtaattttgcatgggctgcgacccgtgcctataaatatgtgaacagtatccctgtactgttcacgctgacttggcattcacttttgcgccacgcctgtattttctttccttcaagccgaaggtacatttgtaatttatatttgcatacacaagtaatacagatggaaatatattaataataaagatgtttaccggaaatatgctattttctgttctttgttagaatgtttttcatcttttaccatgatcatgaaggtacatccttcatgaccttcgtcctaaattcgttatatcc

SEQ ID NO: 74342 - DNA, 430 bp, Zea mays
agcttgatgatagccacatgacggccacttcactctctggaatcctgtccttgctttttgattctttaagtttctctgcctccccttctgggattgatttggtgaaccttattttttttcctcatgaacactttgctagtgttgcagcgttgagcgaacttaatacacattgtcagcatcatgagaaattagctgggcagatttgaaatagaggattaagcttaagcactttgccaactgtcaacagccagttgctgttttgaagaaacctgaattctgaagcatatttaagcacttttcaggttggcatttgagctgataagagcctaatagcaggttttaccaagttctagtaacagctggttgtaagctggaaggatccaatactaaatcctctgttcactgaaaagctcagttctatacttatctg

SEQ ID NO: 74343 - DNA, 426 bp, Zea mays
  unsure (1)..(426): unsure at all n locations
nntgcaacttgggcaacattctgtgcgtccttgacgatcccaggctatgagaaaccgagtcataaagttttggaagtgagggcccttatgccgacgtggcatctcgagaagccctagtggaccacggtcattagttctctgccttcacgcttaacgatgcacttgaggagcggttggactgttcctttcttgtacaagttgtcatcgatgagggagtactgccggttgaaagggaaatggccttaaccattttctctaagatgattttggtgcttcatgaccatcacaaccttatggactaactagtttgcctagttgagtgttccacaggtgcataagttcatccatctcaattctaagtcaactgtatagaataacgtagattatttccgacaggatagctttntggagaaatcacttgcgtgc

SEQ ID NO: 74344 - DNA, 435 bp, Zea mays
  unsure (1)..(435): unsure at all n locations
agcttgagagctgactgagcagcatgatgtttgtttagtgctgcttatcaaagagaattctagcatcaccatttgccatctcatgaagtttctgcagtttgtctaccggtactggtaagcctaagccatccattttctccctgtacgccttcagacagcgatcaagaatggctttgttaaaaatttcaactagagaccctgttgatggaatttcgcctttattcaaagcctcaagaatctgaaacacaggagacaggaggaaaagttactaataattctaactgatcggatacatatcagcaaccacatcattaagtattttacctgctgcaagaaagacacaaagtccttcccatttagagttctgccctgcacaatttttggttntacaatagacgaaacaagctgctttaatagctcccgccgctatacata

SEQ ID NO: 74345 - DNA, 457 bp, Zea mays
  unsure (1)..(457): unsure at all n locations
tgattaatcttaatagntatatctagaagacattcaagcatggttctcaatattgaagaaatgattctcttaatggatgctcaatatgatgtgactcaagaatggcttgatatggtgaagatagcaaggaaagggcttcgaggaactaagcgaatgtgaaggccaagcgacggcttgtagaccgaggtaccatggctaatgtgaagaagagagtacttgcactaagtcgatgaactaatcagctatgaagagttacaacatgttgatgcatcagataggtgacttgaagccatgatttgaactcatataaggtgatatggtacaagtcacagggtttgatttgagtttgcttcaaaaagtgagacaaagatgtttgtgatccttattaagcaatgccatggagaaatcacacatgagacaccaatgactcaaggagtttacttcattttattttatt

SEQ ID NO: 74346 - DNA, 423 bp, Zea mays
agcttggtgccgatggagaaacttattttcttgaaatcttggctgtcgaactgcttgccgttgtcaactgttagctcggacggtactccgaagcggcaaacaatgttctgccagaagaatttttgggcagtctttgatgtgattgtggagacagccctcgcttcaatccatttggtgaagtattcgacggctacgaaggcgaacttaaggttcccctgagcggtgggcaggggcccgacaatgtccaggccccagcgctggagaggccatgtatgggcaatcagctttgtatattgcgaggggttgcctgaccgaggagagaacttctggcaggcttcgcaggaccttgtgacttgatttgcggcgcagatcattgcaggccagtaaaacccttgtcggatcaccttggcagccagggccctt

SEQ ID NO: 74347 - DNA, 307 bp, Zea mays
gagctagctccaatggatacccctccccgactcaagaggttgtgggatactgcagactctgatgctatgcactctcttgataacattaggttggtctacggccaattatctattacttccctatactgtcgcctcgatagcatgactactaatgtaaagggttctggggtatacaccgttcgagcacagggcatgatgaaccacaatatctagtcatttggtatggaaggtggggcagagcataaacaccttgagccttacttttattatgacaatcgccccctgcatcatccgacacgccttgcgg

SEQ ID NO: 74348 - DNA, 425 bp, Zea mays
agctaggacaatgtatcagctgtcgtgttgctatctctctccacatgatgaaattccagtccttcaaatttgtcttctagtttccggacagcagtgcagtattttcccatggaatcattcgagcaatcccattctttgtttatctgacttatgaccaccagagaatctccatataccatcagtctcttgatgcccagcgatatggcaatgttcagtccatgaatcagagcttcgtattctgctgcattgttggatgctggaaataacaattggagagcatatttgagttgttcacctccaggtgcaataaagaggatccctgcacctactccctgcagcttcaacgagccatcaaaatacatttgccatacttctgcagtttccgagttatccggcacctgttgctcggtccattctgatataaa

SEQ ID NO: 74349 - DNA, 467 bp, Zea mays
  unsure (1)..(467): unsure at all n locations
ctattacgtgacctatgaatactaagcttctnagggagaacacgtgataggttggactaacgtgctattcgaaaaagatagaccttgtgcagcttgtcaagcaggtaaacaagtgggaggagcacatcacagcaagaatatgatgaccacttcaagacccctggagctgctgcatatggacctcttcggacccgtcgcctatctgagcataggagggagtaagtatggtctagttattgttgatgactnttcccgcttcacttgggtgttctttttgcaggataagtctgaaacccaaaggaccctcaagcgcttcctcaggagagctcaaaatgagtttgagctcaaagtgaagaagataaggagcgacaacgggtccgagttcaagaaccttcaagtggaggagttccttgaggaggaagggatcaagcatgagttctctgctccctacacaccacagcaaaatg

SEQ ID NO: 74350 - DNA, 424 bp, Zea mays
  unsure (1)..(424): unsure at all n locations
agcttagtgtttcccaccatgcatatgttttatccttgatggngaattgtcaagtaccacacccttgtcctgatccatgtctgcgatgagcaggtgttaaatatatatatatacacacatacaactaatgtaatcgggcatccaatagtaacaaacatatattattgtcgttatgatctttttcctttctatagaggactggaataaaaatactagtactatacagtggcattatatttgtttgaacttgccatgttggcatttcctgtgaactttttggtcgattcagcacggcaagctgccagcagcctgaatgacgaagtacacacacatgagttcttttatttacaccttttttctatttcggtaagaggacaaatatattccagaataatggggtatagggtccaaccaaccaagtgcg

SEQ ID NO: 74351 - DNA, 448 bp, Zea mays
  unsure (1)..(448): unsure at all n locations
tctnagggagaacacgtgataggtttgactatacgtgcttttcgaaaaagatagaccttgtgcagcttgtcaagcaggtaaacaagtgggaggagcgcatcacagcaagaatgtgatgaccacttcaagacccctggagctgctgcatatggacctcttcggacctgtcgcctatctgagcataggagggagtatgtcacacccgggttttagggatccaaagcccgggcgcgaacataaacaccaggtgtgctgggaccaagtctcacacatatgatgcatagtggcacaggatcgaatgtcacatctttactatataacaggagttctatacaaaataattaaataattacatcatatgaggaaacgatccagcaacccaaagttgactgggagacgacggcctanacctcttacgaacacatcgcagcattcttcacgcgcctta

SEQ ID NO: 74352 - DNA, 427 bp, Zea mays
  unsure (1)..(427): unsure at all n locations
agctttntgttcagatttggggagtccatcctaatcaaggcatggtagaatgatttcactgagaaaatattgttctatggtcgtttctagcaaaatgagctgggctccgaacttagggtgatgttagcaacgcgaggaagtaatatgttccaagctactaacttattccctactagagccttgcgctatggaatatttgacgtggaggaactgagtatattagcaatagtggcctttttagttctgacgatattgtaaagacaatgatattggactctcaagggagtagatcctaactagatgtctttccagaatcggacctgatagtcgcctagagggggggtgaatagggcgaaactgaaatttacaaatataaacacaactaccagccgggttagcgttagaaatataaaggagtccacgagag

SEQ ID NO: 74353 - DNA, 353 bp, Zea mays
  unsure (1)..(353): unsure at all n locations
tncccgagctntcaatttgtcatccatgtcgtcggttgttcggaacgtgtttacccatccgatcgtccgcactgtctccgtggaccagatgatttaaagccccactggtgaaattgattgaggggaaatggacatgagggtccaatctggtgtctgccgcacgggagccctatctgttgcggtatccagccgacgtatgcttaccataattcggccccgtgctgttcaccgtcgtggacctcgggctacgaagaattataacatggggggttcttggtaactgttagcgacttatagaaatagtgcggtgaactcaggtcgggttatttaaaacaacatggggctctgtgcaa

SEQ ID NO: 74354 - DNA, 418 bp, Zea mays
agcttgtgaaggttcttcatccccacatgtgctaagcggcgatgccacagccagcccatgctagtcttagctattaagcatgcatctagaccggcctcttcttttgcaaaatcaactaaataaagtttgtcgtctaatacacccttaaaagctagtgaaccgtcacttcttctaaagacagacacatctacatttgtaaatagacagttataccccatgttgcataattgactaacagatagtaagttatatcccagagactcaactaaaaacacattagaaattgagtgctcatttgaaattgcaattttacctaacccttttaccttgccttgattcccatcaccgaatacaattgaatcttgggaatccttatttttgacgtaggaggaggaacatcttcttctccccgtcatat

SEQ ID NO: 74355 - DNA, 482 bp, Zea mays
attcggacctataaaactcagcttcgacatctttttacttcttctttgtgagcccctgtcgtccaatcagcgatgaagtctgctaacgcttgggactgagttgaggatctatgcacatagtcaatggtgaattcgttaagttctgcagcccatttcccaatccttccagtagcttctctattcctcataatgtccttcagtggctgtgacgaaggaataattatgtgatatgcttaaaaataatgccgaagcgttctggaggccattaacacagcatataacaccttttccaattctgtgtaatttttctttgacagactcaaaacttcggagacgaagtacactggagcttgctttttgacttgaccatctagcttctcatgtacaagtgccgcactcactgcagaatgtgaagctgtgacatataagagcaatggagcccctagcgaaggtggagttaacattggtaaatcaattaaata

SEQ ID NO: 74356 - DNA, 423 bp, Zea mays
  unsure (1)..(423): unsure at all n locations
agctnttattgtctcttattgtctctcttgtcaaaagttggcttcttgttgggagaagtattgattatgggaaatagggggagtttttgaaatctttgatcaatctcttttggaatgactctctttatacttcaacatgtgtgtttgacttagagatagagatttgagtttgatttgcaaaaacaaaccaagtggtggcaaaggatgatccatatatgccaaaattgaataaaaccaatttgagtttttatttaaagagattttgcacttgttctagttgctttatgttgtgttggcataaatcaccaaaaagggggagattgaaagggaaatgtgcccttgggccatttctatgtattttggtgattgagtgccaacacatgtgcttaattgggaatntatgtacaaggatgaacaaagtgt

SEQ ID NO: 74357 - DNA, 379 bp, Zea mays
  unsure (1)..(379): unsure at all n locations
tcttggctgtcgaactgtttgccgttgtcgacttgtagctcggacggtactccgaagcggcaaacgatgttctgccagaagaatttttgggcagtctttgatgtgattgtggaaacagccctcgcttcaatccatttggtgaagtattcgacagctacgaaggcgaacttaaggttcccctgagcggtgggcaggggcccgacgatgtccaggccccagcgctggagaggccatgtatgggcaatcagctttgtatatagcgaggggttgcctgaccgangggagaacttctggcaggcttcgcaggacctcgtgacccgatttgcggcgcagatcattgcgggccagtaaaacccttgacggatcaccttggcagcca

SEQ ID NO: 74358 - DNA, 423 bp, Zea mays
agcttgtgcaacccggaaccgtccgatcccatcctacggctccgatctaatcgcctaggaaacactcccaattctaatccaaccgcccacacatcatcctacggcccacctggcacccgccattttgtgacggggaacagtagcgacgccgctgcttacggcggagtttcgccggggccgcgggttttggcgaccccgggcttgattcgaagcataattaggtgataaacaatgcagaggaggtatcgaatcggtccaaggagcattaccgatggatgggaggctggatgaagctgtccacgcggcgtcgcggcgaacagggtctccggcgagaaatccccgtggacacagcaaggtactcctcgattgcccccctcccaccgcctctacaccgtcagtccgagttccgggtggccacgatgg

SEQ ID NO: 74359 - DNA, 417 bp, Zea mays
ttacgcgacgctatgcaatactcaagcttagctgatcagcgggctctggtctatgaaagctgatgtatagagacaacataatcgggtgcccgtactatacatttagtcaagcgtgatagttcagatgatgaatcccgctatgtatatatcggcgagcatgtttggcccatgaagaccaaaccttcttcatgtccttctttgcatccggttcaaaagaatcgacatgatgatcacttgacttttaatggtgctatatcccatagaatgtctgaccgactagtaataattgacagcgttgagttaacacatacaattcttcctatggatgaattactgagacacacttattgcaagtggctgatgaaggcaaacgcgaaaacatcgttgttggtgatcctcgcgcgttgaacatattgc

SEQ ID NO: 74360 - DNA, 262 bp, Zea mays
tctcttggtgcggaatgtatcacataagaatcaacggctccttgcattgagccactgcaatcccttgggcgctcactacatggtgaaactcaggtctttctacagactaaatactgcttacacgaatggtgtttatttcttgaaccacccaagacaactgcacgctatttcatttagaggagaaagcaccaattcattcgtgaggcataactgcataaagatgccgcaaaccaacactaaacacaccaaattatggacttta

SEQ ID NO: 74361 - DNA, 448 bp, Zea mays
  unsure (1)..(448): unsure at all n locations
ctgactcttgcattcaaacgaagctcaatcaggtgattgtcttttttgacaangaccttccgaagagaaggctattattntccaagagatttttcacgaaattctaaattatatggccatagtgcgctctactgctatagttgagcgcgagggagactataccgcactgtcggaaactgttcctatctttgaagcaatgaagcgatctggattgatgacatcataagacatccctgctgctgaagcacaacaatcagatattgacgaggcttgtactgacgatgtatacaatatcgcattaccgagcaagcctagtcatgtggacttcgggaagttgtaacaccctgatattgggggtgtaaaaattctttgctcatattcacaaatacaagtggtacttcctttatttcatccttcctaagtcttatatctcacatttctataagat

SEQ ID NO: 74362 - DNA, 425 bp, Zea mays
agcttcttggcaacaacctccgcctccatctttattactgcaaggacagcaaccagaagggagccagtatgctccacaccaaagggacttccgagagcagtccgaagctcgtacagtcaacagcaccgtgccagaatcaaagcacatctattgacaaatatcctaccctaatagcaatcttttctatccagttttgttttctgtaataaaggatattgtttaggtttcatataaatactttcgttgatttccacaaagaaaatatatttttctcaagcttaaattgttaaagtttaaagacttgtgataatcaagaggaccttcggactaccgaaaattattcgaaacagcaaaaaagtcgttctaaggaacgcagagtaagttgccgaagtcacaaaaaagtcgctccaaagggaacgcagtgt

SEQ ID NO: 74363 - DNA, 466 bp, Zea mays
tcttcgatagagagcaaagggctaataaccttccatgctcacgagattgataatgatacatgagaaaaggataatcgaatggcacgtgcctaacaacgaaccctacccgatgccaaacttggaagagattgtagtctttgctccattcctgatgcatgggttcggcctttctacctctaaattcttccatgatctcctccaatattagcaaatcaagttggtttatctgaattctaactccatcttatacattgccattttttcctatctatactaagcctatcttagcattccacctttctttccttcgtttcaacgcctcttcttgttatgcccttgcctaaacaaagatcaacccccaatggttgggagtgttaggattcaactctaagccaatcactaataccttgattgtgctcataaaacctctcacaaatacttacacatgtgttggttctatgatggc

SEQ ID NO: 74364 - DNA, 419 bp, Zea mays
agcttgtgaaggttcttcatccccacatgtgctattcggcgatgccacagccagcccatgcaagtcttagccattaagcatgcatctagaccggcctcttcttttgcaaaatcaactaaataaagtttgccgtctaatacacccttaaaagctagtgaaccatcacttcttctaaagacagacacatctatatttgtaaacagacagttatatcccatattgcacaattgactaacagatagtaaattatatcctagtgactctactaaaaacacattagagatagagtgctcattagaaattgcaattttacctaacccttttaccttgccttgattcccatcaccgaatatgattgaatcttgggaatccttattcttgacgtaggaggtgaacatcttcttctcccccgtcatatg

SEQ ID NO: 74365 - DNA, 447 bp, Zea mays
  unsure (1)..(447): unsure at all n locations
tcgcnaggtgaaccgaaatagagatttggagaatggtgttagggttcaagtgagtcaggttgatatgataaaaatcaaggatgccacggaaaaaaggagatatgggaaggccgaggccgcgaagaaggaaaggagtgtaaaccactgattcgtgggtatcttcggttgggacagtagtcccatggcaagagcgccaagaacagagttcccgtggagggagaaccccgatggaaacaaggcggagaagctcaacttcagaaatcacagacatatggttacctgcgaagggtaactgactgttgggatcgatggcggtgatcactgcagcagacgagttcgcggtcttcctcttgggcgccatcttgcttctcgctggcgaaacagagcaggaggcgagtggcagagatgactcagatgcggatatgcaagaactagggcacggatagc

SEQ ID NO: 74366 - DNA, 425 bp, Zea mays
  unsure (1)..(425): unsure at all n locations
agctntaggtgatttaaatagtagattgtattctttattaattgatataaatcttgtgagaatatatcacatgtgattaattaaactttcatctgtgttataactgtactagagtcatgttttagctagactgtagtcttaggttaatttcaaatgtcacattaaccttgactagaaaagtcaatgtgataaagaggtattttaattatttctgaaaaatactaaaataaatgtggttatcatgtagacaatacaaatatgaatctaatgcaatttgaatggattaaatcggagttgtaatgccaaagttctgaattttataagatttggtttggttttgtattaaaaatatatgttcatggatctgtttgtgagaaaatcgggacttgtgtgttattactagtgtaaatgggagggctcggatg

SEQ ID NO: 74367 - DNA, 476 bp, Zea mays
  unsure (1)..(476): unsure at all n locations
tgtccttttanatacaacatccttcaatcctctaaccatgtctttctttagaattntcttgagtgtgctcattccaacatgtgcaagccttctatgccatagccatccaagagataatttggtaaagaggcaagtccttatgtttgcatcttcggaagagaaataaactaagtataggttgttgtatctaaatcctttgaatatcactgactcatcatccatcttagacacaacaacctctgtaggagtgaataagcactaaaggccaagatcacaaagttgacccactgatagcatgttgaagcttattgatgcaacaaagagaacatttgagattgaaagatcatttgaaattgccaccttcccaagcccttgaacttttgcttttgaactgntcccaaaagcgattttatcttgttcatcaacatcttcatctagcgaggtcaacattcgtgggttgccagtcatatgttgag

SEQ ID NO: 74368 - DNA, 419 bp, Zea mays
agcttgtgaaggttcttcatccttacatgtgctaagcggcgatgccacaaccagcccatgctagtcttagcaattaagcatgcatctagaccggcctcttcttttgcaaaatcaactaagtaaagcttgccgtctaatacacccttaaaggctagtgaaccatcactttttctaaagacagacacatctacatttgtaaaaagacaattatatcccatattgcatagttgactaacagatagcaaattgtaaccaagagactcaactaaaaacacattggagatagagtgctcattagaaattgcaattttacctaacccttttaccttgccctgattcccatcatcgaatataattgaatcttgggaatccttattcttgacgtaagaggtgaacatcttcttctcccccgtcatatg

SEQ ID NO: 74369 - DNA, 409 bp, Zea mays
  unsure (1)..(409): unsure at all n locations
taataatgcacgtgtgtcatgttttgtatgtttttattgctctagntgattatgatataggagttccgtagttagtaatgcctatgtcgtattcaagctcacgttgtattggttggacttgtgtggtcggtgatgctcttgcgcgattaatatgagaactaataaaaagccgtatccaaataaataaaatgtgcgtgtacttgccatatcgtatttgtgttgcgtaaataaataaaatgtggccgtcgtgttaatggtgttaatgatgaacgccgataacataccaatagctagcgcttgcgtataagtcgtgcggtgtcttacaattaaatgttagntgctaccatgtatttatatagcttgtgatatttttcattgaattcatacatatgcatcctgcatctcattt

SEQ ID NO: 74370 - DNA, 342 bp, Zea mays
cactgccttcatgcacagcgggagacctgtcccgccaccaacattaatggacctggcaacgataaaccgttgcggccttgcggcacaacaaacaattctaatattggatatcctaccgtcaaaatgctgccttacatgacagtaacaatataattaatgctgccttaaaccagtcatacaatgccaacatgaacagcctgactcatttcactcctggaacagaccatcatagcatcactgaagatcatcatctaatatttcgactgcagcgagaccatcccaatcagaatgatgaacgctgagcgggaacggcttcgccaccctgtcgacttgcctataata

SEQ ID NO: 74371 - DNA, 452 bp, Zea mays
tcctcccttctttgacgaaagtcattatcagcgcgaatgttttcatccatcttctgaagcaatttttccaaggtctgagggggtttcctggcgaagtattgggtcgaaggtcctggccgaagccccttgatcatggcctcaatgacaatctcattgggcactattggcgcttgtgccctcaaacgcaagaaccttcgaacatacgcctgaaggtattcctcatgatcctgcgtgcactggaacaaagcttgagcagtaactggcttcgtctgaaacccttggaaactagtgatcagcatgtccttcagcttctgccatgatgtgattgttcctggccgaagagaggagtaccaagtttgtgcaacactttttactgccatgacgaaggatttcgccatgattgcagtggtgccaccatatgaatatatggttgcttcctaactcatcaaaaa

SEQ ID NO: 74372 - DNA, 428 bp, Zea mays
  unsure (1)..(428): unsure at all n locations
agcttgaggctgtgtatagattaccgtcttcttaatgcggtaactatcaagaacaagtatcctttgcctcgtattgatgttctttntgaccagttggtcggggccaaggtgttttccaaaatagaccttcgctccggctaccatcagatcaagatacgagcgagcgatattccgaagacggcattctcaaccagatatgggctatatgaatttttggtgatgtcattcgggctgacaaatgcaccagcatatttcatgtatctgatgaattctgttttcatgcctgaattggacaagttcgtagtggttttcatcgatgatattttggtgtactcaaagaacgaagaagaacatgccgggcatttgcatgtagtgcttcaacgtctgtgagagcaccacctttatgccaagttatccaagtgtgattt

SEQ ID NO: 74373 - DNA, 408 bp, Zea mays
  unsure (1)..(408): unsure at all n locations
actcagcttgtaccnctactacaagcaccccggtgcaagataatataatcctcatcctccctcttgtgttcctcttgcatcaatccatccgggcagggacacgcagcataaaattcactagtcggttgagggtccccgcgggtccaaaacaccgacatttggcgctcgaggtaggggggcagctacgtgttgacaatactttcccgttaagttccagatggacaatcttcagcagcctcttcagcccgggacagtgctccgctttgggagtctcgagttcatgtcccctgacgacagctacgacatgatactcctcctcccgcagcacgacagcaacgactgtcgtcggcccgccccgcggaggcgaacncgacgacgacatctctccggngtggaagaggaacactc

SEQ ID NO: 74374 - DNA, 430 bp, Zea mays
agcttgttcaaaagatggatgagtacattctgtctgataatgatttccgccagagaaaggaagaagcctataggttttctgaaatgactaggggcttcggaggaacaatccaccctaggcatgtcagatcaatccataactccagccagagtgatgatagaggaagccagcttcaaaggccacaacacagctcccaatcctcaggacaacagcaaagctctttcaagccaccagccccaaggggcaggggcgacaggggcttaagaggaaggtatgaggatcagcccacaaagctctattgcttattctgtggtgaagacaagggccacactacaagaacatgccaggtcaccattcagaagcaaaaggagattgtcgaagcagaggcgcgacagaatcagccgaagcaggtcttacatactactttatg

SEQ ID NO: 74375 - DNA, 415 bp, Zea mays
  unsure (1)..(415): unsure at all n locations
ntgtgaaaccaatactcttcgacagagtaccgataaccttcgctccggtttggtctcggggacaacctaagctttcatcgtcaataccgccgaagagtagcgcctctggttgatacccgcaggttatggcatagtctctcaattcttctttctcagcctttgacaattcttgtccaattaagttttgaaagttgaaattttcttcttctgaagtatcttcggctatttccttctctttcccaggcactgtggccatggtctctntggcggctgtagcagcttcttctgcggccatgttcagaagtattttatcaatatcagagagtgtgctttctagatttgcatcttcggcagttacagcttcagtaggtgcagcttcggtacctgtagcgctctcgacagctggcgcctttga

SEQ ID NO: 74376 - DNA, 429 bp, Zea mays
  unsure (1)..(429): unsure at all n locations
agcttcggcttcatctatattataaatagccttcgaatccgtccaactcccttcagccctcctggcagcttcttgactcccgtgtatagcaatggccccttgttccgaaagtatcttcatgcaaagatatgctggatgaagtattgcttcgaaggcattaagcgtccctcgaccaatgattgcattgtatggatactccatgtcaataatgtcaaagataacctgttttgttcttgtgttgtgaacatagccgaagataaccggcattgttatcttgccaagtgccacaatctaagtgcctccgaagccacaaagagggtgtgttgcgtcatgtatcttatcctctagctcttgcatttgcctgaaagcctttgcaaagatgatatcggcagcactgcctgtgtccaccangacattgtggaccagaaa

SEQ ID NO: 74377 - DNA, 455 bp, Zea mays
  unsure (1)..(455): unsure at all n locations
gtcacccnttttgtgtccaatccacccgtgactgatagctatntgggtcttagagagcgaccttctgccgaggaagtccgtgctctggttgcttcgctcggggcaatttctgatgatgaacggcaggtttatttcgatgtgcctctgaaccccagtgatgctgacataaatgatatgctcgatctgctagctgaggattcatccgatgttgctcccgatggtacattggcagtggtgccccttccagaggttgatgcgaccttggatgtcccaaaacctgtcagtactcgcccgaggcgccctatccgaaccagtcagcccgagccttctgctgatgagcagaataagaagagaagacgcctccggcgagtatccagctntgacgaggatgccagtaccttatctcctgctgccgagaaatgactgcaactggcttgctgacattgacccaatgg

SEQ ID NO: 74378 - DNA, 427 bp, Zea mays
  unsure (1)..(427): unsure at all n locations
agctnttcttctgtcactttcaatttcactcttctgctttggtgtccgatcgccactaaacagatataagatgtcaacttacagaagtaacaattatcttatagaagcaaaggaataatagtatccttactggcgtattacaacaattacacagcgcagttcttctgactgcccaaatgtaccaataattccacttccctgtcgtgtaagaccttcagtgggctgaactggttcagacttccaaggaagagttggagggatggttgatgaaagatgaggagcttttgcatcaagaaatatttttctcaagatgcaagcagcatcatcataatacctggatgacaagtttgttcaaacatttcagcacttattaaatcaaactgacaggtttcccaattaanaactgaacattaagaaaaatacttat

SEQ ID NO: 74379 - DNA, 441 bp, Zea mays
ctaaatgtgttgtcatcaatcaccaataagggggagattgaaagtgcattcatcccttttgtgagttttggtgatttggataacaacacatttaaaggtctaacaagtttgctaagtgttgaacaggaaattcagtatgatgaacatacttgaatagtgtataatgatcagtgaacaaggttcaacacaaggtcaaataaccagtgagacaatgcaaatggatataatatggtctctatattggtttgaatatatggacaagtcctgagaaatcactatgcataaatatgatcataatagaggttgaagtgattaagaggattggtcaagccaaagtgaataagatatgaggaatagtgaattggcttgaccatattactgtcagtccatatatgcttctatgagaatcaaactagagcttgattgatctttgatagtata

SEQ ID NO: 74380 - DNA, 156 bp, Zea mays
agcttgtgaaggttcttcatccccacatgtgctaagcggcgatgccacagccagcccatgctagtcttagcaattaagcatgcatctagaccggcctcctcttttgcaaaatcaactaagtaaaggttgtcgtctaatacacccttaaaagcttat

SEQ ID NO: 74381 - DNA, 460 bp, Zea mays
tcattagaccagctggacccactccgtcatggttcagtcaccagagtcagagctcctttcatgccccctcggttgcaagcaaccaaccaccagcgaatgtgtgttggcactgcggagaccccagtcacttcaagaacaactgcccccagttgaaggcatcaggacctgcttactccaactcggtgaatggccccaagaatacctcagcacccgcccccaaggcaccctcctccatcatccagcagaacaagacctagtatcaaggaagggcttgagtaaatcacgtcgatgctcaagaggctcagcaagctccgggagtagtgctcggtgagttccttgttgaatttactcccgctactgtacttttcgattcaggagcatcccattcttttatagccactagttttgtggaaaagcatggcatcccctctacccctctagagattcccttggtcacccg

SEQ ID NO: 74382 - DNA, 429 bp, Zea mays
agcttcatcccatttgaactctgtgcctttctttttagagaggtaagaggcttcactaacttggaaaaaccttcaataaatcttctatagtatcctgctaatccaagaaaatttctgatcttggacgcatctgtgggttgcttccaatttagtatctcacttatctttcctgggtccactttaattccaccatcggtaacaatatgccctaagaaagcaacttctttcaaccaaaaatcacacttcgagaattttgcgtacagttggttgtcacgaagcttttgtaggactagccttagatgatcttcatgtgtttcttcattcggagagtatatcagtatgtcgtcgatgaatacgaccacaaactgatccagatattccatgaatactttattcatcaagttcataaagtatgctggtgcattagtc

SEQ ID NO: 74383 - DNA, 451 bp, Zea mays
tcagaggacaactgcgtcgtcttgaaagctcagcgcgacatagctatggacaaagccattcacgctggacggatcttgatgaggaggcccgacgttgtggtgcctgacgatattgtcgccgatgtcaaggctgtgccctatgcttcgagtcatccttcctcttccggtgctcctgtgaaagacattgctaataaagacgtttcgatgcagtgatgtcttgtgaatcagtcgatgtaatatgaattctatgtgcacgtgatggtaatgttagaactcgaatattttgtgaacagggcgccagaacatgcccctggtgtcaacaagtaaaacattcttttttcctgaagcgctaattggcttgctgttagggtataacagtcaccctgaacaattgtgaaagcaagtgtgccatgcttggtttaagggcttttcggacttacactgatcacct

SEQ ID NO: 74384 - DNA, 423 bp, Zea mays
  unsure (1)..(423): unsure at all n locations
agctntggtgacagatccagtgcaccccaaggaaaccattctgcttgttttggggggaggacaaagtccacactacaagaacatgtcatcataccatcaacaagcagaaagagcttgcttcatcagccgtgcaaccttcatagtcaaaagaggtgttcagtacatcctcatgttgttcaccctacatcctgcaatatgtccaaccttagtcacaggaaccatggccaagtctaccttcggcctcaaacgcctcaagtaaccaagcgatgagtgcatggtcaccagctacctccttcgtcccaggaacacctccttatgatcaagtccctgttggtcaacccaagttcccaaaggaagactgagagcacctagaaggggggtgaataggtgatcctacgaaattaactctaaacaacacatact

SEQ ID NO: 74385 - DNA, 414 bp, Zea mays
  unsure (1)..(414): unsure at all n locations
ggtgaaggttcttcatccncacatgtgctaagcggcgatgccacagccagcccatgctagtcttagcaattaagcatgcatctagaccggcctcttcttttgcaaaatcaactaagtaaagctcgccgtctaatacacccttaaaggctagtgaaccatcacttcttctaaagacagacacatctacatttgtaaaaagacaattatatcccatattgcatagttgactaacagatagcgaattgtaaccaagagactcaactaaaaacacattggagatagagtgctcattagaaattgcaattttacctaacccttttaccttgccttgattcccatcaccgaatataattgaatcttgggaatccttattcttgacgtaagaggtgaacatcttcttctcccccgtcatat

SEQ ID NO: 74386 - DNA, 437 bp, Zea mays
  unsure (1)..(437): unsure at all n locations
agcttatagctntccctgtttaagagattgtatacttgtactccaagttactttggctatatatatgagagatcaccccccccctcattgggtgtggtgtcttcccaattctatctctctacacacaccatcaccccagtctttcaataggctacaagactttcctttctctagccagggtcaaaaagggagcgcatgttcctgactccagcagaaaaccacaatctcatctcgtctttgaatccgtcctctaaagtagaaaggctgggtcgagctccttcaaaaacacacctatttcgctgcttccaaatactccaagccccaaggattaccatactattaaacccctttcttttgcttttaagaatcttagttgaagcctttctccaccattcagcaaagtttgaatctcttctcttaagacccacagaagagag

SEQ ID NO: 74387 - DNA, 457 bp, Zea mays
actcagctatgcgtctaaggtacctgggtcttgcctcatggaggacctcgctgatgtagtagaccggcctctaaatggtttggacccctatagccggtctcgagccctcaggttcctggtcttcttgtgctgtcctctcgacgactagtaccatgctcaccgcttctacagccgccgcaacgtataaatacagcggctccccaggctctggggctaccagtattggtagggacaccaggtgttgtttcaactcttggaaggcttgttctgcctcttcggtccaagagaatggaccggacttccgtagcagcttgaagaaaggcagtgccctctcagccagccttgaaatgaagcggctaagtgtggctaatgaccctgcaagcttctggacgttcttgatacgggctaggggcctcattgcttcaatcgccttgattttctccgagtttgcctcaat

SEQ ID NO: 74388 - DNA, 422 bp, Zea mays
agcttaaccttgtaacaaagataagctgtctttgttccaaaagaggatggtccttaagcctctttgaaatccttaagggaaaatgcttaagacacttataacatgctttcataagtgcataaactgtcatgagcatcacacttatactaggacacaatgcacttcacattctgtatggtatagatatgttctcattaacctcattatgtgcaattggcatttcaaggccaaaatatgtattcctatcaaggcacatatttagggggagcaatctatattatatagaactatgatcatgcttaattgacatatctttttgaaagggaattagacttacacctagtccctaattaattttggtggttgaattgcccaacacaaatccttggactaactaatttgctctagtgtataagttgtac

SEQ ID NO: 74389 - DNA, 465 bp, Zea mays
  unsure (1)..(465): unsure at all n locations
actcagcttgaggtgtcgattgagggcccttgcttggagtggtctcctccttcttttcctccgntgccttgagtgcaatgggttggggctcgatggtggaggtggctccttgctccaagtttgcaatgtgtttggagtctttgaccataagttcaaagctcacaaactgtccaatcacctccccaggagacatcttctcgtacctacggctttcacggattaattgcacttgagtaggattacgaaagacaagtgaccttaggatgagcatgacgacttcgtggtcgtcccacttggtgctcccaaggttgcggacttggttcaccatcgtcttgagccggttgtacattgcttgtggctcttctcctttgttgagagtaaaccgaccgagttctccctcgatcgtttctctcttggtgatcttggtgacgcgatcaccttcatgcgccgtcttgaggacatccc

SEQ ID NO: 74390 - DNA, 429 bp, Zea mays
agcttcccctacacgccgatactacgcatatctcggatgtcaggacgcaagaagattgctccagcaacgaacattagtagctccaagtactacatctgttatgttcctgggcccacatgtcggggctcagtacccttgtacgtgcccccctttgttataaaaggggaggcatgcaacgttacaaaggaagttcacacactccaacactcacatagagacagacttatactctcagctctcaagcttccatagcaatccaacacacagtggagtagggtattacgctccggtggcctgaaccactctaaatcctcgcgtgttcctgagttcatcgtgcatctaccaacaggcaaaacgcttaagccccctcctcaccttaagatttagggcgggtgcactccgccacccggccggagaattccctctccg

SEQ ID NO: 74391 - DNA, 453 bp, Zea mays
  unsure (1)..(453): unsure at all n locations
ggcggtttagccaaaaccttgtttgcgtgcgattggtgtacctcgacgaagtaagtaatgaagagtaagatgtccctctttgttttccaactaatattaggcgatatatattgtaatgtgttgaatgttggtagagtttgttattcatgtgtagtggcgtgcacaagtgtgcgaatcggagaaataactgagttatgttgattggacgtgatgtgtaaattaaaaaattgtatgtttgtgtgtagggtgtactattgcacatgtatgtcgatgtattataatagtgattgcgttagagtcatttgaagtattttgaatgcatgccgaatatggttgcattcctaatagggaaagagtcatgttgtgcgatgaataggctacattgattttataggtcgtacgaaaatcgntctattaagtgtatacgtctagtgtgttaaaaagatcctatgt

SEQ ID NO: 74392 - DNA, 424 bp, Zea mays
  unsure (1)..(424): unsure at all n locations
agcttatctattgcatatattgttcttttgatcacatctgttatttgtttgatcattggatgaacacttatgtttcttagtgccgcatattctatcaatcaatatctcttgatatgcactaagttaaaaggagaattcatgatacatctatgcaatttgtgatccatttgatatatgcttacaatganttagaaaaggatcactagttgtagaactctctcttgtgcaaaatatttccatatattgtcttgagtataggtcttaagcgactaagactaaggacaaagcacaatgaagagagcatctctatgtgaaggtacaaaagggtaaaacaacttcctttcattntanatttgacctaaatcttccttttttatacattctttgcatatcttgtataaaaagaagagaaagcatgttcata

SEQ ID NO: 74393 - DNA, 420 bp, Zea mays
tgacaaaggaagtattcaggacctgtgatgagatgcataagcactaactgttttgaaattagttgaaaaaatagattaagcaagacagaaaaataaatatcaataccccaagccgcttcttatccgctctgctcaagtaaaaattgttgcaagatcgatggcaactatcttaatcttggagctggttaatcttgtcttgcaaaccctggacacatcagattattgtaaatattgaactctgttggctttacctgcagaggcaacaatcagggtccaacagtaataacttgtactactatattatctatgttatcaagcaagacgatcaagtcctatcaatataacaaattgaaatgcagaattgtgcctctcagtattgttcctcatggactgtgcaccttgcatttcattgtgcttgac

SEQ ID NO: 74394 - DNA, 423 bp, Zea mays
agcttcaagtgatttgaagctccatgtttaatctttcctaggttcaacttctccatttcttggcataatgtaatgtcagaaatcttcattgtaagacaatggcaggaagccttgcgacttagcgcatctgccactacattggccttgcctgggtgataatgaatttccaattcataatctttaatcagctcgagccatcttctctgcctcatattaagctctgactgggtaaagatgtacttcaagcttttatgatctgtatagatatgacagatattccccagcagataatgacgccatattttcagggcatgaaccacaacagctaattccaggtcatgagttggataatgttcctcatgctggcgtaactgtcttgaagcgtatgctaaaactcggccttcttgcattagaacacagtct

SEQ ID NO: 74395 - DNA, 415 bp, Zea mays
tcggaataccacgacttcattctcttcgggagtaggctctgttttctccccaatatccgccctcacaatagacatgtctcgaaaataccttcctttcatggtatcaagatgactctacttaatgctcgatttgccgaagactgtgtgactcggtcaccacggtcgatcttcggagtcttcgcccccactttctacatcataactgtcattgtcaccagtatcttcagacaaaccctccaaagcttctttagtaatcttctctgtattagtcttcgacattgattgaagaaagcccagatgcatctcctcagaaagacttagcttcgaatcactaacagcttttttatcctcagacatccttgcaaacgctgagaaagtgctcccgaaaccgaagctttaaatccaaaagtccaag

SEQ ID NO: 74396 - DNA, 415 bp, Zea mays
agcttcccaacagttcatatagtttgttaatacccgaacccgaaattccgggtacccaaattttttggtattgtacaacccgttgtagtttggggtaacgattctcagaacccgatatttcaattactcgaattactcgacctgtatttcttgggtaatccaaacacccacccctagttgaaacagtctctcacaatgaagagtttcattcaacatggtttcatagataacatgaaaaaacaaaaacaatatgtctaagtagtagtgtaggtatggtttcatccctataaaacttatttcatctctttcttcattaattgcttggcatatcatctaaattgctggcatggcacaccatttaatgagaataaaatctgtcgtggttttggaaactggcgacgataagatttttgtt

SEQ ID NO: 74397 - DNA, 430 bp, Zea mays
tcttcaccatgtgatcacggatatcttgagaagggtgatctatgcacttccctttaagctgtgtccagctcttctttagcctctcattttcttctttgagcttttgatatgtgtcttcttttgttcctgggaattctagctcaaaagaagatttgcttgtcgacggacaacaagcattatcacatggtaatgtagtatcaatatgaacatatgtgcatgagtgaggctcgtggaattttaagctctctattacaacctcacgagcacatgtttaatatgatatgatcatctctcagactctcatgagagcatacgagcatatcatatttttcttgtagagctatattctcaattattagcttttccacttggtccttaagccaggggttcttatttactaattgagctatacaatgcaaagcagtatctt

SEQ ID NO: 74398 - DNA, 421 bp, Zea mays
  unsure (1)..(421): unsure at all n locations
agcttcagctagcccccaagccgatgtttaacctttgaaacaccaggattccaagggaaggtgatgaacttattgctgaccgccgaaacctcacaaaaaactgttatatgtagaagcacttctagctggaataaaactgtcttaataatatacaaattctttcctgcacctccatctttgttcaatgataactgacatgcaccatatataacagagcccaagtagtatggcaccagtgaattgttccaatgatttgtgatgagctcatgggagattcttgaaatgggagtaaccaacattngacaagtccaaagcactgcacgaagactaatntccatctgatagcagctgcaactganagaaggccgcggtgacaaacaattgacaataattngctcgcaaaccttatcactgaattctc

SEQ ID NO: 74399 - DNA, 412 bp, Zea mays
tcgcatctctgaactagctcggctgcatcattctttgctgtcggccaatagaatcccgacctgaaaaccttcccaactaatgttctggatgctgcatgtattccgcactgccctgcatggacttcctccagaagttgcttcccggtggacgggagaacgcacttcatgaggacgcctgacgcgcccctccgatataatacctccccaatgagtgtgtagtgagctgattgtctggcaatgcgctctgctgagttcttgtcatctggctcttcttcattctttatatacttaataatcgagtgcctccagtcatcagagtctggctcgggttggtctatgatgttgcactcttccctttgatccatcgagatgcttggctgaaggatttcttgcacgaagatcccgggcggga

SEQ ID NO: 74400 - DNA, 423 bp, Zea mays
  unsure (1)..(423): unsure at all n locations
agctttaatgcctctccaaaccttgcactatcataagtcttgtacaattggtggtaagtctatgaaattagggtgccaccagttttccttgactagataggtttgtatcggatacgaactgcagaaagggttggttaacttaaacaaagttagcttaatggttaaagactttgaggcataaggttgggagccgagacatagagatgtcacccaacagcaggagtcatatatatgatatgattagcaaggagttgcttaccgatctaccttgtcttctagcggtgatgctaaagctcactagtagacttgttagttgtgggttctgaatcactaagtatcaatcgagggatattgattttagtgggagtagactattaaatgtttaatatgatttactctgtcatggatatntttgtcttagta

SEQ ID NO: 74401 - DNA, 448 bp, Zea mays
ctatgaccaaagcaatgggaattatatcaaacactcattacaaccaaattaaaaatttcaaaattttgatcttgcatgtggctttggttctttagtctaaaaaggaagtaagtgaactatggagttaggtggaggcttaagtccataatatcactttgtggggacactcatgcatcgtagcaagtagattgcatattttcattcaaatctttcttatatttgcttgctttggttgtgttgccatcaaccaccaaatagggggagattgtaaggaaaatggaccccgggtcatttggctcaaaaggttttgtgcgttgatggtcaacataacctatggactaaagtgttcgctactatttatgattgtaggtcacaagatgctaaagtaactggactaagaccatgatgaaagcaacacctctaaagaagacattatgaagatcacaag

SEQ ID NO: 74402 - DNA, 351 bp, Zea mays
  unsure (1)..(351): unsure at all n locations
agcttctaaagggagaacacgtgatagggttgactaacgtgcatttcgaanaagatagaccttgtgcagcttgtcaagcatgtaaacaagtgggaggagcacatcacagcaagaacgtgatgaccacttcaagacccctggagctgctgcatatggacctcttcggacctgtcggctatctgagcataggaggaagtaagtatggtttacttattgatgatgacttttcccgcttcacttgggtgttctttttgcaagagaaatccgaaacccaaggggactctcaacgctttctcaggagagctcaaaatgagtttgagcttcaagtgaaaaagataaaaagcgacaacg

SEQ ID NO: 74403 - DNA, 446 bp, Zea mays
  unsure (1)..(446): unsure at all n locations
ntaattaaagtggngagttttatttgggctatgaagagtcaagggctagagccagatgccaggtgcttctgtaatattcatgaattatcttactagacgaaggcaactaggaaggagcagtatgataacaacttcgggtgctatagccttgtgccccgctctgacgcaagatatcccgtgccaacatttcggaataaatggtcgggctcttggatgaaacaatggttctatatgaagaatgatctaagcgagagggaagatgtgaggggcattattcagcgtcccatatggtcacgcttcggcattagaagggggnncattgcaattgggaacgaagtgcaagcgtgtttaatggatttcaacactgtgtgcacttacatcgttaccagggatttggtacaggaacacattgcttacaaggtgtggcctctcgtgaatgactggga

SEQ ID NO: 74404 - DNA, 298 bp, Zea mays
  unsure (1)..(298): unsure at all n locations
agcttgtgaggagcactggggtctttgctgctggtctcccctatcatcactntgggtagagttgtgaattgacctaacgtgcctcggatagaacctacctccgaagctcctagtcatttcagaaaacatgaaagcctcctcccttctttgacgaaaattattatcggcccgaatatactcttccatctttaggagcagcttctccaaagtttgagggggcttcctagcaaagtactgagctgaaggtcctggccgaagccccttgatcatggcctcaatgacaattttgtttggcact

SEQ ID NO: 74405 - DNA, 412 bp, Zea mays
tatacacattttcttacaatttgtagagctttgtttatggttactaagcttacaccaacacacttaaggcactacaaagcaaactataatctcagatctcactaggcacacttgtttcttcatccaaaatcaaacttcacttgaagaacttgcctcaccttccaaacacttatctatactttgattaagggtttattatttctctatttggaccttacaaggctttctgagtaaatggcttccaaacagcctcaaacctttaccacaccctccactaaccaaaacaaggttactcaaaaatttccataatttttggcattgtacttttatttctaaaatccaaacagtcctcccaaaagcacctttaattcacttaatatattctaatggctctaaaaattctaaaaccagc

SEQ ID NO: 74406 - DNA, 433 bp, Zea mays
agcttattattattgttagatgccaacatatatatctcttatgacagaacccacccttaattaagagttgtaatgcaaagtggcccactcacacaacttttgttatatttgtctagagcatagcctttttattttgaacctcaatttcctacaacatgctatattgacctatggcaagccactaaaatttttacagaatttttggaaaaagttaattcactgttgtagctcaaacctacactataattcataaatagaaaataaagaaagggaaaatgaataatggaaattagtgtcatcctaaatgtcacaccctgtgtttaggggtccaaaacccgggcgcgaacataatcaccaggtgtgctcggaccaagtctcacacatatgatgattcatggcacaagatcgaatgtcacatctttactatataata

SEQ ID NO: 74407 - DNA, 443 bp, Zea mays
  unsure (1)..(443): unsure at all n locations
tggcggctanggttacaaacttggagacaagagagattttgagagtaaccttctgatcgcgcgagactcatagggcgagaggtatcgagtcgtacgtaggctgttcgcttgtagctggcctgggtcctgggccgcttggcggccttgctagttgctgctgatgcgttgacggctgacctcgcgaagaattgattcagtgaacaagtacaagccccaatgaggctggacgctggctgttgtgacctatgatgcgtccactatttgggtccacatgtcatatgtgcatcgggtgacggatatggatagccgatattcatacccgctaaaatattacccgtggatatcatatagtatccatacccgtacccactgatatgaaactncaccttatccgtacccaaccgttaaataaccgcggtttttacccctattcgtacccactg

SEQ ID NO: 74408 - DNA, 433 bp, Zea mays
  unsure (1)..(433): unsure at all n locations
agcttgatgctcgctaagatcatgaacaccatgctagtctctcatcaccaccagctttgctgtcgacaatgcccacactcatacccatattcaaactacactctacaaacaataaaatttaccatgcaaaatgtgttttttatgaccatatggttgaactattgtacattgcacctatatgatcattaaaacattgttttgcaccgctttatattgtagattgtattgtttatatagtgtagtttaaatataggtatgaatataggtaagctgctgaagacggtataacaaattaactcaaactataaaccttttacctcatgaaacctttctatggactataaaataactcttgcaaaactaggcaaaantttcttctatacatttgcatacttatatctgtgtttagtcctaataaatgtntttatactta

SEQ ID NO: 74409 - DNA, 441 bp, Zea mays
  unsure (1)..(441): unsure at all n locations
ngaagccatggtaagtagcataggctaataatatacgaattgactcaagcctagctacgggtgcataggtttcaccgaaatccaaaccttcgacttgggagtatcccttggccacaagtcgggctttgttccttgtcaccacaccatgctcgtcttgcttgttgcagaacacccatttggttcctacaacattttgattaggacgtggaactaaatgccatacctcattcctcgtgaagttgttgagctcctcttgcatcgccaccacccaatccgaatcttgaagtgcttcctctaccctgtgtggctcaatagaggaaacaaaagagtaatgctcacaaaaatgtgcaacacaagatctagtggttacccccttatggatgtcaccgaggatggtgtcgacggggtgatctcgttggattgcttggtggactcttgggt

SEQ ID NO: 74410 - DNA, 425 bp, Zea mays
agcttgacaatgaggagatggcgctcgttatcaagagcttccgccaaatcctcaaacaaaggaggggaaaagactacaagtcccgctccaagaaagtttgctacaaatgtggtaagcccggtcattttattgctaaatgtcctatgtctagtgacagtgaccgaggcgacgacaagaaggggagaagaaaggagaagaagaggttctacaggaagaagggcggcgatgcccatgtttgtcgcgagtgggactccgacgagagctcaagcgacttctccgacgacgaggacgccgccaacatcgccgtcaccaaaggacttctctttcccaacgtcggccacaagtgccttatgtgaaaggacggctaaaagaagaaagttaaatccaactcctccactaaatatgaatcgtctagtgatgataat

SEQ ID NO: 74411 - DNA, 436 bp, Zea mays
  unsure (1)..(436): unsure at all n locations
cgagtaatctacttcatcgccactagaatcatcatcactagaagnaggggatntaggggtatcacgaacacttaccttcttctccttggccatgaggcaattgtgtctttcgctggggaagagagaggacttgttgaatgccgaggcagcgagtccttcgtcatcggagtcagaagaagagcagtccgagtcccattcctttccgaggtgtgtctcgccctttgccttcctgtagttctttttcttctccttcttcccgctcttttcttgttcctgggcattaacattatcggggcaatttgctataaagtgacccgtcttaccgcacttgaagcaagagcgctttccccttgttttggtcttgttggggtactccttgcgcactttaagagtggtcttgaagcacttgatgatgagcgccatttcatcctcgttg

SEQ ID NO: 74412 - DNA, 407 bp, Zea mays
agcttctccaaagtttacggtggcttccttgcaaaatattgtgcatttggtcttggtctgagccacttgatcatggcctcaatgacaatctcattgggcaccgtaggcgtctgggctctcaatcgcaggaaccttcagacatatgtctggagatactcttcctgatcttgtgtgcattggaatcggacatatgtctggagatactcttcctgatcttgtgtgcattggaatagagcttgagcggtgactgactttgtttgaaagccctggaagctagtgaccagcatgacctttagcttctgccaatacgtaattgtccttggccgaagagaagagtaccaagtttgcgctacacttttgagtgccatgacgaaagatttcgccatgactgcagtatcgcccccata

SEQ ID NO: 74413 - DNA, 422 bp, Zea mays
tggtggccaggttaaaaagcaggttccagtgttttttgtatctgaagttcttactatatcaaagagaaattacacagaattggagaaggtgttgtatgctgttttgatggcatccaggaagcttcgacactactttcaagcatataatattgttgttccttcttcacagccgttgaaggacattatgagaaatagagaagctactggaaggattggaaaatgggctgcagaactcaacgaattctgtattgaatatgttcatagatcttcgattcagtctcaggcattagcagatttcattgctgactggacgccaggggctcaggaggaagaaacaaataaagatgccgaagcatggacagtgttctgcgatggatcttggggaaccttctgagcaagaacggctgctgtgttggttcacc

SEQ ID NO: 74414 - DNA, 333 bp, Zea mays
  unsure (1)..(333): unsure at all n locations
tctaagncnaccggcaagcacgcgagctcaagcacgagagaggaggtaccattgtttctcacaacagaacttagcgataggcccgtgaatgacacatacacgctcggtttaacaaaacacatcatgaccacgcaccaatggaaacccagacatggctagccgatcaacatcgcaccgcgccaacaactgcctatatgacacacactaaccgagcgacaacccaaaccaagcttacgattccattcacatgaacgatgaagacgcctgcctcaaaagccgcaactaccctacagggaagaacgccacagcgccgcatagcacaaatgcatacat

SEQ ID NO: 74415 - DNA, 465 bp, Zea mays
  unsure (1)..(465): unsure at all n locations
tactaagcttggctaagtccctcgaacgttgatgtcttcncttttatagctaaggggggcatgtacaatggaactgagcctcgacatgtgggcccaggaacataacggatgtagtacttgtagctaataatgtttggtgctggagcaatcttcttgcgccctgacatccgagatctgcgtaacatcggcgtgcaggggaagcttctcgtataaaggatgatggacacagtgcgccgcgcggcatgggcgcactgtttgacaatggactggacaggtgcgccgtctacaggatggccctggcgccgcctgccagcggagtggacaggacgcattaaatgctgagggggcatattgtctgtcagcatggtgggcaagcggcgcgtcctcttcgcaataaatatagagaccgcctttgaagactgcttgcgccgctcgctgacgcgtttcgcgaggtcaatgatctca

SEQ ID NO: 74416 - DNA, 420 bp, Zea mays
agcttaatgcccctcctaaaagattatctaactttgttaaaggcaaagctcccatgcctcaggataacgagggttacattttataccctaccggttatcccgagcacaaaattaggagaattcactctaggaagtctcactctggctctaatcatgcttttatgtataagagtgaggcatctagttctaggcaatcaacccgtgctaaattgcctaagaagaaaactcctattgcatcaaatgaacataacatttcatttaagacttttgatgcatcctatgtgctaactaacaaatcaggcaaagtagttgccaaatatgttgggggcaaacacaaggggtcaaagacttgtgtttgggtacccaaagtgcttgtttctaatatgaaaagacccaagaccgtttgggtacctaagaaca

SEQ ID NO: 74417 - DNA, 370 bp, Zea mays
cgcaaaaacactactgattatatcattgtagtacacacggataggataacaaagtggatcttatgtgtgcataacagaaatgcttacctagaaatctcctttattaagatacaaggtcatgttgggaatggaagcaaaaacatactgagataagtggaatgattatagttgggataataccttgccatcttcacctaatttagctactgtctgtgataatctctgcagaaacatcaataatttctgaaggcgcctaattgctaataatctaagaatcagcgaggacataagaagttatacgtgagtgcatgtgcgttgcattacatgtccgctgtgcagcttgattcctgacatggcaatggcacgctat

SEQ ID NO: 74418 - DNA, 405 bp, Zea mays
agcttatgaaattatctacaacttctctcactaactcaaagtttaattctggtgatagaattgcccaaattttaggaaaacagattctgcacagaattatgagactgaaaaactgttataatcaaactttaattactttctgacctaaagtccgattgaggtgttctttgggccatagaaagatctacaaattatctacgactcatagatagacttttttaggccactaagaccacggaaaactggcatgaatagaaactatcgaatctatcactctgcagggactaattttgagatcaaaatctaatcctgcatctaatccaaccaagacaggctactaaaactcatccaaaacaagggaaagcattcatcaagtggagaaaatagagagagagagagagttaa

SEQ ID NO: 74419 - DNA, 469 bp, Zea mays
  unsure (1)..(469): unsure at all n locations
cttgtgagagaagaaagggaagaggcagtaaggagcagctaagagatgtgaagacaccagagaagcaaaggggttatntatagaagggaaaggcaaccgctcacttctaaccgcggtcactgaacagtcgcaaggcattcaataagcacttccacccacccgaagacacgtcagacggcggacgccgtttcatgcaacactacacccattgggactccagtcaacagcgcaaaggatatgattacactagccgtcccatcgcattactactcagaggcaaccggctaaaacactcagcgtaccaagccgtcccttgcccacacccattgggggggacgcctaggaattatcagtatatttttcaaacggtcacattcgtgcagggcatgcagtgaatatctcaagacaaaaatgagatatctgtaaggatcagaggatagccaaatataaccagcacagtacaagatat

SEQ ID NO: 74420 - DNA, 418 bp, Zea mays
agcttaccaaacaaaactgtgagaagcttatagtgatgatatggcctcttatatgtctcagtttaaggcctattagacatggctggatgaggatgcccatgttggtgctattcttgttactagtatggatgagcgtcttgctagatgtgctttagcttgattaggcttattatatgtgggccttcctccatcaacactatgaggcctctcatcaatctacatatattgttactttacatctagagtatttgttatagcacactgatagttcaactgaggagttctttcaatagttatctatggtgtggtgtcggcttcacacacttggtccttagttgtctctagccacatgattcctataggaagcaacaaagttgccttagcctctattgcacctatgactttctgaatcaccttc

SEQ ID NO: 74421 - DNA, 420 bp, Zea mays
  unsure (1)..(420): unsure at all n locations
tanagccatggtaagtagcataggcaagtaatatacgaattgattcaagcctagctacgggtgcataggtttcaccgaaatccaaaccttcgacttgtgaatatcccttggccacaagtcgggatttgttccttgtcaccacaccatgttcatcttgcttgttgcggaacacccacttggttcctacaacattttaattaggacgtggaaccaaatgccatacctcattcctagtgaagttgttgagctcctcttgcatcgccaccacccaatctgaatcttgtagtgcttcctctaccctgtgtggctcaatagaggaaacaaaagagtaatgctcacaaaaatgtgcaacccgagatctagtggttacccccttatgaatgtcgccgacgatggtgtcgaccgcgtgatctcgttgga

SEQ ID NO: 74422 - DNA, 420 bp, Zea mays
  unsure (1)..(420): unsure at all n locations
agcttgagtactgatcattccggttggtgataagtactcacgtttgggcatttttgttcttaattattttcttattttactgtacattatatatatgacatgattttcttgttttttgtcatgcagccaatgggatgacacgtctttcgacggtcgaggtcaccatagataggttaatcaagtcttaggtaacctatgtcatctacataatcctggaattgtgaccgactcgaaaggtgtggtggttccttgcactagctggtcgcacttcgcattacctccacatgctatatatggaacagctcagggtgtcgtcaagcatgacttttgggtaagcgtattgtttagaaactaacatttatgatctgtttcatactaactnntatttcaatgtttgatagagatgctatcgtgtggaac

SEQ ID NO: 74423 - DNA, 453 bp, Zea mays
  unsure (1)..(453): unsure at all n locations
tcacaaatgtcctatcaacacacttaataaaacaaataatgaggaacacaccagttcatagacacgagtttaaagttcacattgcatagcagcaggttcatatacaaatggggcaacattgtgtgtctaacaaatgatgtaaacatttatttttatacaccatgtctcccttctcttatctaatttccagatttgcaattcatgaggccatggagcagcagacaatatgtagatgctgacattacaacagtactcaattcaaggacttcagttcttggagctaccaatccaattttaggacgctatgatgatcttaaggttggtaaacatgtttttcattgtctcaataattatcaattnttgaaaagtttaaactgttctagccatacatggaagacaatttcctgttccgccattcatattcctattcccatttcctgctacttccatcgt

SEQ ID NO: 74424 - DNA, 419 bp, Zea mays
  unsure (1)..(419): unsure at all n locations
agcttctaaagggagaacacattttggtatctaacaaatgttcattntgagaaagacagggtttgtagcgcatgtcaagcacggaagcaagttggtgcccatcatccacatacactacaaaaaatggttttgtatgacaaaagtaaagtgtcatgtttagtacaaaattggtcataaaaagcatcttatgacgaaaatgttgcgtcataaaggtcgtcatataacgaccgtcacattatgtaccttgtgacgactgttcagagtaccgtcacataatgtcatcaccttttgtgacagctgcgttcgtccatcacatattggtgctatatatgacggngttatctgtcacattctctccagtcaacgcgtcacctaatgttgggatcgtcacttatggcacccacatacagtgaccatac

SEQ ID NO: 74425 - DNA, 420 bp, Zea mays
  unsure (1)..(420): unsure at all n locations
ngaagccatggtaagtagcataggcttataatatgcgatatggactcagcctagctacgggtgcataggtttcaccaaaatccaaaccttcgacttgtgaataccccttggccacgagtcgagctttgttccttgtcaccacaccatgcttgtcttgtttgttgcggaagacccacttggttcctacaacattttggttaggacgtggaactaaatgtcatacctcggtcctcgtgaagttgttgagctcctcttgcatcgccatcacccaatccgaatcttggagtgcttcctctaccctgtgtggctcaatagaggaaacacaagagtaatgctcacagaaatgtgcaacacgagatcgagtggttacccccttatgaatgtcgccgaggatggtgtcgacagggtgatctcgttgta

SEQ ID NO: 74426 - DNA, 335 bp, Zea mays
tgttggaaaaacatctaagcgctgaccatgtcgtgacatcttagtgaccctcggacaggaacactgcaaaaacacaagtatacactatggaccgtccgatggagaaacgagcaccgtccgacctcaggcgcgcactggtcggtcggcaaaaaaccataaaatctgaatgcgacgggttcgctaaaatgtatttttagcgtcctcgcggactatactgagtgcacgaccggactgtacgcgacagctttatttgacttctggcaacgcgttaaatgctctaatagccgatgatatagccattactgctgaccgttgcgatctcagccgtagatgtg

SEQ ID NO: 74427 - DNA, 453 bp, Zea mays
  unsure (1)..(453): unsure at all n locations
ntaccacagagtaaattagaatntagaattgtgaatttcttactcaaaaggaaaacaaaaacagaaaataaaaatagagaaaagaaattggaaacagaaaaaaagagaaaaagaaaaatcgtcgtctgggccgaatctcccctgcgctggcccattgccgcacggcccaacacccccatccgcacactctctggctggaaaatgcattgagtcgctgactggtgggcccctttcgtcaggatattcttctccacagcatctgacgcagcggattcctctgcggtccgtgtcgtcgggatcctccgaagagttcggatctcgccagctctcccgttttcctcgcgtggtcaacgttcccgtcgggctcgcaacgtgacccgcgccgcactattcctcttccncttctcaaccggagctaactcaatggatcttccgtgcgggcgcgaaactact

SEQ ID NO: 74428 - DNA, 456 bp, Zea mays
  unsure (1)..(456): unsure at all n locations
tgtntaagaattatgtgaggaaaatgatgaatatgccaaaaaccctaacttgttttcatctatttggnggtttttgagagtttaacaaaattatattttattaatgtaccttaaagtttgttaattagaaaacatagtataagtcatgtaatttgcactgaagtaaatgtgtgacaatgttttggtgcataaataatttgtttgtgctctaaattttgaatcaagttcagtttcttgtgagacttacaatgtttccaagtatgaaagttctttgacgcttctagtttgacactccgctctctctagtttttgttaaacaactgtggttgggccaaaacaaagttgttctttgaacttanaaagaaagatgtgcggngttggtgatgatgttttaccatgtttgacctttcaaaatcatagttaaaccatgctcagttggggatttcgttcaaagct

SEQ ID NO: 74429 - DNA, 359 bp, Zea mays
tgcgaattttctctagcctagctaccggtgcataggtttcaccgaaatccaaaccttcgacttgggagtatccttaggccacaagttgagctttgttccttgttaccagaccatgctcatcttgcttgtggcggcagacccatatgtgtcctactacagtttttgcttggacgtggtactaaatgccattccgttattcttgtggagtagtagagctccctttgcattggcaccagccattccgaatattgaagtgattactctaccctgagtggctcaatagaggagagaaacaacgtgtgctttctcttatgtgtctcgcgatatcttgaggccctccctttgtaatctccgccgat

SEQ ID NO: 74430 - DNA, 461 bp, Zea mays
cgtgaagattcttcatcccaacatgggctagtcggcggtgccagagccaacccatgttagtcttagcaattaagcaagtgtcgagttcagctctatcaaaatctaccaggtatagctgaccctctaacactcccttaaatgctattgaatcatcacttcttctaaagacagtgacacctacatcagtaaaaagacagttgtagcccatttgacataattgagaaacagaaagcaagttgtaatctaaagaatctacaagaaaaacattggaaatagaatggtcaggagatatagcaattttacccaatcctttgaccaaaccttgatttccatccccgaatgtgatagctcgttggggatcttggtttttctcatatgaggagaacatccttttctcccctgtcatgtggtttgtgcacccgctgtcgagtattcaacttgagccctcggatgcataaacc

SEQ ID NO: 74431 - DNA, 428 bp, Zea mays
  unsure (1)..(428): unsure at all n locations
tcatcccattngaactctttacctttctccagtagatatgtaagaggtttcactaactttgaaaaaccttcaataaatcttctatagtatcctgccaatccaagaaaacttctaatcttggacgcatcctttggttgcttccaatctagtatctcacttatctttcctgggtccactttaattccaccatcggtaatgatatgccctaagaaagcaacttccttaagacaaaaatcacacttcgataactntgcgtataactggttgtcacgaagcttttgtaggactagccttagatgatcttcatgtttttcttcattcggagagtatatcagtatgtcgtcaatgaatacaaccacaaactgatccagatattccatgaatactntattcatcaagttcataaagtatgcagatgcattagtcag

SEQ ID NO: 74432 - DNA, 459 bp, Zea mays
tcttgacaaggatgtttgtttctaactagatgtgctctctggttaatttagttcatgtctttatgggtgtcttcccattgctagcagattattaatgtcgattatgttttcttatcatgatatctatttacactttgttgcttccccgtttatgcaattttcaaaggagatgctgtcgaaattttatatacgaatgttagaggtgtagtttagtatcattctggggtgtttatgggtctcggggtgttacaagatctgtccaaacatatgttaaggttgtaagacacctttttccaccatacagctgctaaaaagttagaatataaagaattcaaaagaatagatcaactttgaaacttaaaatagtggttctatgatattgagggcattgtattcacatgagagtgtattagagtacaactagtggatgaagacgttagtgggctagctaatgacctt

SEQ ID NO: 74433 - DNA, 459 bp, Zea mays
tcagctccatctatgttatggattggctttgagtcagtccagtttccctcggcccttctggcagcttcttgacttccatgaatagcaatgggtccttgatccgaaggtatcttcatgcaaaggtaagcaggatgaaggattgcttcgaaagcgttgagggtgccacgaccaataattgcattgtaagggtattccatgtcaacaatgtcaaacacaacttgctcagttctggtgttgttgatgaatccgaaggtcactggcatggtgatcttgcccagtgctacaatctgtcttcctccaaagccacagagagggtgtgtagcatcatgaatcttatcttctggctcttgcatttgtctgaaggccttagcaaatatgatatcagctgcactgcctgtatcaactaagacattgtggaccagaaaccctttgataacgcaagaaataaccatagcatcg

SEQ ID NO: 74434 - DNA, 444 bp, Zea mays
tgtcaaagaaaaattatacagaattggagaaggtattatatgctgtgttgatggcctctatgaagcttcggcattattttcaagcatatcatataattgttcattcatcacaacctctgaagtacataatgaggaatagagaagctactataaggatcgaaaaatgggttgccgatctcaatgaattcactattgattacgtacatagatcctcaattcagtcccaggcgttagcggatttcattgctgattggacgccacgggctcagggagaagaagtaacaaaagacgcagaagcctggacagtcttctatgatggttcttatggaaccttcggcgcatgagtggctgctgttctagtagcgccctctaaagtcaaaacatgctacgcagcaaggttggacttcagttgtacaaataatattgctgaatacgaagctcttc

SEQ ID NO: 74435 - DNA, 459 bp, Zea mays
  unsure (1)..(459): unsure at all n locations
taagagactntnttcacggatcaagctcgttacgaataactatctatcaccgcgaaaggggctactgttgggtctatgcttcgtcgccgaaggtcttcaagggagaagcggcttaaaatgtgtgagcaggtatcttcggactcgtatcagaaggggaaaagctacaaaggttgacacagcgccgaagctgtgaagcaagaaagcttctgcatgttcgcagaaaagggaaccgacttaaagatgaaaaggccatttagacctcgatagagtgctatagaattatcaccaaatgtaaagggcactgtatgtaatttgtatgagttgtaccccgtgcctataaataggtgaacagtacccccgtactgttcacgttgacttggcatttgcttttgcgtcacacttgtattttcatctccttccaagccgaaggtacatttataattcgatattgtctctatt

SEQ ID NO: 74436 - DNA, 432 bp, Zea mays
  unsure (1)..(432): unsure at all n locations
tcagttccatctatattatgaatggcttttgagtctgtccaatttccttcggcctttctggcagcttcttgacttccatgaatagcaatgggcccttggtccgaaggtatcttcatgcaaagataagctggatgtagaattgcttcgaaggcattaagagtaccacgaccaatgattgcattgtaagggtattccatgtcaacaatatcaaacacaacttgttcagtccttgtgttgttgataaatccgaaggccactgacattgagattttgccgagtgctacaatctgccttcctccgaagccgcanaggggatgtgtggcatcaagaatattatctttgggctcttgcatctgtctgaaggccttagcaaatatgatatcagctgcactgcctgtatcaaccaaaacattgtggaccagaaatcctttg

SEQ ID NO: 74437 - DNA, 449 bp, Zea mays
  unsure (1)..(449): unsure at all n locations
ngaagttggcctttctgccacgtcgaatgatgacctcgcggacaaccttgcatacaacagtctgaaggtacagaagttatgaacttgaaaataaagtctatgaacttagaaataaagtcttttattctcatgctaatcctttatccttttttacagggcctaattcttagcaacgctttgagggcgcagaagaatgctgaagatgaaagctgtgtgatagctctcggcaaccttcgataagaagttattaagctgagagatgaggccttggagaaggataaaattctactttcattggtagacaaagtgaaaaagacatagcgaattttaacgctcaatccgaagctcatatagccgaagttgaagaccttcggaaaagacttgtcgaagctaatgaaaatttttgacttgcaaaggcgaagcaagaaataagtgaatggtcaaatact

SEQ ID NO: 74438 - DNA, 480 bp, Zea mays
  unsure (1)..(480): unsure at all n locations
cactatgaaactaagcttacgggctactggtggagctagccgaagcactggctgttcttgagggtggctggagtgggctggccacgatggccgaagctctagcgacaatggcgggcagaattaagctcgccggagctaatggaaagtggctggccggtgagggtgagtgtggggcgaagtggggcgcgcctgggaaggctatatangcacagcgcggtgcacgggcggtcgtggaccggcgagtgcgcgcgggcgtgcactgtgaggcgcggtgcgcgaacgggcgtgaaccatgggtgtcagccaccgtcgaacacgtgttcccgttgcctctgcccctggttcagcgccgattgagagcaaatcttcgcgaatttgggcaagatcgctgcaagggatttgttcaccagaccaagctttgtcttttgtgtatggactacgtgcggtttatgctatggacatggagttgtagcgtcacca

SEQ ID NO: 74439 - DNA, 405 bp, Zea mays
  unsure (1)..(405): unsure at all n locations
ngccaatacttgtcaaaacaacaacatctaccaccacagttactgcagaacataccggtgacttggcccttcacatgctgggggctagatatgattggacctttcaagaaagctcaaggaggatacactcatgtactggtagcaatcgacaaattcattaaatggatagagttcaaacccattgcttctttgacctcagctaaagccgtggaattcatacaagacataatattcaggttcggaataccgaacagtatcataaccgacctgngatccaacttcacaagttcagagttctttgatttctgcgagcaaaaaagcactcaggtcaagtatgcttcggtagcacacccgagagccaacgggcaggtcgaacgagctaacaggatgatattggaggcactc

SEQ ID NO: 74440 - DNA, 462 bp, Zea mays
tgaaatcatggtaagtagcatagaccaataatatacgaattgtctcataacctagctatgggtgcaagggtttcatcgaaatccaaaccttcgacttgtgactaccccttagccgcaagtcgacctttgttccttgtcaccacaacatgttcgtcttgcttattgcgaaagacccacttggttcctacaatattttggttgggacgtgatattaacttccaaaccttatttctcttgatcaataataactaaaccatacttactcccactgatgcttatataagcaacaagaccaaatatatatagaagctagttagaagtattaaattagtccctaccgtatgacatgtctaaatgctagttagaagtattaaatatagtctaattacaatacaggactaaacgacaagaaaaacctattaagcgttaattagtccatgtttcgtccatgcaatattatat

SEQ ID NO: 74441 - DNA, 434 bp, Zea mays
  unsure (1)..(434): unsure at all n locations
tcttgtcaagggacgatatccacagtgcgctgcatagcacgggctgactgttcggnaacagacataacaggcacgccgcctgcaaggctaccctgatgtcgtctgctagtggagtggacaggacgcattaaatgctgagagggcacatcgtctatcagcgtggtggcaggcgacgcatcctctccgtattaaatgcagagactgcgcggcttttatgggccttacgtctggctccgcccatttgcttatgtcacgggtcacaagccacgcagcagcagcgggtctctgcctgagcggggagcgtacgacaaggcctggacatgtgttagcaccggacccttactcatgccagggttccccccatcccaggtccttgttaaggtccggaccttactcggagggacctggggcccaacggagggacccgacatacc

SEQ ID NO: 74442 - DNA, 438 bp, Zea mays
  unsure (1)..(438): unsure at all n locations
ntacattatcttacacttagtgtattggttagttttcttttttagctaattgattgctgattggttagttttcttttgttggggagaaggccaaacaggacctcgtcgatcattagtctggccggctctgcctaatgccctaatctaccttcagacttcattccaataaatgcaaggctcgctgaaggttgcgagaactaccaaggagacttcaccttgcaaggacataccctccaatatggcacgcaaagcctacggttgccgcccttccgtcgaaggcgacaaagaccgtggcgagatctttgcctagggtggcagttgacagacacactccgccagcagcgccaaacatcagatatctcgatcggaggcctcaaacacatccgaaggcccgatcgactagtggacgaccctagaggctccaaggacttcagtctc

SEQ ID NO: 74443 - DNA, 445 bp, Zea mays
  unsure (1)..(445): unsure at all n locations
tcggcaaanagaggaagcgaccttntaggcttcgttgtgtacgaaaagaagggaaggtgttttttcgccttcggctcaaaatactgatttcgtccacaacaaagcgcctcaagcaaagggtaagaatatattacaaggtatgtacaaagttccttgaagatagtctagttgtgtttacaagaattgttacaaaaatatcctgagtttttctacagtacacttctactgatcttcattaagtttcagcttcgacgacataatttaggcatcatcttcaccttcgtcatcctacataaattaagagtttatgagtaaaaatcaaaagcaaaggaaaaggtaactccgaagtaccatttcttactggttcaagatgacttcgtgcttcgtctccagctttctcccgcccgccttttgccatatcattnttataatctattggagatgc

SEQ ID NO: 74444 - DNA, 459 bp, Zea mays
  unsure (1)..(459): unsure at all n locations
tatgaaggttcttcattccaacatgtgctagacggttgtttcatagccagcccatattagttttagcaattaagcatgcatctagatcggcattcgcctttaagaaatcaactaagtagagcttgccatctaataaacccttaaaagctaatgaaccatcacttcttctaaagatagatacatcaatatttgtaaataaacaattataactcatatgacataattggcttacaaacaacaaattgtacctgagtgattctacaagaaacacattagatattgaatgctcagttgtgatggctattttgcctaagcccttaaccttgccttggttcccatctccaaagatgatagtttcttgggaatccctgttcttgacgtaggaggtgaacattttcttctcccccgtcatgtggtttgtgcatccgttatcaataatccagcttgagcccncggatg

SEQ ID NO: 74445 - DNA, 455 bp, Zea mays
  unsure (1)..(455): unsure at all n locations
cttgaaactcagctgagctgcgtatcctgatgctgaagatcatttcttacagcttatcatacaatagtctaaaggtttgtgtttactattcctgacaatgtatcatttcacatatatttttttgctcgttttaatagacatttatcttattattagggtctaattttaagcaaagctttaaaagcccaaaaggattgcgaagatgagagcacaaagatagctttcgggaatttacgctcagaaattgtaactcttcggaatgaggcgcttgaaaaagataaaatcctgctttctttggtcgaaagattaaaaacaagcgaagctaaattggccaaactttccgaagtggacgaaaagattctaaaatttgagaaagcaaaagatgcagatgcaaaacgcatagctgatctagaatatgctntatctattcaagtggaattacacagatctgaagt

SEQ ID NO: 74446 - DNA, 440 bp, Zea mays
  unsure (1)..(440): unsure at all n locations
actcagctttgacaaacaaaaactctattctactattntcaaaatctctcaagtgggagctgatccatttatcgctttggcctttattttctccccctttggcatcaagcaccaaaaccggatcaatcttggccttttaacctcattggctcaccaaagtcttcaattaagagcaaatggccataagatttcatgagatgaacttggaattaattaccctctcatcggagtgcagtggaagtctttcatggtccaagtccaccttttccctttcaatcctccttcgagactaaattatcaaactcaagcacatggttagtcttaaagggcaaagttgtacacatctcccctacacatgtgcatcactttgaacggacttgtgaagtccaggagtgtttgtcaactgagcacataatagcacatatgcaaaaggacatgac

SEQ ID NO: 74447 - DNA, 379 bp, Zea mays
tgtcttcacgaattcgaagtcctgccggtcattctttcaagtgcagaacctgtacatatatatatgtaaaaaaaaacatccaaaagccatatatgacagcattaagatcgatgaagcagtgatttagtacgcaaatcctttttaccatgaaatagaggatagataggggatctgctgaagatagcctaacgcaaagacatatgctacctttgtgttcgtctactattgtgttagcatctacctctcaccaatgtcggcactcaggaacgaagagaagagaaaaagagaaccgaaagaagataacagaggcttgggcaataacaagatgttattcttttccatcatatagtctctctctctctcaccacacaccacacta

SEQ ID NO: 74448 - DNA, 434 bp, Zea mays
  unsure (1)..(434): unsure at all n locations
tcgtctaacaggctntgtcatggtgaagcgggaagtcgacgtaaggagaagatgttcaagttaataagtacaaatggcgatattgtccttgtgacattttgtaaactttgtatgtaattgttgagggcatgaatgtaatagcgtgcaaagcctataaatagatgaacataacccccgtactgttcacgctgggttgtaattgctctcgtgtcatcacctttaaataagccgaaggtatcgatgtaatgtaaattttgatgatgtttatacattcattatgcaataaatatgtgcatagataacacatctcgtgtgtataaactcttatttttatgaatgatgaagacatgttcttcatgaccttcgtctatagatcattatatccganaggagataatgctccgaaggatgaaggtctttaatgtttaacaatt

SEQ ID NO: 74449 - DNA, 460 bp, Zea mays
  unsure (1)..(460): unsure at all n locations
taagatgntagngctatagaaccaagtggctanatagncttgctcttgcgaatcacaataatcacagagatagacaacacaagagacacagcgtttttatctcgtggttcggccaagtataacacttgcctacttccacgttgtggcgtcccaatggacgagggttgcaatcaacccctttcaagtgatccaatgatcaacttgaataccacggtgttcttatagttttcttcccgtttgtgaggaatctccacaagttagagcctctcacccttacaagattattcacaaagaaagcatggagtaagattgggaagagcaatgcacactagaattaaatccacaccgcanacacgcacacaagtgagaagatgagcacacaaaacacgcgcaaggagtttacaactcaaaaagtgctccaatctcaagaacgatgaacgattgcatgaaagtgaggact

SEQ ID NO: 74450 - DNA, 445 bp, Zea mays
  unsure (1)..(445): unsure at all n locations
gggagaancacatttatgattaacaaatgttcantttgataaagacaggatttgtagcgcatgccaagcatggaagcaagttggtgctcatcatccacacaagaacatcatgactagtgacaggccactagagctcctacacatggacctattcggcccgatcgcttacataagcatcggcgggagtaagtactgtctagttattgtggatgattattctcgcttcacttgggtgttctttntgcaggaaaaatctcatacccaagagaccttaaagggattcttgagacgggctcaaaatgagttcggcttaaggatcaagaaaattagaagcgacaacgggacggagttcaagaactctcanattgaaggcttccttgaggaggagggcatcaagcatgagttctcttctccctacaccccacaacanaatggtgtagtggag

SEQ ID NO: 74451 - DNA, 461 bp, Zea mays
  unsure (1)..(461): unsure at all n locations
ngaagcggatatcagccgctactgtcgacagcatattgtctgcagtttattctattctaatttcaaggtaaacattttgtgtctaactcttattacttgtggtacgaaaatgttttctaacgaaggctatttgtgcacagagcatgcttttgagcaaggcattaaaaatgcaacaagaattagaggataaaaggcaagaagttataatcgaaaatttagaaaacaaaataaaggagcaatatgatgccattgagaagaaagacctcgagctacaaacagccgaaggcttattagtggatgctgaagcaaaaataacagaattaaattcgaagcttctttcctagtcagaaaattntgaacaagagaaactgaagcttgatgccaggcttgaagccgaaactcaaagaaacttggaattgaaagaatctttgaaaaatcttcanaataaatgttcggagttc

SEQ ID NO: 74452 - DNA, 452 bp, Zea mays
  unsure (1)..(452): unsure at all n locations
ntagtgattagagagagagagagatatgttgtgttcatttgagctcttgcgcttggattgcttcttttctttctcattcttcttgtgatcatactcaattgtaatcgaggcaagagacaacgattgtgtggtggtccttgcgggaactttgtgttccgattgattgagaagagaagctcactcggtctaagtgaccgtttgagagagggaaagggttgaaagagacccggtcttagtgaccacctcaacggggagtaggtttgcaagaaccgaacctcggtaaaaaaaatcatcgtgtctcgctctttatttgctcacgatttgttttgtgccctctctctcggactcatttatatttctaacactaacccggcttgtagttgtgcttaagtttataaatttcagattcgccctattcacccccctctaggcgactttcacataccacccct

SEQ ID NO: 74453 - DNA, 463 bp, Zea mays
  unsure (1)..(463): unsure at all n locations
ntatatggatgacgatgtcgtactctgctaaattggtctgaacctggtgaaaggtacttcttcaggcctgatttggtgaaagagaccgaagaaaaggttcggaaaataactcataatttgaagaaagctcaagcacgccaaaagagttatgcacacaaacggcgaatgcccttatattttcttgtgggagactatgtctacctaaaggtctcgccaatgaagggtgtatcgcgttttggggttaaaggaaaacttgcaccacaatatattggtccttttctcattcttgaaagatatgggccagtggcgtatcgacttcaactacccaaagccttgtctgctgtacataatgtgttccacgtgtctcaactaaagaaatgtcttcaggttccagatcgaaccattgaagtgacagatgttgtccttgaaccagacttgacatattctgaacatcctatccgag

SEQ ID NO: 74454 - DNA, 402 bp, Zea mays
  unsure (1)..(402): unsure at all n locations
ttgatgcaccccgactcccgttntcggaatgggggtgngctgcaacgaaatngcgcaaaaccagcccatttatgattntggacctacccccgcggattgggcatgttcgttgcgaaaaacgaagaaatggttccggtggcgaaaactcgtgctttgtatgcaccccaacacccgttttctgaatgggcgacgtgcggcaacgaaattgcgcgaaaccaccccaaacatgagttttggacctaaagtagtggattgggcatgttcgttgcaaaaaacgaagaaatggttccggtggcaaaaactcgtgctttgtatgcaccccgacacacgttttcggaatgggtgacgtgcggcaacgatatagcgcgaaaccaccccaaacatgagttttggacctaaagt

SEQ ID NO: 74455 - DNA, 464 bp, Zea mays
ttaatcgcctagagcaatttaagccttattcctgatttatgcagatacctatcccattctctatattatttcatattttaaacttgtttgtgtaactgctcattctctatatcatctcctattgtgtcctatgttttccatgtttactcgctaaaacaaaactgacgacgcgttccgttccgatttcgaccacggaggcacggacacacaccgcctacaaccccgacgtcggtcaggcggtcagccatccgcctgcacggatctcaaggcaccagtttcctcgacgcggcgaagcattctcttctacagtttccttcgtgtgctccgaagtctaaagtttccttcgtcgaagcacccaaccccaccccatcctccgatcccctcccggcctcccctccccttccgctccgcctctggccaccgcgcccgcacccaatggcgtcggcggcggggtcctctaacgt

SEQ ID NO: 74456 - DNA, 470 bp, Zea mays
  unsure (1)..(470): unsure at all n locations
gacctatgaaactcagctngtgttacaagaaggaaagtgggagcgctgntgtatttctgatcttgcatgtggatgacatattattgattgggaatgacattcctatgctggagtccgtcaaggcttcactgaaaaagagtttttctatgaaggacttaggggaagcagcatatattttgggcataaggatctatagagataggtcgaagaggcttataggattaagtcaagatacgtacattgacaaggttttgaaacggttcaacatggaacagtccaagaaaggtttcatacctatgtcacatggtaaacaccttagccagatgcaatgtcctgcgacggctaatgagcgagagcgcatgagtaaggtaccatacgcctcagcgattggatcaatcatgtatgccatgataagtacacgcccagatgnttcatacgctataagtgctacgagtagataccaggctgat

SEQ ID NO: 74457 - DNA, 459 bp, Zea mays
ggaccgttgattcctcgaagctgggaaacgaatcgtgatctaatcgcaacgcgaagtgaagacgaacaagcacaagcaaacaaacatatgtatatgcataagaacattacactatacaagataaaatattataaatgcgaacaatataaaatagagagtgcctctacggttacgcgaggaaaagaaccacgatagacaaagctatggtcgaggggttagcacgtttacgctaaacaagtattaattagaacatccaattcgacataattatattaatagatattaattaaatataaattaatactactatttagttctgattaaatctgttacgctaacagctgtcaaataaaaaagtaatttaattaacacaagagattctaagcgatgcgaattgacgatacacgaaacagcacgacagcgtgcaaacgacgcgcgtgacacacgaggaaagctaaa

SEQ ID NO: 74458 - DNA, 461 bp, Zea mays
  unsure (1)..(461): unsure at all n locations
tgtgaagattcttcatcccaacatgggctagtcggcggtgccagagccaacccatgttagtcttagcaattaagcaagtgtcgagttcagctctatcaaaatctaccaagtatagctgaccctctaacactcccttaaatgctattgaatcatcacttcttctaaagacagtgacacctacattagtaaaaagacagttgtagcccatttgacataattgggaaacagaaagcaagttgtaatctaatgaatcaacaagaaaaacattggaaatagaatggtcaggagatatagcaattttaccaagacctttgaccaaaccttgatttccatccccgaatgtgatagctcgttggggatctttgtttttctcataagaggagaacatccttttctccccggtcatgtggtttgtgcacccgctgtcgagtatccaacttgagcctncggatgcataaacc

SEQ ID NO: 74459 - DNA, 448 bp, Zea mays
  unsure (1)..(448): unsure at all n locations
taaccttgtaacgaggataagctacctttgttccaaaggtggatggtccttaagcctctntgaaatccttaagggaaaatgcttaagatgtttataacatgctttcataagtgcgtaaactgtcgtgagcatcacacttatcctatgacacaatgcacttcacattctatatgatatagctatgttctcattaacctaattatgtgcaattggcatttacggccaaagtatgtattcctctccatgcatatatttagggggagaaatctatgttatatggaactatggttatgcttaaattgatatatctcttgatcacatctctttatatatatgactaatgcgtcttcaaatgtattcttatgcttagtcatagaattgaaagggaaatggagtatttggcanagacgacgcttccactcaactccatcggtattatccactcttt

SEQ ID NO: 74460 - DNA, 442 bp, Zea mays
  unsure (1)..(442): unsure at all n locations
tcggctntgaagacagntgtttagcatttccgaagatgtctgaagctgctaagaagactgctgctgagatgaagctgagtcttgatgaacagaagaacttangatttcttatagcgatgtcgaaaaccaacacagaaaaaatcaccaaggagattctggaagggctgtctgaagatactggtgacagtgaaagttatgatgtggacagcggtggcgaagactctgaagatcgtccctggcgaccaagccattcagtttatggtagatcaactattaaagagaatcatcttgttaacatgagaggaaggtatttccgggatctgtccgttgtgagggccgatgaaggggagaagacttgtccacaccccgaagagaatgaagtcgtagtgttccgaagcnttttgaaggctggactgcgattgcccttgagcagcttcgtcgt

SEQ ID NO: 74461 - DNA, 465 bp, Zea mays
taagccctggtgctgttcctgtgatttagtacctaagatagatgtatcttggaggatgtgtgttgattgtagggctataaataatattaccttcggtatcgccatcctattccacggctagaagacatgcttgatgaattaagtggttccacaatttttactaaaattgatttgagaagtgaataccatcaaataagaatgaaaattggagatgaatggaagaccacatttaaaacaaaatttgggttgtatgaatggttagtgatgccatttggtttgacaaatgctcctagcacttttatgagattaatgaaccatgtcttaagaactttcattggaaaatttgttgttgtctacttcgatgatattctaatttacagcaaatcttttgatgaacatgtgaaacacattcgacaagttttagatgagcttagaaaagagaaattatttgctaatcttgagaag

SEQ ID NO: 74462 - DNA, 450 bp, Zea mays
  unsure (1)..(450): unsure at all n locations
tgactgtcggaatcgaacgaagctccaacttgaagcctgcttctttattagaaaaaacttcggaagaaaaaagtatttaatttccacaaattcagaattaaatggccagagtacgttctaccgctagggttgagcatgaggggggcgaagctgaaagttcggagactgttcccatctccgaagcgatgcanagatccggactggtaacttcggaaaagatccccagtgatgatgcggaacaagcagaacaagcagttgccgaagcagaagaagatattgaggaaactgatcccgaagatgattatcgcattgccatgcctagcaagcccagccacttggacttcggaaagtctactgttttgaaggctgatctctccaagatggtaaaatcgggcttttttaatgaaaatcagaagaagctattacgcttcggnggagaagagactaccc

SEQ ID NO: 74463 - DNA, 454 bp, Zea mays
agcatcgctgaaaattatacaggtataatagtcttataaactaattgtgctcactgattactactacaagtgcatgtcgatacattcttcactactaatactaccacttatatgttaagaatcagcatgttaatcaaatcaacttgaaagtaccagtttatgctactacacacgtcttctattgatttttgcaaaccaaatttctttctattatatagctgagaagcttattgtctctgcttaccaaaaaattgtaatttcctgttgcaataatacttcagacaaaagttctcaaataaaaaaaaaatctaattatcatgtttacaatttgccaataagcactaaaatacatcttctcttatttattaggaaagtaatatcctattacatgccatttaattttataaatatctgacttttgctctctggtctatattgtacacgcaaggagctt

SEQ ID NO: 74464 - DNA, 448 bp, Zea mays
tctaaagggagaacacatgatagggttgactaatgtacaattctaaaaagatagaccttgtgcagcttgtcaagcaggtaaacaagtgggaggagcacatcacagcaaaaatgtgatgaccacctcaagacctctggagctgctgcatatggacctcttcggaccagtcgcctatctgagtatagggggaagtaagtatggtctagttattgttgatgacttttcccgcttcacttgggtgttctttttgcaggataagtctgaaactcaaggaaccctcaagcgcttcctaaggagagctcaaaatgagtttgagctcaaggtgaagaagataaggagcgacaacgggtccgaattcaagaaccttcaagtggaggagttccttgaggaagaaggaatcaagcacgagttctccgctccctacacaccacaacaaaatggtgtggta

SEQ ID NO: 74465 - DNA, 236 bp, Zea mays
aaatgtaataatgtaccagcctttatggttgcctataaataaatgaacagtaccccctaccgctgacgctggattgtaatcgctctcgcgtcaacaacttcatacaagccgaaggtatcaatgtaatataaattattgtaattttcatattgttatcataacataaatatattgatgaatgaatgaatgaatccatatattgtctctatgagctctcattctcatgaatgatgaat

SEQ ID NO: 74466 - DNA, 465 bp, Zea mays
  unsure (1)..(465): unsure at all n locations
aactaagcttccaatatcttatgtggcacatcacacatagctgaaataatctctcacgaagagctaagcgtgaaaagacaggtttgtactgtncatggcgactctcgacaagcttaggatgaaaatagaacagaagtcaatcgacatttactttattaccaacgaggctcgctcttctcgacagtgaggccattatttntaagaatatctgctattgtcaccaccgttgtaataggtgagaaaagtaaaagacaaaaattatcagattcggtagtgcaaaaataacatgcgcaatagaaaaatgaataatgtgctacctcagttctcgactatttgtcgccaactactttattttttttaactaaaacgcgataaatagaaaagaacggagggaggagggagtacatgtaacaataattcttgacgtgtaaattaacagcatatattgatacanatttgagctta

SEQ ID NO: 74467 - DNA, 419 bp, Zea mays
  unsure (1)..(419): unsure at all n locations
ctagctctatgggtccacgttattttatactctgagcatctggctggggaaggcaagtgtcctctgacccattatgtcccatntactttataatacactgtcccgcatactatgaacaacctaaggaattactagctttctatttaccttgtccttgatttaccttttgggttattatgggtagcttcatgctattgctttactttaatcaatgaacatgatgtgaacacttatgatacgatgttgccattatgattatgatgttggactggtgatactttaaggggctcgagcggtttctcgagtgcctctccgttaggaccttgtcgttgagagaccacccgggataacagtgcaaccatgaaggtgaaatgggatgcccttaactaattaattagaggaactagaggtgtagttgc

SEQ ID NO: 74468 - DNA, 448 bp, Zea mays
ggacattgctcacctgttggataccaataccatccttttgctagggcgtctcccattatagagcatgcgtctagcaaatataaatgtttcgttctctagttcatgctcaacaattttagcacttaatttagccatgtgatcattttgttgcttaatcatggcaaggtgatcatccataccttcaatattaacatctctacatctagtacaaagagtaacatgatcaacagtagatgtagatggcttgcaaacatttaattcttctatcttagcatttaatatgacattctcatctctaagacatgaaatggaatcattgcaaacattcaattctttaaacttagaaactaaactagcattttcagttctaagactagaatatgaatcatgacaaatactaagctccttagttaaggtttcacatttttctacttcccgagcataagca

SEQ ID NO: 74469 - DNA, 454 bp, Zea mays
ttagtgactatggagagtgatttgtagtgttcatttgatctcttgcgcttggatcgcttcttttctttggcattctttcttgtgatcaaacactcacttgtaattgaggcaagagacaccaattgtgtggtggtccttgcgggaagtttgattcccaagtgatttgagaagagaagctcactcggtccgagggaccgtttgagagagggaagggttgaaagagacctggcctttgtggcctcctcaacggggagtaggtttgcgagaaccgaacctcggtaaaacaaatctgcgtgtcacactcttcatttgcttgcgatttgttttgcaccctctctcgcggactcgtttctttatttctaacgctaactcggcttgtagttgtgtttatatttgtaaatttcagtttcgccctattcacccccccccctaggcgactatcaacagggaacta

SEQ ID NO: 74470 - DNA, 104 bp, Zea mays
acctcctggacgggtggggaccttcctttaccattattaccaccgtggacccaggtcctttttaaaaaataatattcctttggccattatgagaaaatttggtt

SEQ ID NO: 74471 - DNA, 442 bp, Zea mays
tcagctccatctatgttatggattggctttgagtcagtccaattgccttcggcccttcttgcagcttcctgacttccatggatagcaatgggtccctgatccgaaggtatcttcatgcaaagataggcaggatgaaggattgcttcgaaggcattgagggtaccacgaccaataattgcattgtaagggtattccatatcgacaatgtcaaacacaacttgctcagttctagtgttgttgatgaacccgaaggtcactgacatggtgatcttgcccagtgctacaatctgtcttcctccgaagccacagagaggatgtgtagcatcatgaatcttatcttctggctcttgcatctgtctgaaggccttagcaaatatgatgtcagctgcactgcctgtatcaactaagacattgtggaccagaaatcctttgataacacaag

SEQ ID NO: 74472 - DNA, 443 bp, Zea mays
  unsure (1)..(443): unsure at all n locations
ntanaagaaagtattgaatatatcatccggcatgcttcgtgataaagactctctaaagaagaagaacgagaagctcaacactatgcccaaaaactgaaatatccgaagggggcattagtgttcaatggcagcagggaggaagattttttgtactgtctcccggatagcaaagagatatatgtttgtcgggagatgggtagaagctttggatttccaacgttagaagatggcctctcattactgtcgaaggatgaattggctgacagtttagcatatactagcataaaggtatgaaaatcaatttttatttgaaaacgaattacttcattgtttatacttaatgttgtactcctcttgtagggcttgatccttagcaatgccctcagagcacaaaanaacatcgaagatgaagggtgtacaatggctctgaacaaccttcgttc

SEQ ID NO: 74473 - DNA, 453 bp, Zea mays
  unsure (1)..(453): unsure at all n locations
ntaccctgtagtctggactataagttggttacgggaggtgtgccttatgcagtttgaccatttccagcatttgcgtaatgaggactctagggagaagcctcgtagtgagaccctggccattcacctcggaagtgaatagggtctagctaacccgggctagaagggaatcacgactcatgggtaaagatgcgccacctctgcagagtgtaaaactgatatatcagccgtgctcacggttaagagcagcctggactcctcacatgataattgaacttgaagatggaaataaatcgagatccgatgatctgccaatggtttgcttaagtagtttcacttaagtgtttttgatatactcttatacctttngttaatgggaatacttgggattcacacttattagtaagacagttgttgttaataaaatgttgaccaactaaaatgcttactgctcaa

SEQ ID NO: 74474 - DNA, 451 bp, Zea mays
tcatgtgccaattaaagataatgatgatcttgacatgatcttatattaaataacataatagttggaacatgaatatactgtaatattaacccaaaaccatgtatagcaatagtctaatacccaaatgattcatggataaacaatgtgaataggataaacagactagggtgacctattgggtcccatcagaattacacctatgcatgaataattgatattaaagaacattattgggtaaaaagtggtcagatggcacaacttgccttcaatgagctcctgctcagcaacttctatcggctgggcaccaaaatcctcagtcacaggctcttctactcgccataatacaaacaagcacagtataaaggagaaattaacatcacatcagacatgtaacatagatacataataataatctacacattaaaataacatcatatgaacaggtatcatt

SEQ ID NO: 74475 - DNA, 205 bp, Zea mays
gcaagaaacgatgatgcataacccgacaatgcaaatatagattcctgcggggacaaaacgttcatggcatctgcaagaacaagataagacgaccacgtggaccctgcactactggggggttaaactacatccaggtgcctggaattaaacaagcaaatccaccaagctgctattaccttggacaacaaggacaccgagggcaaca

SEQ ID NO: 74476 - DNA, 472 bp, Zea mays
  unsure (1)..(472): unsure at all n locations
tactcaagcttaactttcgcattcaaacgaagctccaatgtagaatttgcttcgtcatgagaatagcttcggaagagaaggctattattttccaagaaattnttcaagaaattcaaaattaaatggccagagtgcgctctactgctagagttgagcgcgagggagacgaagccgaaggtgcggaaactgttcctatctctgaagcaatgaagcgatctggattgatgacatcagaagacatccctgctgctgaagcagaacaagcagatattgaggaggctgctactgacgatgattacaatatcgcagtaccgagcaagcctagtcacctggagttcggaaagtcgactatctcgaaggctgatttcccaaagatggtgaagtcgggctacttcagcgaatatgagaagaagatgattcgctttggtggagaagagattaccccgaagccacaataagatgaaatagtgat

SEQ ID NO: 74477 - DNA, 447 bp, Zea mays
tccttcgaaggatattctgtcaaaaatatccctcgttgtttaaatgagcatgctgatttgctagctaagtcagcagcacaggggctgcccttaccttcggatgtgttcttcgaaacaataaaagcaccttcagtggaacttcttgaaagagcagtcctcaatatatctcctgtttatagcgaagattggagaactgagatcatctcttaccttcagggtaaattcctttcagatgacgaaacttataacaggaggatagaggcaagagctcgtccatatgtcatgatagaaggggagatgtacaagcatggagtttgtgctccactactcaagtgtttatctagaaccgaaggcatagaattgatgaaagaaatacatgcaggcctgtgcggatctcacattggatctaggccgttacttggaaaagttttctgtcaagggttttat

SEQ ID NO: 74478 - DNA, 444 bp, Zea mays
tgtttcgaaagaaccttaaagttaagcgtgctcaacttttatcttttcttggatgggtgaccaaaggggaagttcttactagaaagaaaatcacagtccccggagtctgtatgactgagatattggtctggtaggtcttatgtgagttgatcatcatgatggatgagaagttgaatatttgggagatcggagtaacaatgtatagtaggatgaacgatgaataatgattatgaatgatccgtttaacggtgaatagttcatatgaacgaaagatgaacgatgaatatggattatgaaggaacgatgaacgataaatagtttgtatgaacgaacaatgaatatggataatgaacaaacgaacgatcggaattttggcagcataacgactgaacaaagattatttggacgaacgaatgaacaaactacaaaaatattttggatatt

SEQ ID NO: 74479 - DNA, 349 bp, Zea mays
acatgttgagagcctgtgcgttgcaagacaagtcaagatgggacaaaaggttaccttatgccgaattctcctacaacaatagttaccaggccagcttgaagatgtcaccgtttcaggcactctatgtgacggagtgtaggacttcgctgcattgggaccagcctggagagagacaggtgtttggccccgacatcttgcttgaagccgaagagaatatcacaatggttcgggagaacctgaagatagcatagtcaagacaacgaagctatgcggaccgcatgagaagagaactgagtttcgaagtgggagactacgtctatctgaaggtgtcacctatcatgggagtcag

SEQ ID NO: 74480 - DNA, 448 bp, Zea mays
  unsure (1)..(448): unsure at all n locations
cctcggtggtctatcaaagaactggacacaatgacaggcacattaacaactcaactntggggttatagtactcattgcttctcttgatgttgtagaggtcgtcctcctcactcccttggcacttgatgtcgaggaggtacttacaaagtagtggtggaaatatgtcgccaagtttatattcatggtctgagttgactctaggtcttctcaagccatttgatctaattccatgaaacctacaaccggacataacatgacattaatgtgctctcatgcaccatcacggaatgatagggcctagttcctaagaccgtgtcctaggctccagagccatggtgcaagcctccacacccatatcgttaagacctatgggttgcttgaataaacctttttcttcacatgttgagcttgtacttcttcttgctttggctagcaacgtcaaacaact

SEQ ID NO: 74481 - DNA, 410 bp, Zea mays
tagtgcctcatagagcatctagtggttgcatttgcatgatgactaacagcgctttgaatttcatgagttaaaatttctttcaaaagcgtgtttgaaaaactcgaattcttggatgcgcggaccgtccgggtgttgagggcggaccgtccgcgatccaccagtgggtccgaagtctgcccacttcggacttttactgttcctttgcactgcggaccgtccgagccttggggccagatagtccgcagtgctgatcagagaagtatgctttcgggacagtccctgaattatagtgcggaccgtccggcttggatggcagacagtccgcaggtgccaaatatggtttgggcagggccgtgtgttttttgtgttttggtctacagactgtccggaggatatcttcggacgatact

SEQ ID NO: 74482 - DNA, 438 bp, Zea mays
  unsure (1)..(438): unsure at all n locations
taccgcattgaagcatgatcgctttcccttggtcttagtctttcttggctgtccctttcgaccttttagcgccgtcttgaatcttttgatgatgagggccatctcttcatcattaagaccggcagcctcaatttgtgccaccttgctgggtagcgcctccttgctccttgttgccttgagagcaatgggttgaggctcgttgatcggaccattcaaggcgtcgtccacgtactttgcctccttgatcatcattcgcccactaacgaatttcccaagaacttcttcgggcgacatcttggtgtacctggaattttcacgtatattgttcaccaaatgaggatcaagaacggtaaatgaccttagcattaggcggacgacgtcgtggtccgtccatcgcgtgctcccgtagctccttattntgttgataagggtcttgag

SEQ ID NO: 74483 - DNA, 408 bp, Zea mays
tcgaaagattacgacttcattctcttcgggagtaggcgttgtcttctccccgtcatctgccctcacaatagacatgtctcgaaaataccttcccttcatgctatcaagatgactctgcttgatactcgattttccgaagactgtgtgacttggtcgccacggtcgatcttcggactcttcaccaccactatccgcatcataactgtcactgtcaccagtatcttcagataaaccctccaaattttctttagtaatcttctctgtattagtcttcgacaatgattgaagaaagcccagatgcatctcctcggaaagacttagcttcgaatcaccaacatcctttttatcttcagacatccttgtaaacgctgataaagtactctcgaaaccgaagctcaaaaatctaaa

SEQ ID NO: 74484 - DNA, 456 bp, Zea mays
  unsure (1)..(456): unsure at all n locations
ntagctccatctatattatggatggctnttgagtctgtccaatttccctcagcttttctggcagcttcctgacttccatgaatagcaataggcccttgttccgaagggatcttcatgcatagatatgctggatgaagaattgcttcgaaagcattaagtgtcccactaccaatgattgcattgtaggggtattccatgtcaacaatatcaaacacaacctgttcagtccttgtgttgtggacaaatccgaaggtcactggcattgtgatcttgccaagtgctacgatctgccttcctccgaagccacaaagagggtgtgtagcatcatgaatcttgtcctctggctcttgcatccgtctgaaggccttagtaaatatgatatctgctgcactgcttgtatcaaccagaacattgtggaccaaaaatcccttgatgacacaagatataaccatagca

SEQ ID NO: 74485 - DNA, 448 bp, Zea mays
aggacctataaaactcagctgtgttttgctccatccttttcttgggcttccccaccacttatgtcggaaataccctatttgccaagagttcttgcactagatctctagtgctgacttcggccactaccactctaaactccacttcggctagttggcactgggagccaagctgcatctggcacaaaggccttgtcattctgaagctcaaagtcagtggactcataaccatagtcattagcttctctctttttcttgtctgctttcatataaaaccattcactcttccaaccagttggccacttggtacggtagctaagaactggtgccttcgtatcctttcgatacgcaaaattgtagcaaccaaaattctcatgaaggtcgtctgcgctggccttcgtctggtaatgcagcacgtgcacccggcagaaagctttggcattaggactca

SEQ ID NO: 74486 - DNA, 402 bp, Zea mays
gggtctggtgaacaaatcccttgcagtgatcttgcccatattcgtgatagattgctcccaatcggcgctggaacaggggcagaggcaacgggaacacgtgttcgaccgcggctgacacccccggttcacgcccgttcgcgcaccgcgccttcccagtgcacgcccgcgcgcactcgccggtccacgaccggccgtgcaccgcgccgcgcctataaagcctttccaggcgcgccccacttcgccccgcactcaccctcaccggccagccacttccccttagctccggcaagcttatttccgcccgccattgccgccagagcttcggccaccgtggccagcccaccccagccatcttccgggcgagccagtgcttcggctagctctgctagtagcccataaagc

SEQ ID NO: 74487 - DNA, 447 bp, Zea mays
  unsure (1)..(447): unsure at all n locations
tatccatcaaccagcgaaggtgggatctactacacagcgtatctactgtcatatcaagaatgttagagaacccttaacgtcttatggcctgacgttgtctgtcattcaatatgtgaatgcttgcaatcacatcttgtgggttgcatctgacattgagcctctgttataaaatatagatccaaaaacaattgtgttattatcaaaaaaatgagaatcttacgaatatgatattgtttgttgagtatgcataaaactaacctgtcgggaaagatcctccgcttttatcctctttgtcacaacttttcttaaaactcttgtatggctttcagaaacattacgcttcttaacagctggcataaagtcatcgtcatcagaatccacctctattgnttctttgatcaaagtttgactgtcaacatttggaggatntcccacaatttgacttgg

SEQ ID NO: 74488 - DNA, 451 bp, Zea mays
  unsure (1)..(451): unsure at all n locations
ttggccccacctgcaggctcgcatcctcccctgatgtgtttcctaaagccactgtcggtactgagagcacctagaggggggtgaataagtgatcctataaaaatcaaacactactagccacaaaacttagttataagtgttagtacggctaagtagcttaaagcgagttcttgtgaacacaacaatcacagagaaagcaacacaagacacgctatttttatcctgtggttcggccaagtaacacttgcctacttccacgttgtggcgtcctaatggacgagggttgcactcaacccctttcaagtgatccgatgatcaactttaataccacagtttttcctttatgccccgtttgtttcgttggaattgaattccattntaataattacaatntagacaaaactaattaagttcatatatttatatatatgtaatatatttgtatattatc

SEQ ID NO: 74489 - DNA, 454 bp, Zea mays
  unsure (1)..(454): unsure at all n locations
ngacaatgaggaaatggcgctcgtcatcaagagctttcgttcaatcctcaagcaaaggagagggaaagactacaagtcccgctccaagaaggtttgctacaagtgtggtaagcccggtcactttattgcaaaatgtccattatcaagtgacagtgacagggataacgacaagaagggcaagaggagagaaaagaaaagatactacaagaagaagggcggcgatgcccacgtttgtcgggagtgggactccgacgaaagctcaagtgacttctctgacgatgaggacgccgccaacatcgccgtcaccaagggactcctcttccccaacgtcggccacaagtgcctcatggcaaaggacggcaaaaggaagaaggtaaaatcaagatcctccactaaatatgaaacctctagtgatgaaaatgctagtgatgaggaggataacttgcgtaccctt

SEQ ID NO: 74490 - DNA, 441 bp, Zea mays
taaccttgtaacgaggataagctgccttttgttccaaaatgtggatggtccttaagtctctttgaaatccttaagggtaaatgcttgagatatttataacatgctttcataagtgcataaaatgtcattagcatcacacttatactatgacacaatgcactttacactctttacgatatagacatggtctcattaacctaattatgtgcacttggcattttaaaccaaaaatttgttttcctctctatgcacatatttagggggagcaatctatattgtatataattgtttaagcttaattgatatatcatttttaatcatgactctttcctttggtacatttgcatatttcttatcttcattgtgtgccaaggctaagactaatatgttttcatgagcatctcatgtattaagtcttatattgaaagggaaatggagtat

SEQ ID NO: 74491 - DNA, 376 bp, Zea mays
  unsure (1)..(376): unsure at all n locations
cttgacatattanaacaggggtattaataactattccagtctacacatagaaaggccagatgcctacataagaacaagaacaaacctcaagacaaatgtagtcaatcccaccaagaagatcaatccgctcaggaacaaaatgtgtgtcagaaacaccattctgagttaaatctgatacttggtacatcatatttgataacatgcaaatgagcttgctgtgcactacttttgcccaagagtgctccacactaatctcaagaagagtcttaaccacctgttcaagattaaaaaaaacacagagatgaattggagaacattttcagcaataaaaacattcatacaaattagtaaacactaaacagtatatactccacat

SEQ ID NO: 74492 - DNA, 450 bp, Zea mays
  unsure (1)..(450): unsure at all n locations
ngagggagacttcgcgatacccatgaatgaagatcaagccatgacctctatgcggccgaccgaagagacaaagaggatcaacctgaggttcgccgatgaacgcaaaactgccatcatcagttccagcctcgacgataaataggaaagtgtgctcgtccgattcctgcaagataactgagacatattcgcatggcaacctacggatatgccgggagtcccgagagaactggccgagcacaaattgaaggtctatcctcaagcgaagccgattcgacagaagctgcgtcgtttcacgctcgataagagagaagctattcacgccgagttagctcgcttagtggcagcagggttcattagagaagtactgcatcccgagtggctggcaaatcctgttcttgtactcaaaaagaataaagtggattggtgcatgtgcgtcgactatactgatct

SEQ ID NO: 74493 - DNA, 480 bp, Zea mays
  unsure (1)..(480): unsure at all n locations
acctataaaactaagcttacaaccnctagtgggacttactgctacctttggatgcctgatttgctcaagaatgctggaggaagcttcagcagaatgactaccaaagttctcagctctcagattggtaggaatgttctgacgtttgtcgatgacatcatagtgaaaagcacgaagtaagaacatcatgttgctgatttacaagaaacatttgctaatttcagaagagcttgtctcaagctaaatccagaaaaatgtgtcttcggagtgaagaaaggaaaatttattggttgtttggtatcaacaaaggggattgaagctaatccaagtaagatataagctatacttctgatggagcccctgaagtcacgaataggtgctcagagattgacaggaaggctaacatcatttaatagatttatttcaagatcagcagaaaggaacatgcaattcttcgaagtgctgaagtcaatcgaagtcttc

SEQ ID NO: 74494 - DNA, 459 bp, Zea mays
tatacactaatgagcatcaagactatttatctttccttacctctttttgtggtagaagttctgaactaatgatcctaatatagctttatatctgctcatggtatagagtatggaaccatttgtccctttaggtctctcttgggtctgacccagctagagttgtgtctcccttgaacattactctactcctttttatagtgcaaaggacatatgttatatgaacctcagcttccacagtatgagacttaactaccttgtttttatcataatattggagtcacgcatggagccatgcttttgatcatggcacagtgtaaggggtgcccttatccagtcgactgtcgtacctaccgcaagggtagatatgacatgtcatgtccacaaccacggtcatgtcgttgggtacaatgtagttagtaaccaaagtatcagttttactttattatacttcatgataca

SEQ ID NO: 74495 - DNA, 458 bp, Zea mays
  unsure (1)..(458): unsure at all n locations
ntcatccttcttcttacaaatagtgctggacatcccgaatgcgaagtgcttgggcgaataaaacccttatccagcaactcttgcaattgcttcttcaattctgccaactcagcgggtggcattcggtagggcctcttggaaattggggccgttcccggttgcaactcgatggcgaattcaatatcccagtctggtggcattcctggcaattcatcagggaagacatctgcatactcacagaccactgggatcttcttcagaggtagctccgtcgtagagaaagcacatgactgagaagaaccctgactaggcagaattaaagtgaaattcccgcagaacggagaattaacttccacggtacgactggctacatcaagcacaacttggtgcaaggtcantccaattgctcctagaataatgtccacattntccaatcccaacacaagaagagtggtttt

SEQ ID NO: 74496 - DNA, 441 bp, Zea mays
  unsure (1)..(441): unsure at all n locations
tcggatgccagctagtggatttatgccaattatcaaggaatccctaaggttntggacggaatgggaattgctattctttctacttctagaagtataatgacagatcgagaagctcgactaatcagaattggtgggagggagaagttttatgttatatatggtaatggccccacctatagtacccaaattctatctcgaacttcctattttgaaaataaaaatagaaaaataggagaaaaatatatgacagaaaaaaatagtagagaaaaaaacccgagagaagcaaaagtcactttcgaaggtttagttaccccacgaaatgttccgcgttcgcctagagaatgacacgatcatcctgngctatatttcaggaaagatccggtctagctctatacgaatactgatggnggataggatgaanattaaattaagtcgttatga

SEQ ID NO: 74497 - DNA, 447 bp, Zea mays
tccttcgaaggattctctgttaagaatatccctcgagggcaaaatgaacatgctgatttgttagccaggtctgcagcacaggggctgccgctaccttcggatgtattctttgaaacaataaaggcaccttcggtggagttacttgaaagagcagttcttactatttcccctgtgtacagtgaagattggagaactgaaataatttcttaccttcagggcaacttcctatcagatgacgaagcttataataaaagaatagaggcaagagctcgtccgtatatcattatagaaggggagttatacaagcatggagtttgtgccccgttgctcaagtgcttgtctagagccgaaggtatagagttgatgaaggagatacatgcaggcctttgtggatcccacatcggatccaggccgttacttggaaaagtgttccgtcaaggaatttat

SEQ ID NO: 74498 - DNA, 397 bp, Zea mays
atcatgatcaatggggagcacaggcagaacagattattgaggaagaagcaccacaggccccaccaactcaaagtacgaacgacaatccaaagacctcaccccatcgatcagattcttggtgacatcagcaatggcagaactactctctcactatttggcggaacttgctctacggtgcaaattgatccaactggggagtgtagcaatgcaaacagggtttttgcacgagatggcgatatctctgttaatctagcctctcaagggcactgtgcggcggtatttataagtatctatgtgcccagcatcctgtgttaatgatgcatgtgccctcagacacctatgttattcccggaatattcccatatagcgggggtatagacccgaattatagggatgc

SEQ ID NO: 74499 - DNA, 462 bp, Zea mays
tcttggaggcgcgcagatccttgatggtggagtctttggttgacagcaatcgtccaagtcgcagaacttcgtcttgagatgcctgcagctcatggtggtgatggtttatgtcagacatggtgaagcggtggctcctctccaagatggtcaaggagttactggcatcacggtacagcctgtctagattgtcgcgagaagcaacaagtgctcgtttctcctcctgcaagcagaaaacaacattcagcattaaagcaataataacagagcagggttagccagggaagtttacctcatgtgccatccttttagaatcaagatgggcattcagagaagagttcagagagcgtgcactatccagaaaggtagaagtctgggctaagtccgccagactctgagaatacttctcctcaaggtcagagcatcattgagccatatctgataatgcagctaaaagataatgtg

SEQ ID NO: 74500 - DNA, 424 bp, Zea mays
ttctcaagccaactcttctcttgtacctcttcctctgctggccttttatcaatttccgaagggtggttatcaataagctctgaaggcctggcttcggcactaacttggttcactgcaccttgaacttccggcggtcttgtttcagcttccacttgtattttcgaagcctcggcaattttccctaaaggaatagaacttgaagcctttaccgtctccagcacatctagcacactggccatcctttttctcttgggggtcgtcgcaagacctttttgtgccttcgacactgtcacttctgccgaagggcttaaaacttctaatgtttttgccccttcgactcttgtctcctcaatattatcagtcttcggctcaactaaattggctgagggtgccttcgacattgcagccggctcttcaatcttct

SEQ ID NO: 74501 - DNA, 451 bp, Zea mays
tctaaagggagaacatgtgataggtctaaccaatgttcatttcgaaaaagatagaccttgtgcagcttgtcaagcagggaaacaggtgggaggagcgcatcacagcaagaatgtgatgaccacttcaagacccctggagctgctgcatatggacctcttcggacccgtcgcctatctaagcatagggggaagtaagtatggtctagttattgttgatgacttttcccgcttcacttgggtgttctttttgcaggataagtccgaaacccaagggactctcaaacgcttcctcaggagagctcaaaatgagtttgagctcaaagtgaagaagataaggagcgacaacggatccgagttcaagaaccttcaagtggaggagtttcttgaagaggaagggatcaagcacgagttctccgctccctacacaccacagcaaaatggtgtggtagag

SEQ ID NO: 74502 - DNA, 290 bp, Zea mays
  unsure (1)..(290): unsure at all n locations
ctattaggacacttaaactaagctgatgctgagggggggtgtctttgcttttgnacacaataaagcgccccctgaagctccctgatgcgttgctatgagggactgacccttaagctttaggcacttgttttacgtgtggagcgagcatctttccgattaaagccagactgtccggttttaagggccttacatgtggctccgcccatttgcttttgggacgggtcaccagccacgctgcatcatcgggtctatgcctgaacggtgaacgtaccacaatgcctggacatttg

SEQ ID NO: 74503 - DNA, 415 bp, Zea mays
tcgggatgaccagacccctgtgcaacatgaagccagggttaccatgccagctagccatggcagaattcagagaggtggctgaacatatcagtaccagtgatctagtgcaggaatacctggcgaacagggcatctccaatattgagtgtttggagcatgctgaacctgaaaggatcaaagaagaagggtgaacttgttcgattgccctatcgcttcaagtttgagaaacaattcaaagagcccagccaggaatggctagaaatgattgaaactatgtgcaacaaaattttgggcaattatacaaaaaaagaagatcaactgatgactgtggccttcggcacccgaacaaaacaaaggttgaatcgggtaatggatgctttgaactttgaataccctgactatgaacgactaaacaa

SEQ ID NO: 74504 - DNA, 430 bp, Zea mays
tcggctttggtaaatattttggcagcaaaacagtgcaatagcaatgaatgctgtggtaacttcacacctacccgtttgtttatatagtgccgcaggtgggaaggtgaatcgtcaaggtcttccgcactggacaaatagccacccgcactcactgaatggtgggccatagggtccaagaaggtgaatcgctagagcgcgcgtaactactacaagatcgggccacctcgcgcgtggattattttaatcgtttctcgccaatgagctcagggaaggtgtttttcagatcttcggcatcccgaagcctagaagactttttcacggatcaagctcgttacgaaagatgatctagcaccgcgaaggggctactgttgggggtatgcttcgtagccgaagatcctaaagaaagagaacaccttcggcagatcctctt

SEQ ID NO: 74505 - DNA, 462 bp, Zea mays
  unsure (1)..(462): unsure at all n locations
ngaagctggcctctgcgctatgacaaaggacgatcttgcagatagccttgcatataatagtctgaaggtacgaaaattgtatatttggaaatctataatttttaaattattcttttattgttatactaattcttttcatatagggtttaatacttagcaacgctttgagagcgcaaaagaatgctgaagacgagagctataatattgctttcaacaacctacgaacagaggttattaagctgaggaacgaagctttggaaaaagataaaattctgcttacattggtggataagataaaggaagacgaagctacttctaaagctcaagctgaggctcaaaaacgcgaaatcgaggatcttcggaaacagctaaccagagctaaagaagaacgcatacttgaagagacgaaacaagaacttagtgatcagtgggcaaatcatttagaaagaaatgttgaagagc

SEQ ID NO: 74506 - DNA, 472 bp, Zea mays
  unsure (1)..(472): unsure at all n locations
actaagcttccctntaccccagaacgtgatacaccctntattggtgaaacttttaggtagacataatcttcgacttgaaagtgcaagggttgacgtcgcttgtctgcataactcttctgtcgagcttgggctttgtcacacctggctttaaggaacaaagccaagtgcatctcatacatgcgccaagaagacaacatatgtaataacagagtgtatagagataaatgtcacaaaacatcagagtattattacatagcagaagtcttattacaaaataaaagataaaaacgaactaaggatcgtcattggcgccaatgtcaactgagaaacaccacctagatcaaatcaaactcctcgccttgtggctcctcctgtaccacttgttcttctcctgtggnggggggtgtgagatagcaagggtgagctcacacatgatcatagctcaacangttgtggggaaccagtggacatg

SEQ ID NO: 74507 - DNA, 437 bp, Zea mays
ttgcccacagccgagcgcagcgcagcggcggagcaagaagtgcggcgagaaatcccggcagccaccgccacccgcacaccgattacgagcttcaatcgacttcggcatgacccgaagactagccgagacgttccacaagccttccacggcgcatagcgcgtggtccgaccacggcgacggagcttcccaggcccggagtcggtccgccgcgccatcttccacacaggttgcgcggagcccataggagagggataaggggagggaaaacccacgccatggatttatagatgggtgaagtccgccatgctcgaaggaacggatccgcgattccttcgcggaggttgggatcgtcgcgcgatttggtggatatagagtccgggtggggagagcgcccgagcggaactagtcccagcatgcggaaggaggtcccaccagcg

SEQ ID NO: 74508 - DNA, 458 bp, Zea mays
tggatgaggtgtcatcatcatcatcatccgagctatcatccgtgtcccattcaactaagtaggctttgccatctttcttcttggtatagtatttctttttcttcttgtcactttcatctttgcccttcttcttcttgcttggacaattcatggcaatgtgaccgggttccctacactcaaaacattttctatcattgaaagcatttcttctagatgtttgacctcttctaggttgacctcttttcatcttcatgaatttattgaatttccttacaaataaagccatgtcacaatcactctcactttcattttcttcatcattgctatcttccttttcaattgcctttgaggccttggctttgagagcaatagattcatttttcaccttctttgccaaacttaaagcatcggcttgtgacttcttaaatatatcttgagtgagaatttctcccaatact

SEQ ID NO: 74509 - DNA, 460 bp, Zea mays
tccttgatctcgtagggtccaatgtaacgaggagcttacttgcccttgatcccgaatctctagacacccttggtgggtgacaccttaagataaacatggatccccacttcaaactgcagaggcttccgcctcttgtcatgatagctcttttgcctggcctgagcagcttctaagttcttcttgaagactctgacctttgcctctgcttcaagtaccaaatctggcccaaatatttccctctctcctgcttgagaccaattcagcggggttctacatcttctcccatataaagcttcaaaaggtgccatctttagactggactggtagctgttattataagaaaactctaccaaggaaagacacttgtcccaatcttttccgtagtgcagtacacatgccctcaacatgtcttccaaaatcttggttaccctttctgtctggccatctgtttggggatggt

SEQ ID NO: 74510 - DNA, 451 bp, Zea mays
  unsure (1)..(451): unsure at all n locations
tattaatatggtgatgagccccttataactaagcttctgcatgacgtggcccttgtgtaacctgtagcttgggtccccctgccagctagccgaggtggaattcagagttgtggcagagtatattagcattagggacttagtgcaagaatatttgacaaacaacacatttccatcttctcgtggatgagggatgccgaagagaaaggaagaagagaaaaatatgaacttgtacggctcccctaccgcttcaaatttcaaaagagttttggcaagccgtgtgccgagtggttggaagggatagagaagatgtgaaattaaatccttggaaattataaaaagaaggaagatcaactaatgacagccgccttcggcacatgggagaagcggagactaaatcgggtgatggatgccctangcttcgagtaccctgattatgaaagacttgatgatg

SEQ ID NO: 74511 - DNA, 457 bp, Zea mays
  unsure (1)..(457): unsure at all n locations
ctgcaggagaaggagatgatatgaagctctgggggtgctttataaagttaattcaactcaagctatcaatcttcaatgatctatatatccaagattgacctgaagttatttcaaattggtatgtctaaaactcatatcatctcacggaagatattgatgttgtaggaaataaagaattatcttgtgccgaaaaatcaaggcctacaacatggaggaaagccgaaggatggtaacacttgtgtttttaagtgcgagtatcttaaattatgatttctcatgtgtcttgtgtagtcacatagaaaaagaagcacttcaaatgtctctaaatttatattaccattctttggagaatttcctctcatatggtagattgcatactcatcatttccatactatggcaatctacatgctttaaatngttgcaagtatctcatggcatgtttctcgctaatcattc

SEQ ID NO: 74512 - DNA, 451 bp, Zea mays
  unsure (1)..(451): unsure at all n locations
tgagaaatatcttgatacagtccanagaatggaagcctcttttgaaggtttctcagtaaagaatatttgaagaggaaaaaatgaacatgcagatctattagctaagtcagcggcacatgggcttccattaccttcggaagtatttttttgaaacaataaaagcaccttcggttgagctcatagagcgagccgtgcttacaatcccaccaatgcacagtgaagattggagaactaagattgtatccttcttacaaggcaactgtccttcggacgacgaagcttatatcaaaataatggaagctaggacaaggccttacataatcatagaaggagaattgtataaacaaggagtttgctctccattgctgaagtgtttgtctagaactgaaggtcaggagctaatgaaggaaatacatgcagggctatgtggagctcatattgggtccatgac

SEQ ID NO: 74513 - DNA, 309 bp, Zea mays
ttccatcgtgtgcttgaacattccaatctgatctttcatttgaccgaggcgaccgccacaagttggtgttcttctgcagtccgaattcaccatgctcacatccttttccctttcggtcttctccctgactcctaagcaaaacaccgagtgcggcggtcgccctggtctaatatatgatggacatgaactcaacacgggattcccccgatggtggagatgaccagcactaccgcgagtaatgggaccagaaatcggaacttgtatcggtatatatgcatcagaagagtggatgccctcatcaatggactt

SEQ ID NO: 74514 - DNA, 368 bp, Zea mays
  unsure (1)..(368): unsure at all n locations
tcggagcgccgaaggtctcacaanacaccttccctgagctcgttgtcgagaaacgatttaatttccctgcgcgtagcggtcccaccgtgcagaattgctgttcggtctctgcggtccaccgtacagcgagtgcgagcgagtgtctgcctggtgtaaaacttctggcgcttcgccttcttacctgcggcactatataaacagacgagtaggtgtgaagttaccacagcatttactgctatttgcactgttttgctgccaaaatttttaaccaccgccgaagcttgtctgtcgaaatcaaacgaagctccatcttgaagcctgcttctgaggagaaaagtatataagtttcaagagttcatagttaaatg

SEQ ID NO: 74515 - DNA, 438 bp, Zea mays
  unsure (1)..(438): unsure at all n locations
tgtacagtcaacagtactgtgccagaatcgaagcatatctattgagagatatcctacccctgaaacaattnttacattcattgtcatttttctttctaataaggaacaattattgaaaaccttgntctcttgtcatttttcatttcttgtaatagcttcgttcttgcaatagtgaaatatatcttctccacagactcacgaagttccaaaagtttgtcgaagctacaaaaagtcgttctaaggaacgcagcgtaagtttgtcgaagctacaaaaagtcgttctaaggaacgcagcgtaagtttgccgaagctacaaaaagtcgttcctaagggagcgcagtgtaagttttctactcaaaagtcgttccaataaagcgaagcgcgaaaagtcaacgtgaataccgccgaaatagaaggagaagaagttcaaaagacgtt

SEQ ID NO: 74516 - DNA, 435 bp, Zea mays
  unsure (1)..(435): unsure at all n locations
agcttgcaagagacacctaatggtgtggtgtattttgcggngtcttagagacccgtgagattgagaaaaagcactctaccagtccgagtgaccgattgagagagggaaagggttggaataaacccggcctttgtggcctcctcaacggggactatgttctttagaaccgaacctcggtaaacaaatcactgtgtttatttgtgttgatcttaactcgatttgtttctcctcccttcctctctctaaagctgcctngctcatattaatttgtggtggctcccaaagttattcacattgattgagcaactcttggaaaggagaactatctctcgcactccgaattatctcttacactaacccctatcatagtgtgtggttaaaggttggaatatcagattcgcttattactcgccccctcttgcgacttttaatgga

SEQ ID NO: 74517 - DNA, 387 bp, Zea mays
  unsure (1)..(387): unsure at all n locations
tgttgcttgaataatcgaatntccaaatatgtatgtagttgcaaacttgctctgcttanttgcagatgtcacaagcagaagagccaatgcctcaactagcgttgactgagaatgttcgagtgccagagaacctagctgaagagcctgagaaagagattgctgaagtagctgcagagaaagaggtgaagaaaagaaaagctatggcacctagatcagaggtatggcagagcttcaccaagatcatagacaataattctagtgttattaaggaagctaggtgcaactattgcaagattgttataaagtgtgaggcacaagtgaatggtacatctgcattatgcanacactttgaggtatgcaaaaagaatcctataagatcaatgatga

SEQ ID NO: 74518 - DNA, 351 bp, Zea mays
ggatcttaagcacctgggctgcaagcttcaaagtcaagatcatagaatttattttggagctaaaagttatggccaaaatacgacaagcgagcatgggctgaccgatgcacaccggaccgtccggtgcgccatctacggaagctccaacggctacctttaacggctagtacatgtggcatgttcggtgcaccaccagacagtccggtgatgaaagtagtagtgatgatgaaggtgagggaaatccctccgtagatgagcgttcggaagtgcgtaaattttttcagaatgtctgcactaaacaaaaagcccaacttagaactttgaaacataagttgattatctctcaaaatg

SEQ ID NO: 74519 - DNA, 340 bp, Zea mays
  unsure (1)..(340): unsure at all n locations
tagcacatcacagtgcacaagagctaannaatgagtgagcgggagtggttggccanaaagcgtgcaaaatgagtttgcggtatggccgtatttatacgctcggtgcgttgaaagttgaaagaccccacttgtcattgattgttgctattctagcaaagggaaggtgttttttcggaccttcggcgtaaagccttcgtccatatcgcaatctaaatttattatttcgaacaaattaatattgcgaggggctactgttggggaccttcggcgtccgaaggtcctcaaaaacaggatttaacagtatttctgtannnnntgtgtgaacaggtatcctcggact

SEQ ID NO: 74520 - DNA, 459 bp, Zea mays
  unsure (1)..(459): unsure at all n locations
agcttatgaagattcttcatcccaacatggtctagtcggcgatgccagagccaacccatattagtcttagcaattaagcaagtatcgagtttagctttgttaaaatcaactaagtatagctgaccctctaatactcccttaaatgctactaaatcatcacttcttctaaagacagtaacacctaaatccgtaaaaagacagttgtaacccattttgcataattgagatacagaaggcaaattgtaatctaaagaatctacaagaaaaacattggaaatagaatggtcaggtgatatagcaattttaccaagtcctttgaacaaaccttgatttccatccccgaatgtgatagctctttggggatcttcgntnttctcgtaggaggagaacattcttttctcccctgtcatgtggtttgtgcatctgctctcaattatccaactctgagccccggatgca

SEQ ID NO: 74521 - DNA, 421 bp, Zea mays
  unsure (1)..(421): unsure at all n locations
tanggtttccttaaggtcttcgctaatagcaatagcacccaagcgaatttcttcttggtgctgactcagaacttttgatttagaatgagcattagttagctgatgctcaagctccttaatgcaattctgatcagcttggtgttgcgtctgaagttctgtcacctgatgctctaatccaataattcgctcagcttgaatctttgtgtcctcccagtgttcttgtgcctgngtacaagccctattcttgccatttccatcatcttaaatgttgcataacttccagtgtacaactgctgccacatttgacgaatgtgccctcgagtaagctgcaactctagcacggncatcaatactcgagcagatgccgatttacagaatctgccaatangatgcttttcatatcggctgtgatgatcacatg

SEQ ID NO: 74522 - DNA, 418 bp, Zea mays
  unsure (1)..(418): unsure at all n locations
agcttctaaagtgagaacacattgtaggactatcaaatgttcattttgagaaagacaggatttgtagcgcatgccaggcaggaaagcaagttggtgcccatcatccacacaagaacatcatgacgaccgacaggccgcttgagctactccacatggatctattcggcccgattgcttacataagcatcggcgggagtaagtattgtcttgtaatagtggatgattattctcgcttcacttgggtattctttttgcaggaaaaatctcaaacccaagagaccttaaaaggattcttgagacgggctcaaaatgagttcggcttaaggatcaagaataatagaagcgacnacgggacggagttcaagaactctcatattggaaggttccttgaggagganggcatcaagcatgagttctc

SEQ ID NO: 74523 - DNA, 478 bp, Zea mays
  unsure (1)..(478): unsure at all n locations
tctaaagggagaacacattntaggattaacaaatgtttattttgagaaagacaggatttgtagcgcatgccaagcagggaagcaaattggcactcatcatccgcataagaacattatgacgaccgacaggccactggagctcctacacatggatctatttggcccgatcgcttacataagcatcggcgggagtaagtactgtctagttattgtggatgattattctcgcttcacttgggtattctttctacaggaaaaatctcaaacccaagagaccttaaagggattcttgagacgggctcaaaatgagttcgccttaaggatcaagaaaataagaagcgataacgggacggagttcaagaactctcannatgaagggcttcttgaggaggagggcatcaagcatgagtntctcttctcctacacgccacaacanaatggtgtagtggagaggaagaatagaactctattggacatg

SEQ ID NO: 74524 - DNA, 392 bp, Zea mays
agcttctaaagggagaacacgtgataggtttgactaacgtacaattcgaaaaagatagaccttgtgcagcttgtcaagcaggtaaacaagtgggaggagcacatcacagcaagaatgtgatgaccacatcaagacccctggagctgctacacatggacctcttcggacccgtcgcctatctgagcataggaggaagtaagtatggtctaatcatagttgatgactttcccgcttcacttgggtgttctttttgcaggataagtctgaaacccaagggaccctcaagcgcttcctcaggagagctcaaaatgagtttgagctcaaggtgaagaagataacgagcgacaacgggtcggagttcaagaaccttcaagtggaggagttccttgagg

SEQ ID NO: 74525 - DNA, 454 bp, Zea mays
tgccggaattgccatcaaggaagctccttcacttttctcatcccctcactgtctcatggcaaagggagatgctaaggtaaaaatcaacaccgatttaaatgatataaatgatgatgttgatgatgatggctattcatatgatgatcttgttagaatgttaggtgaggccgatgactacatgcacaaataaaaagaaaaatttaagaccttgaaggaattgtataaaaacctccaagtgtctttttaggagctcaagacctctcacaacgatctaaaagagaattgtgagaagcttgcggaagctcaaaacttatctattgtgcatgaagttattgtggtcaccgaggatgttggagtcacttgtgacttacttgatagtcccacaagtgaaccactacctactaactctatttgtgataaatgcaaaaattctcttatgaatgatatatttgtc

SEQ ID NO: 74526 - DNA, 280 bp, Zea mays
agcttgtggaagaccagatcatcaaagcatatatttttctggatgagaagtgatcacccaagttccgttgatgaagcaccagaagaccaatcaaggaaggaatcaatgtggaattttgcaagaggaaggtttgtgtgttggcatcgttgcttactcaataagttggctgcccagcgaaacctataagcctgaagatggtctttgagtagccagaatcagcgtttgcaatcagcaaccggatgctccgcaagggccagattttgttgaagttccatctcct

SEQ ID NO: 74527 - DNA, 299 bp, Zea mays
tctaaagggagaacacgtgataggtctaactaatgttcaattcgaacaagatagaccttgtgcagcttgtcaagcagggaaacaggtgggaggctctcatcacaccaaaaatgtgatgacaacatcaagacccttggagatgctgcatatggacctcttcggacccgtcgcctatctgagcataggaggaagtaagtatggtctagttattgtagatgacttttcccgcttcacttgggtgttctttttgcaggaaaagtccgaaacccaagtgtcggggaccataattaggggtaccc

SEQ ID NO: 74528 - DNA, 435 bp, Zea mays
  unsure (1)..(435): unsure at all n locations
agcttctaaagggagaacacgtgataggtttatctaatgtacaattcgaaaaagatagaccttgtgcagcttgtcaggcaggtaaacaggtgggaggaacgcatcacagcaagaatgtgatgaccacatcaagacccctggagctgctacatatggatctcttcggacccgtcgcctatctaagcatagggggaagtaagtatggtctagttattggtgatgacttttcccgcttcacttgggtgttctttntgcaggataagtctgaaacccaagggaccctcaagcgcttcctcaggagagctcaaaatgagtttgagctcaaagtgaagaagataaggagtgacaacaggtccgagttcaagaaccttcaagtggaggagttccttgaggangaanggatcaaacaccaattcttcgcttcctacacaccac

SEQ ID NO: 74529 - DNA, 455 bp, Zea mays
  unsure (1)..(455): unsure at all n locations
agctntatgagtgatagctgcggcactacntttgagaggatctaccgaaggtgtttctttcttcaggatcttcggctacgaagcatacccccaacaagcatgatcatagcatctatcattatgagcatgcctagtaaatttcctatcatacatataagcatgattcttttgagaactactagccatagggcccttccctttctccttgttaagaacaggagtcttttggcttgttaagttcttggtttcctttcgaaaaccaagtccatccttaattgaggggtgtataccaatggtgtaggcatccctagcaaattttaatttctcaaagtcatctntgcaagtcttaagttgagcattaagacttgtacctcattgtcaattagcgatagtggagcatgttcataaaataacatcttacacctatgcaataacacatgtctacacatgactag

SEQ ID NO: 74530 - DNA, 396 bp, Zea mays
  unsure (1)..(396): unsure at all n locations
nggatggatcaatnggaagccctttacttggagtagtctcctccttctcttcccgtgccttgaaggcaacggcttgtggctcaggtgtgaaagtgttgccttgagctatgttctcaatatgcttggagtctttgaccataagttcaaagctcataaacttttcaagcacctccttaggagacaacacttcgtacttaagatttatatgaagtaattgaacaagagtagtattacaaaatacaagtgaccttagcatgagtttgacgacttcatagttgatccacttggtgcttccgaggttctagacttggttcatcatcgtcttaagctggttgtacatttcttgtagctcttctccttttgtgagggcgaatcgtccgagctcttcttcgatca

SEQ ID NO: 74531 - DNA, 450 bp, Zea mays
  unsure (1)..(450): unsure at all n locations
agctncgacttcatcaatgttgtggatggctctttaatctgtccaattccactcagcctttctggcagcttcctgactcccatgaacagcaataggtccttgatccgaaggtatcttcatgcaaagatatgctggatgaagaattgcttcgaaagcattgagtgttccgcgaccaatgattgcattgtaagggtactccatgtcgacaatgtcaaacataacttgttcagtccttgtattgctgacaaatccgaaagtcactggcatggtaatcttaccaagcgctacaatttgtcttccttcgaagccacaaagagggtgcgtagcatcatgaatcttgtcttctggctcttgcatctgtctgaacgctttaacaaatataatgtcgggtgcactggctgttgcaaccaanacattgcggactataaatcctttgatgacacaagatat

SEQ ID NO: 74532 - DNA, 458 bp, Zea mays
  unsure (1)..(458): unsure at all n locations
cactcaagcttaatgtccngatttgccatcaatgaagcccctttctatttctctccnctcatcgtctcaaggcaaagggagattctaaggtgaaaatcatcaccgatttaaatgatataaatgacgatgatgatgatggctattcatatgatcttgttacaatgttacgtgaggcctatgactacatgcacaaaaaaaaagaatagtttacgaccttgaaggaattgtataaaaacctccaagtgtcttttgaggagctcaagacctctcacaacgatctacaagtgaattgtgagaagcttgcggaacctcataactcatctattgtgcatgaagatgtggtggtcaaccgagactgtggagacacttgtgacttacttgataggcctacaagtgaaccacaacctactaactctatatgtggtaaagcacacattctcttatgaatgataatattc

SEQ ID NO: 74533 - DNA, 365 bp, Zea mays
  unsure (1)..(365): unsure at all n locations
agcttcagcatctttatgtgcgtgttctttctgagcccctggcatccagtcagcaatgggctaacgcctgngactagattgaggatctatgcacatagtcaatactaaattcattaagcttcgcagcccactttccaatccttctagtagcttctctgttcctcataatatccttcagaggctgtgatgaaggaacaattatgtggtatgcttgaaaataataccgaagcttcttagaggccattaagatagcatacaacaccttctccaattctgtatagtttttctgtaaaaaacttagaacttcggagacaaagtatactggggctggcattttaatttgtccttcagcttcttctgtacaa

SEQ ID NO: 74534 - DNA, 330 bp, Zea mays
  unsure (1)..(330): unsure at all n locations
ntatcaatggacgngaaaagagccttcctcaatgtgaccttcaaggaagaggtctatattgagcaacctctcgactttgaagatagtgagtaccctgaccatgtttataaactcttaaaggcgctttatgggctcaagcaagccccaagagcatggtatgaatgcctgcgaaattttcttatcactaatggcttcaaagtcggaaaagccgatcctactctctttaccaaaactatngcaaaagattttgttgtatgccaaaattatgttgatgatatcatatttgggtctactaacaaatctacttgtgaagagttagtatgatcatga

SEQ ID NO: 74535 - DNA, 443 bp, Zea mays
  unsure (1)..(443): unsure at all n locations
agcttggctttcttggcccaagctattgttctttagttaacagcccaatcgagcgctaaatctcgttcatcaagttggtcttgcaggtggtggatgtcagttcttaattcgtttattctttcaccatcctcgacccatacatcgttcctgtgaaggagctccgatcgaagctgttctacttgagcttccagatctccgattggatcattgctaccactactactgtcttcatgccttggagctagttgatggcgaggtacgccaatgggtccggtagactcgcgcacggtttttcttatgcacggtggcatatctccatgaggggaaaatcatattangtatggttntatcatgatgcatgcatatntacagaatcaaccttagtttattcacaaccttctatacattgcactctactatctggggtcttaaatgagtatttc

SEQ ID NO: 74536 - DNA, 363 bp, Zea mays
  unsure (1)..(363): unsure at all n locations
ntcaggcataaccataaccatttaagtgtttcgagtttcgtcatctaaaactgaccttacacgtcccagactctgctatatgtatcatgttntgtatcttataaaccttctcttatatctttgaaagggaagcacgctccttattttacctttagggctagtttgggaacaacgtttttccaagggatttcaattttcccaagggaaaatgaactaatttcccttggaaaaataaaaacccggtgggaaaatgtggtttccaaactatgccttaagaaaaaaaaactatttactctttgaaatgttgttttttctcttcaaccgtatttgcatctataaatacctcacgtgtcacacagtcta

SEQ ID NO: 74537 - DNA, 202 bp, Zea mays
ggatccttaagtcacctgcggcatgcaagctttggcagagagggaagtgcatttttttatccccgccacagacagtccactgaagtaaataatgccatctacgaggtttgctgtgagactgcgcagtagtcatacaagttatggatgttccataagttatcttttgcaaattctcctataacaacagctattatgctacact

SEQ ID NO: 74538 - DNA, 448 bp, Zea mays
  unsure (1)..(448): unsure at all n locations
tgagaatggcttgccgaagcaacagatgtcttatgctgttggttgcctacatactctaggacataaggagagtagcatgaagtagtgtggaggacttgcttctgctgattctgccgcgcttcagcttcagcaatttccttctgattctgaatggtgacatgacacatccttgttgtatggcccttgtcctcgccacaaaaaaggcagtacaacttttggggttgatttccaaaccttccaccaccaaaacttcttcctcctctacctctcggagctggcggtctgaaagaagtctgttgcatgctcaaagtctgagaattatgatggctatgttgagcattgctggccctatcatcgctggtattggagttgtggaatgatcggacatgcctggggtgaagtcttcttcgaagcacctgtcatctcnaaaacctgatgctctctcctt

SEQ ID NO: 74539 - DNA, 457 bp, Zea mays
agcttgaagctggattatgcgctatgatgatggatgatcttgcggatagccttgcatacaatagcctgaaggtgcgagaattgtatatttaaaaatttacaatttttgaatcattcttttattcttatactaattcttgtatatacagggcttaatattgagcaacgcgctgagagcacaaaagaatgccgaagacgagagctatgacattgctttcaataatctacgatcagaggttattaagctgaggaacgaagctctagaaaaagataaaattctgcttacattggtggacaagataaaggaagacgaagctttctccaaagctcaagctaaagcccaaaaacgcgaaatcaaagatcttcagaaacagttagccagagctaaagaagaacgtatacttgatgagacaaaacgagagcttagtgatcaatgggccaatcatttataaataaat

SEQ ID NO: 74540 - DNA, 350 bp, Zea mays
  unsure (1)..(350): unsure at all n locations
ngccaatacttgtcaaagcaacaacacctgccagcacagcaactgcagaccataccagtgacttggcctttcgcatgctggggactggatatgattggacctttcaagaaagctcaagggggatacactcatgtattggtggcgattgacaaattcactaaatggatagagttcaagcccattgcctctttaacctctgttaaggccgtggaattcatacaagacataatattcagattcgggataccaaacagcatcataactgacttaggatccaacttcacaagttcagaattctttgacttctgcgagcaaaagagcattcagatcaagtatgcatctgtagcaca

SEQ ID NO: 74541 - DNA, 360 bp, Zea mays
  unsure (1)..(360): unsure at all n locations
agcttcgatgaccaagagatcaaactctctgttatttacaagaatgaataccctgagcatctgtttggtgaaggcaagtgtcccttgacctatctatgtcctatgcaagtctatgattcactccccgcatttatatctttatacctaaggattgactagcttttgttatccatgtccttgtttacctatttgggttggattattattattgtttagctntatgctattgctcaacactaatcaatgaacatgatgagatttaccaatgatacgtggtttccccttctttattatgatgttatacttgtggcatttaagggactcgngctgttttccgagtacctcttcgtaaggacctgt

SEQ ID NO: 74542 - DNA, 345 bp, Zea mays
  unsure (1)..(345): unsure at all n locations
atatcacctttgcacattagctatattctctctatagtgcaaaagagaattacaagaagtaattgccttatactatatccgtatatgtatttgaaaagtaatatttaaagaaggcctataatactttaaaatttacaagaagtaaatttacaagaagtaattttcggtctatgcttttgggctaaactacaattataagaagcattgatgatggcataaaaggatcatggattgaaggtaattgtacagtattatttattacctttatgcaatacatttacgaaattactagtgcaattatatttcatggctattaatnttcatgagaagcatataccacttata

SEQ ID NO: 74543 - DNA, 384 bp, Zea mays
  unsure (1)..(384): unsure at all n locations
agctngtctgggcccaccatagtatccaccttctatctcgatgcctcatccatcgtcaagcctgctatcctctgcctctgctaccccctccattgatgcatactaactctagatctaggctgacttcactagaatcacctactgtcatgacgatctataaaagaaaagatgtggtaagggagatggagaaggaaggaagaaaacaaactcaccttgatatattaaagaaaagatgtcgtaagggacggtccgnctataaatcgaggatggtccgtaatatgtactaaaattcaaccaggaacttaacacctttgggtagaaatgttggtgtgcaacggacggtcagagacctgtgacccgacagtctgcggcctacgatcggac

SEQ ID NO: 74544 - DNA, 475 bp, Zea mays
  unsure (1)..(475): unsure at all n locations
ntngacacaacaaaaactctattctacaaatttcaaaatctctcaagtggtagctgatccatttatcactttggcctttattttctccccctttggcatcaagcaccaaaacgggatcaatcttggcccttttaacctcattgcctcaccaaaatcgtcaatgaagagtacaaaggcaataagatttcatgagatgaacttggaattagttaccctctcatcagagtgcagtggaagtctttcatggtccaagtccaccttttccctttcaatcctccttcgagactcaatcaagcaaactcaagcaaatggttagtctcaaagggtcaagttgtaacacatctccccctacacatgtgcatcactttgcaacggacgtgtgaggtccagggagagttngtacaacttgagcaccataataagcaacataatgcanaaaggaacatgatcaanagcataaatacatgtatgctat

SEQ ID NO: 74545 - DNA, 402 bp, Zea mays
agcttgctagtgtgtggtttctctcatcatgtcatgaggagcatggccgaccataaggaggagcagtctgtgatggacaagatctccgagaagttccacggcggggactcctcgtcgtcgtctgactcggacgacgagaagaagaaggggtcttcttcggcgtcggcgacggaggccatgaaagccaagatctaccgtctcttcggccgcgagaggcccgtccactctgtcctcggcggcggcaagcgtaagccatcctcccttccccccgatttgtatacccgattctctccttttctccctctagatccgatctagctatatttgtgcttgctcgtgctaccttgtactgctgcagaatacaatactagttcgttactttgttaataagctccatcatga

SEQ ID NO: 74546 - DNA, 457 bp, Zea mays
  unsure (1)..(457): unsure at all n locations
tcggctccatctatattatggattgctntngaatctatccagttttcttcggcctttctggcagcttcctgactaccatgaatagcaataggcccttgatccgaaggtatcttcatgcaaagatatgctggatgaagaattgcttcaaaagcattgagtgtcccacgaccaatgattgcattgtaggggtactccatgtcaataatatcaaacacaacttgctcagtccttgtattgttgacaaatccaaaggtcactggcatcgtgatcttgccgagcgctacaatctgccttcctccgaaaccacaaagagggtgtgtagcatcatgaatcttgtcctctggctcttgcatctgtctgaaggccttagcanatataatatcccctgcactgcctgtatcaactagaacattatggaccagaaaccctttgatacgcaagaaataccatagcatca

SEQ ID NO: 74547 - DNA, 323 bp, Zea mays
agcttctaaagggagaacacgtgataggtttgactaacgtgcaattcgaaaaagatagaccttgtgcagcttgtcaggcaggtaaacaagtgggaggagcgcatcacagcaagaatgtgatgaccacatcaagacccctagagctgctacatatggacctcttcggacccgccgcctatctaagcataggaggaagtaagtatggtctagttattgttgatgacttttcccgcttcacttgggtattctttttgcaggataagtctgaaacccaagggaccctcaagcgcttcctaaggagagctcaaaatgagtttgagctc

SEQ ID NO: 74548 - DNA, 430 bp, Zea mays
  unsure (1)..(430): unsure at all n locations
tctnagggagaacacgtgatagggttgactaacgtacaattcgaaaaagatagaccttgtgcagcttgtcaagcaggtaaacaggtgggaggagcgcatcacagcaagaatgtgatgaccacttcaagacccctggagctgctgcatatggacctcttcggacccgtcgcctatctaagcatagggggaagtaagtatggtctagttattgttgatgacttttcccgcttcacttgggtgttctttttgcaggataagtctgaaacccaagggaccctcaagcgcttcctaaggagagctcaaaatgagtttgagctcaaggtgaagaagataaggagcgacaacgggtccgagttcaagaatcttcaagtggaggagtttcttgaggannganggatcaagcacgagttctccgcttcctacacaccac

SEQ ID NO: 74549 - DNA, 253 bp, Zea mays
  unsure (1)..(253): unsure at all n locations
agcttgnncaattgaaaacatattttcgtttctataaaatactatgcgacgttttatcgacaacaattacacacaacattaacagccaatggtaattaatgttgaaaatttgaatttattaattcaaaaattaataaatacacattnttgcacatcatttgtatagcgtgaattgggaagaaaacaaagaaaacagaaaaagaaatggaaaaaagggaatctgttaacactatagctntagcggaccgaattt

SEQ ID NO: 74550 - DNA, 366 bp, Zea mays
  unsure (1)..(366): unsure at all n locations
tctaagggagatcatgtgttaggactaaccgatgtctgttntgagaaagacagacctcgtgtagcatgtcaagcacggaacaggtgggaagcactcatcacagcaagaatgtgacgataacatcaagaccactggaacttcttcacatggatctcttcgatcccattgcctatctcagcatcgggggaagtaagtatggtcttgttatagttgatgatttttcccgcttcacttgggttttctttttgcaggacaaatccaaaacccaagggaccgtaaagcgcttcttaaggagagctcataatgagtttgagcttaaggtgaagaagataagaagcgacaatgggtccgagttcaaaatctaca

SEQ ID NO: 74551 - DNA, 472 bp, Zea mays
  unsure (1)..(472): unsure at all n locations
agcttcgatgaagttttctgagttgtctgttttgattaccacatcatcgatgtaggcttccacccgcttgccccagtgatcggctaagcatgnttggatggctctctggtaagttgctcccgcgttcttgaggccgaatgacatgcaggtatagcagaaagctccaaacagggtgatgaaagtagtcttctcctcatcctcttttgccaagctgatctgatggtatccagaataacaatctaggaaggatagcatagaacagccaacagtcgagtcgactacctgatctattctagggaggccaaagggatccttcggacaatgcttgttaagatcgatatagtcgacgcacatgcgccaatccactttattcttnttgagtacaacaacagggattgctagccactcgggatgcagcacctncctaatgaaccctgcactcactnaagcggctagctcgacacgaatagct

SEQ ID NO: 74552 - DNA, 352 bp, Zea mays
  unsure (1)..(352): unsure at all n locations
ccttttctttntattnttctgttntctttcttcttctcttctaggggggaatttgaatttgaatttagttntcaaaccttgtgtacatttgttatcaaatcatattatggaatgtaaaatacaaatttttggaatatatttatattatttatattttcatatcctttctatgcttactttcaaaccctaattntcaatttagggtttactccaatttctagtcatttttatattattattatttttatttaatgcacaaacataaaaactccaacaaatgcactttcttttattttagaatcattattttatttagtcactctcaattacataggtgctctttttatgatgc

SEQ ID NO: 74553 - DNA, 381 bp, Zea mays
agctttctagtagagctgatgattttggattctatgtgatacttggaatagactacttgaccaagtatgatggaataatatcctatgccaaaaggatggtttcattaaccagtccgcaaggagaaagaattgaagtcaatgtcagtatgccagcaatagcagaggtaatggtaaattagttggaagagaaatctttggagcacatcagaatagtgtgtgaatacccagaagtatttccggaagaattaccaggtatgccacctgatcgtcatatagaagtttctattgaactattacctggaaccgcaccaatttcaataaaagcttaccgaatggatgtcaaagatttaattgaactgaagaaactaatagaagaattac

SEQ ID NO: 74554 - DNA, 434 bp, Zea mays
  unsure (1)..(434): unsure at all n locations
gccttggacgctcagaagtctgccaatgttcgtcctaaacgttctcgtcgagctgttcaagcctcttttcctgctgaaagggagaaaaagaagaagatacgtcttcgtcgggtgtctagcttggatcagggtgccggcccttctgctcctgttgctgaggaagtgccagtgcctgaatttactgaagctgatcccaatgggtgtgatccgtctgacgctgatcccaatgggtgtgttgtccgtgttgttgatgaggatgatgaagaagagggcgagatccctctgattcggaagaacagccgtcgttacatagctagtggggaaagtagttgtgttccttctcctgccttgtctgccctcattggtctgcaagaattatctctggcaaactttgatcanactcttgatgacatggttccagaagatctgttatc

SEQ ID NO: 74555 - DNA, 390 bp, Zea mays
agcttgaagccatggtaagtaacataggcctatattatacggattgactcacgcctagctacgggtgcataggtgtcaccgaaatccaaaccttcgacttatgagtataccttggccacaagccgtgctttgttccttgacaccacaccatgctcgtcttgcttgttgcggaacacccatttggttcctacagacattttgattaggacgtggaactaaatgccatacctcattcctagtgaaggaggagagctcctcttgcattgccaccacccaatccaattgttgaagtgcttcctctaccctgtgtggctcaatagaggaaacaaaagagtaatgctcacaaaaatgtgcaacacgagatctagtggttacccccttataaatgtc

SEQ ID NO: 74556 - DNA, 307 bp, Zea mays
  unsure (1)..(307): unsure at all n locations
tctacagggagagcacaatctatgattaacaaatgttcattctgagacagaaaggatnaggagcgcatgcgaagcagggaagcaagttggtgctcatcatccacacttgaacatcataacgactgacagacctgtggatcttctacacatggacctatttcgctcgaaagcttatataagcatcggtgggaggaactactgcctaaatattgagaacgaatattctcacttcgcttgagtattcttgtatcaggacacatatcataccgctgagaccgtagagggattcttgagacaggctcaaaat

SEQ ID NO: 74557 - DNA, 345 bp, Zea mays
  unsure (1)..(345): unsure at all n locations
cgcaagcttgnggcattaagtgagtgaagtttttcttgatcacctattcacccccctctaggtgctctcaataacaaggtatgtttctagacttagtaaattggttttgaatactaatgtatttgtctaagtgttagaaacagagctaagaagaaaagaaacaaattggaaaagacttggctgagtgcagtcaagcttcagctcagtctggcacaccggaatgtccagtggtgcaccggatagtgtgcggtgcgccaggccggtccgtgtgaactcgccgctctcgggaatcaacggcggcgtacgactataattcaccggactgtccgatggtgcaccggactg

SEQ ID NO: 74558 - DNA, 268 bp, Zea mays
  unsure (1)..(268): unsure at all n locations
tctttcttcctcctcatccncatttgtgcttccgctatcattttcattagccacacaacacatgtgggaatcgaaatgggaagacaaaccttttggagaggtggattcatcgtttggtctccatcgntcattttcttcttcttccttgtgttgggggccttcggcttccgaaggtcctcanaaacatgatttaacagtgtttctagagtgtaatgtgtgaacaggtaccttcggacatatatcanagagggagaacctcanaagatac

SEQ ID NO: 74559 - DNA, 320 bp, Zea mays
  unsure (1)..(320): unsure at all n locations
gcttaagcatttctgctgaagttctgtaatgatttctgtaaatntgagtatttgtccacttcagccttcaggcttgcttcgaaatatttcttttcttgttcgaatttttctgactgaaggagcaagtcattctttaaattgtcattttcaagttgggcttcagccaaagagccttccatggtctgaataacaaaatccttcttttctaatgcaccttcgtgctctttgaccatgaagtcaagatcttgaattgcgaagtctttctttttcagattggcttcgtgaatctcaactntttcagccaaatcttgaatgacagc

SEQ ID NO: 74560 - DNA, 342 bp, Zea mays
tcgtaagctggtgggcatggtcggagttgcccggtcattgcatcctcgtgcgtgcgctagcactgccgcgattatggggaattgggtagaagaaacacttgcgatcgtggttcgggttttggacggtagggattgatcctgttctcccttagagcatgattcaaccaacgcccttggatcatgatcgtgtgacccagtgttgatcgggcttcataaaatctaagtcattcgattagaatattgcggtgctccttggatatcggttcactgagctgacaatttaaccatgacccttgatcattcatcgggcgatcctagtggtcgtgggcctcggatcgttga

SEQ ID NO: 74561 - DNA, 466 bp, Zea mays
  unsure (1)..(466): unsure at all n locations
agcttcatcacttgaaagacaattgccttgatggaaagatattatttcagttcttcagtcttcactgtgtactggagaaatagcaagcactgctctctccatgagctcaaccgaaggtgcttttattgcttcaaaaaatacttcggagggtagggggagcccatgagccgctgatttggctagcaaatctgcatgctcattttcacctcttggaatattcttgaccgaaaaaccttcgaaagaagcttccaaccttcggactgcatccagatatttttcaagcttcggatctcgtgccttgctgctcttatccacatggccagcaataacttgngagtcagtctttaggatggcccttcttattcccattgcccttagtttccgaagccccaatagaagtgcttcgtactcagcaatattatttgtgcaactaanatccagttngaccgcataacatgttttgact

SEQ ID NO: 74562 - DNA, 382 bp, Zea mays
cgaagccatggtaagtagcataggctaataatatgcgaattgactcaagcctagctacgggtgcataggtttcactgaaatccaaaccttcgacttaggagtatcccttggccacaagtcgagctttgttccttgtcaccacaccatgctcatcttgcttgttgcggaacacccatttggttcctacaacattttggttaggacgtggaactaaatgccatacctcattccttgtgaagttgttgagctcctcttgcattgccaccacccaatccgaatcttgtagtgcttcctctaccctgtgtggctcaatagaggaaacaaaagagtaatgctcacaaaaatgtgcaacacgagatctagtggttacccccttatgaat

SEQ ID NO: 74563 - DNA, 372 bp, Zea mays
agcttatttcgggtcgtgcccgggccttatttttggcccgtgcgccatgggcgaacccctcattttcggcccagacgcaaggccgaacagccatgccgcccgtcgtcttgcgcctccgtgccgttttccctccgttccgccatgcccttcacccaagacatacatattaccttcggtgtctttccacacgcttggacttaacttatttccggggccatgcccgaacctcggttttcccccctgcgccatgggcgaacccctcgttttcggtccaaacgcaaggccgaacagtcatgcctgcccgtcgtcattctgtctttacccaaggcatacgtcgcagcttcagtgtccttgcacacgcttggacttggc

SEQ ID NO: 74564 - DNA, 369 bp, Zea mays
  unsure (1)..(369): unsure at all n locations
gaagacacgaagctaagtgttgtttggcttgagngaaggggcagggggaacggagggaaaacgggaggaggcgcgcggcgacaggcggcanggctgttcggccttgcgtctgggctgaaaacgaggtgttcgccatggcgcacgggccgaaaacggaggctcgggcacgaactcgaaaataagctaagttcaagcatgtggaaagacaccgaacatacagtgtatgtctttggtgaagggcacagtggaacggagggaaaacgacacggaggcacgcggcgacaggcggcatggctgttcggccttgcgtttgggctgaaaacgaggcgttcgccatgtcgcgcgggcccgaaacaacggttcgggcac

SEQ ID NO: 74565 - DNA, 458 bp, Zea mays
agcttgagtcagttcttctgcagagaattattgatgctcaaagaacgggataagggtatgaagtatattcatgaaaaaatggaggtcggcaaggcaaattgtttcaagaaaaataatcaaggagtaatatggtttaaggatcgcatagtagtgccagaagatgttgaggtccgccaacaaatcctgtacgaagctcatcttagtcgatattccattcatcctggaagcaataatatgtatcaagacttaaaacaacattattggtggactaaaatgaagattgaaatctaacgctatgtgcaatgtgtgacacttgcagacgggtcatagcgatacatatgaaggccgctggaccattacaatccttgcccatcctgacctggaaatgggaagatatcagtatggatttcattatgggattgcctaagacagctaaaggatttgactgtatttgggtc

SEQ ID NO: 74566 - DNA, 386 bp, Zea mays
  unsure (1)..(386): unsure at all n locations
cttgtcgaaacaacaacatctaccagcacaacaattgcttaccataccagtgacttggcccttcgcatgctggggactggatatgattggacctttcaagaaagctcaaggaggatacactcatgtactggtagcaatcgacaaattcactaaatggatagagttcaaacccattgcttctttaacctcagctaaggccgtggaattcatacaagacataatattcagattcgggataccaaacaacatcataactgacctaggatccaactntacaagttcagagttcttcgacttctgcgagcaaaaaagcattcagatcaagtacgcttctatagcacacccaagagccaacgggcagggtgagcgagccaacgggatgatac

SEQ ID NO: 74567 - DNA, 399 bp, Zea mays
  unsure (1)..(399): unsure at all n locations
agctnggtgccgatggagaagcaganattctgttgtcttggctgtcaaattgcttgccattgtcaactgtgagttcggacgggactccgaagcggcaaacaatgttttgccagaagaatttttgtgcagtctttgatgttattgtggatacagccctcgcctcgatccatttggtaaaatactcgacagcgacgaaggtgaacttgaggttcccctgagccgtgggcaggggcccgacaatgtgaaagggaaatgtgcccttgggccatttctaagtattttggtgtttgagtgccaacacaagtgcttttgtgttatactatgaaaaggcgtggacaaagtgcaaatcatgtcanaaggtatgtttctagacttagtacatttatttatggactaatg

SEQ ID NO: 74568 - DNA, 368 bp, Zea mays
  unsure (1)..(368): unsure at all n locations
gacatcggttntgtcgcggagtgtgcagagagacaaattatacttggcgccggtctatctcctaacctagggcgtatcctcccttggaactcacatgaaataggtagctctaggtgcagggaagagatctttcacagtcgacatggcgagattcgtacgcttggccgctcagcagagcgaagaacacgggcagaagcaacgcgccacgtgttcgacgcgttctgccgcgccagagcacgcccgcgcgcgccctcgcgagccccgcgccgcgcccgagccaaagccagcgccctggtccgcgtccgcgcctataaaagcctnccgagcgtcgaccttacccgttcgcacccacccgaccctcgccggag

SEQ ID NO: 74569 - DNA, 245 bp, Zea mays
agcttgtatggaaattcacaaggtcaggcttctacttctataagtaagcatacaacacatgtttctttggatcaatcaaatatgtgggaaatgaggtctgaaaagactggaaactgctgcaaatcaaggttatcttactgctagctgatgacaatcgatgtttgactgccaaccttcgtgccaaatggggtctgccagatccttgtgcctgtcccatatgtgaccactgaccaagccgatgaaag

SEQ ID NO: 74570 - DNA, 446 bp, Zea mays
tgccaagccctcggacccggccagacttcaccggaggcccgagatcgacctcaccggacttcggtcttccgccgccgcgcgtggaccgagctatccagtgagtctccgaccgattccttgcacccatatcttctctgtcatcccatgaacctctctgacccatccaattgctctatctcgccgtgaccaggccggactcctcgccgccgacgagcatccccgcctgcgcgcgtggaccgaccgactccggccatctccgacggcgacccgcacaccgttgtgatccccgagacttccccttcgtcctcgaccacttcaccggagcaatctcgccgccggtaagcccctccgccctttcttccgccgcggttactgtttgaggtagaagaaggacctcgggttaggatttgtagaacccgagggttttctgtacgtcagtgactcat

SEQ ID NO: 74571 - DNA, 440 bp, Zea mays
  unsure (1)..(440): unsure at all n locations
agcttggcatagtggagccggccattagttacttcngctgcacagtagtggctaaaaatctgctggtttagatgtcacagctctgtcgtcgatgtatattctactgaatcgtggggttcacacttcccaacccaaccgtactccttcgctggtacggactgagtactattgctagtctgttcttgttctaacatgcatatgaccttaattcgttttggctacgtgttggagcaattntgctaaagaaaagattgctaagaaatttgtgattatgtctacggccgtcaatcaaattcttccacacaggcatcnatcttcaattgcctttcgcgccttaataacattcaccttctttgtcttggcatgaatcgtgaaaccatgtcctaagacttctgccggcgtcttttgggccaacactaatggtcctatagctcctcacg

SEQ ID NO: 74572 - DNA, 411 bp, Zea mays
tcatatcatctctgggtacctgcaaaacttattaagtacattttggtacccacttttggatggtccaccaaggttagctaataaatacttaggcacccaaatggcctttgtgctagttttaggtgaactacttacctttctagcacaagtgtcatttttgggtctcctaagtgaatatgaatgaattgacatggtaggcttaagagttttaccctttggacaaaccttgaatagatgacctttttcacggcaattgtagcaaatgcggtgcttatccttgcaatgcatttgccttttgttttcatcctttttgatagtcatctttcttgatcgtgcaagatcttggttcttcatgtgggggcatgaatcaatttcatgacccttcttcttgcattcatagcaccttctatc

SEQ ID NO: 74573 - DNA, 468 bp, Zea mays
  unsure (1)..(468): unsure at all n locations
agcttnctccagcattcttgagcccctcatgtatccgaagataacaataggtgccactgggagttatgaagctagtcttcagctcatcctccttcttcatccatatttgatgatatcctgagtagcaatccagcagactcataagctctgaagaagctgttgcatctacaagagagtctattcttggtaatggaaattcgtcctttagacaggccttgttaagatctgtgaagtcaatacacattctccatttgccattggccttcttcaccataatagtattggctaaccactctagatattttacctctctaatgacaccagtattgagaagtctttttacttcattccgagcaccttctgctttatcagtagacattttccgaagcctntgctttcttggcctgaaggacnggtcgacattgagtgaatgttcaatgatgtctctngtgacaccacatatatcat

SEQ ID NO: 74574 - DNA, 430 bp, Zea mays
  unsure (1)..(430): unsure at all n locations
tgctattacggaccttgaaactcaagctttgccggagttttctttttttaagagcgcggactgtttagctattctgttggagctgctctaagagcaactccaaaagactaggtataaatcctagctaaatttgaagtattgagagctgtaaaaaaatagataagttcataatatgtgagtgtatccaacaaactcttcaaatatagatgatgacctataaaactctcaactggccaactcatacggttctttttttggcgcatgaattttcatctgctgtagttgacggacatggcgcatgatcgttctgaatcggtctgacacccagacancaacattggtgccaatttcaagcacataatacagacacaaagntgttcggtccacttcaacaaactagaaaagaatgtggattatgttttcattccac

SEQ ID NO: 74575 - DNA, 365 bp, Zea mays
agcttgcggaccgggtggttcgggcgaggttctccgatcctccccgctgtcgtatcgtcccccacgcctggggtggtagcctcggcgcaccttctcgtcgaggtgggctcgacggtcacggcggtggtgctcgttgccggggcgacccggggccataggcgctgtgttccacgtgcgcccggtgtggaccgagacttcccgcatgaatcgggaagtcgcggcgcgatgctccggggggtacccctgccttcgggaggtagagctttcggcccgtgggaccgtgacatcttccaggagattcttgagctctccctggatacgccgcccctcggtggtggatggttccggcatcgctcggagtaata

SEQ ID NO: 74576 - DNA, 447 bp, Zea mays
  unsure (1)..(447): unsure at all n locations
tcaactcaactaacttgtcgggaacaacataatatagtgagtagtgacaccagatacattgtctaaactacaaacaagtgcataataaaatgaatagactacataagacagtacaacaacccataatgccccttagcattcgatccatgaatttagattatctcttgggtgaaacttctggattcaggggacatggattgataataccagacatacgaaataaatagtgaatttatgttcttttttagcacaatagtgaatttgttttatgcaaacacatagtcttatggcccaaacagataagtgaataggatcaggtgataccaaatagtgatattggctctgcatttctacattggaaaagtcaaattaccaaattagcagaaatcggcacataccacggcagcggccaagaatagaactgcacctncactttgtccacctaac

SEQ ID NO: 74577 - DNA, 449 bp, Zea mays
  unsure (1)..(449): unsure at all n locations
agcttatgaacattgtgcaatgtgaaccacttctttnggagttcatttgcaaaatatatgaaataaacaagtcttggaattcaaaatacaaaactaggcccatttatgtgctatcctaaaaggtctggggcttctctgcaaaatttcaagcgtctgcacgcaaaacgcagggacagcgggttgatatctggaaagccgagggggttttaacaagttntctaggcaaacgggtatcggcttatcttgaccgcacgatcgttgatcaacggccaggatttgatctaagcacgagcgcgcgcgagggcgcgcgggtgatcatctacaaacgggtcagggcggtcagcgactgggtaggggggacgggctgaccggtcgagccattcgcagngggcgcatgcactgacgggtanggcccaagggcagagcgcgcagacgcggaccgatgtctg

SEQ ID NO: 74578 - DNA, 398 bp, Zea mays
ctaccttgattcccaaaacacagcatattcttaagagtctttatccttagacgggtaagacttgcgaaagtacacttcgtactcagggttatcgaacccatgttattgtaggtgagaaaacaacatagctttgatgtttctgttcaaatgtggtacccaatgaatagccccagcacatgatgttggtcacgggaggatgtctgcctcccaccttgaaaacaataaactttattgtgggacggtgtggtgcctccctggtctgtaataatactttatgcactcgtaataccctgttattgcaataataatatagtctctatattctataaaggtaaattaacttattataatatgcttccacttattctatactccgatgtaatgtaatatctgtgtga

SEQ ID NO: 74579 - DNA, 266 bp, Zea mays
agcttgaagagattgtaggtcggcaagcgttatacgtcaagatcgtgcaatacttgcaggccaaaatggacctctccatgaagtccttggcgcaagtctcgaaggaccaaaccaggctggcgaatttggtgaatgtcgtagcaaggaatgcctgtatggacggagttacaggcacaggtgatgggttgatcggaccccgtccgacagggatgccgataggaccacaaattcagaatccgcctcctcctgttactccacatggtatg

SEQ ID NO: 74580 - DNA, 350 bp, Zea mays
  unsure (1)..(350): unsure at all n locations
cgctatangccttcttctttttctccattgcaggaagcttattggaacactacccaacttaaaaagaatgagggtggaactcttgaatcttggggatttgatatccttgaagtacctcataacaagggtgttacggngccttcttctgctgttgctgcttgatcaggctacgaagaaataactgacacagggttgattttggaagaaccttcttctcatcttctcttcgctatcttcttttcactgaccctttctttctctttgctcttcccactggaggattctatcanagagtattaccatcatacagaggaggaaaccaaagactatgaaccatgtacaacagtctt

SEQ ID NO: 74581 - DNA, 379 bp, Zea mays
  unsure (1)..(379): unsure at all n locations
agcttctaaagggagaacacattttgggactaacaaaatgtttattttgagaaagataggtattgtagcgcatgtcaagcagggaagcaagttggtgttcatcatccacacaagaacatcatgacgactgacaggccgcttgagctactccacatggatctattcggcccgatagcttacataagcatcggcgggagtaagtactgtctagttattgtggatgattattctcgcttcacttgggtgttctttntgcaggataaatctcanacccatgagaccttatagggactcttgagacgagctcaaaatgagtttggcttaaggatcaaaaagaatagaagcgacaacgggacagagctcaagaactcacaaatag

SEQ ID NO: 74582 - DNA, 328 bp, Zea mays
tctgcgcgtcgatccgtcctccgtccgagcaggcgctgcgcccttccacgggatcatccctgggaagcgcgtccagcccctcgggcgactcgacctcccagtctgcttcgggacaccctccaacttccgaagggagaccctgacgttcgaagtggtcgggttccgaggaacctaccacgccgtgctagggaggccatgctacgcgaagttcatggccgtccccaactacacctacatgaagctcaagatgccgggccccaacggggtcatcaccgtcggccccacgtacaaacacgcgttcgaatgcgacgtggagtgcgtggagtac

SEQ ID NO: 74583 - DNA, 467 bp, Zea mays
  unsure (1)..(467): unsure at all n locations
agcttgtataattgtgtaataaagaagtgacccccacatcacccctgccttgtaccagaaataaggaaataaaaatgtgacacatttccttttccgttacttaccctaggacttttaatctcgggacgagattcttttatggggggaaggatgtaacacccctggtgttactgtaactaanacttgagcatggcatcataagcattggcattgcatatgtttgatacacctagagtgcattcactaggcaaaaatttcaaacaagttgtattgtttaagtgttttgcaaatagaaccctggataggaaacttaaccctaaatagggattaaaggggtaagacctaacccaagttgagaaaacctaaagactttagggaaatagttataaaatatccccaaaataaagttgaatcacatttgtacccctgggatactaaaaaccctaattgaaaccctggaaaaccct

SEQ ID NO: 74584 - DNA, 429 bp, Zea mays
  unsure (1)..(429): unsure at all n locations
tggctngaccacacaagagcatccccacccttatcacattcaatggtttaacaacagcggtaagttcaaggtaacaaaaacaacaagggtgcatctttctattgcctcttaccatgactntgctgatttcgatgtggtgactatggatgcttgctctcttttactgggacatccttgggagtttgatactgatgctattcaccatggtagatctaataaatatactttcatgcataagggaaagaaaattgtgttgcttcctatgactcccactgaaattgtccactttgaacatgagaaaaagactaatgctaagcaaaaaggtgttttgaactcttgaaatcagccacctattaaagtaaaaactcctactttgctagccactagatctgatctttgatgaagtacatgcctctgtggactttgcta

SEQ ID NO: 74585 - DNA, 373 bp, Zea mays
  unsure (1)..(373): unsure at all n locations
agcttctaaagggagaacacattgtgggactaacaaaatgtttattatgagaaagataggatttgtagcgcatgtcaagcagggaagcaagttggtgttcatcatccacacaagaacatcatgacgactgacaggccgcttgagctactccacatggatctattcggcccgatagcttacataagcatcggcgggagtaagtactgtctagttattgtggatgattattctcgcttcacttgggtgttctttttgcaggataaatctcaaacccatgagaccttaaagggactcttgagacgagctcaanatgagtttggcttaaggatcaaaaagattagatgcgacaacgggacagagctcaagaactcac

SEQ ID NO: 74586 - DNA, 363 bp, Zea mays
tcatgtggacgatcgctacactgccaggtgagcggggtgcttccatctcttatgatcaacgagggaatgccatgcgagcacacaatgctagacaagcaatactctgccgacactgctctattataggcggtcgtgactgtggtgaaatgggacagacttgtgaagccgtccactattacccaaatggagtgataatctgtgctggtgcggagctgaccgtatatagagatgactccaatctcgtcccattttgagcgacgaatctggaacgggtgggctccacccgcaggctactgatgatctgacttgatacattgtcaattgtcacatgcagacacatactatactataaaccttttcata

SEQ ID NO: 74587 - DNA, 419 bp, Zea mays
  unsure (1)..(419): unsure at all n locations
agcttggccggtagccaaagcatgaacaactcttctccattcgcttctgataaaagaccagatacgtcatgttggaatccaaaattacaggcaactaccaaaaattacatgatttcaatctggcatatcatgaaaacatgtacctgacggtaaaaaatactatttatgtacaacatattattgcgagaacatgatatgaggtgccatatctgatagcagaactcaaaagacaaaatgatacataaaccaaacaaaatcaaggatcctttatttgtctagcactctagcataaggataactcaaaaaggaaaaaatatattttagttgtctccacatgctcgtgagtggaggtgggtgctgcgtggaaaggcacatcgagcccggagagttgacggcgcgggcacangcatgagagctgg

SEQ ID NO: 74588 - DNA, 431 bp, Zea mays
  unsure (1)..(431): unsure at all n locations
tgngatatctaacanatctgaagctgacaggctgaagtttggtctgttcacagtgtttccatgtgtgcagccagccttcaaaaaagcagcagctgtgccccgagaagctaccagggcgcagaagtcagcgtgcccaccaataacttcgtcaagggcgtcaacttcgccttcaatatgttctaatgtttttggcaggttttcagctgaaggtgtaaatttcgaagaactagctccgacagagtgaaacacgtccttcagccgctgcacacaccgggcgccgaagcttaagcatttctcctgaagttctgtaaaggatttctgtaaatttgagtatttgtccacttcagccttcaggcttgcttcgaaacatttcttttcttgctcgaatttttctaactgaaggagcagttcattctttaatttgtcatttt

SEQ ID NO: 74589 - DNA, 328 bp, Zea mays
agcttggcgtcaatggacgagcagaaatccttgtattcttggctgaacaactacttgtcgttgtcaactgagaatacagacggcactccgaagtggcaaacaatgttccgccagaataatttctgcgcagtctttgatgttattgtggaaacagccctcgcctcgatccatgtggtaaaatactcgacagcgacgaacgtgaactcgaggttcccccgagccgtgggcacgggcccaacaatgtccacgccgcagcgctggaggggccatatgtgggcgatcagttttgtgaatagcgaacggctgtctgaaccatgaccaaacttct

SEQ ID NO: 74590 - DNA, 438 bp, Zea mays
agaaaaataagctcaaagttgtgctgtcagtcactctactgactgaatttaggtcaccagtaacattggccagacttttgggtcgaattagagtaagatctattgctcgattgagggtagttgctatagcagaattgtagctggtatgaagggctacaagttggctacaggtgtattagcaagttgttgcacaaaaattcgagatctagacattgcaattcggcctgtcaggagctctaaatcgggttttcaatggtacagtgaccggatcagaacgccagttcagataactcaccgctgacgaccgtgcgcccggattcgcgcccgccacggtgattcatgctcggcacagttggataacgcagaggggtaagaaatatcacgccgtggatgaactccgccactattctacttcccgtcgcgtacccgctgagtcac

SEQ ID NO: 74591 - DNA, 471 bp, Zea mays
  unsure (1)..(471): unsure at all n locations
agcttggcattgtttccctgttggaagccattgccatccttaatgccagggcgtctcccattatagagcatgctcctagcaaatttaaatttttcattttcaatttcatgctcattgattttagaagttagttgagctatgtgatcattttgttgtttaattaaagctaggtgatcatgaatagcatcaacattaatatctctacatctagtacaaatagaaacatgatcaacactagatgtagaaggtttgcaagattttaattcatcaatcttagcatgcaaaatggcgttctcatctctaagattgaaaatagaagcattgcaaacatttaaatctttagcctttaaaattaaacaaacattttcaattgtaaggctagaaatttattcattcaatttatcaatcttangcatcaaactagcattataattnttaagaatgacaaaagaatcatcacaaccatttaac

SEQ ID NO: 74592 - DNA, 431 bp, Zea mays
tctaaacggagaacacgtgataggtttgactaacgtgcaattcgaataagatagaccttgtgcagcttgtcaagcaggtaaacaagtgggaggagcacatcacagcaagaatgtgatgaccacttcaagacctctggagctgctgcatatggacctcttcggacccgtcgcctatctgagcataggaggaagtaagtatggtctagttattgttgatgacttttcccgcttcacttgggtgttctttttgcaggataagtctgaaacccaagggaccctcaagcgcttcctaaggagagctcaaaatgagtttgagctcaaggtgaagaagataagcagcgacaacgggtccgaattcaagaatcttcaagtggaggagttccttgaggaggaggggatcaagcacgagttcttcgcttcctacacacctc

SEQ ID NO: 74593 - DNA, 435 bp, Zea mays
  unsure (1)..(435): unsure at all n locations
gccccccaaggaaacgtcagactcgatgtacagtggttgggggtttccactccaaaatatccttgactttgctgggatccaccgcaatccccttagcagataatacatgtcccagaaattgaatctcctccagccagaatgcgcacttactgaacttagcatataattgatgttcccttaagcgcgtcaatacgatccgcaagtgctgagcatgctcctcttctttcttggagtatattatgatatcatcaatgaagaccaccacaaacttgtccaactcgggcataaataccgagttcatcagatatgtgaagtggacaggagcattcatcagtgcgaaagacataaccaaatattcaaataatccataccgcgtagtgaatgccgtttttgtatatcttcnggtcgataccgatgtgctgataccccacctga

SEQ ID NO: 74594 - DNA, 402 bp, Zea mays
  unsure (1)..(402): unsure at all n locations
tgagtcagtcatcctgcanagaataattgacgcacaaagtaatgatgagggaatgaaacacatccatgagaaaatagaagctggaaaagccaactgcttcagaagagatgatcaaggcattgtatggtttaacaactgcatagttgtgcctaaaaatgatgagatcgaccagcaaattttagatgaagcacatcttagtcgctattctattcatcccggaagcactaagatgtatcatgacctaaaacagcattattggtggacaaagatgaagattgaaatcgcacgctatgtggctagatgtgacacttgtaaacgtgtcaaggccatacacatgaaggttgctggtccattacaatctctacctatccctatatggatatgggaagatataagcatgga

SEQ ID NO: 74595 - DNA, 438 bp, Zea mays
  unsure (1)..(438): unsure at all n locations
agcttagaaaaatctggtatgaatctgcgattatatccagctagtccaagaaaactccggacttggtgaacagtggttgggggtttccactccagaatatctttgaccttgctaggatctaccgcaattcctttagccgataacacgtgccccaaaaattgaatttcttccagccagaacgcgcacttgctgaacttggcatatagctgatgttccctcaggcgcgtcaatacaatccgtagatgctgagcatggtcctcttcatttttagaatatatcaagatatcgtcgatgaagaccaccacgaacttgtccaactcgggcatgaacaccgagttcatcaaataagtgaagtgggcatgagcatntgtgagcccgaaggacattaccaggtactcaaacaatccataccgcgtagtaaacgcggtcttcggtata

SEQ ID NO: 74596 - DNA, 438 bp, Zea mays
  unsure (1)..(438): unsure at all n locations
ttcatgagaacatgagtacanaagtgagatttagtacagcttatcaccctcagactgatggacagactgaaagaactaatcaagtattggaagatatgttgagagcatgtgcccttcagtatggaggaagttgggataagagtctaccttatgctgaattctcatataataatagttatcaggccagtctgaaaatgtcaccttttgaagctttgtatggaaggaagtgcaggacccctctatattgggatcagactggagagagacagttctttgggcctgaactgattcaagaagcagaagaacaagttcgtataattcgagagaatttgagagtggctcanaccaggcaaaagagctatgctgataatagaaggagaccactggaattcgaagaaggagatatgtgtatctcagggtgcaccacttcgtggaatg

SEQ ID NO: 74597 - DNA, 466 bp, Zea mays
agcttgtatggccgacggtgtcgcactcttgttaactggtctgaaccaggtgaaaggagtttctttaggccagatatggtaaaagaaacataagaaaaagttcaacgaataattcataacttgaagaaagcccaagctcgacagaaaagttatgcagacaagcgacgaatgcccttatattttctggtgggagattatgtctatctgaaagtctccccaatgaagggtgtaacacgtttcggggtaaaagggaagcttgcacctcgatacattggtcctttccctatgcttgagaaatgtggaccagtggcgtaccgacttcaactacccaaaaccttgtctgctatacataatgtgttccacgtgtctcaactgaagaaatgtcttcgggttccagatcgtaactattgaagtacggatgttgccttagaaccagacttgacatattcagaacactctattcgag

SEQ ID NO: 74598 - DNA, 473 bp, Zea mays
  unsure (1)..(473): unsure at all n locations
tatgaaggttcttcattccaacatgtgctagactgcggtgccagagccagcccatattagtcttagcgattaagcatgcatctagatcagcattctcttttaacaaatcaactaagtagagcttgccgtctaatacacccttaaaggttaatgaaccatcactccttctaaagacagatacatcaatatttgtaaataaacaattatagcccatatgacataattgacttatagacaataaattatacccgagcgattctactagaaacacattagagattgaatgctcggttgtgatggctatcttgcctaagcctttgaccttgccttcgttcccatctccaaagatgatagaatcttgngaatcccttgtcttgacgtangaggtgaacattntcttctccccccgtcatgtggttgtgcatccgctatcaataatccagctngagccctcgaatgcataaacctacaag

SEQ ID NO: 74599 - DNA, 384 bp, Zea mays
agcttgtctgtcggaatcgaacgaagctctcttttgtttcctgcttcggaggaagaaagtattaaagtttcacaagttcataattaaatggccagagtgcgttctaccgccagggttgagcgtgagggggacgaaactgaagcttcggagactgtccccatctccgaagccatgcaacgatctgggctggtgacttcggaaaggattcctagtgatgatgcggaacaagcaatcgctgaagcagaggaagaagatattgaggaaactgatcccgaagatgactatcgcattgccatgccaagcaaacccagccacttggactttgggaaatctactgtttcgaaggctgatctgtccaagatggtaaaatcgggctttttactg

SEQ ID NO: 74600 - DNA, 471 bp, Zea mays
  unsure (1)..(471): unsure at all n locations
tgttgcaccggcaagctgttgaacaatctaggaccgtcttataacaactgccgcctggacagcagtagcaaacaccttcggatattgctccctttttgcaggcccgtttctcgcatttgcagaaacgaacaacgttccgagctgcatgcaataagggcattcagttactgtttttacagtaagttaaggttattgacattatgagaacaatttatatttactactagtaagaaactgtataataagtaacttgattcaaatgcgcatggttgccgatgtgcacttacagtatgcaggaatcatcaaacttcctaggatcaccatcaagagcaggacggccttgcttgcttccattgtaattctcgccatataaggatttttttcctcaaatcagagatcgatgtctataggggcttgttngactaccgaatggcttgctgcagggtcatatatatacactcatatatgtga

SEQ ID NO: 74601 - DNA, 424 bp, Zea mays
  unsure (1)..(424): unsure at all n locations
agctntatatgggaggaagtgcaggactcctctatattgggatcagactggagagagacagttctttgggcctgaattgattcaagaagcagaagaacaagtccgtataattcgagagaatttgagggtggctcaaaccagacaaaagagctatgctgataatagaaggagaccactggaatttgaggaaggagattatgtgtacctcaaggtgtcaccacttcgtggcatgaggagattcaaagtcaagggcaaattgtccccgcgctacattggaccattcttgatctttaggcgagttggggagatggcataccaactcgagttacctgctactctatcagatgtgcataatgtgttccacgtgtctcaactaaagaagtgtctccgtgttccccaggaacagttacccatggaagagctc

SEQ ID NO: 74602 - DNA, 304 bp, Zea mays
  unsure (1)..(304): unsure at all n locations
tgtgaagattcttcatcccaacatgggctagtcggcggtgccagagccaacccatgttggtcttagcaattaagcatgtgtcgagttcagctctatcaaaatctactaagtatagctaaccctctaacacacccttaaatgctattgaatcatcacttcttctaaagacagtgacacctacatcagtaaagagacagttgtagcccatttgacataattgggaaacagaaagcaagttgtagtctaaagaatcaacaagaaaaacattggaaatagaatgggtaggagatatangcaatttacc

SEQ ID NO: 74603 - DNA, 353 bp, Zea mays
gcaggggaagtattgtctcccactctgacaatatacatatcgcataaatatctccccctcatggcgtcaatatgactttgcttgatagtcgattatctgaagatagtatggcttggccgccacggccgatcctcagaatcttcatccccactttccacgtcataactatcattgtcatcagaatcttcggacaaaccttccatgatcttaagaaatttctctgtattctgttttaccatagactcataaaacccagcgatgaaaggatctgcaactttcttttcttcatatagcttcttctcctcgggcattttcttctctgtaacatcttcttctcctcactcatctcgtct

SEQ ID NO: 74604 - DNA, 384 bp, Zea mays
  unsure (1)..(384): unsure at all n locations
tgcgcggaagagtgcagtctattcctgtgtgggctttataagcgcgggcgcgggacaaggcgccggctggccgttggcgcgacgcggggcgcgcgcgggcgtgctctggcgcacacagagcgcgtcgaacacgtggagctttcattctgcctgtgttccacagctcacccaagtcgcaaacgtgcgaatcttggcaaaaatctggcgcgagtctattcctggcacctatggctgtctctcatacgtgagctgccatggcagatatggcctacgtagggagatctctggtcgccaaatctggtgtgtcacactggccacctcgcgacanaaaccatgccgaggcatgtcatacgtcagaattttgtgctcagctttttccagtgg

SEQ ID NO: 74605 - DNA, 359 bp, Zea mays
agcttgactgacatgctgtgtccactaggttattcggcgtcaccatggaacaaagtcggctctgagtgagaatgctaccctgatacaatgacccacagaactcaagcactatacatgaagtgtaagtggtgcagagccttacgactgtgctgactaacatggagtgcgttgctctcgctgtccgctagtcaatcatgcctgaagatctgctcgctgactaactgaatccgcctacactagcacagtgacgtcgaacagatcaaactgccagcgctgttcgctacacgtcagagacctgcctgcgctgggattcgtgctagtgccctctatatgcacgctcggcggggcggataacatcg

SEQ ID NO: 74606 - DNA, 387 bp, Zea mays
  unsure (1)..(387): unsure at all n locations
agcttctggaggcctataaaacagcatacatcaccttctccaattctgcatagttnttctttgataaactgagaacttcggagacgaaatatactagagcttgctttttcaattgtccttcaagcttctcctgaacaagcgccgcacttactgcagagtgcgaagctgccacatgtagcagtagaggagcccctggcgctggtggagttagagttgttaaatctatcaaatactgcttcagctcttcaaaggctttttgttgagctaatccccattgaaaaactttggctgacttcagcacttcaaagaatggtaaatttctctctgctgatctgaatataaatcgattcaaagatgccagtctttctgttagcccgtgagcccctt

SEQ ID NO: 74607 - DNA, 421 bp, Zea mays
  unsure (1)..(421): unsure at all n locations
gacctataaaactcagcttacatgcttgtttcaagtacattcttttcattggcaagattagctatagaggttttcatattaattacttctttatctttattctctatagttatcttgactaaagatacttccttagtcaagaaatctagcatttcatctttattgtgaagcaatttttgaagctctaggtttctttccttttcaaggataagcaagtcttcttgagcatcaagagttgcttttcttttatctagcttctccattaatttggtgataacattgtatccattcaagccaaattctttaatcattttatttttcatggcaatttgttcatcatcatcatcatttagaanatcattactaaataaggttaccttatctccttttgccatgaggcangttggagtgtaggagtcat

SEQ ID NO: 74608 - DNA, 387 bp, Zea mays
  unsure (1)..(387): unsure at all n locations
agcttctccatcatctctatctttatgtctttatcacaaatatgtctataaaagtagcttagctccgctaatgctttccacacatcatttttttacaaaaccatggaacataacaggaaggactctntctattattatgtggtagtcatgactcttcaacccggaaaacttgctcgtcttcaaattcgcagaccttctaaagctcgcggcgtaaccatctaggtactttaagttttcaaccatttcatcaattgtttcttccttttaggtttaagactgaaaggagcacgtggcttcttctcgtcctctcctagctccaaagntggtcgactacaaattaaggcccagtcctttctagccctannggtgtcttttgtttgctagtga

SEQ ID NO: 74609 - DNA, 445 bp, Zea mays
  unsure (1)..(445): unsure at all n locations
tgtgaatcttagcanaactccggcgcaggcctcctcctatcacctatggctgnctcttgtatgtgagtccccatggcagatatgccctatgtagggagatttgcggacgccaaatctggcttgtccctctacccacctcgcgacaaaagccatgccaaatcttgtcaaacgtcttgggctcgatttcaaacttttccagtgggtgccttaggtggtatgacgcatttttggtatacaactcaagtggttttggtgccatttactgagtgaacacggtggatctttagattaggtttaaaatttgacttagaaagaattaaagagccctagtgctctctccacttaagggaatgaattggggttnttaaggggtctttntgtaatggttcctctntgcattttgtagatacaatgttacttaaactttggctaagggttaactcat

SEQ ID NO: 74610 - DNA, 338 bp, Zea mays
  unsure (1)..(338): unsure at all n locations
agcttggacttagctaattgtggaggtcgttgctcttattctccgttntcgacccttgcgccatggcgaacccctcgttttcagcccatacgcaaggccgaacagccctgccgcccgtcgccgcgtgcctccgtgtcgttttccctccgttccaccgtgcccttcaccaaagacatccactttaggttcggtgtgtttccacatgcttggacttagtttattttcgggttcgtgccacagccaccatttccggcccgcgcgccatggcgaaccacctgttttcagcccagacgcatggacgaacagcccttgccgccgtcgccgcgggccttcgtgtc

SEQ ID NO: 74611 - DNA, 401 bp, Zea mays
  unsure (1)..(401): unsure at all n locations
tcacatgtctcgtatgattcanaatcaaacgaagttaaaagcccatcataatgaagcttcttcatgcgattctcacttatatgacccaaacgacagtgccacatgtaggtaggacttaaatcattaagccgaggccttttagcactaatattacagataggtgcatcatcaagatttaaaatgaataacccattcataatggatgcaaaagccacaaacatgtcattcttagagatcacacaaccattgttttcactcgcaaatgaataaccatccttcatcaaacatgaaggagacataatgtttcgactcatactaggaactagataacaattatttaactccaaaataaatcctgatgggaggtggagttgcatcgtcccgacggtcaacgcagcaac

SEQ ID NO: 74612 - DNA, 295 bp, Zea mays
agcttgttaagttatacatttatttgtgcctacatcaggtgggcgttggtttcctggtggggggtggggtggggtggagaaaaaaccaaccttacttctcttcttcacttgcatcatcaacattattattcactatctaacttccttatgtacctccctatggactacgtttaccctcacccctttcatccatcccatcatcaacttgaataccaccgtattcttccttatacttctcttaccgtttgccaggaacttcataaattggaccctctctccttacatttttatctca

SEQ ID NO: 74613 - DNA, 398 bp, Zea mays
  unsure (1)..(398): unsure at all n locations
ntatcacatggacgtgaagagtgccttcctcaatggacctatcatttaagaggtctatgttgagcaacctcccggctttgaagatagtgagtaccctaaccatgtttataaactctctaaggcgctttatgggctcaagcaagccccaagagaatggtatgaatgccttagagatttccttatcactaatggattcaaagtcggaaaagccgatcgtacactcttcactaaaactcttgaaaatgacttgtttgtatgccaaatttatgttgatgatattatatttgggtctactaacgagtctacatgtgaagaatttagtaggatcatgacacaaaaattcgagatgtcaatgatgggggagttgaagtacttcttaggatttcaagtgaagcaac

SEQ ID NO: 74614 - DNA, 362 bp, Zea mays
  unsure (1)..(362): unsure at all n locations
ggatccttaagtcactnancatgcaagctttggaaaacaggcgaagcgcggttcgttcgggcccttgcagcggaccgtccgcgacacaaggatgaccctcggacagaaccaatgcaaaaatccgagtctgcactatggaccatccggaggataagcgcggaccgtctgtgacctcgcccggaccgtccgggctcatgcgcggaccgtacggtaggcaatgttggnaaaaanctgaaggtgacgggttcggaagaatgaattatagcgggctcacggaccgtccggggtgcacgaccggaccgtccgcgactgggtctgtctgacatctgacgacgcattaaatgcaatatagccggtgatat

SEQ ID NO: 74615 - DNA, 188 bp, Zea mays
ttagcggtcaaatcaagctgagtgccctatctccttatcatgcgcgccaatatggtcgtgaacattcactattactacacacaatgtctgctagataaatgggccaactgtcgggctcatctgtcgttagtggtagaccgaggatctcgaacaggttggactatgcctccgagtaacctacggacgcc

SEQ ID NO: 74616 - DNA, 462 bp, Zea mays
  unsure (1)..(462): unsure at all n locations
tatgaagattcttcatcccaacatgtgctagtctttgatgccagagccagcccatgttagtcttagcaattaagcatgtgtcgagttcagctctatcaaaatctgccaagtatagctgaccctctagcacacccttaaatgctattgaatcatcacttcttctaaagacagtgacacctacatcagtaaagagacagttgtagcccattttgcataattgagatacggaaagcaaattgtaatctaatgaatcaacaagaaaaacattggaaatggaatggtcaggggatatagctattntacccaaacctttgaccaaaccttgatttccatccccgaatgtgatagttcgtaggggatcctgggttttctcataggaggagaacatcttcttctcccctgcatatggtttgtgcacccgtgtcagtatcaacttgagcccccgatgataaactacaaaca

SEQ ID NO: 74617 - DNA, 405 bp, Zea mays
  unsure (1)..(405): unsure at all n locations
agcttagntggacttagcaaatcgcaatcttttctcatttttttctctggttacatcactctgtaaatnttatgtatgataatctctcgggaagtttctcaaacaagaaaagttatgataaactatacaaagattaaaaattagtctctataggagatatgcaaatacagtattcatgagacggctgctggacacaaatatagattgaattgctcttaggtttaaccaatattctaaaaacataaacatattatgataaaacagatacgtttatgcaataggaagagtatccgactntgttcgtttgaatagaanatcggataagctattacaactcaacgtctctgagtagataattatnttataataaaagcaactcaagaaccggttttaaacagaaaaata

SEQ ID NO: 74618 - DNA, 453 bp, Zea mays
  unsure (1)..(453): unsure at all n locations
nggtcattntattactaactgtcccgacaatgattgtgatcaataccaagggaacaagagggagaagaagaagaactataagaaggcaaagggcgaggcacatctatgaaaggagtgggattcggattgctcctcctccgactccgacaatgaaggactcgccgccaccgccttcaacaagtcatccctcttccccaacgagcgtcacacatgccttatggcaagggagaagaaggtatgtacttgagactctacttatgcttcttcaagtgaggacgaatctagtgatgaggatganatagattattcatgtntatttaagggcctagatagaaccaaggtagataaaattaatgaatngattgatgccttgaatgataagaatangctnntagaanaacaagaagacttgtngtatgaagaacatgataaattttagaagcacaaaaatct

SEQ ID NO: 74619 - DNA, 448 bp, Zea mays
agcttggttataaagatgttagtgcaacagtatcctgtggctatagagcgagctcttgcgaatcacaaaaatcacagagaaagacaacacaagagacacagtggtttatcccgtggttcggccaagtataacacttgcctacctccacgttgtggcgtcccaatggacgagggttacactcaacccctttcaagcgatccgatgatcaacttgaataccacggtattcttccttatagttttcttcccgtttgcgaggaatctccataagttggagcctctcgcccttacaagaatgatctcaaagaaagcacggagttaggttgggaagagcacgcacactataattaaatccacaccgtaaacacgcacacaagtgagaagatgagcacacaatacacgcgcggggaagttacaacttcaaatgtgctccaatctcaagaatgatg

SEQ ID NO: 74620 - DNA, 349 bp, Zea mays
  unsure (1)..(349): unsure at all n locations
tgggccactatttcaggcatacaatataggtgtttcttcttcacaaccgttgaaggatattatgagaaatagagaagctactagaagggttggaaaatgggctgcggaactcaatgaattttgtattgattatgtgcatagatcttcgattcagtcccaagcattggcagacttcattgctgactggacgccaggggctcaggaagaagaaacgagtaaagatgccgaagtttggacagtattttgcgatggatcttggggaaccttctgagcangagcagctgctgtgttggtcgcaccttccaaagttaaaacttgttatgcaacaagacttgatttcagttgcaca

SEQ ID NO: 74621 - DNA, 351 bp, Zea mays
  unsure (1)..(351): unsure at all n locations
gtcacctgcagcatgaagctttaaaggagaaaggtgagaggtttgtttttcgtgcatntcgaaaacaatagaccttgtgcagcttgtcaagcaagtaaacaagtgggaggagcacatcacagcaagaacgtgatgaccacttcaagacccctggagctgctgcatatggacctttttggacccgtcgcctatctgagcataggagggagtaagtatggtttagttattggtgatgatttttcccgcttcacttgggtgttctttttgcaggataagtctgaaacccaagggaccctcaagcgtcttctcaggagagctcaaaatgagtttgagctcaaagtgaagaagata

SEQ ID NO: 74622 - DNA, 408 bp, Zea mays
  unsure (1)..(408): unsure at all n locations
tcttntagtngctgccaaaaatgagaggagaactgcgtttctctatctgacaccatcttcttcggcacaccatgatagcagactatccgtgacatgtataactcaactaacgttgctccggtgtatgtcgtcttcacaggtatgaaatgggccacctttgttaagcggtccacaatcacccagatggaatcgtagccggcccgggtacgaggtaggccagctataaaatccatcccgatctcatcccacttccattgaggaatctgcaacggctgcaacaatccggcgggtctctgatgctctgctttggttctttgacagctatcacagatggcgacatattctgcgatctctcttttcatgccataccaccaaaacctcctttttaatcctggacatcttctcact

SEQ ID NO: 74623 - DNA, 364 bp, Zea mays
agcttcgcacctatgagctaactcggctgttttgttctttgctgttggccaatagaatcctgacctgaagaccttcccgactagtgttctggaggctgcatgtattccacattgcccagcatggacctcctccagaagttgcttcccagtggacgggagaatgcacttcatgaggacgcctgacgcaccccttctatacaatgtctccccaatgagtgtgtagtgagccgactgtctggcaatgcgctcagccgagttcttgtcatctggttcttcttcattctttatatacttgatgattggccttctccagacatcagagtctgactcgggttgatctataatgatgcactcttgtggttga

SEQ ID NO: 74624 - DNA, 386 bp, Zea mays
ttgttccagtgtacgcaagaccatgaagaatacctccaagcgtatgttcgaaggttcttgcgtctgagagcacaagcgcccacagtgcccaatgaaattgtcattgaggccatgatcaaagggcttcggccaggacctacggctcaatactttgccaggaaacctccttagactctggagaagcttctttagaagatggatgagtacatccaggccgataatgatttccgccaaagaagggaagaagcttataggttttctgagatgactaggggcttcggaggaagaatccaccctaggcatgtcagatcaatccacaactctagtgagagtgatgacagaggaagccagtttcagaggccacaacataactcacaatcttcagg

SEQ ID NO: 74625 - DNA, 378 bp, Zea mays
agcttcgtcacagaggaagtcttggatatttactggttcatgacaaagattgtcttggttgaagcccttgtaattctagaccctgtagttgttctggtcctgcgcttcaatgttgcgtatttctttgtcaatctttttctgaagttaagaaagacgaagcaccttctccctgcacttctccaatcactggtggattgcttcgaggttgttgatctcttaatcgagctcttggtcttatggtttctaggctaatagccttcctattttggtttcttgcctccctaaggagagcttcctccccttggttagtgtccaacgtcctgagaatggagctgattggtgttgacttcttcaacggcatggtgtgagttgtggtgt

SEQ ID NO: 74626 - DNA, 374 bp, Zea mays
  unsure (1)..(374): unsure at all n locations
ntatcaaatggacgtgaaaagtgccttcctcaatggaccaatcaaggaagaggtctatgttgagcaacctcccggctttgaagacagtgagtatcctaaccatgtctataagctctctaaggcgctntatgggctcaagcaagccccaagagcatggtatgaatgccttagggattntcttattgcaaatggattcaaagtcggaaaagccgatcctacactctttactaaaactcttgaaaaagacttgtttgtatgccaaatttatgttgatgatattatatttgggtctactaacgagtctacatgtgaaagagttagtaggattatgacacagaaattcgagatgtctatgatgggggagttgaaagtat

SEQ ID NO: 74627 - DNA, 448 bp, Zea mays
  unsure (1)..(448): unsure at all n locations
agctngtataattgtgtaataaagatatgttctccacatcacccctgccttgtaccagaaataaggaaataaaaatgtgacacatttccttttccgttacttaccctaggacttttaatctcgggacgagattcttttatggggggaaggatgtaacacccctggtgttactgtaactaaaacttgagcatggcatcataagcattggcattgcatatgtttgatacacctagagtgcattcactacgcaaaaatttcaaacaagttgtattgtttaagtgttttgcaaatacaaccctggataggaaacttaaccctaaatatggattaaaggggtaagacctaacccaagttgaaaaacctaaagatttatggaatagttataaatatcccaaaataaagttaatcacatttgtcccctgggatattaaaccctattgaaacctgg

SEQ ID NO: 74628 - DNA, 412 bp, Zea mays
  unsure (1)..(412): unsure at all n locations
tggctngaccacacaagagcatccncacccttatcacattctaatggttaacaacagcggtgagttcaaggtaacaaaaacaacaagggtgcatttttctattgcctcttaccatgactatgctgatctcgatgtggtgactatggatgcttgctctcttttactgggacatccttgggagtttgatactgatgctattcaccatggtagatctaataaatatactttcatgcataagggaaagaaaattgtgttgcttcctatgactcccactgaaattgtccactttgaacatgagaaaaagactaatgctaagcaaaaaggtgttttgaactactgaaatcagcaacctattaagttataaactcctactttgctagccactagatctgatctcgatgagttacatgcc

SEQ ID NO: 74629 - DNA, 418 bp, Zea mays
  unsure (1)..(418): unsure at all n locations
agcttatcacttaatccatcggcgtctctttctgttgtggatgaaanacgatgttgttaaagtgaaacaatgaaaattggtgcaggaagttgatccgtgtgataaggaagcggtaagtatatcggcatagttgagcgtgtacgagaggccgttgcaacctcgtgctttgacgccgagacgcagaaatggacgctgcctgaggctgaggagctgccggatcaaatgtggaaccaacaacaaaatattaaaaaaatcggcaatacataatcatctacaagtaaatgccttcttgggaagctggttntggctagcaactaggggtcgttttgggtttcatagcaaacacttcgtaccanngcaaacttgtggtattactgctctcatcgtgcttgtgagatgagtgagtgattattaactt

SEQ ID NO: 74630 - DNA, 478 bp, Zea mays
  unsure (1)..(478): unsure at all n locations
tgacatctcanaagcctntgattctgtatggtgggattacctcctcgttctcctagctcatcttggcttccctacaaaatggcgagattgggtggcatctttgctggctacctccaattcccaagtgctcctaaatggaatccctggtcaatcagtcactcatggttggggcctaaggcaaggagacccccctctctccactcttgtttgtgctcgctagtgatcccttgtagcccctcctccacctagctaccgaggcaggcattctgtccagagttgctaaagctagaacacgtctccggacctctttgtatgcggatgatgccatcatctttgtcaagcctaacaagagagaaagtggattctttgcagctctactacatctttttggggaggtgactggnttgcgtaccaatatttagaaatctttagtcgtgcctatcanatgtactggcctcaaacctcaatgaaattcttg

SEQ ID NO: 74631 - DNA, 429 bp, Zea mays
  unsure (1)..(429): unsure at all n locations
agctttngaacgtactaagcacatgccgggttttatggtaaccggtaaacctagtacctgagtgaagccgggcgcggactntatccctcatacgacctgagacagggtctcccatgctagctatggtgggtacaagtgcggtcactgcacggcggcagccggggtcagtggagcattgtatgccaaggcggtgaggcctggacgcgaacggngaatcgatggggacggttgtcatgtgcggngtcggagtaccctgacatgccgtgtgtttaggtttaccttgcaaggtttaaaaactcgattcgaatcgtctgcttctcgcagctaatgagactgcttgattccttgtactgcatcgagtaagaagtgaaatgtgtgtatatgagataacttgttgattgatctaattgattggtaccatcgtatgct

SEQ ID NO: 74632 - DNA, 447 bp, Zea mays
  unsure (1)..(447): unsure at all n locations
ntacagccagtccgacccgaggacctctctatactatgcagcgacttctccccgcttgccccttttgggtaagggaatatctccctagctttcctatttacttagccaagggcatcccattccacccttgtggtagcactgttatctcaagttaagctccatgttccaattgacacaataatcttgtcataaacaataattaaatcaacagtaaaattggaacatggtcataattcaaatgtaacattaatcccaaaactaggtagagcaatagcaagtctacccaatagttcatttgtctgcaaggtatggggtaaacaaaactagggaaacctattangtctcatcaaattaacctgagcatgtcacagtgattatcaggaatattattaggtaaagaagagtgatcaaggcataacttgcctgtgactngagaatcctgatact

SEQ ID NO: 74633 - DNA, 464 bp, Zea mays
  unsure (1)..(464): unsure at all n locations
cgcaagcttggctggattggtcacggggagagttttttaatntcttcttgattatagctcaacctgacggttctgagttcagtgttgagaattgccttgtgttgggttaaccaattcatacccaaaattacatctatatcctggcctcttagaacaatcatgttagcaggaaagttccgtccggccattgttactggcacttcataggccacttctctggtaaaaatatgtcccctaggtgaatgaattttaaatccctcttttgattcatgacatgcaatgtgatgttgctccacaaatttcttgctaatgaaggtatgcgaagcaccagaatcaaaaagaataattgcagggtgactggccacgggaaacgtacccatcatcaccggctctccctccggtgtagtggccacttgagtgtagtatacacgcctctgtttctttgtacttctccccacagcatt

SEQ ID NO: 74634 - DNA, 401 bp, Zea mays
  unsure (1)..(401): unsure at all n locations
tatcgggcgggtcgaggcggaggcggcgtcatgtggggagcatcgaccggatcaccttgacaccgccgccgccggaccctaagggcgcgcangcagcgtcgcccttggctgccggctgcgtggacgcggcggtcccccagagcggcatgtggcacagccccaagcggccggtgccctgctcctcctcccgcagtcccactaatctctgcggggctggccaacgagggtgagggatccgcgagcaggattcgagggaggcgctgcggggctggccaatgaaggaagccgcggtgggagcacggaggaagcgcgacgacagaaccagatgtggacgcctacaatacaaacataaggaatagtagagatgactccacgtttaagcataatgcgttagttatgta

SEQ ID NO: 74635 - DNA, 357 bp, Zea mays
agcttaactcgggtcaaacctgacaagtcttattctttaagcttttagcacttaaattctttcttttcatgaaattattggttcttgaaatatgcatgaggtactgcacttagggggagtattcaaaactcaaatcattcttgaaaacccctagtgcaagccaaaatgcaaatttcaccatttgcctattttctctaaaaattatctagcctatggcacaatattttgaaaagtatatgagggtgccaatacctgtcccaacaagtgttattttgtgtgattatatgttgggatttggtttggttaggagttagataaaaaaaattcaaaaattttcaaactctcctctgtctgggc

SEQ ID NO: 74636 - DNA, 459 bp, Zea mays
  unsure (1)..(459): unsure at all n locations
tcanagtcgttcctaaggggatgcagaggttagctccaatgtcgttcctaaggagatgcagagcttaaatactgtaacaccctgaatttgggggtataaaatttcttttattatattcaccaaatttaggtgttaccctcttctttacttgtttttcttctctttttttctaaataatggtcagtaattttattatatatataagtttttagcgtagtaaaataaaatcctggagaagctttgattgttgcattcatgtcgttgcatagtgtttataagtgcaaaggttttcaaactatatcggattatcttgtttatgttttcagaaactttcgaaacgtttcttcgagtattaaatattaatttcagttttctaatattaattaaatacctaanatgtggtagttgcgaaaactantaaaatttggaattcaattatatatatatattcctctcgtc

SEQ ID NO: 74637 - DNA, 377 bp, Zea mays
agcttatgaagattcttcatcccaacatgttctagtcggcgatgccagagccagcccatgttagtcttagcaattaagcaagtgtcgagttcagctctatcaaaattcactaagtatagctgaccctctaacactcccttaaatgctattgaatcatcacttcttctaaagacagtgacacctacatcagtgaatagacacttgtagcccattttgcataattgagatacagaaagcaaattgtaatctaaagaatctacaagaaaaacattggaaatagaatggtcaggtgatatagcgattttacccaatcctttgaccaaaccttgatttccatccccgaatgtgatagctcaatggggatcttggtttttctc

SEQ ID NO: 74638 - DNA, 395 bp, Zea mays
agcttgtaaccttcatacaggggaaccttaaatgtgttctattatttgtttaatgaaaaatacaaaattcggatacggatacagatttgaattcggatgattgtttactttctatacagggagcaaataatgcacaaaagctttatttttattttttataatgtgcttaacaacataactaaaaattataataaattctttataatatatatttaaaataataaatttgtcccacattttcgatgtttaggataaatacccgcccacaaaggaacggagtgggagtaaaacttcgttcgagaaaaagactgaacggaacaggatttatcgccgcgtactccgacgtcccaatctatggcatgccacctgtgaaccgacccacgcgcatgcatagc

SEQ ID NO: 74639 - DNA, 404 bp, Zea mays
  unsure (1)..(404): unsure at all n locations
agctntanacaagtttaaacggttcaaggtttatgtanaaaattaacacgatttgaagataaagattatcatatcagatcgtgtgggggagtactacgggcgtcatacagagcatggaaagtccaaggaccttttgtgaggtgccccaaaaagaaaatggcatagttgcccaatattcgacacctggtgaactccaacagaatggggtagccaaaaggcaaaacagaacgctaatgaaaatgataaggagtatgcttagctactctagcttaccgttgggtctatggatggaagctntaaaaccgctatccatatactcaatagagtccctagtaaatcactggctaaaacttcatatgagttgnggactggcagaaagcccacgctcaactaccttcacatat

SEQ ID NO: 74640 - DNA, 436 bp, Zea mays
  unsure (1)..(436): unsure at all n locations
ngctataactctgnagctgattgagttctgctgacgtttttatgatagtcatgcaacccagtctcacactgagcagagtctgtgtttgtgatgtcttgtcttccctttatacaaagtaaaatcatacctttctcaccagaagttgatttattattattgatctgtgttgaatttccagtctactcgttggctcctgtacacggaacaagcaccttctgcatggctaaattttgcattgtgtggcttggtggggatcatcacagcatatgcttttgtttggatttcgaagtattacacggattataaacacgagccggtccgccttttagctctttcaagttctacaggacatggaactaatattattgctggagtaaagttggggatggaatcaacagccctaccagttctagtgataagtggtgccattatatca

SEQ ID NO: 74641 - DNA, 473 bp, Zea mays
  unsure (1)..(473): unsure at all n locations
agcttcatcttgaccagattcctgtatactcttggcccaattccgaagatacctgttcacatatttcacttggaaaacattgtcaaatcatatttttgaggaccttcggaagccgaaggcccccaacggactttntgtagcttcggcaaacctacgctgtgttccttaggaacgacttttgaactttagtaattttttagcttcgtgggtctgtggaggagatatatttcactatggcaagaacgaagctattacaaaaaattggaaatggcaagaaaactaagtttacaataattgtttcttattaaagatgaaaatgacaatgaatgtaaaactgtttcaatggtaggatatctctcagtagatgtgtttcgactctggcacagtgctgttggccatgcgagcttccgactcctccttgaaatctcgctgctgataggtctggtggctcccttctggctgctagcctcgtg

SEQ ID NO: 74642 - DNA, 429 bp, Zea mays
  unsure (1)..(429): unsure at all n locations
tctaagggagaacacgtgataggtctaaccaatgtaactttcgaaaaagatagaccttgtgtagcttgtcaagcaggtaaacaagtgggaggagcgcatcacaacaagaatgtgatgaccacatcaagacccctggagctgctacatatggacctcttcggacccgtcacctatctaagtataggaggaagtaagtatggtcttgttatagttgatgacttttcccgcttcacttgggtattctttttgcaggaaaaatctgaaacccaagggaccctcaagcgcttcctaaggagagctcanaacgagtttgagctcaaagtgaagaagataaggagcgacaaagggtccgagttcaagaccttncagtggaggagtaccttgaggaggaagggatcaagcacgagttcttcgctcnctacacaccac

SEQ ID NO: 74643 - DNA, 430 bp, Zea mays
  unsure (1)..(430): unsure at all n locations
agcttcggctttggtcaaattgttcgacttttctcagtgcaatagtagtaaatgttgtggtaacttcacacctacccgtctgtttatatagtgctgcaggtgggaaggtaaatcgtcaagccgcttgcaccacctgaacagttgcccgcacccactgaacggtggaccatagtgcgcgagaaggcgaatcaccagatcgcacgtacccatcgtatggtgggaccaccttacactcggaatatttaaattgtttctcgacaacgagctcaaggaaggtgttnttcggaccttcggcattccaaagcctaagagaatttttcacaggtcgagctcgtacaaaaaatgatctggcaccgtgaaggggctactgttggnggtctgcttcgttgccgaaggtcccataagaataaacacctttagaacgtaacac

SEQ ID NO: 74644 - DNA, 401 bp, Zea mays
agatcccgttcagcaagctcgtcttgaagatgtcggatgtcacctttcaactcatatatacgctgaccatcctcttcccacaccctatttctgtgacgtaactccgttcgaagctgctccacctgagcttctaggtctccaatggggtcattactgccgccgctgctctcctcatgccttggagccagctgatgccgaggcacgccaatcggtcaagtggacttacgtgcgggtgttctcgtgcgcagcgacatatctacataagcgtcacaccccggttctagaacgtaattcgattgcgaaccatgtatgtgccaggatcagcaattcacgtacacaacagttcctatacatggacatcatacacagggctcaatagtattacaaggaaatatatgtca

SEQ ID NO: 74645 - DNA, 416 bp, Zea mays
  unsure (1)..(416): unsure at all n locations
agcttcttccgtcctacctacgctcatgcttatttggcctcaactccatcattatcctgggagcttatactctatggaggcacagaatcgaatgcttgtttgacggcaaacctgcacgcctatctactggtttatgtgtggctggagatgatttgtggctttggggtgcggttggagccaacgacataaaaccgctggaagtcactactgggttgttttgatttttttggagtacttttacaggagtgttttgtttccaagtctaattggaagtgtgtgtgggggtccttntttctcttgtacgtaattatatntttcatcctttctatcaatgaaatgatatatacgcccctgcatgtttgagaaaaatatgcttgctgatcccacacccacgaatagganggtctacgctaatg

SEQ ID NO: 74646 - DNA, 440 bp, Zea mays
  unsure (1)..(440): unsure at all n locations
tgtgaacagtacanattcagaagggagaaagcagcttctgtatatcagccgaagcccatgctcttatgtgaggatgtagcagaacagagggtgttgttgggctctcagttatccgaagcacaagagaaaaccttgctaaggttcttgttcaacaacaaagatgtttttgcatggtcagccaatgatctctgcggagttaatagggacgttattgagcattcgctcaatgtcgatccatccttcagacccagaaagcaaaggcttcggaaaatgtcagatgataaggccgaaggtgctcgtaatgaagtcaaaagactcctcagtgcaggagttatcagagaagtaaagtatccagagtggctagccaatactgttatggtaaaaaaggccaatggcaagtggcgaatgtgtatcgattntacagatctgaacaaggcttg

SEQ ID NO: 74647 - DNA, 453 bp, Zea mays
  unsure (1)..(453): unsure at all n locations
agctngacgcatattcatagtgctacactattntntgctacatttatctggcatcatgaaacatggttgttttttggtcaccacacaaatgtctttatcctacttgcgtatgacaattttgatcaatctatttatgttctccttttgagcatcatgtatacttctaccatgcatatctaattattatcaattttaactttcaaggtactaccagttcatgaggtgggaacctttgaatgctcattacaaattttaactttcaaggtgacaacagagagaaaatgaaactaaaaatgctgccataaatcttaagcagtttgatctggttaaacacaagagaattaaacaacacttagcagcaacccctaccaattgaaaattccatatacatgacacgagcagtaccaagcttcattactccagattttccttttagcaaaagcaacagtaatc

SEQ ID NO: 74648 - DNA, 282 bp, Zea mays
  unsure (1)..(282): unsure at all n locations
tgtgaacagtacanattcagaagggagaaagcagcttcatcttatcagccgaagcctatgctcttatgtgaggatatagcagagcagaaggtgctgttaggctctcaattatccgaagagcaggagaaaaccttgataaggtttttgttcaataacaaagatgtttttgcatggtcagccaatgatctctgcggagttaatagagatgttattgagcactcgctcaatgtcgatccatccttcagacccataaagcanaggcttcggaaaatgtcagatgat

SEQ ID NO: 74649 - DNA, 370 bp, Zea mays
  unsure (1)..(370): unsure at all n locations
agcttctaaagggagaacacattntatgactaacaaatgttcattntgagaaagacaggatttgtagcgcatgccaagcaggaaagcaagttggttctcatcatccgcataagaacataatgacgaccgacaggccactggagctcctacacatggatctattcggcctgatcgcttacttaagcatcggcgggagtaagtactgtctagttattgtggatgattattctcgcttcacttgggtattctttttacaggaaaaatctcaaacccaagagaccttanagggattcttgagacgggctcaaaatgagttcggcttaaggatcaagaaaataagaagcgacaacgggacggagttcaagaactc

SEQ ID NO: 74650 - DNA, 413 bp, Zea mays
  unsure (1)..(413): unsure at all n locations
tagaanaatctggtatgaatctgcgataatatccagctagtccaagaaaactctgtacttggtgaacagtggttgggggtttccactctagaatatctttgaccatgctaggatctaccgcaattcctttagccgataacacgtgccccaaaaattgaatttcctccagccagaacgtgcacttgctgaacttggcatacaacttatgttcccttatgcgcgtcaatacaatccgtaaatgctgagcatggtcttcttcatttttagaatatatcaagatatcgtcgatgaagactaccatgaacttgtccaactcgagcatgaacaccgagttcatcaaataggtgaagtgggcaggagcatttgtgagcccgaaagacttaccaggtatcaaacaatccataccgcgtagt

SEQ ID NO: 74651 - DNA, 381 bp, Zea mays
  unsure (1)..(381): unsure at all n locations
agcttgttccagtgcacccaggatcactaataataccttcaggcgtatgtccgaaggttcttacgactaagggcacaggcgccaacggtgcccaatgaaattgtcattgaggccatgattaaggggcttcggccaggacctacagcccaatacttcgccaggaaaccttctcagaccctggagaaactgctccagaagatggatgaatacatccgagctgataatgactntcgacagagaagggatgaagcttacagattctccaaaatgaccaggggcttcggaggaagagtccatcctaggcacgtcagatcaattcattccacttagaatgacgacagaggaagccagcaacagagggcacaatattcctcccaagct

SEQ ID NO: 74652 - DNA, 439 bp, Zea mays
tcacggcttcactgtgaagcgatccatgggctatggcgatgctggagttcaacacgaaggggtggccacgatggccgatcctgtgtagggatggcgggtggcggtgctcgcttttcacggcgaactccggcgatctctggctcgggcgaggctcggggtgtgcggtgccaacggctaaggccttttggacgcatttataggcgagggcatggcacaggcgcggggcggggcgaccacgcgcggggcgcgcgctgccgcggccagtccgcgctcggccgatcaggcaagcgatcgaacacgtggctttttgcttctgcccgagttcaagcgcccataggttgaagatcttcgcgaatttggcatgatcgctgacaagaattgctccccacacagctttgtcgtttggtgtggagtcagcggttgtggactgacagagagt

SEQ ID NO: 74653 - DNA, 419 bp, Zea mays
  unsure (1)..(419): unsure at all n locations
agcttatggctcatatgattctatagggtgttttgttccttgaagtaaacatctgttaacttgactactccctctgtcctgaaatgtaaggaatcgaagcgattttcagataaactaaggagtctggcaaaataccccacgaatcgatgggattttcagacaaaatattgaaataaggagtctggcaaaataccgcattactcctcactaattaggagtgagtagttcggttattgctttcctagtttaaaagagatccttacatgttattattttctgctatgaattaaagatgaaaggtatggtgtacgtaaagtgaaaggggtgttcggttaataagcatagaggagatagaggagctgagggcctacaataccttatattttggtacaaactgaaccctctnattcttacatttg

SEQ ID NO: 74654 - DNA, 467 bp, Zea mays
  unsure (1)..(467): unsure at all n locations
ntacatttaacatgagcccttaccgtaagtgagctcatgcatattatttctcacactngctgagcagtgaacgtatgtgagctcgtccttactgtactcacaccaaatcaaggacaggtaccactggaagaacatgaagatgttacgctgagttcgaagaggtctaggtcgtcgtctcccagtcaactatggttgcagaggatcgttgtcgacatatgatgtatcgatttagctattttgtatagaaccccaattatataataaagatgtgacattggtttatgtatcatgagtcatcatagcacacatttgagacatgtccgagttttcccttacatccgggtgtgacaacagagacccanaattgtgtaataccacagcagcacaagtagtgaagtaccanatgaactcaacaacttattagtcttacttttgcagaatttttgcaattaactatccatcatttt

SEQ ID NO: 74655 - DNA, 435 bp, Zea mays
  unsure (1)..(435): unsure at all n locations
caagcttcgaattaactctaatattttagcctcagtttcagccagcaagccttcggtcgattggagctcgaagtctttcttttcaatgatggcagattgctcttttattttgctttccaagttatcaattatagcttcgtgctttttgtcctccaagtcttgttgcatcttcagagctttgctcagtagcatgctctgaacagaaacaacttatgttaagtaatattttcattgttaacggcaataaaaaccagagaaaaaggttgtttaccttgaagttagaataaaacaagctgccgacgatatgttgtcgtcggtagcggctgatgtctgtctctaacttcagaaaaccgatactcttcgatagagtacagattaccttagctccggtctggtctcgaatacagcctagttnttcatcatctacacccccca

SEQ ID NO: 74656 - DNA, 472 bp, Zea mays
  unsure (1)..(472): unsure at all n locations
tcttcaccatgtgatcacgggtatcttgagaaggttgagctatgctcttcccttttagttgtgtcaagcttatttttagcctctcattttcttctttgagctnttgatatgtatcatcgtttgttcctgcaaattctagctcaaaggaagatttgcttgtcgacggacaacaagcattaacacatgataatgtagtttcaatttgaatacatgtgcatgagtgaggttgttgggattttaagttttctatcacaacctcatgagcaatatttaatatgatatgatcatccataagattttcatgagaacataggagcatatcatatntttcttgaaaagctagattttcatcttttagcttttctacttggtccttaagcaaggcattcctatntactaattgagcgatacaatgtannagcgtatcttgctcaatngaaatagtntcatacctttggaccanatcaacatg

SEQ ID NO: 74657 - DNA, 403 bp, Zea mays
  unsure (1)..(403): unsure at all n locations
agcttcggngagccgaaggtgcaaaanatttctttcctgagctcgttgacgagaaacgatttagtttcccagcgcgtagcggtcccaccttgcagagttactgtttggtctctgcggtccaccttgcagcgagtgcgagcgggtgcccgactggtgtaaaaatcctggcgcttcgccttcttacctgcagtactatataaacagacgagtaggtgtgaagntaccacaacattcattgctatttgcactgttttgctgccaaaatttttaaccatcgccgaagcttaactctcggaatcgaacgaagctccagtttgaagcctgcttcgtcagaagaataaacttaggaggaaaaaagtttaaatttttacaaattagaattaaatggccagagtgcgttcta

SEQ ID NO: 74658 - DNA, 386 bp, Zea mays
  unsure (1)..(386): unsure at all n locations
ttattgctaactgtcccgacaatgatagtgaccatgaacacgggagcaagagggaaaagaagaagcattacaggaaggccaagggcgaagcacatatcggaaaggagtgggattcggattgctcctcctccgactccgacaatgaaggactcgccgccactgccttcaacaagtcatccctcttccccaacgaacgtcacacatgccttatggcaagggagaagaaggtatgtaatcaaaacaatgtcacttatgattcttctagtgatgatgagtctagtgatgatgaaatagattactctagtttgttcaagggattggatagaactaaagtagataaaattaatgaattgattgatgccttgaatgnaaaagatagactctta

SEQ ID NO: 74659 - DNA, 383 bp, Zea mays
agcttgtgaaggttcttcatccgcacatgttctaagcggcgatgccacagccagcccatgctagtcttagcaattaagcatgcatctagaccggcctcttcttttgcaaaatcaactaagtaaagcttgccgtctaatacacccttaaaggctagtgaaccatcacttcttctaaagacagacacatctacatttgtaaaaagacaattatatcccatattgcatagttgactaacagatagcaaattgtaaccaagagactcaactaaaaacacattggagatagagtgctcattagaaattgcaattttacctaacccttttaccttgccttgattcccatcaccgaatataattgaatcttgggaatccttattcttgac

SEQ ID NO: 74660 - DNA, 362 bp, Zea mays
  unsure (1)..(362): unsure at all n locations
ngatgacgaaagcagatgagtgtaatgacagtagttcatataatgtgtaaatcaagctaaattacatcacagtacctggaggttggaaaagaacgaagggatccccatatcacgagagatcagttgataatcagacgtaatgccaccacccgaagcagcttgcaaagaaccagtaggaatcagctcggtgccttcagcagagccgaacactcgatcagcggggacgctgccctctaaagcgactccctggtccaaggtttgggctaccaccatacaaccagagtgtggaggagatcccacatgaacgtccatggaagtacaggagggagaccccgctcgggcaccctcgggggctgggtcat

SEQ ID NO: 74661 - DNA, 387 bp, Zea mays
  unsure (1)..(387): unsure at all n locations
agcttcatgactcctttgattaaacttgatctgtctaggttgccgngaacgcccgtgttcttccgttgcccatacggtcaccgtgggcagggcgttttagtgcgccattagtgaaattgatttaggggaaatggtcctcaggtcttgaatttggcctcggtcaaagaaggacgccagtctttgagcgatttggccggtacacgagctcgtcggagctccgcgcgtcgccgtccaccgtcgaggtcttcggagtgtaaagaattagaagtacaggggctattatgaaaatgtcagtgactgcctaaaatagtgtctntgattctttcgggttatgccaaaagccaaggactttcttgcaaaggctacacgcgggcgcgcgtgggcacg

SEQ ID NO: 74662 - DNA, 459 bp, Zea mays
  unsure (1)..(459): unsure at all n locations
tcactgggttgattntactaaagagaatgccgatctatatgcatgtttacatgctaatactaacatgggatggctntggcatcgccgtatagcacatgttgggatgaagaaccttcataagcttctaaagggagaacatgtgttaggactaaccgatgtctttttagaggaagacagaccttgtgcagcttgtcttagcataaatataatgacgatgtcaagaccactagagttgctacatatggatcaattcgggcccgttgcttatcttagcatcatgggaattaagtatggtctcgttattgttgatgactattctcacttcacttcggtattctttttgcaggataaatctganacccaaagaaccctcaagcgcttcttatggtgggcacaaaatgagtttgagcctaaggtgaagaagatcaaaattcaagaacctacaagtagaagagtacc

SEQ ID NO: 74663 - DNA, 422 bp, Zea mays
  unsure (1)..(422): unsure at all n locations
agctnggaggcgtctattggttgtcgacttgtggtatactcctccttcttttcttccgtcgccttgaatgcgacgggttgagcttctgatgtagatggatcatcaagctcgttgatcttcctcgagccttcgatcatgcactcaaaacttacaaaatgcccgattacttcctcgggggtcattttagtatatctaggattaccacgaattaattgaacttgagtaggattaaggaaaataagtgatcttagaataaccttaaccacctcgtggtcgtcccactatatgctcccgaggttgcgcacttggttcaccaaggtcttgagccggatgtacatgtgttgtggctcttctcctttgcgaaggcggaaccgaccgagctctccctcaatcgtttcccgcttggagatctttgtgagctc

SEQ ID NO: 74664 - DNA, 431 bp, Zea mays
  unsure (1)..(431): unsure at all n locations
tctaaagggagaacacgtgataagtttaactaatgtgctattcanaaaagatagaccttgtgcagcttgtcaagcaggcaaacaggtgggaagctctcatcacaccaaaaatgtgatgaccacatcaagacctttggagattcttcacatggacctcttcggacccgtcgcctatctaagtataggaggaagtaagtatggtcttgttatagttgatgacttttcccgcttcacttgggtattctttttgcaggataaatctgaaacccaagggaccctcaagcacttcctaaggagagctcanaacgagtttgagctcaaggtgaaaaagattatgagcgacaatgggtccgagttcaagggaccttcagtggaggagtaccttgaggaggaagggatcaagcacgagttcttcgctccctacacaccac

SEQ ID NO: 74665 - DNA, 455 bp, Zea mays
  unsure (1)..(455): unsure at all n locations
agctntaatatgctccatattgtaaccagttaataaaaatatgctacaaaccgactcagaataaactagaaacacaatcctaatacactaaaacatcttttctcctttatattaagtcaatcaaagttacaacacaaggaagtatatgatgcactagcttactgagcgttgtgtaatgcatttgtatgcgttgtgtgatgctatatatacggatatcgcttcaaagcaagcgctcactgttgtacacattcaatgcttgacaggaaaatttcaatatgtagttaaaagatcacattgttgttgttgttggcatttaaccagaaattttgttcttctggtattattatttctgtgcaccgtgttttgtttcttattacgaattntaaataatatttatgtgcatctatcatgctntttatgtnataacatttcgtagaagctcaatactctcaaac

SEQ ID NO: 74666 - DNA, 395 bp, Zea mays
  unsure (1)..(395): unsure at all n locations
tcagtcatcgggtgcatcatctgcttcaattccatttgatagacacactcatcgtcgntaagtttaggccccttgtccttgtccatttgattctttggtcctgtcattgttagcacaaaacagagacaaaaaggcaacaaataatgtgaaccctacaactatctctcaagggtggtggtggagggggtggaatacaaattatgaagcgtcttaccccgctcttacaacattcttaccagtactacaggtggcaaatggtgaccggtgtgattgtccaacgagcgtgggtgtgattccaaaggagtacctgttctgctcgagagaaaattggagctatgggaaggctgactaaatatatatatgtggcacacaagtcaataacagatagcaatgct

SEQ ID NO: 74667 - DNA, 446 bp, Zea mays
  unsure (1)..(446): unsure at all n locations
agctntatcaaatggacgtgaagagtgcctttctattggaccaatcaaggaagaggtctatgttgagcaaactctcggctctgaagatagtgagtaccctaatcacgtctataaactctctaaggcgctttatgggctcaagcaagccccaagagcatggtatgaatgccttagagatttccttatcactaatggattcaaagacggaaaggccgaccctacactctttaccaaaacacttgataatgacttgttcgtatggcaaatttatgttgatgatattatatttgggtctactaaccaatctacttgtgaagagattagtatgatcatgacacaaaaattcaagatgtctatgatgggggagttgaagtacttcttggtatttcaagtgaatcaactccaagaaggctgccttctcaaccaaacgaagtatactcaagata

SEQ ID NO: 74668 - DNA, 466 bp, Zea mays
  unsure (1)..(466): unsure at all n locations
acggacactatgaaactaagcttggcccttggccaggactgtcgacagccacgacgtggccaggcctacgtcgcacaggcggaggcggaggctctactcctagcacatgcaagcatcgagctatctccagtaggggtgggcacatttttaccataaaccaaaaaccaaaccgaaccgaaccgaaatttcggtttttttggtagttcggttcggtttccggttttgtatctaagaagttcggttttcggtatcgtaatcggttttcaccgtataccgaaccgaaaaaaccgaataccaaactttatcaattctcaaatttgactattcgattatgtgaactaatngtgtgatacaattaaattgtattcacttatttgtatgtgatgtatgatgtatatctaaatatttgaacctatatatattttacttttaaaatnatatgtaatctatcatgcaacttgttgta

SEQ ID NO: 74669 - DNA, 373 bp, Zea mays
  unsure (1)..(373): unsure at all n locations
agctntatatggacgacggtgtcggactcctcttaattggtctgaacctggagaaagatacttctttagaccagatatggtgaaagaggttgaagaaaaggttcacagaattatccataatatgaagaaagctcaagcacggcaaaagagttatgcagacaaacggcgaatgcccttatattttcttgaaggagactatgtctacttgaaggtctcaccaatgaagggtgtatcgcgtttcggtgttaaaggaaaacttgcaccacgatatattggtccttttcttattctggaaagatatgggccagtggcgtatcgaactccactccccgaaaccttgtctgctgtcataatgtgttcacgtatacaactg

SEQ ID NO: 74670 - DNA, 329 bp, Zea mays
  unsure (1)..(329): unsure at all n locations
ntatatggacgacggngtcgagctccgctaaatnggtctgaacctggagaaagatacttctttaggcctgatatggtgaaagaggtccaagaanaggttcagagaattattcataatatgaagaaagctcagactcgacaaaagagttatgcagaccgacgacgacaacccttatgctttctggtagacgattatgtctacttaaaagtttcaccaatgaagggtgtatcgcgtttcggggttaaagggaagctngcacccangtacattggtccattcttgtgcttgagcaatgtggaccagtggcgtaccgactccaactacccgaa

SEQ ID NO: 74671 - DNA, 389 bp, Zea mays
  unsure (1)..(389): unsure at all n locations
agcttgtaagtgcaatcaaccctaattgatggttntggtgattaatgacaaaacaaactaagattctaacaagtttgctcctagtatgtacacaatgtttctacagacaggaggagcacagatcttacgagcataaaagtataaagcacagcggatttaaaattccacatcaaatgacgtgcttcaagtgctaagaaataacggcggtgctaaatttataattcttgagtcataggaatcgccgtacaattaagagggatccgtgacggttaagtaagttgtgaaacgagccaagttcaaaatcttttgaaaacttcttggagatcattttcccagatcatgaatgcccttgagaaaacaaatttagttccacaagactcccttttgtc

SEQ ID NO: 74672 - DNA, 387 bp, Zea mays
tcggcgaccaagagatcaagttcttcgagttctactagtttgaagaccctgagcatttgtttggtgaaggcaagtgtcctctgacctattatgtcctgtttacttataattcactgtcccgcattacttaattgaaacctaaggattgactagctttctatttaccttgtccttgattaccttttgggtaatcatggttagctttatgctattgctttaacttaatcaatgaacatgatgtgattatttatgatacgatggtgttatcccgatgatgatcttgtgatattctatgggactcaggccatttttctgagtacctctcagtaaggacctgttcgtggagtgaccacccggtataacagtgtagccataatggtggaatgg

SEQ ID NO: 74673 - DNA, 374 bp, Zea mays
  unsure (1)..(374): unsure at all n locations
agctntanggtaaaagtcataagatgattctaataataaacttgaatcacttttgtacccctgggataccaaaaaccctaattggaaccctggaaaaccctgaaaccaaaccctagggacctaagtgcaaaattagtccacttttgggctaaagtgcaaaaaccaagtcaaataagtattttaagtcaattggatcacaaatatgtgattttgcaagccaaaccctaagttttggacctaaatgcaagatggacctcatttgagtttattctaagtctgaaaaattagtgaatgggctcaactntggggctttgtaacttgcanagcatnagggttttgccctagatcaccacaccaaagttgtagagcattca

SEQ ID NO: 74674 - DNA, 436 bp, Zea mays
  unsure (1)..(436): unsure at all n locations
tgtgtaaagccgaagcagcactgccatggtccgcaatcgttctgtgaataaccaaataacaacttcagctataatttaatcaataatccgacaaaggatgattgatatggcattgaaaaaaggatatcctttgggtaaaacatgaatggnggtgttttttctttaaaagcccatatgctaaaggcatctggagaaaatttgaagcttatatgtggagattgatagaatttaatggttggtttggaaagcccataattcaagctttaaagactaccagcttatcctaatagaatggtatccacttctacagcaaaaacaaatgatgtcgacaaaaagagcaagatgatagtataactagcttgctttgtctggcaaactacagcagaatgcttaaaatcatgcaagagtattgaaaaccctcctctcatctactatc

SEQ ID NO: 74675 - DNA, 469 bp, Zea mays
  unsure (1)..(469): unsure at all n locations
agctntcatccttcttcttcacaaacagtgttggacatccncaaggcgaagtgcttgggcgaataaaacccttatccagcaactcttgcaattgcttcttcaattctgccaactcagcgggtggcattcggtagggcctcttggaaattggggtcgttcccggttgcaactcgatggcgaattcaatatcccggtctggtggcattcctggcaattcatcagggaaaatatctgcatactcatagaccactgggattttcttcagaggtaactctgtcatagagaaagcacatgactgagtaggaccttgactaggcagaattaaagtgaaattcccgcagaacggagaattaacttccacggtacgactggctacatcaagcacaacttggtgcaaggtcatncaatttgctcctagaataatgtccacattntccaatcccaacacaagaagagtggttttgacaat

SEQ ID NO: 74676 - DNA, 467 bp, Zea mays
  unsure (1)..(467): unsure at all n locations
taagaagaacanattcaatagcaagaaagaccattcaagttacgacatgaagaanaatgataagtcatataatagaagggatggcaagaaaataagaatcacttccaaaagaacaagaaaggtggtgatgcttacattgttagtgatttgctcaccaacattgagtcataagtagctaatcttcatgtgatagtaatgttgaagaagacaagttggtcgtgcttgctattggggattatcttcctctaccatcacgtgcatcatcctttaagtacttgggccttatagataaaggtgatcaaaatgtattgtgtttattatttagtatagatggagaatgggcacatcacttctgtagcagtaccactcctaaacgtgcacacaaaacgaanatatataaatcatgtaaccacctataaattcnttcacaagccaatacggaacgtttctatcccaaccacaaatct

SEQ ID NO: 74677 - DNA, 466 bp, Zea mays
agctagacattgtctacgtgtgggaagcctttgtcatccttaatgctagggcgtctcccactatatagcatgctacgagcaaatttattcttttcattctctagttcatgcttagcaattttagcatctagttttgctatatgatcattttgttgtttaatcatagcaatatgatcatgaatagcatcaatgttaatatctctacatctagtgcaaattgtaacatgctcaacggtagatgtagagggttgacaagaacttacttcaacaatcttagcatgtaaagtgtcattctcatctctaagattggaaatagatacattgcaaacatttaagtctctaaccttagcaattaattttttattctcaatcctaaggctagcaagagattcattcaacatgttaattctagcaattaaactatcattatcatttctaagattaacaatctgatcattcacaacat

SEQ ID NO: 74678 - DNA, 429 bp, Zea mays
  unsure (1)..(429): unsure at all n locations
ggggatatctaacanatctgaagctgacaagctgaagtttggtctgttcacaatgttttcatgggtgcagccagccttcataaaagcagcagctgtgccccgagaagctaccagggcgcagaagtcagcgtgcccaccaataacttcgtcaagggcatcaacttcgccttcaatatgttctaatgttcttggcaggttttcagctgaaggtataaatttcgaagagctagctccgacagagtgaaacacgtccttcagccgctgcacacatcggatgccgaagcttaagcacttctcctgaagttctgtaaaggattttttgcaaatttgagtatttatccacttcagtcttcaggctcgcttcaaaatatttcttatcttgctcaaatgtttctgattgacgggagcattcattctttaatntatcat

SEQ ID NO: 74679 - DNA, 394 bp, Zea mays
  unsure (1)..(394): unsure at all n locations
gctcttcatactttccttgatgtgaaatatacccttgtcggagttatgcttttggatgatctgatcctccagtgagcaacgaacttgaatgttgagtagcactaccgggtgtaacaagttaaatccatcctctacgagtggttgaagactgtggcaatgtgaattccgactcaaagcgtcagccacaacattagtctttcccggatgatagtgcacttgcaagttgtagtctttgatcagcttgagccatctgcgttgcattatgttaagcttaggttgggtgaagatgtactttagacttttatgatctatgaagatattacacacattcccaagtaggtagtgcctccaaattatcaatgcatggactacgacngcaagctccaaatcatgt

SEQ ID NO: 74680 - DNA, 394 bp, Zea mays
  unsure (1)..(394): unsure at all n locations
agcttcgtcctggccatactcttgtatgctcacaacctgtttccgaagatgcatgttcacatattttacttggaaaacattgtcaaaacatgtttttgaggaccttcggaagccgaaggcccccaacagggcccttgttccgaaattgtcttcatgcatcagtatgctggatgaagtattgcttcgaaggcaataagtgtccctcgaccaatgattgcgttgtatgggtactccatgtcaacaatgtcaaagacaacttgctcagttcttgtgttgtggatataactgaaggtaactaacattgttattntgccaaatgccacaatctgtcttcctccgaagccacaaacagggtgtgttgcatcatgaatatngtcttctggttcttgcatct

SEQ ID NO: 74681 - DNA, 387 bp, Zea mays
tgtccaagcaaggattgaggccctgcctcaccgtgacagcaagatcaccgtcgccagacttcggccgccaaccaccgcacgtagactgagctatcaggtgagccattcttaaattcctcgcacccatgccttccctgacacctaatgaagctcgctgaccagtttaattgaactctaccgccctggataggctggagcccttgccgccgacgagctcccccgcctgcgcatgtggccggcctactccgaccatccccggcgacaatccgcacctcagcgtgaccgtcacaacctcccctgcgctctcgaccacctcaccgcaacaatctcgccgccggtaagcccctccgccctttcctccgccgcgggaactgtttaattggggga

SEQ ID NO: 74682 - DNA, 336 bp, Zea mays
  unsure (1)..(336): unsure at all n locations
agcttctgaggctgctatcgaggatctcttctcagccccagcaattgaaggcaagccccggtttatatgcataaccgtattattatatgctactttattacacttaatgcttgtaagattgtaatgtgcacttaagtgtangagttgcttgaaacctctagttgcatgaacataggattcctttttgagatgaatactaatatgctaggtcgagtagctgctttgctaatcaggatctcggtagaagtcgagtgatttttctagcactcacgtgaggtcaggaattgattgtattcatcttgataacgggatctatgttagtctatggacttggat

SEQ ID NO: 74683 - DNA, 312 bp, Zea mays
  unsure (1)..(312): unsure at all n locations
tcgtattcagcaatattatttgtacatataatatcaagtttcactgcgtagcatgttctgactntggaaggtgcaattaanacggcagctacacctgccccaaaggttccccaagaaccatcgtagaatactatccaagcttcggcatctttacttgcttcttcttcctgagcccctggcgtccagttagcgatggaatctgctaacgcctgggactgaatcgaagatctatgcacataatcaatgcagaactcattgagttccgcagcccactttccaatccttccagtagcttctctgtttctcataata

SEQ ID NO: 74684 - DNA, 421 bp, Zea mays
  unsure (1)..(421): unsure at all n locations
agcttgacttanatgacaatggtaaaatgttttactatttgaactgggggagtatatatacactaagctgcctgattcattgtgtaggcaattaattccatgtttaaattatggattntgtacataaaacattcgttattttttccagattgacccagcgaaatacaagagtatctcatctggatttggtatcctgttaaaggagcaaggggccaggggtttcttcaggggatgggtgcctactttgcttggttacagtgctcagggggcttgcaaagttggcttctatgaattctttaagaagtattactcggacattgcagggcctgagtattcccaatagtacaagactcttatctacctcgcatgatctgcatctgctgaggtaattgctgatgtggctctctgcccttttgaagct

SEQ ID NO: 74685 - DNA, 438 bp, Zea mays
  unsure (1)..(438): unsure at all n locations
ntntcaccatattatcacgactatcttgagaaggttgagtatgacactttcccttcaaacgagttaagctccttcttagcattccgacttcttccttgagctctttattttcttgtgtgatagaaatatcactaattcctgaaatttctagctcaatggaagattggctttcttgagagcaacatttgttagcacatgataatatagtttctacttgagtacatgtgcatatgtgaggttggtatgatttcaaattagttagcacaacctcatgagccatttctaacatgatatgtgaatccataaatttattatgagagcacacaagcatatcatgttttccttgtaaagctagaactttcaatattagctnttctattgngttcttgagcatatcnattntactttctaatngagcaatatatgatgaatgataac

SEQ ID NO: 74686 - DNA, 398 bp, Zea mays
  unsure (1)..(398): unsure at all n locations
agcttatctgaaattcatagagtggaggatttataatgattttatgcatgattagaatttgtttctaatctgtaacttacatgacactcttcgttctactcctctatagtaaaaatgtagcacataaatatctaagacatcttgctaataatgtaatacaaatatattttgtataaaagtgaattagcttaattgatatatgcctaaattactattattagaatagaattcaattccagtgatccaaacagggcgtaaaagaaatgggagatgatcaaagattactggaagtgtatgactaagacttaggggtgtttcgtttctagggattattttttagttcttccattctaatttacattntagttcttaaattgacaaatatggaaactaaacta

SEQ ID NO: 74687 - DNA, 421 bp, Zea mays
  unsure (1)..(421): unsure at all n locations
ctcaagctttcaccanattatcatggttaccttgagaatgttgatcatgacactttcccttcaatatagacaagctccttcttagcctctcattttcttcattgagctcgttgttttcttttgcataggaaacattacttgttcctgaaaattctagctcaatagaagattggctttcttgagagcaacatttattagcacatgataatatagtttctatttgagtacatgtgcatatgtgaggttggtatgatttccaattagttaaaacaacctcataagccatttctaacatgatgtgtaaatccataaatttattatgagagcacataaccatatcatgtttttcttgcaaagctagattttaatattgagcttttctatcgngttcttgagcataacatttttattctctaattga

SEQ ID NO: 74688 - DNA, 473 bp, Zea mays
  unsure (1)..(473): unsure at all n locations
agcttgtgtttacaagaaggagagtgggatctttgttgtatttctgatcttgtatgtggatgacatattattgattgggaatgacattcctatgctggagtccgtcaaggcttcactgaaaaagagtttttctatgaaggacttaggggaagcagcatatattttgggcataaggatctatagagatagatcgaagaggcttataggattaagtcaagatacgtatattgacaaggttttgaaacggttcaacatggaacagtccaagaaaggtttcatacctatgtcacatggtaaacaccttaaccagatgcaatgtcctgcgacggctaatgagcgggagcgcatgagtaaggtaccatacgcctcagcaattggatcaatcatgtatgccatgataagtacacgcccagatgtttcatacgctataagtgctacgagtaggtaccangctgatccangtgaggatcact

SEQ ID NO: 74689 - DNA, 271 bp, Zea mays
  unsure (1)..(271): unsure at all n locations
tctaagggagagcacattctaggactaaccaatgttcattntgagaaagacaggatttgtagcgcatgccaagcagggaagcaagttggcactcatcatccacacaagaacataatgacgactgacaggccgctagagctcctacacatggatctattcggcccgatcgcttacataagcatcggcgggagtaagtactgtctagttattgtggatgattattctcgcttcacttgggtattctttttacaggaaaaatctcaaacccaag

SEQ ID NO: 74690 - DNA, 340 bp, Zea mays
  unsure (1)..(340): unsure at all n locations
agcttcgctatgaggagaatttggcatatttcagtgcaaatagcaatgaatgctgtggtaacttcacaactacttgtcagtttatatagtgctgcaggtaagaaggcgaagcggcggaattgttacaccaggcgcgcagtaacttgtacccgctgcgcagtggaccgcaaggatcaaacagtaactctgcaaggtgggaccgacacgcgctcggaagtcggatcgtttcttcgcaacgagctcagggaagggtgttttttggaccttcggcttcccgaagctgaagaggcttttntcacgggtcaagctcgttacgaagaacgatctatcaccgcgaaag

SEQ ID NO: 74691 - DNA, 458 bp, Zea mays
  unsure (1)..(458): unsure at all n locations
tgtgaaggntnttcatncncacatgtgctaagcggcgttttcacagccagcccatgctagtcttagcaattaagcatgcatctagaccggcctcctcttttgcaaaatcaactaaataaaagttgccgtctaatacacccttaaatgctagtgaaccatcacttcttctaaagacagacacatgtacatttgtaaatagacagttataccccatgttgcataattgactaacagatagcaaattatatccaagagactctactaaaaacacattagagatagagtgctcattagaaattgcaattttacctaacccttttaccttgccgttgatccatcaccgaatataattgaatcttgggaatctttattcttgacgtaggaggtgaacatcttcttctcccccgtcatatggtttgtgcatccgctatcaataatccaacttgaacccccgatgc

SEQ ID NO: 74692 - DNA, 287 bp, Zea mays
  unsure (1)..(287): unsure at all n locations
agcttctcctgcacaagcgccgcactttctgtagaatgcgaagctgctacatacaatagcaaaggagcccctagcactggtggagttaatgttgntagatcaatcgggtattacttcagctcttcaaaggctttctgttgagttgaaccccatttaaagactttggctaacttaagtacttcaaagaatgggtaaattctttctgctgatctagatatgaatcaattcaaagatgcaagtctttctgtcagcccgtgggcccccttctttgtgcttggtggctccat

SEQ ID NO: 74693 - DNA, 214 bp, Zea mays
  unsure (1)..(214): unsure at all n locations
ntacaagcacttatgaaaagaatgaggaaggaattaatgcaatacaagcgacaagagcaacaaaagaacacatatgatcctctcacaagcccttaagcactagagttgattttggaaactttgagtggattgattgctntgattgtgtcttggagtgttggaccttgctctcgcaatgaatgaaaacttcagaatgcttggatgactntgaatg

SEQ ID NO: 74694 - DNA, 463 bp, Zea mays
  unsure (1)..(463): unsure at all n locations
agcttgtgggggtctgcttcgttgtctattgtcctttaagaagaagcaccttcagaagatcagcacagaagccaacatagcgtgaaggtacacaccgaagctaccttccagggagcttcggcatagcgacatgccttgatacgaagggctgcaccgacttaaagaggaaaagaccaattggcccatggtaatttgtgccagattgtaactaattgtagaggacataaatgtaattttgaccgagctgcatcccatgcctataaataggtgaacaatacccctgtactattcacgctgacttgtattcgctcgtgtgtcacgcttggaactnttaccttctgtcaagccgaagggacaaattgtattcaatattgttcttatttattcatgatgatataatgaagatatattaataatgtcatatgattatccatgttatttctcatgattatatgcttatctt

SEQ ID NO: 74695 - DNA, 386 bp, Zea mays
  unsure (1)..(386): unsure at all n locations
agcttgtccncatggagttgtcccgtcatttttgttaagaagaaggatcaaaccttgagaatgtgcgtggattatcgacccctaaatgaggtcactatcaagaataagtacccccttcccaggatcgacatcttatttgatcaactgactggggcgagggtattttccaaaattgatctcaggtcgggctatcatcaaatccgtattcggcccgaggatataccgaagaccgcgtttactacgtgatatggattgtttgaatacttggtaatgtctttcgggctcacaaatgctcctgcccatctcacctatatgatgaactcggtgttcatgcccgagttggacaaggtcgtggtagtcttcatcgacgatatcttgatatattc

SEQ ID NO: 74696 - DNA, 341 bp, Zea mays
  unsure (1)..(341): unsure at all n locations
ntgntccagtgcacccaggaccacgaagaataccttcatgcgtatgtccgaaggttcttgcgtctaagggcacaagcaccaacggtgcctaatgaaattgtcattgaggccatgattaaggggcttctgccgggaccttcagcttaatattttgccaggaaaccccctcaaactttggagaagctgctccagaagatggatgagtatattcgagctgacaatgacttccgccaaagaagggaagaagcatacaggttctctgaaatgaccaggggcttcgaaggaagaatccacccgaggcacgtcaggtcaattcacaactctactcagagtgatgacag

SEQ ID NO: 74697 - DNA, 333 bp, Zea mays
tcttctcctccggtgatatgaatgcaaggggttgagctacagatgtgagggcatcatcaagctcgatgatcttcctcgagccttcgatcatgcatacaaagcttacaaaattcccgataacttccttcggaggtcaatttggcatatctatgattaccacggattaattgaacttgagtggggttaaggaaaataagtgatcttagaataaccttaaccacctcgtggtcatcccactttacgctccccacgttgcgcgcttggataccaaggtcttgagccgattgacatgtgatgtggctcttccctttgcgaaacggaaccgatcgaact

SEQ ID NO: 74698 - DNA, 365 bp, Zea mays
  unsure (1)..(365): unsure at all n locations
tgacacttagatactcagcttgatgcatgaatggtgggtggngcccttttttttttcttnnccccaccntaacnccgcggggtgctgtctcctctatggcacaccataccaatactgtgtcttatgttatttgctccttatacatactcactacattttgccgtctcacacacaccatcacaaacacaagttggactagcgatcaaattaagaagatcctttagccacattatcacatggttataggactcaacaaacaagactagaacattgcttataggacagctatgctctcacattcttcaattatttattatcgaaataaatataatgggaagcacgttcgttcacaatcaccaattatt

SEQ ID NO: 74699 - DNA, 462 bp, Zea mays
tgacgcatgccatcttgatgaggcatgcagctactctgagttactttgtgctgaagaatccaatgctcagcaagcacacacaacactgtgatagatgggctgtttaataatgggaagttataaacaccatgtctgcttttttacgagctaaggaggaaagggccactgctggatggaatagcctatagtatcatggtgaagcagttctgcaaggaggggattggtgaccaaattgcagatgctgtttagttggagaatgagatggagcagcactgctttagaggtgatttggctaccataacatcattgttgataggttttaacaagagtaaacgctgggacttggaagagcaaatagtaaagattataagggacagcactgtattgccggacgccattcgagggaaacagacatgatggtgccttggaggacctcacagcataaagaatatgggacaccat

SEQ ID NO: 74700 - DNA, 423 bp, Zea mays
  unsure (1)..(423): unsure at all n locations
gtcctttatgatgcttcagccgaaggccgacttcattttttattgtcggcgtttcgacaccggagggtccctggaccgacgagtaaaattgtcgctgcgtgtctcaacccagatgggttggcgcgagatggaacacaaggtggaaaacgcggctcgtgttatcctgcgccagggggatgcgcttgcagtaggggttacaagcgttcgcgcgagagagagtgagcctgctcgtcagcccgttctcccgcgcgaccctctcgcatgaaggccctggacctcccttttatagatgcaaggagagggtccaggtgtacaatggnggtgtagctatgcgctaacgtgtccggcagagaggtgccagagccctgtgtacatgccaacgtggctgtcggagaggtgctagagccctgtgtacgcggtatc

SEQ ID NO: 74701 - DNA, 464 bp, Zea mays
agcttgaaaaagttgagattgtctcgacttcatcttttggtgcagatgttgatcctagggcaatagatcttgccatgagaatcgccgaaaggatgttcctcataatgaatgaagatgaggcgaataacaaaattgaagaagaaaatgatcgatggagaccaaacgacgaatccacctcttcacaaggtttgtctttcaaatccacttctcatatgtgctttattgctaatgggagtgacagtgaaagcgaaagtgaggatgaggaggagcaagaaagtgatagtgaagacgaggatgatcttcaacaattcttcgctcagctaagcaagaaacatcggatgagcttgctcaaactcatgaaaagagcggaagaacaaaaagaaatgcttcataagcaagaagacttcctcattataaaaatcgaagacttagagaagttgaccaaagagcatgagaagctaaag

SEQ ID NO: 74702 - DNA, 402 bp, Zea mays
  unsure (1)..(402): unsure at all n locations
cttcatccncacatgtgctaagcggcgatgtcatagccagcccatactagtcttagcaattaagcatgcatctagaccggcctcctcttttgcaaaatcaactaaatagagtttgtcgtctaatacacccttaaaagctaatgaaccatcacttcttctaaagacagacacatctatatttgtgaatagacaattatatcccatattacataattgacttacggataacaaattatatccaagcgactctactaagaatacattagaaatagagtgctcatttgagattgcaattttgcctaagcctttaaccttgccttgattcccgtcaccgaatatgattgaatcttgngaatctntattcttgacgtaggaggtgaacatcttcttcttccccgtcat

SEQ ID NO: 74703 - DNA, 411 bp, Zea mays
  unsure (1)..(411): unsure at all n locations
cctgaggcatgcaagctntaatgcctctccaaaccttgcactattatttgtcttgtcaattggcggngggtctatgaaactacggcgccaccacctttccttgactagataagtttgtatttgataccaaccgcagaaagggttggctaacttaaacaaagccagcttaatggttaacgactttgaggcataatgttgggagccgatacatatagatgtcacccaacaacaggagtcatatatatgatatgattagcaaggagatgcttacccaactaccctgtcttctagcggggatgctaaagctcactagtacacttggtaggtgtgggttctgaatcacctagtatcaatcgagggatatttgttttagtgggagtacactattaaatggttaatatgagttactct

SEQ ID NO: 74704 - DNA, 523 bp, Zea mays
  unsure (1)..(523): unsure at all n locations
acactatgaaactaagcttcataccagctgtggcggaactgcccgaattattctttcttaagtgcctaagccccgccttagaggctagtccacacttaaatgggaataacccgtcaatccctcggatctagtccgacacggccactgacaggatcaagtaccacaatttcactcgatggtgagtcacagagcanatacaataaagcataaaaccatgcatgtaagagtattaaattattacatcaccatcggagttttgcaaaagtagtcatcattgttcgaagtgcagcggaataaaactaacggtaaatgaacagagagatggggaagcctgtcccatcactcctcatgctcctcctcagccgaggtagggtcccactcgatagtccaacccggtggcaagatggacggccaagtcactccagcaaccatgtcctccagagatcctgannaattatgccacaagcaaggctgagtatactaatactcagctagacttacccggtgtgaggagtctactcct

SEQ ID NO: 74705 - DNA, 458 bp, Zea mays
  unsure (1)..(458): unsure at all n locations
agcttgtgaaggttcttcatccccatatgtttatgcggcgatgccacagccagcccatgctattcttagcaattaagcatgcatctagaccggcctccttttttgcaaaatcaactaaataaagtgtgccgtctaatacacccttaaaagcgagtgaaccatcacttcttttaaagacagacacatctacatgtgtaaatagacaattatatcccatattgcataattgactaacagatagcaagttatatccaagagactcaactaaaaacacattagagatagagtgctcatttgaaatagcaattttacctaatccttttaccttgccttgattcccatcaccgaatattattgagtcttgggaattcttcgtctttgacgatggacgagaacatcttnnctctccctgtcatatggnttgtgcatacgctgtcgataatccagcttgaaccccc

SEQ ID NO: 74706 - DNA, 302 bp, Zea mays
  unsure (1)..(302): unsure at all n locations
nggtcctaaagtaacgatgggaattcagactcgtccactttttgtatactgggaaaaacttcggggaattaacatcganttgggtcatggctcctaaatgaggacatggccaaatttttagtttacacaaacataccaccaacattctaccgacacaaacacaccatcacaaacacaagttggactagcgatcaaattaagaagaaccattaaccacataaagacatgtttaaaggacccaacaaacaaaactagaaatttgcttataggacagtaatgcttncacattntccaattattta

SEQ ID NO: 74707 - DNA, 443 bp, Zea mays
agcttgtacaaagcccgctggaattaatcttctgataaacccgacctcgctgtaacatgacacccgaaggtccaacacaacaagcaatgagtgaattcagaattattgcagagcatatcagcacaagggacctggttcaagagtttttagcattcaaagtttttcccagtttgagagaatgggaaatgccgaagctacagggggaaaagaaagaaggtgaactcgtacgtttaccttactatttcaagtttaaaaagtactttaaagcaccttgccaagagtggctagatacgattgaagcaatgtgtaatgaaatacttggcaattattccaaaaaagaagatcaattgatgaccgcagccttcggcactcgtccgaaacgaaggctaaatcgagtgttggacgccttgtgtttcgaatacccacactacgaatatctgaac

SEQ ID NO: 74708 - DNA, 346 bp, Zea mays
agaaaataaggcaaatggcacaagcagtgtattaaatgcaggcggtgtgagatcctatttatacgaccagcacgctccaagttggggggcccgtcattcattgactggtgctattctagcaaagggaatggtgttttttaaactttggcttaaggccttcgtacatgacgcaatctgaattcgttattctaaacaaaataatattgcgaggggctactgttgggggccttcctcctccgaagggcctcaaatatgtgatttaacaataatttacaagtgtgacatgtaaacaaggtaccttccgactctggtcaaaagcatatataatacggacagcatgatcggg

SEQ ID NO: 74709 - DNA, 521 bp, Zea mays
  unsure (1)..(521): unsure at all n locations
acacttagatactcagcttcnagccacagtctgaaactgaagtcgggccttagagcttgtcttgtgaaatccttggaagctgaaaaaacaaaaatggcagaacaaattttgagtgaagaaactggcactgctgcccctgaagcatcttccaaaatacgtgattatattgtacgacatgcttcggggaagaaattatctgaagaagagattnttgaagctaatcactatgcccgagaactgaagtatccgaagggggccttagtgttcaacggcacagatgaagatgacttcttatactgcctcccagacaacaaagaattatctgtctgccgggagatggctagaagtatggngttcccgaagcttgaagctaggctctgcgctatgacgaaggacgatcttgcagatagccttgcatataatagtctgaaagtatgagaattgtatatttggaannattgtaattttgaatcattcttttattcttatactannatctttttcatataggggttaatact

SEQ ID NO: 74710 - DNA, 485 bp, Zea mays
  unsure (1)..(485): unsure at all n locations
tagacgaggctttctgtggagagggaggaatgattgtaattgtggccattgactgctgacttggaccatagtcactacacccaaggacctgaggggtctgggtattatcgatcttccgatcatgagctgggcactgcgggctangtggccttggctgcaaaaatctgataggactaagccatggtcggacttgcagattcaaacttgcgacattgtgcaaagcttagtgactgcagctggtatcactcatttgggagatgggtctgatactctgcttaggaaggatcgttggctgaatggcaaatgtattaaggaggtggcacttgctgtcttcagtatggtgcctaagcgtattgcttatatacgcctggtcaatgatgccgtgcctgatctcaattggttggctgatctgacacgggctagttctgctacatcccttgctaatatcatggacctttgtgacttactggatgtgatggttctgc

SEQ ID NO: 74711 - DNA, 411 bp, Zea mays
tagcttcttgtgtacccaaacacaagtcttttatttcttgtgtttgcccccaatatattaggcaactactttgcctgatttgttagtaagcacaaatgaagcatcaaaagtcttaaatgaaacattaggttcatttgatgcagtaggaagtttatttttaggcattttaacatgggtagaatgcctaaagctagatgcctcattcttgtacataaaagcatgatgggaaacagaatgagacttcctagcatgaattctcctaatcttgtgctcaggataaccagcaggatataaaatgtaaccctcgttatcctgagccataggagccttgccctttacaaagatagacaatcttttaggggcattaattttgacatttgcttcctggtggaaccaatgccatccttaatc

SEQ ID NO: 74712 - DNA, 388 bp, Zea mays
  unsure (1)..(388): unsure at all n locations
ctcaagctgggaggcattgatggggacctacttgatgagactcttttacttctcctccgtcgctttgaatgcgacgggntgcacctcaggtgtggaggtgccgccttgccctaagttgactacttgataggagcctttgatcatcaattcaaagctcacaaactttcctataacctnctcgggagacattagcttatatctaggatcaccacgtattaattgaacttgcgtaggattgcgaaaaacgagtgatcttagaataaccttgaccatttcatggacattccatttagtgctcccgaggttgcgcacttgattcaccaaggtcttgagccggttgtacatagcttgtggctcctctccctgggtgaggatganacgaccgagc

SEQ ID NO: 74713 - DNA, 443 bp, Zea mays
agcttgctcctcttcttgaagttgatcctattgtcgcaaaacatacaaagaaggacaagtgtaactgaaaatgatatggttagctataacacaaccctctagttgatcatattgtttcatgacataaggagaattcatatttcaataaatgtatactcaatgtaccatatattctcctttccaattataccttgcaacacaataatatgtatgtttagatgtccatggaaaatcagcaataaaagaaagtttctcctctaaattatttagattacatagagtatcaaatttgaaataagctaaagtatttaaagaagataacaatttcagctcaacatgtacattgaaactaatcttccaagaggtacgatagcttgattgggtggagatcacgacattgatgatccaaggctccgagcgaacagatccttgcaatcactaca

SEQ ID NO: 74714 - DNA, 510 bp, Zea mays
  unsure (1)..(510): unsure at all n locations
tctnagggagaacacgtgataggtctaaccaatgttcatttcataaaaatagaccttgtgcagcttgtcaagcaggtaaacaagtgggaggagcacatcacagcaagaatgtgatgaccacgtcaagacctctggagctgctgcatatggacctcttcggacccgtcgcctatctgagcataggaggaagtaagtatggtctagttattgttgatgacttttcccgcttcacttgggtgttctttttgcaggataagtctgaaacccaagggacccttaagcgcttcctaaggagagctcaaaatgagtttgagctcaaggtgaagaagataaggagcgacaacaggtccgaattcaagaaccttcaagtggaggagttccttgaggagcangggatcaagcacgagttctccgctctctacacacctcagcanaatggtgtggtagagaggaagaacaggacgctcatagatatggcgaggactatgctnggagagttcaagacccccg

SEQ ID NO: 74715 - DNA, 444 bp, Zea mays
gcacgcatgcaagcttctatttatatgtcgagcgctttttttttgtggggcccgcttgtctatgtcattcgctattctaacgaatgggtcgtatcttttcgggccttcagatataagccatcgttaaccaagcagcggaaatttgttacatagaaacaaatcttactgtgaggggctactgttggagcctatacttcttctaaggccctaatatacataactaaccatatgtctttagtatgacatatatcattacaagaggattctgctttggaacagagatcttcttctatgacaagagtataatctcaacccacacgcgactataatgggcgacaaattatatcaagggacttcacctcggttgtgacaagacccatataacaggaccggaaaagaaaatactatctaaccttatgctttgtatataattgttaccgtgac

SEQ ID NO: 74716 - DNA, 459 bp, Zea mays
  unsure (1)..(459): unsure at all n locations
tatccganagctcaacctgaaaagcggcaattataatagtacctcagtgtcattaataagaggttcttactatcttagttgttcaaatgaattgacatgattttgcgactcagaaaacaaatcttgaacataatcatagtatgtaccactcgtcccagtgaccgcatctggaggcccctagtgtgcataaaatctgttaatgtccttccatcaacaggggaaagctcaagtgagccaaagtctgcaacctgacaacacagaaggatggcagtaaaacacagtgtaactcanaacaagtctttgattgctgcaagatagatatattaaccaattgggtagcgcggtatcatcataatatttatgtgacatctcaatcagttcatccagtgactgcacacagaagcatganatcaaaaggcataatgtaacaataaagaatgtgaggaccatgatggacgt

SEQ ID NO: 74717 - DNA, 464 bp, Zea mays
  unsure (1)..(464): unsure at all n locations
agcttggcaagaatcattgtggttggntatcactaaactttgcatgagcagctcgtatcatccacaaatggacggccaaaccgaaagaataaaccagtgctttaaggcctatctacgttgctttaaggaaccgatgctgctgtcaaagagaaaaaggccagtgccgccgtagcagcctagcaaggtggagtgggagattaatcccctgcgtaaaggcactccaaagacgtctggtataacacttgttctcactcatatcttggcaaatcacccaccatctcactttggagtcccctgttgtggatcaatgtgttgtggcggacttgaaacagtttctgtagaacagacaactgatgctcaacaggtgcgaatgcacttgcagtgcgtgcaggaccgtgtgtttgcagtaggagatcaagtaatattcctcanattacaaccatactggcagtcatcagtgcatg

SEQ ID NO: 74718 - DNA, 446 bp, Zea mays
  unsure (1)..(446): unsure at all n locations
agcttctgacaactgggccaccggacagtcttgtgttgcaccggacagtcactgttcactgtccggtacgccttctggcgcctgctctgactctgcgcgcgcagtccgcactgttcactgtagccgttgcagtcgaccgttggcgcgagtagccgttgcttcgcttggcacaccggacagtccggtgctacaccggacagtccggtgaattatagcggagaggatcctagaattcccaaagctgagcagttcggagttggactccctggtgcaccggacactgtccggtggcacaccggatagtccggtgcgccagaccagggcagccttcgggtgccttgctccattctttatgaaccctttcttttggctttatattnggttattgtgaacctctggcacctgtaaaacttatattctagagcaaactagttagtccaattatt

SEQ ID NO: 74719 - DNA, 449 bp, Zea mays
  unsure (1)..(449): unsure at all n locations
ntagctgatttagagtcccttggtggattatccccaggtttatcttttctatctcttgacacanagtgttgtcagaggtcttcaccataagacagtggcaggaattcttactgctcagtgcatctgccaccacattggctttgcctggatgataatggatctccagttcatagtccttaataagctcaagccatcgtctttgcctcatatttaattctgactgggtgaagatgtacttcaagcttttatgatatgtatagatatgacagatatttcccagcagatagtgacgccatattttcagggcatgaaccacagcagctagctccagatcatgagttgggtaatgctcctcatgtcggcgcaactgccttgaagcatacgcaattactcggacctgctgcattagtacacagccgagtccactgccagatgcatcacaatataca

SEQ ID NO: 74720 - DNA, 483 bp, Zea mays
  unsure (1)..(483): unsure at all n locations
ctctaagtcacctgccgcatgcaagcttctaaagggagaacacantttgggactaacaaatgttcattttgagaaagacaggacttgtagtgcatgccaagcaggaaagcaagttggcacccatcatccacataagaacatcatgacgaccgacaggccactggagctcctacacatggatctattcggcccgatcgcttacctaagcatcggcgggagtaagtactgtctagttattgtggatgattattctcgcttcacttgggtattctttttgcaggaaaaatctcaaacccaagagaccttaaagggattcttgagacgggctcaaaatgagttcggcttaaggatcaagaaaataagaagtgacaacgggacggagttcaagaattctcaaattgaaggcttccttgaggaggagggcatcaagcatgagttctcttcttcctacacgccacaacaaagtggtgtagtagagaggaa

SEQ ID NO: 74721 - DNA, 468 bp, Zea mays
  unsure (1)..(468): unsure at all n locations
tatgaaggttcttcatcccaacatgtgccagacggtgatgttcaagccagcccattttcgtcttagctattaagcatgcatctagatcggcattctctttcgagaaatcaactaagtagagcttgccatctaatacacccttaaaagctaatgaaccatcactccttctaaagacagatacatctacatttgtgaataaacaattataacccatgttacataattgactcacagataacaaattatacctgagcgattcaactaaaaacacattagagatggaatgcttggatgtgatggctatctttcccaatcctttgatgttgccttggttcccatctccaaagatgatcgaatcctgggaatcctggtttttgacgtaggaggtgaacattntcttctcccncgtcatgtggttcgtgcatccgttgtcgataatctagctggagcccncggatgcataaacct

SEQ ID NO: 74722 - DNA, 435 bp, Zea mays
agcttgtctgtctgagagacgcgagactcctattctatcctgctcttgaggaagaaagcactagacggccacatgattctaattcgatggactgagagccttctaccgacattgacccgcgcgacgtggaccatacttatatctttgagactgcctctatcttcgatgctatgccccgatccgggctggagacttcagtgagactcctctttattgtgcagaagaccctgcactatctattgctggagcacaccaaaaagatatgggggaaactgaatctgataaagattatctggttgtcttgcgcagcaaacccagccactaggtctattagacatattctgtttctaacgcgtgcctgttcaagaaggccaaatcctgctattctacttgaatatagaagatgccattgcgcttctgtggagatgagactac

SEQ ID NO: 74723 - DNA, 488 bp, Zea mays
  unsure (1)..(488): unsure at all n locations
ggtcggagggaacgatgatcggcgcgtagacgagtgctttgtattngcaagctccattgatgttctaggtttctgtcgtggggtcgtcgtgctcattcggtcacatagaactcggcaacacaccctttttcccaacagtagcccaaatcgatagctcgacgacgagagcacgtgtcgcccaagtttagaatcggaagccgcagctagcttggcacgaccacaatgtgctacacactgcgccatgactgcaccatgggcatgacctcctcgtggatgggtgctgctgtcggtgcctggtcataaagagtggaatgagaaataaaataaatggagaaataaagagaaaaggggggcaaaaaggatagtttttgccctagttntttcgttcttctcttttctctgcagtcgtaaataaatggtttattgtatacggtggtaagagtanattgataacaattaggatgtccagcagcaataaatacaacttt

SEQ ID NO: 74724 - DNA, 443 bp, Zea mays
  unsure (1)..(443): unsure at all n locations
agcttcagacanaatcttatgccaatggttatgattatcatataccttcttttttatcaaattaatcaatgtcctattactagactcggcctgtccattggcctgagcataatatggagatgaattaagcagcttaattctgtataattcagcaaattcacgtacctcctttgacataaaagaagtaccttgatctgtagtcaaggtctggggaatgccgaatctatgaataatatattcagttatgaactcaattacctccttgtgtgtcatgtttttcagagcaacgacttcagtccatttggtgaaatagtcagtggcaactaacacaaaccgatgccctnttgatgatgaaggatgaatttctccaataaagtctaatccccatcctctgaacggccaaggcttgatgataggatataattcggctgcagggaccaact

SEQ ID NO: 74725 - DNA, 362 bp, Zea mays
  unsure (1)..(362): unsure at all n locations
tataatctcagcttacacctctggactaactcgaccgcatcactctttgctgttgtccaatagaaaccagacctgaagactntcccaaccagagttctggatgctgcgtgtattccacaatgtccggcgtgaatctcgtctaatagctgttttccagtaaccgaggaaatgcacttcatgaggactcctgttgcaccccttctgtacaatgtgccccctacgagggtgtagtgggccgacagtcttgtgatgtgtctgttatagccttatcatccggttcttcttcattctttatatacctgatgataggctctcttcagtcattagagtctgactctagctggctcaaagtgttgcactct

SEQ ID NO: 74726 - DNA, 473 bp, Zea mays
  unsure (1)..(473): unsure at all n locations
cctgctgcatgcatgcttcaaaacacacccacttgatgtttttgttctgggcaatagnctcttccccgccaaggctaactatataagcatcattaatgtatattgcattcttcaaaacctcgatatggcccttcatgatgctcgatttatcgaacaaaacatggcttggcttcaatggacgttcttctttaatgtcttcttcctcaagctcacattccttactgccctcaaaatccttggacaaaccagcaataatatattccgtaatcttttcaaactctggccctattcagggtgttgtaatatgcaacaagggcgagcttttcactctttccttcaccgaccgtttctagagctactaatgtggtcgagtactacactgtgtggaaagctttagaggcaaacaangcactagaagtaggttggctaaagcagcgaatgtcatacttagcagcatcgaccatggactcatt

SEQ ID NO: 74727 - DNA, 458 bp, Zea mays
  unsure (1)..(458): unsure at all n locations
agcttgngtaatgcttttaggtcagtaactttcttggttaatacatggtctccaagattctaatgctcttctccttaagtttcttccacatgtgatcacagtcattagtgcatagatgtgccatagccatggtaacacttggggtgttacaacgccctcccactgactgacctgacaggaaaacaacgccgctcgcccctctacgactgctgtgccacccgccagggtgaggctgacagcagctgagtccagcctcaggagccacaagaagctccgcctcgcccgaccttgggcctctgcctcaggagaagtctccgcctcgcctgaccccagggctcggcccacgcctcggcctcagaaggtggtctctgcctcgcccgaccccaatgctcggtctcaacctcgaactcagaaggtggtcttcgtctcgctcgaccctagagcccagcctcaacctc

SEQ ID NO: 74728 - DNA, 444 bp, Zea mays
  unsure (1)..(444): unsure at all n locations
nttcgcgagcgtgctggtgtcgtccgctggctctggattggcgtgtcacggggagacagcgctcgccttcgcctcaaacgcgaggtcgatgcccgacgcgtctttcttggggcgctggggccgtcgacccgctcgacagccgacgaggcgctgcctcctacttggccttggttgccccgcctcctcctccgtcggcggnggagaggacggngtgagctcgaacgtcgttcttccaccacgcggggaagacgtcgtcgattccgccgccggcgggcgggctgtcggccgccattgtcgttgtcgcacggcggtggaaggagcatcatgtcgtagctgccgtcgagggacatgaactcaaggctcccgaaacggagcaccgtcccgggttggagaggttgctggagactgcccatctggagctggacgggaagctgttcgtcaaca

SEQ ID NO: 74729 - DNA, 411 bp, Zea mays
gaagaactttgctgcgcccctgatgattgggagctatgctgtagcatttgggtttggcttcccctgacatcacttgggctggcattggggaatgacctgacatgcctaggggggaatattacaccgaagcccctggccatttcagaggaactgtaagcttcttctcttctttgctgaaaataattggcagctctgatgtattccaccatattctggagaaacttctccaatagttgcggcggcttcaattcaaaatattgcgtcgtaggtcctggtctgagcccctcgatcatggcatcaatgacaatttcattgtgcactgtaggcgcctgagctctcaatcgtaagaaccttatgacatacgcctgtaggtactctgtcttgacctatgtgcctggaacagagcttgac

SEQ ID NO: 74730 - DNA, 249 bp, Zea mays
acatctggctgtgcgccattgaagaccactgccactttagggtacatgacatctcgggcatacatgataacttgaaaaactattatgttatactacacaattaccgaagcgagccatacaatactgtcgcgagcttgcgaaagctctatcggaagctgaacgacagcgttttcaaccacgattcgcctacgacaaccttttcgctagggatcaatgatggatatcgaacgactggaatgtcagcttgag

SEQ ID NO: 74731 - DNA, 496 bp, Zea mays
  unsure (1)..(496): unsure at all n locations
tgaagccatggtaagtagcataggctaataatatacgaattgactcaagcctagctacgggtgcataggtttcaccgaaatccaaaccttcgacttgggagtatcctttggccacaagtcgggctttgttccttgtcaccacaccatgctcgtcttgcttgttgcggaacacccatttggttcctaaaacattttgattaggacgtggaactaaatgccatacctcattcctcgtgaagttgttgagctcctcttgcatcgccactacccaatccgaatcttgtagtgcttcctctaccctgtgtggttcaatagaggaaacaaaagagtaatgcttacaaaaatgtgcaacatgagatctagtggttacccncttatgaatgtcgccgaggatggtgtcgacggggtgatctcgttggattgcttggtggactcttgngtgtggcagccttggttcttcatcctcctttgcttgatcatttgcatctcccccttg

SEQ ID NO: 74732 - DNA, 410 bp, Zea mays
agcttatgaagattcttcattccaacatggtctattcggcggtgccagagccaacccaagttagtcttagcaaccaagcaagtgtcaagttcagctctatcaaaatctaccaagtatagttgaccctctaacactcccttaaatgctattgaatcatcacttcttctaaagacagtgacacctacatcagtgaatagacagttgtagcccatttgacataattgagaaacggaaagcaaattgtaatctaatgaatcaacaagaaaaacattggaaatggaatggtcaggtgaaatatcaattttacccaaacctttgaccaaaccttgatttccatccccgaatgtgatcgctctttggggatcttggtttttctcatatgaggagaacatcttcttctccccggtcat

SEQ ID NO: 74733 - DNA, 450 bp, Zea mays
  unsure (1)..(450): unsure at all n locations
acttagatactcagctcagatgagtttatgaatatgttaggttgagttagatttattccattcactaatactattaaagtaatatgcaaaagaagttagaacagttggtctaaaaaaattcccgaccaagttttacttcaaataaccatgcaaatttttagtattaggagagagaataagattttattttgagtctgagagatgctcatagccacctaggcgagaagtcacaggttttgtgcttttaattgtggctcanattctcagtttagatatcatctttggagcaaaacataacgttttccaccattttttaagagatcacacntcgcatcataatgagatatctcatgtgaagacttgagaacatatcactgatggctaattattcatactgtgtatctggtgcatttcttgagggtgatacttcacactcctactggagagata

SEQ ID NO: 74734 - DNA, 418 bp, Zea mays
  unsure (1)..(418): unsure at all n locations
agcttctagagggagaacacantttgtgactgacaaatgttcattntgagaaagacagggtttgtatcgcatgtcaagcacaanagcaagttggttcccatcatccacacaagaacatcatgacgaccgacaggccgcttgaactactccacatggatctattcggcccgatcgcttacatcagcatcggcgggagtaagtattgtcttgtaattgtggatgattattctcgcttcacttgggtattctttctacaggaaaaatctcaaacccaagagactttaaagggattcttgagacgggctcaaaacaagtcggattaaggatcaagaaaataagaagcgacaacgggacggagttcaagaactctcanatcgaatgctttcttgaggaggagggcatcaagcatgagttctct

SEQ ID NO: 74735 - DNA, 228 bp, Zea mays
atatcagcttctactgcgtctatagtatatctggctttatcgagaggaactgcagcaaactaaacagctggctttaatccgaagcgaatattcgtctacagcactaaaatctctaattaaatgactgagagtgagatgggtgatgccatcaacctcagaccaattacacacacagaaagaaaacaaaagaaaaaggtgatatctatctttcactgaatcggaattcac

SEQ ID NO: 74736 - DNA, 449 bp, Zea mays
agcttctaaagggagaacacgtgatatgtttgactaacgttcaattcgaaaaagatagaccttgtgcagcttgtcaagcagggaaacaggtgggaggagcacatcacagcaagaatgtgatgaccacttcaagacccctggagctgctgcatatggacctcttcggacccgtcgcctatctaagcatagggggaagtaagtatggtttagttattgttgatgaattttcccgcttcacttgggtgttctttttgcaggaaaaatccgaaacccaagggactctcaaacgcttcctcaggagagctcaaaatgagtttgagctcaaagtgaaaaagataagaagcgacaacgggtccgagttcaagaaccttcaagtggaggagttccttgaagaggaagggatcaagcacgagttctccgcttcctacacaccacagcaaaatggtgtg

SEQ ID NO: 74737 - DNA, 444 bp, Zea mays
  unsure (1)..(444): unsure at all n locations
gacactatgatactaagcttatacaagagaatagaggcaagagcccgaccatatgttattatatatggggagttatacaaacatggagtctgttctccattgctcaaatgtttatccagagctgaaggtatagaattgatgaaggaaatacacgcaggcctttatggatctcacatcggatctaggcccttgctgggaaaagttttttgtcaaggattttattggccgaaggcagcttcggatgcagcataattagtccaaaaatgcgaaggctgtaaaaaatgtgcaagagatcaaaaacagccttcgtctctgactcagttaatacaactgttgtgggccttcggcttccgaaggtcctcanaaacgtgatttaacaatgcttctggagtataatacatgagcaggcaccttcggacatggactcttcagacacggactctt

SEQ ID NO: 74738 - DNA, 448 bp, Zea mays
  unsure (1)..(448): unsure at all n locations
agcttntttcttactcctcatcctcatttgtgcttacactatcattctcattagccacacaacatatgtgggaatcgaaatgggaacacacaccttttggagaggtggattcatcgtttggtctccatcgttcattgatttcttcttccttcaaagggctagtatcattgatagcacctagagggggggtgaataggtgatcctgttacacttttaaacttaagccacaagacttggctaattgttagcacaataattgccaagtggctatagaggaatcctcaacaaaacacaatgaccaacaaagatcaatcacagagatggcgcggtggttatcccgtggttcggacaagaccaacgcttgcctactccacgttgtggcgtcccaacggatgatggttgcaatcaacccctctcaagcggtccaaagacccactcgaataccacg

SEQ ID NO: 74739 - DNA, 469 bp, Zea mays
  unsure (1)..(469): unsure at all n locations
cgcgcgaccttagaaactcagcttcccacgctngccctagtggtcggctaagcatgtctgtatagtcctctagtaagtcgctccagcgtttntaaggccgaacgacatanaggtatagcagaaggctttatcggngtgatgaatgctgttttttcctcgtcttcttttgccaggctgatctgatgatacgcggagtagcaatccaagaaagacagtatagaacatctggcggtcgagtctaccacctggtcaattctaggaagtccgaagggatcctttggacagtgcttgttgagatccgtatagtcgacacacatgcgccaatccactntattcttnttgagtacaagaacaggaattgctaaccactcanggtgtaacacttctctaatgaatccggccgcgaccaagcgagccaactctgcacggatggcctctctcttgtcgggtgtgaagcgtcataattttt

SEQ ID NO: 74740 - DNA, 452 bp, Zea mays
  unsure (1)..(452): unsure at all n locations
agcttgtgaagccaatcacaagtctgttgaataatgacattaagttcaattggtcttctaagtgcaatgaagcctttgaacaactgaagacactattgaccactgctccggtattagctcaaccggacatcactaaaccttntgacgtatattgtgatgcatcgggcagtgggctcggctgtgtactgatgcaagagggccgagtgattgcgtatgcttcaaggcagttgcgccggcatgaggagcactatccaactcatgatctggagctagctgctgtggttcatgccctanagatttggcgtcactatctgctgggaaatatctgtcatatatatacagatcataaaagtttgaagtacatcttcacccagtcagagttaaatatgaggcaaagacgatggcttgagctcattaaagactacgaactggagatccattatcacccgggc

SEQ ID NO: 74741 - DNA, 456 bp, Zea mays
  unsure (1)..(456): unsure at all n locations
tacgctgacactatgaaactaagcttacagagtaacatgcaaaataatctcctcctcgtgcttctggattggtgctttacttccattaattggacatcaacttatcccaatactttgcttttgcccctggcacaaaccaccttataccatattccctatgtagcccaaattggcacttcgattcctaaagccaacattttccaatttgaaaattattggattgagcatccaggttttattgatgtggttagaacaacttggaataaggagaagctcttatagctatgcaaaaaatgttgcaaaaatcaaaatgtcagatatgctcttaagaagtggagtaaaagtatatcttagctaaatcttttgatcaacataaaatgatgttattctagtgttggataaactggaagggcatagagtactatntatccaagaaaaaatatgtgaaatctcatc

SEQ ID NO: 74742 - DNA, 427 bp, Zea mays
gctaatgccggaattgccatcaaggaatcttctctattcttctcatccccccattgcctcatggcaaagggagatgcttaggtacacatcatcacctatttaaatgatctaaatgatgatgatgatatcgatgatgttgatgatgatggctattcatatgatgatcttgttacaatgttaggtgaggccgatgactacatgcacaaagaaaaagaaaaatttatggccttgagggaattgtataaaaacctccaagtgtcttttgaggagctcaatatctctcacaatgatctcaaagaaaattgtgagaagcttgcggatgctcaaaaatcctctattgtgcatgaagatgaggtggtcactaatgatgttggagtcacttgtgacttacttgatagtcttacaagtgaaccactacccactaact

SEQ ID NO: 74743 - DNA, 503 bp, Zea mays
  unsure (1)..(503): unsure at all n locations
tgtgtcacttatgttcgatctggcttactcgccatgtgttatatgtataagaagagcatgccagatataacgacatcattaagggggaaaggacaagatataacgacatcattaagggggaaaggaaaaaataagcatgtggtgtgaaaaaattgtgtctactgtgtttgaggagtgtctatcgagctccaaatttagagagcaatngaggttaaatagtgtgttaaataaacttagaagtctatttacacttacacaattattggttgtttacttacaattaaaatttaagatttagagagttgtttngatactattaagactagtttggataaacttttcgaattcccggagatcgagaagaatattccgaagaagattatatttcaaactagcccttacagtactattatactcttctttaaagacaatttaatgtcacgtgaacctgataactaatgngatgtctggaagtaaagttctttcacagttttgaaagaata

SEQ ID NO: 74744 - DNA, 465 bp, Zea mays
  unsure (1)..(465): unsure at all n locations
agcttgccttcgcttcagtctatcatccgcagtccaacggggtcgtggagcgcgccaatgggaaaatattcacagctgtcaaaaagatgctcctcgatgatataaaaggcaganggaccgatttattaccagaggcaggctgggcgctaaacacaaccgagtgcagagcgaccgggttcactccttttcgccttctatacggatcggaggccatgaccccgcaagaaataaagcatgggtccccacgtacagttccgtcagccgtccccgacgtggatgagccagcttcaaaagatctcattgacggagaccgggtcttcgccctacaggccctaaacaaatatcaggcccagaccaaagcatggcgcgaccgcgcagtcatcccgagggagttcagcgagggggacctcgtactcatccgaacagctcggacggagtccaagggcaagttggagcccaagtggg

SEQ ID NO: 74745 - DNA, 279 bp, Zea mays
  unsure (1)..(279): unsure at all n locations
agtaccctaaccatgtgtataaactctcaaaggcgctntatgggctcaagcaagccccaagagcatggtatgaatgcctaagagatttccttatcactaatggcttcaaagtcgggaaagccgatcctacactctatactaaaactattgcaagagacttgtttgtatgccaaatatatgttgatgatatcatacttgggtctactaacaaatctacttgtgaagagattagtaggatcatgatacataaattcgagatgtctatgatgggggagttga

SEQ ID NO: 74746 - DNA, 445 bp, Zea mays
  unsure (1)..(445): unsure at all n locations
agctngaagccatggtaagtagcataggctatgtttatgctaatngattctagcctagctacaggtgcataggtttcaccgaaatccaaaccttcgacttgtgaatatcccttggccacaagtctggctttgttccttgtcaccacaccatgatcatcttgcttgttgcggaaaacccactntgttcctacaacattttggttaggacgtggaactaaatgccatacctcatttctagtgaaagtgttgagctcctcttgcatcgccaccacccaatccgaatcttgaagtgcttcctctatcctgtgtggctcaatagaggaaacaaaagagtaatcgtcacaaaaatgagcaacacgagatcgagtagttacccccttttgaatatcgccgaggatggtgttcaagggatgatctcgttggattgcttggtggactcttgagt

SEQ ID NO: 74747 - DNA, 402 bp, Zea mays
  unsure (1)..(402): unsure at all n locations
cttcatccncacatgtgctaaatggcgatgccacagccagcccatgctagtcttagcaattaagcatgcatctagaccggcctcctcttttgcaacatcaactacataaagtttgtcgtctagtgcacccttaaaagataatgaaccatcacttcttctaaagacagacacatctacatttgtgaataaacagttatatcccattttacaaagttgactcatagacaacaagttatatccaagcgactcaactaagaacacattagaaatagagtgctcagatgaaatagcaatttttcctaaccctttcaccttgccttggttcccatcaccgaatatgatngaatcttgnggatccttgttcttgacgtaggaagaagaacatcctctttcccctgtcat

SEQ ID NO: 74748 - DNA, 445 bp, Zea mays
agcttcatcctgtgccagcaaactatatctttttctaaagttcggtggctcagcaacaagaaaaggtcacgataaaggatcaagcacaattatgaaggatctttctagagataaaactttcgagattgaaatcttatattgatggcataaggaactccgcctacttagatggaaagtacaccatgaaatggtaaaggtacaagaggatgtattgacctttggcgtatttgcatcttaattttcctccaatgattgtgttgcatatgtctaatgggtgaggaggagtaatgataatgtgttgcattttacctgcttaataacctgtgtgcccttgacatcatcctatgttcctgcttgaatatggttccggcgttcgatgtcaaaggaggagaatatgtgcgataaagctcacctcgacctgagaggagagcatatcttaagcgcg

SEQ ID NO: 74749 - DNA, 428 bp, Zea mays
tctaagggagaacacgtgataggtctaaccaatgttcatttctaaaaagatagaccttgtgcagcttgtcaagcagggaaacaggtgggaggctctcatcacaccaattatgtgatgacaacatcaagacccctggagctgctacatatggacctcttcggacccgtcgcctatctgagcataggaggaagtaagtatggtctagttatcgttgatgacttttcccgcttcacttgggtgttctttttgcaggataagtctgaaacccaagggaccctcaagcgcttcctaaggagagctcaaaatgagtttgagctcacagttaagaagataaggagcgacaacgggtccgaattcaagaaccttcaagtggaggagtttcttgaggaggaggggatcaagcacgagttcttcgctccctacacacc

SEQ ID NO: 74750 - DNA, 457 bp, Zea mays
  unsure (1)..(457): unsure at all n locations
agctntatcaaatggacgtgaaagtgcctttctattggacggatcaaggaagaggtctatgttgagcaacctcccggctttgaagatagtgagtaccctaatcatgtttgcaaactctttaaggcgctntatgggctcaagcaagccccaagagcatggtatgaatgcctaagagattntcttatcactaatggcttcaaagtcggcaaagccgatcctactctctttactaaaaccattgcaaatgatttgtttgtatgccaaatttatgttgatgatattatatttgggtctactaacaaatctacttgtgaagagtttagtaggattatgattcanaaatttgagatgtctatgatgggggagttgaagtatttcttagaatttcaagtcaagcaactccatgagggcaccttcattagccaaacaaagtacactcaagacatactcaccaaat

SEQ ID NO: 74751 - DNA, 467 bp, Zea mays
  unsure (1)..(467): unsure at all n locations
acacataaaactcaagcttgaaattaaatttagtatctctaatttctaatctatttaacataatgactaatggaaaccttctaaactntagtcttttaaccactaagagagtgagtaaaggtgtatgagggggtgttttccatggttctagatcaaaacttcaagtgggagctagacagagcgagtcaaatactatggagttttgagagttgtacaaatttctagagtgccgcttttgctacgctaaaattcttaanaagcaacctaaacatggagtctgaaggaccgccactgtcactggtcataagaaagaaatctaaatgttagagcagagctgctccacctaaagctntggagccataaaggatatggggatatatcaagttgtaagggaagctacctccatctagggatatcgccggaaccatgaaccaaggagaacanaataatgtacgatgatcccatgt

SEQ ID NO: 74752 - DNA, 355 bp, Zea mays
tcagcgcaagaaggggggaatgtgaagaacaagatggtatctttaatcatggaggagcaggatactgacgtgaagccaagaagcatgcacgtttgtcgtccaaattcgaagtttgctgggccatagtgggccaagtgatgttgggccttgtggaggttgtaagggtattaatacgttttgctggtagaacaggggatatcactattgagaataacaattcgctacgtctcttcctcgttaccactgttattctcttcttcctctacgattctactcttcctttctagtttccttctattgttcacacgcatgtttcaattggggtgctaaagaggaagaccatatggaaggggac

SEQ ID NO: 74753 - DNA, 406 bp, Zea mays
agcttaaagatggctcagactcactgtctttttgaattcagacttaagacagtctgacagatcaactttgagtcccattcttcttaaaactttctatataccaagacgcgagctctataacaaacacggtccccttttgtagctctacaaacttgatgtgctgacccagggcaaaaactttataatttgaaagttacagaggtgcaaagttgggccaaatgcactgaaattcagacttaactccatagggcttaaatagggctttttgcaaataagaccaattcacatcttttgacttgggaaatcccaattatgtgaaccatatgacttaaggaaccctaattccttgggtattgcactctaatccaaaagtgcactcaatttgcacttagccccctagggttta

SEQ ID NO: 74754 - DNA, 336 bp, Zea mays
  unsure (1)..(336): unsure at all n locations
acgatctacanacttgaagataactgttagctgattgatagacaccaaaccttcgccccttatggacggtttctatcgaagggagaccgaatgaaactacatgacaactatgagttgtatcgctttgaaaatttaagagtctcggcatatgtcttagcctattctttttgcatcgcatgtccttccttttatagcccaatgaaaacacataatggttgttcctctcctccgtttctcgcttatcaataggacatttcaccacataagaaccctgacagatccacctaaacttccacataataccaccacactatctaaatgagtacgagcgatcga

SEQ ID NO: 74755 - DNA, 445 bp, Zea mays
  unsure (1)..(445): unsure at all n locations
agctntctcaacctttcttgtgctcatttttatacttaaattnttataattggctcaagtcataattttaaacttttcatcccctttttcttattttcttgaattntgctcatggggctcacttagggtttttatttgggttgcacattcttacctttntaaaagactcaattgttttgatcatgatacttttaagtatatacttggtggattctttcttacttaagttaatttgatgctcatgcttactttggttcacataaaataatggttcttggtttggcatttgagagaaaccctcggtgacactggggtgtcacagcggtcagaaacaatggtccgaggtaatccgtgcaaacacacgatccggtcaatatacaattctgcatacttctgagccttatcagtggtgtgcaccagaagaaaatgtgtcactttcgtcaat

SEQ ID NO: 74756 - DNA, 406 bp, Zea mays
atcgcgctctgggattggagagatggcgagagtggcacgtaccctcctggcaacggaccgcctaaaaggggtggtgcgctctctgctggcgcagacctgttcatgcagtggaggatccgtgggaatggtagacatatgcaagagttacgagaaacatatgtcgtgtggttagagatcctcagctgagtaaaccgattcggattgtcgttatatctctggagagtggagacttgatctccgacctacaacctaagtgctgatgtgaacctcctgaattaaaatgatgctgtattgatgagatggtgaaattagactagatgcaaacaatgtctattaatacttaatctagcattaaaatgttgaaagtaaggactcactttattaaggtatttctgcacaagtatct

SEQ ID NO: 74757 - DNA, 442 bp, Zea mays
agcttcacatgacgtccgcttttcatctctagtcgaacggtcagacggaagccgccaaccgagtcatagtgatgtacctgcgctgcttcactggagatcgcccccgccaatggctgcgctggttgccgtgggctgagtacacctacaacaccccgtacagacttcgcttcgggacacaccgtttcgggtggtgtatggccgagagccaccttccatccgctcttatgagccgggggagacgagggtggcagccatcgcccgggacatggaggctcgggaggccttcttggaggaggtccggtaccgcctagagcaggcccaggcgacccagaagctttactacgatcgacaccaccatcaagtctcctaccagccaggggattgggccctccttcgtcttcggcagcgggcagcttcttcaatgcccaggaccaccacgggc

SEQ ID NO: 74758 - DNA, 446 bp, Zea mays
  unsure (1)..(446): unsure at all n locations
ntcctgttgtggcangtaccgcgtgcgttggaccggatggactcctctctacccacgggatcgaaggtgcctcgctcctcttccttctacgcacacgatgataccatgcacgacagctgcccgccaacaatagaaagatgtccaccttcgttggaggctttcgcgcgccgacaccaccattattgtcgttgttgccagcatcaccaacaccctagagcccacacttagattatctcaaaaaagaaacgctaaatgagcttatactctaaatttagcagatgagacgtncgctaccatctacagcagcaacctctaaagcgaacggtaaaatggcggatgccttataaacgctcaagctgaagtgtacttattcattcgctatccggtttatcacatgcagtactacttcttcctatctcctgcctttcttttctcgcagcaacagt

SEQ ID NO: 74759 - DNA, 405 bp, Zea mays
agcttcggcatgatgacagatctcaagacgtaagggtgaaccgacttaaagatgaaatgacttgaagacccatgatgttttgtatcattagtgtattcgattgtaaagggcataaatgtaattttacacaggctgcgccctgtgcctataaatagatgaacagtacccctgtactgttcacgcaatcttgtaatcgctgacacattacgctggaattattgctttctgccaaggcaaatgtataaatgtacctaaatattatgttttaatatttaggtttgtataataaaatatgtgaataatattatctgttgttggtacatctttctctaatgattatatgtcattatacattgtcttataagtctgatcacgaaggtatgacctttgtgatattttgctcat

SEQ ID NO: 74760 - DNA, 467 bp, Zea mays
  unsure (1)..(467): unsure at all n locations
ntgagccagggagtcgctntagaggttagcgttcccgcttttctgttntgggctctgttgatggcactgagttggttcctgctggttcattgcgagctgcttcgggtggcgaccctatgccaagtcatcaattgatctctcacgatctgggagtccctttgttcttctccaacctccaggtactgtgatatattctagcctgacttttacaccgtacgaactgctgtcattacactcatctgttctccatatcaggcattagtggacgggatggctagtcagctgaggttgcaaggtgcttctgttccagaaggagcttcgtctctggcacgttggaatccggtgttgcttcaacatcgtgtctctgacttggaggcgacaaatgctggttagtgctcttttgcttctcttcgtctaccttggtgaactgccttacacttttgacccttttgcttgattgtctctcg

SEQ ID NO: 74761 - DNA, 448 bp, Zea mays
  unsure (1)..(448): unsure at all n locations
tattgcatgggctggctaacatggtagtcgaccagctatggactgatgtcccatctcaatgcatgaaaatcatgtcgaatgcataatgaaacatacttttggttgtagattatttcttttcctatgcaaagatggaaagaaggaactangaaccttgtcctctaaccctagccactagataaataaatatagataggactttagggttgcaaaattacaccagtagggcgatgaaccacaactcagagatggtgaggcggcagcaacaaccttcctttcactaaacgtgtttaggttagatcagctatatgggaaagaggagacaacggcaaacgttggaccccgactcagatcaccgagtcggtgatcaccgagttggttaagccacaacattctcctcttgacctcgtacttttataattaaaactttctttaattctttaattat

SEQ ID NO: 74762 - DNA, 345 bp, Zea mays
  unsure (1)..(345): unsure at all n locations
acctataaaactcagcttctnagggagaacacattctgagactacacacatgttctttttttgaacaacgtgatgtggcgtgcatgtcaggcgaggaagcaagctggtactcattatccacacgagaacattatgactactgacgagccactcgaactccatacacatggacctactcggcccgagtgcttatatatgcatcggtggcagtgcatactgtctaggtgatgtggatgattatactatctatactcggtggttctttttgcaggagatatctcattcccgacagaccattaagggagtctcgagaccggctcggacgatttcagattagcgatcaag

SEQ ID NO: 74763 - DNA, 439 bp, Zea mays
gaagcacgaacgctttctcttggctttggtcttgctaggctgtcccttgcgacctttaagcgccatcttgaatcttttgatgatgagggccatctcttcatcattaagtcccgccgcctcaattcggccaccctgctaagtagcgcctccttgtttcttgttgccttgagagcaacgagttgaggctcgttgatcgcgccattcaaggtgtcgaccacgtatcttgcctccttgatcatcatccgtccgcttacaaattttccgagtacctcctcgggcgtcatcttcgtgtacctgtgattctcacgaatattgttcacgagatgaggatcaagaacggtaaatgaccttatcattaggcggacgacgtcgtgatccgtccatcgcgtgctcccgtaactacttattttgttgataaggatcttgagccggctgtatg

SEQ ID NO: 74764 - DNA, 437 bp, Zea mays
  unsure (1)..(437): unsure at all n locations
nttaggttttctcaacttgggttaagttttacccctttatttcttatttanggttaaagcttcctatccagggtcctatttgcaaaatattaaaacaatacaacttgtttgaaatttttacctagtgaatgcactctaggtgtgtcaaacatatgcaatgccaatgcttatgatgccatgctcaagttttagttacagtaacacctgnggtgttacaggctagaggcccagaggcgcgcccaaaagtacctgcgggtgatctgccggacccgatcccctgtcgacggngtccgagggctcgatgcctccctctgatgggattccgttacaagatcgntcccgctggtctcgaanatgtcctaaggtacctcgggagcacaacccgagccttggttatgtatcgaacgtacccatggtcatccctcgctctgcgtctg

SEQ ID NO: 74765 - DNA, 438 bp, Zea mays
agcttaatgaggaattggctagtcttaatgcccaacttaagactagcaagaatgaatttgataagctgaaatttgcaagggatgcctacacgattggtatacacccctcaattaaggatggacttggctacaagagggaagccaagaacttgacaagccataaggcccctatctccgccaaagagaaaaggaaggcttctatggttagtaatgctaaaaagaaccatgcttttatgtaccatgataggagacaaattaaaaatgcttataggaattataatgcttttgatgattttgattctcatgctatgtttgcttctagatcttcctatgtgcatgatagaaatatgggtaagagaaatgttgctcataatatgtctaagaaaaatgttgtcaatgttcctagaaaagttatgaatggtccctctacaatttatc

SEQ ID NO: 74766 - DNA, 492 bp, Zea mays
  unsure (1)..(492): unsure at all n locations
tgagtcaatccttctacanaagatggttgatgcacatttatttgataanggtgtgaaacacattcatgagaaaataaaggccggtaaagcaaactgtttcagaaaggatgatcaaggcatagtatggtttaataaccgcatagttgtgcctaagaatgatgatgtccgctagcaaattntagatgaagcacatcttagtcgatattccattcatcccggaagcattaagatgtatcatgatttanagcaacattattggtggacaaaaatgaagatcgaaattgcactctatgtggtgagatgcgacacttgtagacgtgtcanagccatacacatgaagactgctggtccactgcaatctttgcccatcccgacttggaaatgggaggacattagcatggacttcattatgggattacccaggacagcanaagggtttgattccatctgngttatcattgatcgacttacanagattgccactttcttcct

SEQ ID NO: 74767 - DNA, 461 bp, Zea mays
  unsure (1)..(461): unsure at all n locations
agcttcggattcccaacactagaagacgggctcttagtgntgtcaaaggatgaattggccgacagcttancgtacaacagcttaaaggtgagaaaatattctttttgtgtgcttaaaaattcgcgtgcttattttttaataccacattccttttgcagggccttattcttagcaatgccctcagagcgcagaanagcgctgaagacaagggatgtactatggcgttgaataaccttcgttccaaagtgattgagctaaggaacgaaggtcttgagaaagataaaatattaaactcattgcttaataaaataaaagaagatgaagctacttccaaggcccaagctgaagcccagaagtgcgaaattgaagatcttcagaaacaactggctgaagcgaaattaaagtgtgcaattgccgaagctgaccgagatgccagcgattattggaaaaatcaatgggag

SEQ ID NO: 74768 - DNA, 503 bp, Zea mays
  unsure (1)..(503): unsure at all n locations
ttaccttgattcccaacanaccagcatactcttgggtgtcttttctttagtcgggtctgaaagtcgcctagaggggggtgaataggacgaatctgaaatttgtaaacttaagcacaactacaagccggggttagcgttagaaatataaacgagtccgagagagagggtgaaaacaaatcacaagcaaataaagagtgagacacaaggatttgttttaccgatgttcggttcttgcaaacctactccccgttgaggtggtcacaaagaccgggtctcttttaaccctttccctctctcaaacgatcacttagaccgagtgagcttctcttctcaatcaaacaggacacaaagtccccgcaaggaccaccacacaattggtgtctcttgccttggtacaattgagttgatcacaagaaagaatgagaataagaagcaatccaagcgcaagagctcanatgaacacaagtcactctctcacaagtcactatttgatttggaatgac

SEQ ID NO: 74769 - DNA, 366 bp, Zea mays
agcttatgaagaatcttcatcccaacatggtctagtcggctgtgccagagccaacccatgttagtcttagcaattaagcatgtgtcgagctcagctctatcaaaatctaccaagtatagctgacccactaacactcccttaaaagctattgaatcatcacttcttctaaagacagtgacacctatatcagtaaaaagacagctgtagcccatttgacataatcgtgaaacagaaagcaagttgtaatctaaagaatctacaagaaaaacattggaaatagaatggtcaggagatatagcaattttacccaatcctttgaccaaaccttgatttccatccccgaatgtgatagctcgttggggatct

SEQ ID NO: 74770 - DNA, 439 bp, Zea mays
  unsure (1)..(439): unsure at all n locations
ntacagganaaggagatggtatgaagcttcgggtgcttgtttattcaattcaattaactcaagctatcaatcttcaatgatctatatccaagattgacccacagttattttgaattgttatatctaaaactcatatcatctcggggaagataacaatgttgtaggaaataaagaattaatcctatgccgaaaagtcaaggcctacaacatggaaggaagtcaaaggatggtaacaattatgcttttaagtgcaagtatcttaaattatcatttcttatgtgtcttgtgtagtcacatagaaaaagaaatcacttcaaatgtttctaaattatgtcaccattctttgaagaaattcctctcatatggtagattgtagtattcatcgttctataccatggcaatctacatgctctaaattggtgtaagtatctcatggcat

SEQ ID NO: 74771 - DNA, 348 bp, Zea mays
aaatatgctagaaaatagctacacctgttgttgggaccaaaggccttgtacaccctagggtttcttggccatcaccttggatgtcaccctaaccgcctctattagatatacattcagtagtatctattatcttacatgggttttgcttagataaatatatgctcttacagtttcgacgttcatcagtttgtgagaccccagctcatgatcttcatctttattcgcaaattatgttgcatcttctctgttcttgcttgtgttctcgatttcacttgcagggattagctatcgagacatggtcaaccgagttgtgcgattgataactagaggacacgtggtgatgtgatt

SEQ ID NO: 74772 - DNA, 468 bp, Zea mays
  unsure (1)..(468): unsure at all n locations
tctangcagtggtataagaggttngactcgttcatgctttcacatggntattcttgaagcaattataatcactgtatttatctgaagcagttccctaatgggtcttttgtgtatctactgctttatgttgatgatatgttgattgcttctcatgacaagtcactgattgttgaattgaaggctcaacttagtcaataatttgatatgaaagatcttggaccagtaaagaaaattcttgggatggaaattcagcgtgatcgtcgtgttggtaccctttttctatcttagaagagttatattgaaaaagttcttgaaaagtataatcttactaattgcaaatctgttgctacaccatttgcttcacatttaaattgtcattgaggcaatgtcaagttactaaagatgagaaaaacacatgtctcacataccgtattctaatgtnngtgngatctcatgtatgtatgatct

SEQ ID NO: 74773 - DNA, 297 bp, Zea mays
ttgagagcacaacgaccaatgattgcatttgaagggtattccatgtcaacaatgtcgaacacaacctgttcatccttgcgtagtaataaaaccgaaggttactggcattgtgatttttccaagagctacaatctgccttcctccgaagccacaaaggggatgtgtggcatcatggatcttgtctacgggctcttgcatctgtctgaaggcctaaccaatatgatatcagttgcactgcctgtatcaacccaaacattatggaccaaaaattctttgaatccataagagataaccata

SEQ ID NO: 74774 - DNA, 377 bp, Zea mays
atcttggctgttatactgcttgccgttgtcaactgttagttcggacggtactccgaagcggcagacaatgttttgccagaagaatttttgggcagtctttgatgttattgtagaaacagccctcgcctcgatccatttggtgaagtactcgatggcgacgaaggcgaacttaaggttcccctgagcggtgggcaggggcccgacgatgtccatgccccagcgctggagaggccatgtatgggcgatcagctctgtatactgcgaggggctgcctgaccgaggggaaaacttatggcaggcttcgcaggaccttgagacccgatttgcggcgcagatcattgcgggccagtaaaaaccctggcggatcaccttggcag

SEQ ID NO: 74775 - DNA, 452 bp, Zea mays
agcttcctctgagcgacgctcctgtgtcctgtgttctccctccatgcgtacttggcctctgctcctcccttgccgcgtctctctggtgctctgctatttccacagatcggagcttcgcgcgcgtcttcctcactgctcgcccagctccccgctatgccgcgcggattctctgtctctctctgctcagccggacggtgcccatggtcggtctgtgttcgcaccctggccgagctccatgccatggcatctctctgctcgctccttcaacttcgccgattcaccaagctctcacggcgcccaacctctgtgccgaggcctatcaactctcttaccctcggtcggcgctctgaccaatccccaactttgacacttctccctgctgcgtgtgcgagctcctctggtgcacgcacgaagctctctgctcgccgagggcgggttcttgctcgcgccgc

SEQ ID NO: 74776 - DNA, 454 bp, Zea mays
actaagcttaaagaatgagttcgttgtgcgcttctttcaggtatttgcagagggtcagagcgaagccaggtcagtcgtccattgccgaacgactttattgttcctttccactttgaagttgggcagtaattatgccttcgcttccttgatcaactgctcctgatgctcctcgaacacgagctgttcttcagtcgataaggtttcccaagtcggctctatgatattgttggtggaaacgtcagagctactctttgaaccggccattgagggccgatctgataggtctgcacgcaaagtccccagcggagtcaccaaaaagtgtgttggcgccgatccgggtgacaatcactgtgataaaacacgcggcagtgctctatgccgaggtgcggacggtccgcggtcatgaccggatggccacgacctggtcatgggcaagagtcctgctgacagccga

SEQ ID NO: 74777 - DNA, 436 bp, Zea mays
  unsure (1)..(436): unsure at all n locations
agcttggtaaaggttttctcatctagtggcttgtgtaagatatcggctaattgatctttggtgttaatataggctatctcgatatccccctttgttggtgatttctcaaaaagtgatatcgaatggctatgtgcttagtgcggctgtgttcaacgggattatccgccatgcagattgcaatctcattatcacataggagagggactttgctaaatttgtagccatagtccctcagggtttgcctcatccaaagtaattgcgcgcaacaatggcctgcggcaatatactcggctctggcggtagaaagagctacaaagttntgtttctttgaagcccaagacaccagtgatcttcccagaaactgacaagtccctgatgtgctcttcctatcaattttacaccatgcccaatcaacatctgaatatcctaataaatc

SEQ ID NO: 74778 - DNA, 392 bp, Zea mays
  unsure (1)..(392): unsure at all n locations
tcaactgtgtcaaagttccatgttgtatcatacctatgtttaactnttccatttctcgacatanggtggtgtcaggtgtccttactataagacaatgataggaagctttgcgactcaatgcatctgccaccacattggcttttcctaggtgataatggactttcaaatcataatcgntaattagctcaagccatcttcgttgtctcatattcagttctgactgggtgaagatatatttcagacttttgtgatctgtatataaatgacaagtatttcctagcagataatgatgccaaatcttgagggcacgaacaactgcagctagttccgaatcatgagtnggatagtgctcctcatgctggcgtaattgtcgtgaagctgaagctatgact

SEQ ID NO: 74779 - DNA, 450 bp, Zea mays
  unsure (1)..(450): unsure at all n locations
agctttcttcggcgccataacgaatggtattatcgccgaaggtgttcaaaaaactcacagagtggaagtgagttcaccggaggtgggcgccaatgttggggacttgttctcaaatgctatgagtcaagaacaaggcaacatagaaaatgttaatcggtaaagtccttcgtccttcgaagcattattcctctcaggatataatggttttcggacgaaggttatgaagggcataccttcataaatacattatacaatgacgaaggatgaattataaggaatataatgaacacataaacaattatgtcttattatcatgtataaacagaaataatcgttggattacaaatgtacctttaacttgaaggagatganagtacaaacgtgacgcanaagtgaatgccaaaatccgcgtgaacagtacggnggtactgttcacctatttatatgcac

SEQ ID NO: 74780 - DNA, 435 bp, Zea mays
ggggcaaactagttagtccaattatttgtgttgggcaattcattcactctaaattaatataggaaataggtgtaatcctaattccctttcaaccgatccgatgtcttgtactcatcaagcatggttctagccatgtccaatagagttctattcttcctctccactacaccattttgttgtggcgtgtagggagaagagaactcatgcttgatgccctcctcctcaaggaagccttctatttgtgagttcttgaactccgtcccgttgtcgcttctaatcttcctgatcctcaagccgaactcattttgagcccgtctcgagaacccctttaaggtctcttgggtatgtgatttttcctgcaaaaagaacacccaagtgaagcgagaataatcatccacaataactagacagtacttactcccgtcgatgcttatg

SEQ ID NO: 74781 - DNA, 455 bp, Zea mays
  unsure (1)..(455): unsure at all n locations
tcgcatcanaattcttcttttcttgctcaaagctgtctgttttttgtatgagttcatcatttaatttagcaacttcggcttgagcttccaccaatgaaccctccattgtctgaaggagaaagtctttcttctctagagaagcttcttgatccttgattttcttctacaagccctcaattataatcttgttctttttatcttcaatgtcttgctgcattctcagcgctttgcttaatgacatactctgtacaaaataaccttcatcagaaatctttgcttcatcgcaaaacattaaaaagttgaggaaaaacattaccttaaaattagaatagaataagctgccgacgatatgctgtcgtcggtagctgctgatgtcagcttcaagttttggaaaaccaacacttcttgacagagtgctgataatcttcgccctagttcgatctcgaatacatcct

SEQ ID NO: 74782 - DNA, 510 bp, Zea mays
tacgcggacctatgaaactaagcttgaggggttgtgatgttgccacttacttgatgctatcttgatatttccttcaccaaagccatcttcaacacttcacccataataaagatcaattctctttttcaattgtctgtctgcaagacaagtgataattgcaataagtaacatgatatgttaaccagaaggtatggtagcaccagaaacgaccaaagaagatggtatgctatgaaagatattatgaagaagacattcgcccggctcaggaaggaatcgctcccctagttttcaatcaaaatcacttactcgagtagtcgctgatggcgacgacgacatataagttctagtttacaatgaacaatttaaaattaagcaacaatgataatatattatgtagcaaataaatataaataagaatgttgagagttacgttaaccatataagatgaattaccatcgctaatgtcatgacataagtggactaataatctgaacacacacaattttactt

SEQ ID NO: 74783 - DNA, 458 bp, Zea mays
  unsure (1)..(458): unsure at all n locations
tgtgggtcttctctttcttttcatccttcttcggctttgttactcttcggtaactactagctggtcaaagtagggaacactttgtaagctagaaattcttgaattaagtcacgtgtcccaatttgactagtcacaatattgaatgccaaaaatagcttgcttcacaaccccatccattctgcagatcgaccttttcaaagcgaagctcacctttagcggccttataacaatatctttgaactcatcccaattccccacgtcggtctggatataaaaccactccttcgtccaatcgttaggccattttgacttgtaggctagaatgggaaatattttgtctttccagtaggcgaagttgtaacagcaaaggttgttgtatnttctatctaaagaccttgccttcttgtgatagtgcaactcgtgcactctgctgaaagcttcggcatcnagtttcacgt

SEQ ID NO: 74784 - DNA, 480 bp, Zea mays
tctaagtcacctgaggcatgcatgctttggcatccaaggtgtgtagagatctctttctatataagagctctagcattcactccaagacacaatctaaaggatcataacctctccaagccccaaattcattctctacacttagcgactagtgagagagagattctgtgttcattcgcgctcttggtgcttggattgcctttttcctttctattcttggtctaaagcgatttgttatcaaagccagagacacctatgtgtgtggtggtccttgtggggtctaagtgacccaattgattaaggagaacgctcactctgtctaagtgacctttgagagagggaaagggttgaaatagatccggtctttgtgacctcctctacggggatcatgtttcttataaccgaacctccgtaaaaccaattattggggttattcgcttgaatctcaaatagatttgttttccctctatccagacttgaaat

SEQ ID NO: 74785 - DNA, 488 bp, Zea mays
  unsure (1)..(488): unsure at all n locations
ttctaaaaagtcttggatcactctttatggtgatctgtttatttagttatgaatgtttaaagtatgaagagtaaatctgtccaattctggacagcaaagccttctagtgtcttttgtccttagttaaatattgaatcaccttgagatgtttataaatgatatgtatacaattttattacctttccaaaaagtctaagatcacttcgtttggatgtctgaatctttagttgtgaatttttgaagctgcaagtctgaatctgtccaaatctggacagagctgctgtgtttgcacaattcgattttgctaagtgttgaataatgttgtgatgaanataccaaaattatagagcactttctaaactntccagaaagtcatagtttggctatgttggattaatatttgaaaagttatgattaaaacaagtaactgctgtgctgctgtcctaaaaatctgcacgtgctcanatgaatgtttagttcaccatttt

SEQ ID NO: 74786 - DNA, 455 bp, Zea mays
  unsure (1)..(455): unsure at all n locations
agctntatcaaatggacgtgaaaagtgcctttcttattggaccagtcaaggaagaggtcctatgtgagcaacctcccgactttgaagatagcgagtacctctaccatgtgtataaactatctaaggcgctttatgggcttaagccagctcgcagagcatgatatgaatgcctaagagattttcttatcactaatggctttcaagtcggaaaggcccatcctactttatttactaaaactcttgacaatgatttgttcgcatgccaaatttatgttgatgatattatatttgggtctactaacgaatctacatgtaaagaatttagtagaatcatgacacagaaattcgagatgtcgatgatgggggaggtgaagtacttcttatgatttcaagtgaagcaactccaagaaggctcctttattatccaaacgaagtatatttaagatattctaaac

SEQ ID NO: 74787 - DNA, 481 bp, Zea mays
  unsure (1)..(481): unsure at all n locations
ntggcccanaccgaagctaccttatctattgaagatttataagttctctcggctgaagcaagcttagatggcgggaaattcttcactgacatctgggagaacggcggccgagagatggctcatgagataatnaatagagtgaaaaagattctcatgatgcataagaagcgacgaatgcagctgagaaagctgcggaacttgaaaggcggataggtattgcttaattgcttttgactttgtgttttatttctgtgacttcgaacttatttatgttttgtatcgcagctgagctatctcctcccccggagcccttcgagccaacggccgacccagaagcaaagagagaggaagaaatcactaaaatggccgaagctatnttggatgaagctatctctcaactattacacgaagctgcagatgtaagtttaaaagaagactagctcgtattgtataacatttggaatgtatatttgctgaacaa

SEQ ID NO: 74788 - DNA, 373 bp, Zea mays
  unsure (1)..(373): unsure at all n locations
tctaaagggagaacacattntaggattaacaaatgtttattttgagaaagacaggatttgtagcgcatgccaagccgggaagcaagttggcgatcatcatccacacaagaacatcatgacaactgacaggccactggagctcctacacatggatttattcggccgatcgcttacataagcatcggcgggagtaagtactgtctagttattgtggatgattattctcgcttcacttgggtattctttttgcaggaaaaatctcaaacccaagagaccttaaaaaggattcttgagacgggctcaaaatgagttcggcttaaggatcaagaaaattagaagcgacaacgggacggagttcaagaaattcacaatt

SEQ ID NO: 74789 - DNA, 286 bp, Zea mays
actttagcatgtcagggcatacaacaagagcactataatactgtgaaaacatcccaaaaaaaataaaaacaagaacttcacttttggacctgaaagtgacgatgacactcttgatgacatggatggtaaaaacaattcaaagaacccagctttggtgaatgtggttctctcactcattgaacagctaaaacgtatgcctcaaaccctagggaggccgagcttatgccgcggcatgatgaatatccccagcagaataacacacagagtctacactctgctgatgcat

SEQ ID NO: 74790 - DNA, 326 bp, Zea mays
ggtgaagattcttcattccaacatgggctagtcggcggtgttcttgccaacccaagttagtcttagcaactaagcaagtgtcgagttcagctctttcaaaatctaccaagtatagctgaccctctaacactcccttaatagctattgaatcgtcacttcttctaaagacagtaacaccagtatcagtaaaaagacagttgtagcccattttacataattgggatacggaaagcaaattgtaatctaaagaatctacaagaaaaacattggaaatagtatggtcaggtgatatagcaattttacccaaacctttgaccaaaccttga

SEQ ID NO: 74791 - DNA, 457 bp, Zea mays
  unsure (1)..(457): unsure at all n locations
ttannatgtgtgtcatcaatcaccaaaaaggtttatatttantttgcattcatcccttttgtgagttctggtgatttggataacaacacatttaaaggtctaatgagtttgctaagtgttgaacaggaaattaagtatgatgaacatactttaatagtgtataatgatcagtgaacaaaggttcaacacgaggttaaataaccaatgagacaatgcaaatggatataatatggtctccgtattggtttgaatatatatggacaataccttagaaatcactacatacatatgatcataatagaggatgaagtgattaagaggattggtcaagccaaagtgaataagatatgaggaatcatgaattggcttgaccatattactatcattccatatatgcttctatgagaatcaaactagagcttgaatgatcttaacatgtatatctagaagacattca

SEQ ID NO: 74792 - DNA, 416 bp, Zea mays
  unsure (1)..(416): unsure at all n locations
ntattccagtgtacccaggaccacgaagaatacctccattctttgtccgaaggtttctgcgtctgagggcacaggcgccaacagtgcccaatgaaattgtcattgaggccatgattaagggacttcggccgggaccttcagcgcaatactttgccaggaagccaccacaaactttggagaagctgctccagaagatggacgagtatatccgagctgacaatgacttccgccaaagaagggaggaggcattcaggttctctgaaatgaccaggagcttcggaggaagatttcatacgaggcatgtcaggtcaattcataactccactcanagtgatgatagagggagccaacagcaaaggccacaatactcttcgcaagcttcggggcaatagcaaagttctgttcggccaccagca

SEQ ID NO: 74793 - DNA, 497 bp, Zea mays
  unsure (1)..(497): unsure at all n locations
tgtggcgccctcgggcgtcctgccacagccgaagtactatgtctcccacctggaagtctcggngccgaacccctcgggcgtggtagtgtcgcagagactgctgataccgcgccgagtgtagtaaggacatgtcccgagcctcttccagctggtccagtgagtcttctcggctggtctggttgctntggtcgtcgtacgcccttgtcctcggggaaccgtattctaagtctgtgggcaagatagcctcggccccatagactataaagaacggtgagaaacccgtggctcggcttggcgtcgtcctcagactccagaccaccgagggtagttccttcatccaccgcttgccgaacttgttgaggtcgttgtagatcctcggtttaagtccctgtagaagcataccgttggcacgctccacctgcccattcatcatggtgtgagccacggcgacccagtccacacggatgtggtggtccttgcagaagtccaggaacttc

SEQ ID NO: 74794 - DNA, 444 bp, Zea mays
  unsure (1)..(444): unsure at all n locations
ncaagctggaaggcattctatcaagagctgtcttgtgtgtaagaagccaaagttggacgagcagggcatgcttcactagcctggtattttgctctatctatatggcatgccgagtgactccactgaggggttggcttatgaagatactctctcgccccacccctccttaattacctgatgctttttttggtcgagttaaaatgtgtagatgatcaagtacctatactgaatatattgtgatggtattcttaacaaacatgttctcagaaacttcttcaccattacactggaatgagaaccacacttacactagggagctcgtccaacgcacctggatgtccgccgaagtgcaagtgcatggtcagctccgatggcaaggcaccatggctcgctgctccgctaaacgcctcatctatgtaggtagaagntattatatatgtatta

SEQ ID NO: 74795 - DNA, 429 bp, Zea mays
  unsure (1)..(429): unsure at all n locations
ctgcagctggcaaaaactcattatactcttaataagcttctcatgtggggactcaatggggaattctgaatttcagaccttgagccaaagatcaagcgtgctcatcttgatccctaactaaaatcctaatggccccattaacaaaaatgtgcctaactaacccttctattgtgtgccagaagatggcattgggacgcgagctctatacacgacaaaaccctggatttgcctcgggtttgagcagggagacagactggatttccgggctccatatctctgcaaccagttggcataatcctatgacccccacacaagatcggtagcttgtagggaggagaagaggttntgtgcactgaccaacgcgagagcaggctctgatgggcgaccacactcgccacaacttgggcagaacgcacgggcacacgtgtt

SEQ ID NO: 74796 - DNA, 400 bp, Zea mays
  unsure (1)..(400): unsure at all n locations
tgtcttaggctcgtcttccttctttatccagaattgattattatcccatatagcaatccaatagactcatgagctccaaagtagttgctgcaaccactaggaaatctattcttggcaaagggaactcatccttcagacatgccttgttgaggtccataaaatcaatgctcatcctccacttcccattagacttcttcaccatcacaatattggctaaccactctggatatgtcacttttctaattactccatcactcaggagtcttttgacttcattcttgcaccttcagctttgtcatcggacatcttccgaagctnttgcttccttggcctgatagccagatctacattaagtgaatgctcaatgacatctcttgtgacaccacaaagatcattagtc

SEQ ID NO: 74797 - DNA, 492 bp, Zea mays
  unsure (1)..(492): unsure at all n locations
tacacagtaacacaggtgccaatctttccaatctgcattctctgtttgatataactcttnngnacaaagctgacggaagaaataactcaactctgaaagcgctagccagacatgctcagggatatagcctcgaaccattgcaggaagaatccgttcaatccatatgtggaagtcatgactcttcatccctaagactcgcatagtagataagttcaccccctactcaggttagttgcatacccatcagggaacatcgttgatcttgatccattgaagtacttccttcctctgggccctgcttaggacaaaatcggccttaggccttctccacgtctttccgccacttggcgacttcatctctaggtttggtctatcagataacgctgccagaaccactcttgccttcacgttatcctttgacttatcacgaatgtctcatattgttgcccatagtgcctcggctacatacttctcagtgtgcatcacgtcaat

SEQ ID NO: 74798 - DNA, 462 bp, Zea mays
  unsure (1)..(462): unsure at all n locations
agcttgtatgcactntagaaaatgttggattctttggacatataatggntgtgcaaaactatacagtgcatctgccaccatagccattatctatggaaggtatccaaagacctttcaaatctgtctctaatttggcgtgttgcttgttgtgtcccacatgcccataagaacatccctaatgcttcacatgactccacctcttgtgttgactttaacccatgatacctcactaaagtatcaagcaattctctaaaagaatctggagtcatacgaaaattgtcatgacacctcctgaagtccctcatattaagttccacccattgtcgtcctgtcacgtgtggcaatggagtataaagattgatcataggagcaagagtatacgaactagaagcgaaagcagctagaaccgccgctgcacgagctngttggaatatgttggagctatcatcacttgccgcgtcc

SEQ ID NO: 74799 - DNA, 422 bp, Zea mays
  unsure (1)..(422): unsure at all n locations
actcagcttaaccctgcagacctttccattttttcttcttatctaatgcgatatcgaatgtcatactttatgcatatntactttatttgtccccttgtgtggtgtactgtttgtttcctaatttgaatggagggatgtatgtatgcttgcaatcgcatagagaacgatctggtcgaagagcccgaggaactcgcatgagaagcccctgagcagcagtcggttggtggaggcaagtgtcccttgacctatctctgtcctatacattctttaattcacctcccgcattacacgtttatacttaaggatttgactagctttgttatccatatccttgtttacctatttgggttggattattatttgttagctctatgctatntctcaagctctaatcaatgaacatgatgagattatctatgata

SEQ ID NO: 74800 - DNA, 459 bp, Zea mays
  unsure (1)..(459): unsure at all n locations
agcttcggatctcttgccttacaactcctgtcattatgaccagaaataacttgagagtcggntntaaggactacccttcttattcacattggctataactttcaaagtaccaaaagtaaagcttcatattcagcaatattatttgtacagctgaaatcaagccttgctgcatagcatgttctgactgtggaaggtgcaactaagacagcaggcgcacctgcacctaaggttccccaggaaccatcgcagaacactgtccaagcttcggcatctatatttgcttcttcttcctgagcccctggcgtccagttagtgatgaagtctgctaacgcctaggactgaattgaggatctatgcacatagtcaatactgaattcgttaagctccgcaacccactttccaatccttccagtagcttctctgttcctcataatatccttcagaggttgtgatgaaaga

SEQ ID NO: 74801 - DNA, 483 bp, Zea mays
  unsure (1)..(483): unsure at all n locations
actcagcttctaagggagaacacattntaggactaaccaatgttctatttgagaaagacaggatttgtagcgcatgccaggcaggaaagcaagttggcattcatcatccacataagaacataatgacgacagacaggccactggagctcctacacatggatctattcggcccgattgcttacataagcatcggcgggagtaagtactgtctagttattgtggatgattattctcgcttcacttgggtattctttttacaggaaaaatctcaaacccaagagaccttaaagggattcttgagacgagctcanaatgagttcggcttaagggtcaagaaaataagaagcgacaacgggacggagttcaagaactctcanattgaaggctttcttgaggaggagggcatcaagcatgagttctcttctccctacacgccacaacaaaatggtgtagtggaaaggaagaatagaactctattggaca

SEQ ID NO: 74802 - DNA, 457 bp, Zea mays
tctaagtcacctgaggcatgcagctctaagggagagcacattttacgacttatctatgttcattttgagaaagacaggaattgtagcgcatgccaagccgggaagcaagttggcactcatcatccatatattaacatcatgactagtaggccactggagctcctacacatggatctattcggcccgattgcttacataagcctcggcgggagtaagtattgtccagtaatagaggatgactattctcgcttcacttgggtgtgtcttttgcaggaaaaatctcatacccaagacaccttaaagggattcttgagacgggctcaaaatgagttctgcttactgatcaagaaaatttgaagcgacaaccggacggagttcaagaactctcaactgaaggctgccttgaggaggacggcatcaagcatgagttttcttctcctacaccccacaacaaatg

SEQ ID NO: 74803 - DNA, 503 bp, Zea mays
  unsure (1)..(503): unsure at all n locations
ttgaaaagttaanatatctttgcaccttgcacgctctgtatcgtcttcggctcgcttggcttcttctcgagcctcatgagttactttctcattcttctttatcgcctcgtcggctagttctcgaccgcctttcatccaaattttggagtaaaatttttcgtccattagagttgcttcagccgaaggatccttcgtgttttccacagtaaagacagcctccgtctgggttgcagctttaacgtgttcacaaccagatttttccaaaattgctgcaacccctctggcaccggcaaaggcgcagaaattaccacgatcactaaggatctcttcaaaagctttagcttcttcaccgatccattcgatgattccttcgggatcgcctctaataaatnnttgctcggatgagtaggcacccaccttcgcanaactgtcctttagcttcttggcacaatccaagggattttcgtaatatctttcttttgattcccgaagctcatctacat

SEQ ID NO: 74804 - DNA, 446 bp, Zea mays
  unsure (1)..(446): unsure at all n locations
agcttctgcacattatttattgttacttaagttgtgttattaattntctagnttagcttgctatgatagtgataggattggaacctacgttgtataactcttttgcagtagagatagtaacacacctagcaaaaccatagttgaacatctagatagattactttcttggataggttttaggtaggtgaaaattagaggccttaggttaagaagttgattcttaagttgcctaattgacctacctcttaggcatcattatcccttcacaattgtcaactatgaattctataagtgcatgccaaggtggcaactgataggtggggcgctgccctgacctgtccaatggactgattcaacaatgggtcatcgccggtgaggggggcaatacattataatatgggccctgcacctgtagtgctagatccaagcattgtgggtgtatcatg

SEQ ID NO: 74805 - DNA, 498 bp, Zea mays
  unsure (1)..(498): unsure at all n locations
ggttatgcatcatcactaaattaatcattggttgtttgtattgtgtaatatttacttgcctttgctttgaaaaataagtggaatgttaaaatgcagatgaagtgtggttgcttggtttttttcaagtgatacaagttgttatctgttaaattgctctgcactgttgggggcaagtcatagtagtaaacaatatcttgcaaaactgacagtaacaacctcacacttcaaacccaagggcctatttggatgttatagatgtttcacgtcaacaatgatacatgaactagcatggtgcatgcgtaatcttgtcttagtctgagtttttatttttattgctgtcttgctgacacagctgtacaaattccaaatatgcactatattcacaaaatacataatattgctaataatatgtaagccgtcatggaattagtcaatcctacatagaagatcgatattnntgtgtggtgtcgcatatttaccaacatgagtntaagaaca

SEQ ID NO: 74806 - DNA, 419 bp, Zea mays
  unsure (1)..(419): unsure at all n locations
agcttgtggaggttcttcatccccacatgtgctatgcggcgatgccacaaccagcccatgcaaatcttagccattaagcatgcatctagaccggcctcctttnttgcaaaatcaactaaataaagtttgccgtctagtacacccttaaaagctagtgaaccatcacatcttctaaagacagacacatgtacattngtaaatagacaattatatcccatattacataattgactgacagatagtaaattatatccaagagactcaactaaaaacacattagagatagaggtctcattagatattgcaatcttgcctaaacctttcaccttgccttggttcccatcaccaaatatgattgaatcttgggaatccttattcttgacggaagaggtgaacatcttcttttcccccgtcatatg

SEQ ID NO: 74807 - DNA, 317 bp, Zea mays
aggctgggttgagattcccccttcactgtattattgcagagatattggaataatttggaatctattttcaccagctaacccctaacgctatcgttaggcttagtgtttatatttgggcactccgaagccaggcggtggaaccgtttgcggacagcttttgccgagttcatgaactgcactatcagacaaaggctagaaaggatggattgcatgacaactttggttgctataattttgcttatcggaaaactacaaagtgtcctgtgattagctaccgaagcaaatgggcagcacggtggaaatcggaatggttctat

SEQ ID NO: 74808 - DNA, 372 bp, Zea mays
acagccagcccatgctaggcatatcaattaagcatgcatctagaccggcctcctctgttgcaaaaacaactaaatagagtgtgccggctagtacacccttaagtgctagagaaccatcacttcttcttaagacagacacatctacatttgtaaatagacagttatatcccatattgcataattgactaacagatagcaaattatatccaagagactcaactaaaaacacattagagatagagtgctcatttgaaatagcaaatttacctacaccttgtaccttgccttgatgtccatcaccgaatattattgaatcttgcgaatccttgtttttgacgtaagaggagagacattttctctcccccgtcatat

SEQ ID NO: 74809 - DNA, 478 bp, Zea mays
  unsure (1)..(478): unsure at all n locations
gattcttccatggaatagatcttgattctcaactactgtttcaatctctaaacatcacacaaatatcttaattataagtatacaaatattagattttccattttaattctttataaaagcatatgtggtatgtctaagcttaagagttcataacataaatcacattataacattattaacccttttaaccttttaaaaaatatatgttatatatctaaggttaatgacttatgaaacacatcattaaacattaaatgatgagaggctaatatataaacctaaacatgtttcatatggaacgatattgaaacaaataattatctttattttattaagaaaacacatggcttatattattattaagaaagctatattcaaagtcaatatatacactaacattntaattatagaaacaacatgaatactanatacattattttattctttaggaaaaactaagtggtatacataaataata

SEQ ID NO: 74810 - DNA, 441 bp, Zea mays
  unsure (1)..(441): unsure at all n locations
agcttgcttttgaaataaatgtaagtttatgttattcgcttccgcatttctttatctccgatgttctgtaatgtctgcaagacgggtgagacgttcctggtaaggtaaggaaagataccgagcttgtcaagtaacttatgaacatctacagggtgtctgatgtctgtgagacaaagacaactgtaggtgggcctaattacttgggaggttccgtcacagctggtatcagagcgtagcccttcttggcagatattatgaggcatcttcaaaaggattttcaaaagtcttacctaaaaattcttttctcttcttacctaagtattctgaagagtctatcttaaagaccagatatgaagagtgcaatgtatagaaggttgaatcgactaacgttgattctgtaattatacatgcatcnatgctagaatcttactaataacattt

SEQ ID NO: 74811 - DNA, 443 bp, Zea mays
  unsure (1)..(443): unsure at all n locations
cattattacggacacataaaactaagcttggaaggttcttcatccncacatgtgctaagcggcgatgtcatagccagcccatgctagtcttagcaattaagcatgcatctagaccggcctcctcttttgcaaaatcaactaaatagagtttgccgtctaatacgcccttaaaagctaatgaaccatcacttcttctaaagacagacacgtctacatttgtgaataaacagttatatcccatattacataattgactcacagacaacaagttatatccaagcgactcaactaagaacacattaaaaatagagtgctcgaatgannatagcaattttcctaaccctttcaccttgccttggttcccatcaccgaatatgatngaatcttggngatcctngttcttgacgtaggaagagaacantcctctttccccgtcatgtggt

SEQ ID NO: 74812 - DNA, 401 bp, Zea mays
  unsure (1)..(401): unsure at all n locations
ggatccttaagtcacctgcggcatgcaagctntaaattatgtcagagcactccttatattttngtcgcaccatcatctagaatctgaaatgttgagaacaggagaacggttacgtaaaatatacaagtaattttatgcatgggttaatggtaacggaaggggaagaacagttacagtgatacatgcaacgtatttgaggaaatgccaccacccctcatagcggcatagaaactacgagaggcaatgaccgatgccttcctaaggtgtctctcacctgttgaagagggctgacttgccgacattggggcagacgaggaggaagactgcaataaagcattggtactctacaggcaacatcttatgcttatgacacatggtacaaaaaatattaacagcccagt

SEQ ID NO: 74813 - DNA, 450 bp, Zea mays
ccacactatgatactaagcttagcaccctggccatttcaatgtatctaggccggtgcatattaaccttgatcttcttacccttcggcgcaacagatttggccgaagcagcagtttttcttttctttctttcctttcgcgagggatagcaatagtccgggtatacaaaaccaattacatcgaaaactctgtttaatcttttcttgccttgtcttccgaaggctaaggtcatggcatcatctttggcccttgtgtaagccctaagcaactcgtcactagttgcctcaacacagttcatccagttatcattcggctcatcaaactgttctctgtatctgaaggtatatttcaaataaaccaagccgccttgactggacctggcagcagtctccttcgacatctcccagtcattcacaagaggccacactctataggctatgtgctcctggact

SEQ ID NO: 74814 - DNA, 418 bp, Zea mays
  unsure (1)..(418): unsure at all n locations
agacaagtcctagatgcaacacaaggaatttaaatatgcaatgcaagtgacaacaccatctgacattttacataaaacttctgagatcaagaatatttagttcatttctcaacatgcaaaagcgggtcttatcaagtggcttagagaaaatatccgctaattgagcttccgaccttactccttctaaaaagatatctcctttagcaacatgatctctaaggaagtgatgacggatatcaatatgctcggtgcgagagtgttgtacaggattattagcaantttaacatcactctcattatcacacaacagaggtactttttctagaactacgccatagtctagaagagtttgtttcatatataaanatctgtgtgcaacaagcaacctgcggaatgtattccgcttctgcagatgaca

SEQ ID NO: 74815 - DNA, 492 bp, Zea mays
  unsure (1)..(492): unsure at all n locations
tcaacgccaggggctaccgcactacagccactggtacccttccaggagaccctttctcttcgagaggcccgaagccagaagaggaaggcaactagtccaacactccaggaggaggagttggaccaagaaatcagaaacatggagataattcatcagcaagtgcaaaggaagaaggagaagatggcccgactggctgattntcaaaggcagatcgacgaagccactgaagaagtacgccatcttgttcaagacgaacaagatcgaaggcctcaacacagggagcttcatcaagaaggcttgttcaacgacgatggatggtatgatgattttaatcatgatacctttacttttgatgatgcttctcccttggcagcggaactgcaggctatcccatggaccccatcatacaagccacatcagcttcccatgtatgatgggcattcagacnncgaagcagttttgatgagttatgaagcaactatatcttcatat

SEQ ID NO: 74816 - DNA, 462 bp, Zea mays
  unsure (1)..(462): unsure at all n locations
agctntgnggtgatgtgggagtacatagttatttgtctactcttctcacttctggtagatcggaggtagataatggtaagcatgccaaagggtagaattcagtgtagttcggctacataaaccccaggtatgtgtccattcaggaccgacctttaccatttagtttacagtgtataccaaacttgtcaaaggactatcccgagtcaattcagtgactataagtatttacaattccgagagatgtatgcgacacaagcatagaggttctagatagaacgagtaaagtggttcgacgggaacacactatggttttcacaccaacatagtgaaattttatcagaataacctctcagtatactcgcaacatcgtgttgctagcggntacatatccttttatctcatagtttgtttcatgtcatccagcgacaaagaaagcaatgtgctaacatctggttgagcaat

SEQ ID NO: 74817 - DNA, 473 bp, Zea mays
  unsure (1)..(473): unsure at all n locations
cgcaagacccccaccanggcgagcgatctgttggttatctccaccaagttcgcctctggccaggaggcgattgaggccatcttccggaaggacaagcagccccagagctgcccaccagaagatgtccccaaggcgtcaactcatcgcggcgccaagaagaaaggcaagaagaagtctcaagcgaaacgcgacgccgccgacgcggaccttgtcgccgccgccgagtacaagaaccctcggaaacctcccggaggtgacaacctcttctacatgatgctcaaggagccgtgcccctatcatcatgggcccgtcaagcacacccttgaggagtgcgccatgcttcggtgccactttcacaaggctgggccacccgcgaagggtgacagggctcgcgacgactgatagaatgaagatcaccaggcaggagatgtccccgatgaccgcgactgcttcatgatctacggtgggcaagt

SEQ ID NO: 74818 - DNA, 447 bp, Zea mays
agcttcatgagagagggaaccagacctatgtctcttgagaagcctagtgttgcggagtagagttcgatgtttgagtgagtccgtctccgtcgttcttactgcccgttcctctctctcccccccgagaaggccttgggcatccccttttatagatacaaggggatggtccagctgtacatatgggggtatagctatgtgctaacgtggccggcggagaagtgcttgagccctgtatgaagcgtagctggcggtgcggccctgggtcctactgacgtttctttgccttcatagagagcttgagaacaatcgacgtcatgggcgcatgcagggaaccatcattacctgttgccggagtaatctagatgtgacaccggtcttgttccttcgtagcctgaggcggctagctagaggtagggtaatgatgtgttccctgtagcgtagtcggtc

SEQ ID NO: 74819 - DNA, 389 bp, Zea mays
  unsure (1)..(389): unsure at all n locations
ngcattgcatgtttaaatttcttgtattgcatctagggcttgtctaactctagttgagataaccgccaacaaagcgagtgaaaaagcttaactcggatcaaacttgacaagtcttagttttaagctnttagcacttaaattcttactttttatgcaattgttggttcttgaaatacgcatgaggtactgcacttatggggagtattcaaaactcaaatcactcatgaaaacccctagtgcaaggccaaaatgcaaatttcaccatttgcctattttctctaaaaattatctagcctatggcaaaatattntgaaaattatgagaaaagtatatgagggtgccaatacctgtcccaacaagtgttattntgtgtgtttataagttgggat

SEQ ID NO: 74820 - DNA, 448 bp, Zea mays
agcttcgactttctgaagattcatcttgatttattaattgcacttaatggtttgtcctaatgtggaacaacagattattcctaggaacatatcttgtaagtaacaggagtttgtgcaattgtcatatgctttgtgagttgaaaacattgagtatcctaagtaaaaagaatctctgagccgaacatgtatattcagtttatggtaagaggcagtaaaaggagactcgaaaggatggaatatatccaaagaattagctttgaataggaggagtgcatgaaaaacagctatccatatgactaaactttgacttgttggttctgttgtgtttcaactctagtctatcccaacttgtttgggactaaaagactctgttgttattggtgaagcatctagaatctgttcatgcgtttggtttctgaaactgtacacatatatattaactagttta

SEQ ID NO: 74821 - DNA, 491 bp, Zea mays
  unsure (1)..(491): unsure at all n locations
tactcaagcttcggaaattccatgttgttcatcatttcgcggcagatgtttattttcttattgttaggaaggcaatagaggaagtaatctttgtcatcccctccatataccaaggaccctcgggggtactttagatccatggcataatgttctacttcaacaatctgttctgaagataactgctttcttgaagcatgtcgaataatgaagtccagctctttattaggtacttcgggagcaggagatttattagatttctcaggagcactctcttcgaccagtgctataggtgcagtttccgaaggtccagcttcggtaggagcgttggccgcactcgcagcaacatcttctctggcatccttaatttgttcgctaggagcttcggtagaggcaggagctgatgtctntatggattccaaaacagcatctagcacgcctagccattctccttttcttggagtcactgcggaaacacttgatggcttcaacag

SEQ ID NO: 74822 - DNA, 426 bp, Zea mays
  unsure (1)..(426): unsure at all n locations
tcgactgcngatactacgccatcatcgacaggccattgttggctaaattcatggccattccgcactattcgtacatgatattgaagatgccgggaccacaaggaatcatcaccgtgcgtgctgacttccaaggcgccgcggaatgtttccgagtagccattcatgcggccctcaccaccaaaccatcgatgacttcctccgcgcatgcgaactcatagcctgagcaagaccccgcgatacctacaaatgaagctcaagctgtgacctctatgcggccgactgaagagatgaagagaatcaaccttgggttcgctgatgaacgcaaaactgccatcatcagctctagcctggacgacaaatatgaaggcgcgctcgtncagtttctgcaagataaccgagacgtattcccatggcaatatgcggata

SEQ ID NO: 74823 - DNA, 335 bp, Zea mays
taacatagattgtctatggataaacccaacacaagagatgacattactagtgtcggcgtttctaccccggggggtccctggaccgacgagtaattacgcgccgcgtgctccatcccagatggcgcggcgcgagacggagcgcgtaaggggaaatggaaccggagggagacaggccgaaaatgggaaacccgcaggcctctcgcacatcccgcgcccaggtccggtgcgcctgcagtagggggtcacaagaatccccgtgggagagagcgagaggcttatgcgcgccgtcccgttctttcctgcgcggcaaccctatgaagagggccccggacctt

SEQ ID NO: 74824 - DNA, 465 bp, Zea mays
  unsure (1)..(465): unsure at all n locations
nngctttacctttattcttccacctttcgtgttcttgatttctaccttacttacactcatcttcgcacagatggcctcacccacacccatgagggaggagatgcaccttaccacactcacaaccttgctgaggagggctttcccctcattctgtgggaagtactacaggaggcaggataccacgcacctccatagtacacggtgcagctattcgaggaacatggagtgtctcgatgtaaggtgtggctagccttagagccccaccccttgcagccagggtggcgttcgttggattctgagacccttggtttctgagcccacgacaccacaatggccacaaccatgcacgcactgactactttctgtggatttcacccgtaggagatggaaactcacccaatngatntattccccgctacanaggaggatgacctcgtgtggaaggaccaggttgactacgtcaag

SEQ ID NO: 74825 - DNA, 421 bp, Zea mays
  unsure (1)..(421): unsure at all n locations
agctnttgtgccaaatatcacagaaagctaatggatggttattttgttgtgattttccaaagtttaatgccaaaaaggcactttccactaccttgctatttgaaaaatgtcaaacaacagatttcatatttttcctatgttttttataacaaaagatttactatcccaaaggttggggtgttttcaccttggggttattattgtagggctcttctaagttttccttgttttcttaaaatgaaaggtatcctatttattatatactaaaccagggtataatgcaattttctagtagcctacactgaataagtatactaacaaaaatatgggggctccctggttctttatttaaatcacttttcctattntctttaaccttaagcctaatgtaaaataaatggcaaactctaccttaatgggg

SEQ ID NO: 74826 - DNA, 494 bp, Zea mays
  unsure (1)..(494): unsure at all n locations
tctanaggggagaacacatttgggactaaccaatgttcatttttataaagacacggattgtagcgcatgtcaagcagggaagcaagttagtgttcaccatccacacattaacatcatgacgatcgacaggacgcttgagctactccacatggatttatttggcccgatagcttacataagcatcggtcggagtaagtattatcttgtaattgtggatgattattctcgcttcacttgggtgttctttttgcaggataaatctcaaacccaagagtccttanagggattcttgagatgggctcaaaatgagttcggcttaaggatcaaaaagattagaagcgacaataggacggagttcaagaactctcaaattgaaggctttcttgatgacatgggcatcaagcatgagttctcttctctctacacacctcaacaatatggtgtattagagaggaagaatagaactctacttgacatggcgaggactaccatgc

SEQ ID NO: 74827 - DNA, 456 bp, Zea mays
  unsure (1)..(456): unsure at all n locations
agctntatctcttgcggcgtcatggcctcgtatctatacaataaacgaaatggtgtgaatccggntgcccagcattctgtcgtgtttagggcccagaccatcttatgtagttggtcggcccatctgccctttttgtcgacgagaagtcttttcttgatggcagtgaaaatcttgcctgttgggggccttcgtcttccgaaggtcctcaaaaacatgattaacaatgtttcccaagcgtaatatatgtacaggaaccttccgactcgggatgaagctatacacaatatggaaatcagggtcggaacgaaggtaaaaccagcgccgaagctgagcgcaagggagcttctgctcggcaacagaaaaaggaaccaacttaaggaggaaaaggctatctagtcctcgacagattattattgaggtaatagtgatcatgaagggcatgaatgtaatttcaca

SEQ ID NO: 74828 - DNA, 452 bp, Zea mays
  unsure (1)..(452): unsure at all n locations
tactcaagctgaaaatattgggacacagttcgaaggctcgaagcttcttttgaggattntctgtcaagaatattccaagaggggaaaatgagcatgctgatctgttagccaagtcagcggcacaggggctcccactaccttcggaagtattttttgagacaataaaagcaccttcggttgaacttatggagagagcagtgcttgcaatttctccagtacatagtaaagattggaggacggaaattatatctttcctccaaggtaattgtctttcggatgacgaagcttataataagagaatggaagcaaggacaagaccgtatgtgataatagagggggaattatacaatcatggagtatgttctccactcctcaagtgtttatccagagctgaaggtattgaattaatgaaggagatacatgcaggtctgtgtggatctcatattgggtct

SEQ ID NO: 74829 - DNA, 413 bp, Zea mays
gcccatgctagtcttagcaattaagcatgcatctagaccggcctcctcttttgcaaaatcaactaaataaagtttgccgtctagtacacccttaaaatctaatgaaccgtcacttcttctaaagacagacacatctacatttgtgaataaacatttatatcccatattacacagttgactcacaaacaacaagttatatccaagcgactcaactaagaacacattagaaatagagtgctcggatgaaatagcaatttttcctaaccctttcaccttgccttggttcccatcaccgaatatgattgaatcttggggatccttgttcttgacgtaggaagagaacatcctcttttctcccgtcatgtggtttgtgcatccgctgtcgataattcagcttggagccccggatgcat

SEQ ID NO: 74830 - DNA, 284 bp, Zea mays
ttctaaaccggaaagcactgtatgaagactcacgaatcaacaacttcattggaacggcccgttattatccgcgattcattgaaggtttctacaaaatagccaggccaacgacaaccttgttggtaaaaaatgttgagttcaagtggaccccagcatgccaatagtcctttgagacattgaaggagaaattgacaacaacaccagtattgatgctgccagatgtccacaagtcatttccaatatattgtgatgccttcgacaccggactgggatgtgtgctaatg

SEQ ID NO: 74831 - DNA, 472 bp, Zea mays
  unsure (1)..(472): unsure at all n locations
tgccagaagttntctccccgctcggcaagcctcgagtttttaagctgattgnccacacatggccacttcaacgctgggggctggatattgtcgggccactacctacggctcaagggaacctcaagatcaccttcgtcgccgtcgaatacttcagcaagtggatcgaggccagggcagtatccacgataacgtcgaagactgcccagaagttcttctggcaaaacattgttcgccggttcggagtcccgtccgatctcacagtcgacaacggcaagcagtttgacagccaggacttcagggacttctgcttatccatcggcaccaagcttgccttcgccttgtgtccactcacaatcaacggcgttttgacgtgcaacagcaaatttcactgtatcataaaaacttctgacacaataaggaaatggctgacaactacctaagatctggcctaacacactgatgcggcaaccga

SEQ ID NO: 74832 - DNA, 474 bp, Zea mays
  unsure (1)..(474): unsure at all n locations
ggatcttaagcgactgggctgcagcttgatttatacaaagtgtggagaattattatctcagagntgtgctgtcagtcagccttatgtctgaattttcagaaactgtgaagttagatgaacttagagctcgattttgagtaagatccttgtgacttttgtgggtgcacaaagtgggctagtgaagacaataacactcatgcgcctaaggagaatgaagttgtgattttccgaagcttctttaaagctgggcttcggttcccactgagcaagtttgtaggggaggtactgaaaaccttccaaattttccttcatcaactgacccccgaagctatattgaggatgggagtcttcgtctgggcagcaaggagccaagggatagaactaagcgcaaaatgcttctgcagcatgcacgaacttatgtatgatacgaacgccacgaggaaggaatagtatcacaacaacttcggttattat

SEQ ID NO: 74833 - DNA, 493 bp, Zea mays
  unsure (1)..(493): unsure at all n locations
tgtacatatatattatgtaccttgttaaagctccatttaggttttggtaattgagagaactagtggactaacctctactcaaggtattgtgagtgagatagattatagtccacatccaaagattgagcaaggtgggaaaccatgaggagaatggtgatgactagaaaggatgaacaattgctcaacattggaagaggaaaagcaaaacgcaaaggctcaaggaaaaggtatcagttatggtgaaagggaaatagggtcaaacctattcctaaatgtttttggtggctgaaatactcaacacaaataattggactaactagtttgctctagattatatattctacaggtgctaaaggttcaacacanaccaataaaaagatccgagttanggttcataagaaaggagcanaagaaaccaaagagaaacctggtctggcgcaccggactgtccngtgtgccaccggacagtgtccaatgcaccaccggacagtgt

SEQ ID NO: 74834 - DNA, 396 bp, Zea mays
agcttgcgatccatgatgcctgctgttatttgattcctctgaatgctgccttaaaatctcttcattccaccacgtggtcaactggctgcataattatgaagtgatcccaccatgtccgcgcgggttcgtgaagctgttgggtggcgaaccggaccttatccacatctgaacaaactgtagtaagcagtgggaatatggattccactaccctgagccatacatcaacatcaagtggatcctctgctcgagtgaacaacagcggctgagtgctgaggaactcctgataagtggctgctgctgggggacgctgatggtgatcaccaccaccatagtgctgaggtggtggctgacgcttgaccatataatcttatcctgctggccatcatttcttgcatg

SEQ ID NO: 74835 - DNA, 517 bp, Zea mays
  unsure (1)..(517): unsure at all n locations
acactatgatactaagctttcctgccaagcgctgcgcttactgtggaatgcanagctttctcatataataacagatgagcccctagcgtgggtggagttaacgttgttaggtctatcatgtactgcttcagctcttcgaaggttttctgctgagctgatccccattgaaagacttcggccgactntagcacttcaaagaatggtaaatttctctctgctgatctagatatgaatcgattcagagatgtcagtcttcctgtcagccgttgagctcccttctttgtgcttggcggctccatccgaagaatagcttcgatcttattcagattagcttcgattccttttgttgaaactagacaaccaaggaattttcccttctttactctgaagacacattntctggattcaacttcaggccagcttgcctaaagttggcaaatgtttcctgcagatcagcaatgtgattntcttgcttcgtgccttttactatgatatcatcaacatatgttagcacatt

SEQ ID NO: 74836 - DNA, 450 bp, Zea mays
  unsure (1)..(450): unsure at all n locations
agcttggtcattttattgctaactgttcctacatgatagtgatcacgatcaagggaacaagagggagaataaaaacaactataagaacgcaataggttaggcgcatctaggcaaggagtgggactctgactgctcctctttcgactccgacaatgaaggactcgccgccactgccttcaacaagtcattcctcttcccaaacgagcgtcacacatgccttatggcaagggagaaaaaggtgagtactcnagactccacttatgcttcttctagtgataatgagtctagtgatgatgatgacatatactattcatgcttattcaagggcttagatagatctaagatagataagattaatgagttgattgatgctttgaatgacaacaatacattactagaaaaacaagaagatcttttatatgaggagcatgataaatttgttagtgcaca

SEQ ID NO: 74837 - DNA, 477 bp, Zea mays
  unsure (1)..(477): unsure at all n locations
tctnagggagaacacgtgataggtctaaccaatgttcatttctgaaaagatagaccttgtgcagcttgtcaagcaggtaaacaggtgggaggatcacatcacagcaagaatgtgatgaccacatcaagacccctggagctgctacatatggacctcttcggacccgtcgcctatctgagcataggaggaagtaagtatggtctagttattgttgatgacttttcccgcttcacttgggtattctttttgtaggataaatctgaaacccaagggactctcaagcgcttcctaaggagagctcaaaatgagtttgagctcaaggtgaagaagataaggagcgacaacgggtccgagttcaagaaccttcaagtggaggagttccttgaggaggaagggatcaagcacgagttctccgctctctacacaccacagcanaatagtgtggtagagaggaagaacaggacactcatngatatg

SEQ ID NO: 74838 - DNA, 454 bp, Zea mays
  unsure (1)..(454): unsure at all n locations
agctntaagtgattngaagttccatgttgtatcattcccaggtttaacttctccatttcttggcataacataatgtcagaagtcttcattgttagacaatgacagaaatccttgagacttaacgcatctgccactacattagctttgcctcggtgatagtgaatctccaattcataatccttaatcagctagagccatctcctctgcctcatatttagctcanactgggtaaagatgtatttcagacttttatgatctgtataaatatgacagatattccccagcagataatgacgccatattttaagggcatgaaccacaacagctgattccaggtcatgagttggataatgttcctcatgtcgacgcaaatgccttgaagcataagctatctctcgggcctcttgcattanaacacagcctagaccactgcctgatgtgtacaatacacatc

SEQ ID NO: 74839 - DNA, 393 bp, Zea mays
  unsure (1)..(393): unsure at all n locations
cacatgtgctaagcggcgatgctccagtcagcccatgctagtcttagctattaagcatgcatctagaccggcctcttcttttgcaaaatcaactaaataaagtttgccgtctaatacacccttaaaagctaatgaaccatcgcttcttctaaagacagacacatctacattcgtaaatagacagttatatcccatatgacataattgactaacagatagcanattatatccaagactctactaaaaatacattagagatagaatgctcattagaaattgcaattttacctaacccttttaccttgccttgattcccatcaccgaatataattgaatcttgggaatccttattcttgacgtaggaagtgaacatcttcttctcccccgcatatg

SEQ ID NO: 74840 - DNA, 453 bp, Zea mays
  unsure (1)..(453): unsure at all n locations
agcttaatgtgatcaccgtttttctgtatgtctagatggttgccttcgctggggcccctagatcgacgtggaaacattcacgacttgngccgcagtcctcatcgccgaagctatggctaccgtcggaacaatcggagaggcagtagtcacatgcggtcatgaagtcccgcatggcactggggttaccgagtccggagaaatcccaacaaaagtcgggctcgtcatcttcctcggaacccgagggcccgtaggtcgagacggctgtcagccggtcccagggtgaccgcataccgtaccccggagggtttggactcgcctctatgaaagcgtccaccgaagtgaggtcgcttggtgggtcgaggctgaatccaaaaggctcgagatgggaatcggtcggtacctcttggtcgatgggcggtgacgaagtcgcgtcaggggcagactgcaccatcg

SEQ ID NO: 74841 - DNA, 333 bp, Zea mays
tgaattcaaattctagatttaaatataaaaggagaacaaattcagaatataaggaggaaattagttggctgcctgggcccaaactccccctttcggcccacatcaccgtttcctacgcaaagtcggcccagccagactcctcccgcatttctcgcgtgaggtcgttgtcgcgtgggaccaccacgttagcccaagcgcatagcctgtgctccgtgcgcttagtctttggcaaacggacccgcctggtctgtctcccatcgcgcgggatcggacaccgacgtgtgtgaccgcacactccgtcctcgctttcgtaacagctatgccgaaatcatc

SEQ ID NO: 74842 - DNA, 451 bp, Zea mays
  unsure (1)..(451): unsure at all n locations
agcttctggcggcaatggcggtcttgaattatctcgccgaagctaaaggaaagtggctggccggtgagggtgagtgcggngcgaagtggggcgcgcctgggagggctttataggcacggcgcggtgcacgggcggtcgtggaccggcgagtgcgcgcgggcgtgcactgggaggcgcggtgcgcgaacgggcgtgaaccaggggtgtcagccgcggtcgaacacgtgttcccgttgcctctgcccctgttcaagcgccgattgggagcaaatcttcgcgaatttgggcaagattactgcaagggatttgttcaccagaccaagctttgtcttttgtgtatggacgacgtgcggttttaggctaaggacagggagttgtagcgtcaccaatgtgccagtgtcagaatgcctggtcccgaggttaagctgcgccacaaccgtgccaaatggat

SEQ ID NO: 74843 - DNA, 493 bp, Zea mays
  unsure (1)..(493): unsure at all n locations
gttgggtacccaaagttcttgtgtctaatgtcatatgacccataaccatttgggtacctaanatcaagaactaaacttgttttgtaggtttatgcatccggnggctcaagttggatcatcgatagcgggtgcacaaaccatatgacatgggagaaaaagatgttctcctcctatgagaaaaaccaagatccccaacgagctatcacanttggggatggaaatcaaggtttggtcaaaggattgggtaaaatagctatatcacctgaccattcaatttccaatgtttttcttgtagattctttagactacaatttgctttccgttttgcaattatgtcaaatgggctacaactgtctttntactgatgtaggtgtcactgtctttagaagaagtgatgattcaatagcatttaacggagtgttagagggtcagctatacttggtagattntgatagagctgaactcgacacttgcttaattgctagactaacat

SEQ ID NO: 74844 - DNA, 295 bp, Zea mays
gctgtgaagaatctttatccgcacatgggcttgtcgtgtgtgccagagacaacccatggtagtcttaacaaataagcaagtgtcgaggtcagctctatcaaaatctaccaggcgtagctgacgctctcacacgccctttaatgctagtggatcttcactttttctatagacagcggcacctacttcagttaaaagacagttgtagcccatttgacataattgggaaacagaaagcaaggttgaatctagagaatcaacaacaaaaacattggaaatagaatggtcaggagatata

SEQ ID NO: 74845 - DNA, 493 bp, Zea mays
  unsure (1)..(493): unsure at all n locations
tntccttgtcgncatcaaccttgacatagaaccactcttttttccagcctgctgcccatntgcttcggtagctgattacaggaaactttgtggttttccgataagcaaaattatagcaaccaaaattgtcatgcaatccatcttttctagccttcgtctggtagtgcagctcgtgaactcgacaaaagctgtccgcaaacggctccaccgcttggtttcggagggcccagatataaacgctaagcctaacgatagcgttaggagtcaactgatggaagtagataccaaacctcttcagtacctctgcaataatcccatgtagggggaatcttaatccagcctttangaagctctngaaaatgactatntcatccttctccggctgtggngtagtttcttcccccacgaagcgtagtagcttcttcttgttagaaatatgccctagagataatcatagagatgagcatatctctgtggatgcatgatatatata

SEQ ID NO: 74846 - DNA, 396 bp, Zea mays
  unsure (1)..(396): unsure at all n locations
catgcctcaagataacaaaggctatattttatatcctgctggttatcctgaggataagattaagagaattcatgctaagaagactcattctgnttctcaccatgcctttatttatgagaatgaggctcttagctctaggcattgtacacatgttaaaatgcctaagaagaaatctcctattgcatcaaatgatcataacatttcattcaagacttttgatgcatcttatgtgcttactaacaaatcaggcaaagtagttgccaaatatgttgggggcaaacacaagggctccaagacatgtgtttgggtacccaaggtgcttgtttctaatgtaaaaggacccccgaccatttgggtacctaagaacaagacctaaatttgttttgtatggttatg

SEQ ID NO: 74847 - DNA, 444 bp, Zea mays
  unsure (1)..(444): unsure at all n locations
cgggacctataaaactcaagctgagaataaacatttctctggctagtcttagagatgattatgatataatgcttgctaaggctaaagaatntgatattngcaatgctaccatttccgaccttagaagtaaaaatgatatattgcatgctaagggtgtagaattaaaatcttgcaaaccctctacatcttctgttgagcacacgtctanttgcactagatgtagagatgttaacattgatgctattcatgatcacatggctntaattaaacaacaaaatgatcatatagaanaattggatgctaaaattgccgagcatgacttagagaacgaaaaatttaaatntgctagaagtatgctctatagagggagacaccctgncatcaaggatggcattggcttccanaagggggacaatgtcaagcttaatgcccctcctaagaaat

SEQ ID NO: 74848 - DNA, 422 bp, Zea mays
agcttcggcttcatctatattatgaacagtcttcatatccgtccaactcccttcagctctcctgacagcttcttgactcccgtgtacaacaatgggcccttgttccgaaggtaccttcatgcaaagatatgccggatgaagtattgtttcgaaggcattaagcgtccctcgaccaatgattgcattgtatggatactccatatcaacaatgtcaaagacaacatgttttgctcttgtgttatgaacatagccgaaggtaactggcattgttatcttaccaagtgccacaatctgtcttcctccgaagccacaaacagggtgtgttgcatcatgtatcttatcctctggttcttgcatttgactgaaagctttagcaaagatgatatctgctgcacttactatgtccactaagacattgtgga

SEQ ID NO: 74849 - DNA, 498 bp, Zea mays
  unsure (1)..(498): unsure at all n locations
ctcagcttggatacagctgacgatcttgtagcctttgtagtactttcctctagtgctcctcatgatcttgctcattctgggaatatacaaggatatcatcaatgaacaccactacgaacttgttgtgatagtccgtgaacacactgttcatcaagtacatgaaataagctagcgcattcgtcaaaccgaatgacatgaccatgaactcatacagtccatacttggtgataaatgctgtcttcggtatatctgagggtcggattctgagctgatggtaacctgacctcagatctatctttgagaacacactgactcctctcaactgatcgaatagatcttcaattctgggaagggggtacttggtcttgatagtgacttcattcagggatctgtaatcaatgcacatactctttgtccatccttcttctccacaaataacactggggcggcccaagtcgaggtacttggtctgatgtagcctntctctaacaactcatc

SEQ ID NO: 74850 - DNA, 344 bp, Zea mays
gagcttgagtcagttctcttgcaaaagataattgattctctcaaggattatgagggcatgagacacattcttgagaagttaacggctggaaaagccaaatgtttcaaagaagatgatcaacgcattgtatgtgtttataaccgcattatggtgtctaagaatgaagagatccgccagcacaatcttgatgaagcacatcttagccgctattctattcatcccggaagcactaatatgtaccaagacttgaagcaacattactggtggacaaagatgaagatctaaattgcacgctatgtggccagatgtgacacctgcagacgagtatgagacatacatttgaa

SEQ ID NO: 74851 - DNA, 498 bp, Zea mays
  unsure (1)..(498): unsure at all n locations
actcagctcgagcttcgaggttatccattccgattgtgtgcgttgagcttagctttttcccctgcgctacttaggctttngtcgatagctctttggatgaggcttaacttcacctgcggttaagtggtacctcacacacatgtgtttactcggaaacaaaaggtatttgacgacctttggtaaaggtagaccaccaaccgtagccccttgcgtgatgagnttggtcattcataaccagcttagattgctaactatattattgggaggccttgcagcgaacgtccaaaaaacacctttcccaagctcgttatgaatcgagagcacgagaatactctgactggtggngtttggtgctcagcgagagtaacgtgtaaaatctcaaaggtgccccgattaaaggaacagtacccgaaacattttacttggtatatgctgctacactggnaccaaagctctcaactactttgaactacctagccagtagcaagctatactttt

SEQ ID NO: 74852 - DNA, 448 bp, Zea mays
  unsure (1)..(448): unsure at all n locations
agcttaatgcccccaaaagattgtctaattttgttaagggtaaagatcccatggttcacgatagtgagggttacattttatatcctgcaaactatcatgaggacaagattaggaaaatccatgctaacaaacctcataatgtttctcatcatgcatttatgtataaaaatgaggcttctagctctaggcataccactcatgttaaaatgcatagaaagaaaattcccgctgcatcaaatgagcataatgtttcatttaagacttttgatgcctcttatgtgctaacaaacaaatcacgcaaaatagttgccaaatatgttgggggcaaacacaagagtactaagacttgtgtttgggtacccaaggtgcttgtttctaacgtcaaaggacccaagactgtttgggtacctaagaacaaggcctaagtttgttttgcnggttatacatc

SEQ ID NO: 74853 - DNA, 450 bp, Zea mays
  unsure (1)..(450): unsure at all n locations
gcttcacaattgcatgtgtgataacgtaactgtgagctcatctttcatattntaattgctttaagtttcaaacatttctttatgtagtgcacgaggtgttgatctacctgattcctaagtagctataaaaacttgagattgctattatgcatgattacatgtaggaatggtttgcaaagcattccgacttgcttgtagcaactcattattttgggctcctaatgatttttggttgtttgatttgctttaacagacatgtcgtagcgttagtataggcattattatgatgtaaataataaaacccatagatttatatagtcttcatagcaacacacatgtacatcactaagtctaataaaanaataacttctaataacatcgatccctcaagttacgtagcaaaacatatggatttatatgatttccgtagcaacgatcggatacctaact

SEQ ID NO: 74854 - DNA, 368 bp, Zea mays
ctgtatggcagaaaatgcacgactcccctgtattgtgatcatactggagaaagacagttctttgggcctgagcttattcaagaggcagaagaacaagtacgaatgataagagaaaatgtgagaattgcacggtccaggcaaaagagctatgctgataatagaaggagactactggagtttaaggagggtgatcatgtgtatctgaaggtgtcaccaatccggtgtatgaggagatttaaagttaaaggaaagttgtcccctcgcttcattggacctttcttaatcttaaagcgagtgggagaagttgcatatcaattggaattacccgatcatctgtcagatatacatgatgtatttcatgtgtctca

SEQ ID NO: 74855 - DNA, 458 bp, Zea mays
  unsure (1)..(458): unsure at all n locations
agctntatttgaagtgcaggatattntgagacatgatcttctattccgctgcaacctactcgaagagtcttctcactccactgcgtactaagtcttcgagtatagtaagaatttaagttttaaagtaaaaagttttattcgcctattcaccccccctctaggcgacatccagatcctgttcccgggtcaaagggaactttcacttagaataaccttaaccatttcgtggtcgtcccacttgacgctcccaaggttgcgcacttggttcaccaaagtcttgagccggttgtacatgtgttgtggctcttcccctttgcgaagccggaaccgaccgagctccccctcgatcgtttcccgcttggtgatcttggtgagctcatctccttcgtgcgcggttntgagcacatcccanacctacttggcgctcttcgacccttgaactatgttatactcctctc

SEQ ID NO: 74856 - DNA, 496 bp, Zea mays
  unsure (1)..(496): unsure at all n locations
ntaccaaatggacgtgaagagtgctttcctcaatggactcttcaaggaagaggtctatgttgagcaacctcccggctttgaagacagtgagtatcctaaccatgtctataggctctctaagacgctttatgggctcaagcaagccccaagagcatgatatgaatgcctaagatatttccttgttgctaatggcttcaaagtcggcaaggccgatcctactctattcactaaaactcttgacaatgatttgtttgtatgccaaatctatgtttatgaatattatattgggtctactaacgaatcaacatgtgaagaatttagtaggatcatgacacagaaattcgagatgtcaatgatggnggagttgaagtatttcttaagatttcaagtgaagcaactccaagagggcaccttcatcagccaaacgaagtatactcaagacattctaaacaagttggggatgaaggatgccanacccatcanaacacccatggga

SEQ ID NO: 74857 - DNA, 463 bp, Zea mays
  unsure (1)..(463): unsure at all n locations
agcttggtcctaaagtaacaatggatattcttactcgtccacttttggaaactggggacaaatttcggggaattaacatcgatttgggtcatggctcctaagtgaggacatggcctagctttgggttcatgcaaacaaactacccgctttctaccagcacacaagcacaaaaacaaacacaagttgcactagcggtcaaactaagaagaaccacataccacataaacatatgtctaaaggacataacaaacaaaactaaaaattgcttataggagaataatgcttcacacatttttccaattatttattatcggaataaagatgagaaaagcatgttcgttcacgatcaccaattattagaataaaggtgagggaagcatttntgtgcgcaaacaacaaacacaatgcaacaatcaggatgcatgcttgtcctanttgtcctcacaaaatattgccaatctaa

SEQ ID NO: 74858 - DNA, 462 bp, Zea mays
  unsure (1)..(462): unsure at all n locations
agcaggctccagtatactntgtctccaaagttctcagnttatcaaagaaaaactatacagaattggagaaggtgttgtatgccgtcttaatggccaccaaaaagcttcgacattattttcaagcataccatataattgttccttcatcacaacctttgaaggatattatgagaaatagagaagctactggaaggattggaaagtgggctgcggaactcaacgagttcagcattgattatgtgcatagatcttcgattcagtcacaggcgctagcagacttcatcgttgactggacgccaggggctcaggaggaagaagcaagtaaagatgctgaagctnggacaatgttctgcgatggttcctggggaaccttcggggcaggtgcagctgccattttaattgcaccttccaaagtcagaacatgctatgcagtgaaacttgatttcagctgcacanataata

SEQ ID NO: 74859 - DNA, 515 bp, Zea mays
  unsure (1)..(515): unsure at all n locations
acactatgaaactcagcttaagctctttgcaatagaatcacttcatctatttttatcatagatgcaataatgcatgagtgaaattttaagaagttaaactaggtatgaagcagggataaatgcaaaggacatgctttctcttccttagatataagatatgcaaagaatgcttataagaggaagatttatgtacaagtttaaatgaaaggaagtgattttacccttttgtaccttctcatagagacgctctcttcattgtgctttgtccttagtcttagttgcttaagacctatactcaatgacaatatatggaaatactttgcacaagagagagttctacaactagtgatctttttcaagttattgttagcatatatcaaatggatcacaagttgcataaatgaatcatgaattcttctttttttntagtgcatatcaagatagatgtcaattaanactaccaattgagatcaaatngaaattacatgaggcactaagaaacataagtgataatc

SEQ ID NO: 74860 - DNA, 459 bp, Zea mays
  unsure (1)..(459): unsure at all n locations
agctntagcagtattcagactattcatttctgcaagaagtgctgaaataaaaaaacttanattaaagctataagaacatgaaattaaagctataactataagaacatgaaataaccaaatgcagtaccttcttctagtttggctaactcctcggtatcctcttcattagtgataggacttgcacgcctcatccaatcctgagtgcaaacaagagcttcaaccatgaatggagtgagaaagcttctgaaatgatctaaaatgcgtccattggtactaaaggcactctcagatgcgaccgtagacatggggatggctagaacatcacgagccaagcggcctaaaattggaaatcttgtagaattcaccttccaccactccataatattaaacttggtagtatggtcttcattctcttcagcaaggtacttctncaactctgattttgaagcactaacacta

SEQ ID NO: 74861 - DNA, 438 bp, Zea mays
  unsure (1)..(438): unsure at all n locations
gcttgcgtttagatgattaagctgagaccgggcgggtgacttttctataagagagtctcggtgtagtgtcttcgtctgagttgattaaggaccttgtcgatgtaggcttgatgaccgaggaccctttaactggtcacatgcctcgtcatgggtaagccttgcctcgagcagactatggccagaataagataacacgaaatgggcgtggagcggtggcgagagtancgtgtaccctccgtggcaagaggctggacggcggtgtatctgtgctctcggtttgcgtgaacctgatctgagcttaagaaccccggtggcgggttgacatttgcaagggttaagtgctacatatgacgtgtgattggagatcctcagctgagtataatcgattcggatcgccgtaccttcgcgggtatgaagacttggtcactgacttacacg

SEQ ID NO: 74862 - DNA, 426 bp, Zea mays
  unsure (1)..(426): unsure at all n locations
tcggccgctctttntcttctctggccctcagcacccttgtttatctgttcataatcaggatattcgaaacccagtgcatcaagcactcggttcagccttcgcttcggacgggtgccgaaggctgctgtcatcagttgatcttcttttttcgaataatttccaagaatttcattacacatcacctcaactgtatccagccactcttggcagggcttcttaaaatatttcttgaatttgaagtggtaaggaagccggacaagatccccttccttcttctcccnctttaactntggcatttcccattttttcagagtacggaagactctgaatgctaagaattcttgaaccagatccctggtaccaatatgctctgcaatgattctgaattcatccattgcccgtgagtttgacctctggtgtatgtgc

SEQ ID NO: 74863 - DNA, 364 bp, Zea mays
  unsure (1)..(364): unsure at all n locations
gctgacacaggtatccgcacgttaatccttattccaatttcgnctcatagaccacgcatccccatggatccgtgtccatagaccatcatcattttgttatcaaaaatggatacaaccaattcctgacctcgcgcgagtgctagaaaaatcactcgacttctaccgagatcctgatttagcatagcagctactcgacctagcatactagtatccatctcaaaaggaatcctgagttcatgcaactagggtttcaaccaactcctacacttaagtgcacggtacaagcctacaaacattaagtgtagtaaaatagcatatataacggttatgcataaaaccggggcttgcctttaatttaacactt

SEQ ID NO: 74864 - DNA, 494 bp, Zea mays
  unsure (1)..(494): unsure at all n locations
gcttggtggaagagtaaatgctctaactcatgacttagagattgcatatggtggaaaagctaaactagatttcatattaggaagccaacattgttctcttaatcgtgagggtcttggtgtattcctaagaaaggaaagaatgcatttgtaaagcgaaagaccatgtttgtgaaagaatgtgacaaagtgtgtcacaaatgccacaagaagggacatgtcaagaaaaattgtcttanattttaaaatgtatccttatcttgttttgagcattgatatgttctttcacataatgcaaaaggtgtgcgtgctaagtttgttggcacttcaattgttggtaccaaaaagaaagcatattgggtgccaaaacccttggtcactaacatccgaggacccaaacaaatttgggtacctaanagagaatgatttccttttgtaggtaaattacaaggtgggaggaaatcattgngtgtntggatagtggtgtacataacata

SEQ ID NO: 74865 - DNA, 374 bp, Zea mays
  unsure (1)..(374): unsure at all n locations
cttgcaccccggtatatggccctttttctgtttttgaacaatatggagcaanggcataccgactcctattacccgaaacattgtctgccatacataatgtgttccatgtatctcaaatgaagaaatgtctgtgggttcccaatcgaaccattgaagtaatggatgttgccctacaaccagacttgacatattccgagcattctgtccgagtcttggatcaaaaggatagaactacccgaaggaaaactctcaagttctacaagatatagtggaaccaacattcagaagatgaggcttcatgggaaactcacgaattctataaaagaatttcccaggctttttagcctcatgtaatgttgaaagtgtataaaatt

SEQ ID NO: 74866 - DNA, 425 bp, Zea mays
tgtgaatgttcttcatccccacatgtgctaagcggcaattttattgccagcccatgctagtcttagctattaagcatgcatctagaccgacttcttcttttgcaaaatcaactaagtaaagtttgccgtctagtacacccttaaatgctagtgaaccatcacttcttctaaagacagacacatctacatttgtaaatagacagttatatcccatattgcataattgactaaccgatagcaaattatatccaagagactctactaaaaacacattagagatagagtgctcatttgaaattgcaattttacctaacccttttaccttgccttgattcccatcaccgaatataattgaatcttgggaatccttattcttgacgtaggaggtgaacatattcttctcccccgtcatatggtttgtgcat

SEQ ID NO: 74867 - DNA, 435 bp, Zea mays
agcttctccaccatgtcgctgctttgccagttgtttcatctaccgccatcaatgatcaaacgacatgaacgctccttaatgacacactttgtttgaaacaacgtatgtcgctgattctgctctgccttctccatttgtgcactaaacacacgctgtacaatgaggctctcataatgctctgcatcatctgcaccaatctgttcttcgggtggttccttagtgtctgcatcatcagccgcaagcaaagcaagtgtagcttcatccaaatcactagcagaggaatacccaccatcgtcttttaccaccaaaacacgctgattatgacaatcacgctgcacgtgtccatagcccttgcatcgataacacagaacatctcttgtctacccgtggaggctactgaagaggcactacctgctggtttctgggcagaattgg

SEQ ID NO: 74868 - DNA, 418 bp, Zea mays
  unsure (1)..(418): unsure at all n locations
ctcagcttgccttacgaccaaaccgcacccgcatccatatcacattctatggctcaacaatagtggtaaggtcaaggtaaccaagctggtacgaattaattttgctattggttcatatcgtgatgttgttgactgtgatgttgtgcctatggatgcttgtaatattctgctaggtaaaccatggcaatttgattcagaatgtatgcatcatggtagatcaaatcaatattctctcatataccatgataagaaaattatnttgcttcccatgtcccctgaggctattgtgcgtgatgatgtngctaaagctaccaaagctaaaactgagaacaacaagaatattaaagttgttggtaataacacagatgggataaaatngaaaggacattgcttgcttgcaacaaaaactgatgttaat

SEQ ID NO: 74869 - DNA, 345 bp, Zea mays
cttctttgggcctgatatggtgaaagagaccgaaaaaagagtttatagaataattcataatttgaagaaagctcaagctcgtcagaagagttatgcagacaaacagtgaatgcccttatatttccttgagggagactatgtctacctaaaggtttcgccaataaagggcgtatcgcgtttcagggttaaaggaaagcttgcaccacgatatattggtcccttttttattctagaagatatgggcagtggataccgacttagttacccgaaccttgctgctggcatatgtgtccacgtgcacaaagagaagagtttctggttccgatcaaccattgagtgcagatg

SEQ ID NO: 74870 - DNA, 429 bp, Zea mays
ctcggtagatctcgaaataaacctgtttttagaagcaaatcttcctgctagcctctgggctcctttttcatgacattgtcggctccatccgaagtatggcctcaattttgtgtgggtttacttcgatgccttttgttgaaacaaggcatcctagcaatttccccttttttacttcaaacacacacttttcagcgttcaactttaaacctacccatcagaagttagcgaaggtctcctagagatctaagatatggctttgttacttcatgcttctcataacgataccatcaatagaagtcaaaacatttttgcccagttgtcaactcagcaccttagttgtcactccgctgaagcttccgccagcattcttgagcccctcaagcatccaaaggtaacaataagtaccactaggggttatgaagctagtct

SEQ ID NO: 74871 - DNA, 436 bp, Zea mays
  unsure (1)..(436): unsure at all n locations
accttgaaactcagctgacctcaatggagacgcggggcangggcagctggggttgtactgaaactggtgcttggaggagaaagagtgagtgttatgtgtgctatcgagagactgctgggatgcatgagatgtggttctgtccgttagatttggatcatgccgctaaaatagaaagggctgacgtggacgcatctgaaagcagaattgctccctgctaatatacactccctccgtctataaatgttgatcgttctcactttttgaggagtcaaccatttttaactttgaccatatttatatgtgaaaatattaatatttatgatacataattaatatcattaggtatatctttgaatctatttttaagaaaattgctcgcagatacaaatgttgcttatatattctataaatctagtcaaacttaataaaatttgac

SEQ ID NO: 74872 - DNA, 417 bp, Zea mays
  unsure (1)..(417): unsure at all n locations
gcagctttgaacaattgaagacattattaaccactgctccggtattggctcaaccggatattaataagccctttgatgtgtattgtgacgcatcangcagtggcctctgctgtgtgctaatgcaagaaggccgagtaattgcatatgcttcaaggcagctgcgccgacatgaggaacattatcctactcatgatctggagttagctgtggtggttcatgccctanagatctggcgtcattatttgctgggtaatgtctgtcatatttatacagaccataaaagttaggagtatatcttcacccagtcagaattgaatatgagacaaaggcgatggctcgagctgatcaaggattatgaattanaaatccattatcacccaggaaaagcaaatgtagtggcagatgcgctcagtcgca

SEQ ID NO: 74873 - DNA, 445 bp, Zea mays
gcttcttatagtccttgtatgggctcctccaaaggacgcgcttatgatggccaagttttcgatgaagttactatgtggatagctccatgtcgtatttactattgagtttctcccctctctatacctctatgactgcacaatttaagagcaatgagagaatttttgtttgaacagcactatcgtgtcctaagcaacattaccactttgcatagagagtttctcgagtagttctttcttggactttttagcatacaattgaagttccgctgattttaattatgtaagtgcaatcaaccctaactgagggttttggtgattaaatgacaaaacaaacagagattctaacaagtttgcttctagcatgtatacagttattctacagacacgagaagcacagatcatatatgtacgcaaaagtaaaagcacagcggattaaaattctaca

SEQ ID NO: 74874 - DNA, 435 bp, Zea mays
  unsure (1)..(435): unsure at all n locations
agcttcgaaacactaccaattcgcctttctctatatggagaataatgcctccccactgagcctcacaatggaaatgtcactaatataatttcctttcatcacctcgacatgtcccttctttatggttgactcggagaagaaaacatggcttggcttcgagggccgatcttcgacatcgtatgcattctcttcgaagtcaaactcttcgctgtcatcagaatcatttgataagcccaccatgatttcttcagcaattctttcaaccatagccttctctatggcgtcgtagtattccacgagagcgagntcatcacttcatccttctctagccatttcacaaaactacacatagtgcatgacaactttctcgaaacactggtcaaattttatcagtctctacatatgatgtcatgacatgtcgacatgtttcatgat

SEQ ID NO: 74875 - DNA, 280 bp, Zea mays
tctatattggtggatccactgcaagaaataatgcattctattgtcttgtaagtgccacttgagaacaaccaaggtgcttgtaaagacgcttgtgagcaccaaaagtgatggacggtccgcgcccccacgatttagataactcgagcgattatcgcgtgggtatccatctaataatgtggggttgttagctatcacctaggaatggggttagaccaccctatatatatgaacgggtaccactgattgagaactttcgaacacattcaatcgaaccaattac

SEQ ID NO: 74876 - DNA, 426 bp, Zea mays
agctttatgaacttcccaattgagcatcgtatatctcgcgtcttagttttacccttattctcatcgtcaccaacaataacaacattgtcgtcgccagaaccatcgccggcaggagcaaactctgggtcttgttcatcatcactttcttcatcttgaataggagacaaggggactttcaaccttaacctcttcctcctttccttcaattcatttttatctaattcctttctcttgttttgtacacgaggagagcgatggacagtgtcagcgccttgctggcctgtgacattctgttcttgatccattataaaaaccactgaaaaaatgggaatgaaaaaaacgtgagggcacaagcacatggtacagatctcataaccaaaaattgctaatcaacaaactaaaacacacagtacaaataggaacaaa

SEQ ID NO: 74877 - DNA, 426 bp, Zea mays
tcggaatatcacgacttcattctcctcgggagttagacaagttttctctccttcgtcagccctcacaatagacaagtcccgaaaatatctacccctcatattgacaagatggctttgtttaatacttgatttaccaaaaactgcatggcttggtcgccaaggtcgatcttcggaatcttcaccaccactatccatatcataactgtcactgtcaccagtgtcttcagataaaccctccaaaatctccctagtgatcttctttgtattggtctttgctattgattgaagaaagccgagatgcatctcctcagaaaggctcagcttcaattcagcgatagctttcttatcttcagacatctttgcaaatgctgagaaagtgctctcgaaaccgaagcttaaaaatttaaaagccaagcaagtgttgtg

SEQ ID NO: 74878 - DNA, 439 bp, Zea mays
  unsure (1)..(439): unsure at all n locations
tgcaagcttattgcaagcgtgtggaatggaaagacttctttgctaaggtgtatgtatggcttgagtgaagggctaggtggaacggacggaaaactggaggaggcgcgcggcgacgggcggcagggctgttcggccttgcgtctgggctgaaaacgaggtgttcgccatggcgcacgggccgaaaacggatgctcgggcacgaactcaaaaataagctaagttcaagcatgtggaaagacaccgaacatacagtgtatgtctttggtgaagggcacagtggaacggagggaaaaccacacggaggcacgcggcgacgggcggcatggctgttcggccttgcgtttgggctgaaaacgaggcgttcgccatgtcgcgcgggccgaanacaacggttcggccacggactctaaaataagctaagtccaatcgcgtagaaaga

SEQ ID NO: 74879 - DNA, 407 bp, Zea mays
  unsure (1)..(407): unsure at all n locations
tatnttcggggtcgggcccgggcctcagttttcggcccgttctccatgggcgaacccctcattatcggcccagacgcaaggccgaacagccatgccgcccgtcgccttgcgcctccgtgccgttttccctccgttccgccatgcccttcacccaagacatacatattaccttcggggtctttccacacgcttggacttagcttatttccggggccatgcccgaacctcggttttccgcccctgcgccatgggcgaacccctcgttttcggcccaaacgcaaggccgaacagccatgccgccccgtcgccattctgcccttcacccaaagcatacgttacagcttcggtgtccttgcacacgcttggacttggcttttttttggtcgtgcacgaacccacggcggtct

SEQ ID NO: 74880 - DNA, 436 bp, Zea mays
tagcttgcatgacaaaaacgagaatgccttattttttactcatcagaaaaattaacagaattcgccattttattacacacatcatgcagtgataagcggaacaagccttcacagtcatatcctttaccaacaaaagtaccatgttgcgacacaacacatttattagactcaagaacaactttgtatccatctcgacatagcatagaagcgctaacgagattcttcttgagagagagcacatgctacacactcttcaatggcaccgtctttcccgaagtaaacttcagaatgactgtaccaacaccaagaacatgagcacgcgacccattttccattaacaaggcgccagacctcccgacctgataggaggagaacatataggcatcagcgcacacatgaatgtttgcaccactatccatccaccactcaggtgaat

SEQ ID NO: 74881 - DNA, 418 bp, Zea mays
tcctccctctcttggcggaaatcattgacagcttggatgtatttatccatcttctggagaagattctccaaggactgtggtggctttcttgcaaacatattgagctgtatgcgcttgatcatggcctcaataacaatctcattgggcattgtaggcgcttgagctctcaaacgcaaaaaccttcagacatacgcctgcaggtactcctcatggtcttacgtgcattagaacaaggcttgagcagtgactaacttcatctgtaagccctggaagctagtgactagcatgtcctttatcttatgccacgacataattgtccctggccgaagagaggaataccatgtctgagccacacttttaactgccatgacgaaggacttcaccatgatggcagtgttgcccccatacgaggatattg

SEQ ID NO: 74882 - DNA, 434 bp, Zea mays
  unsure (1)..(434): unsure at all n locations
agcttctcatcttttgtcttgtccgacatatgtgtcttgcccttctcggtgtggttgtcaaccaccttccccttccttttaggatcttgtccccacatcactttgagcggttaggctcaacaagaagtgttgggctccgataccaattgatagtcacctagagagggtgaatagttgatgcctaaaaatcacaactttagacaaaaacttgatccaaaatgagtgttagagcaaaaagagatcaagttagagtgagatagaggacatgttcttgcacttgatagctctcaaaaggttgtggaattaacttgaacaatattacaagtcaagaactagagaatagagaggaagagcaaatcgcacaaaaattctatcacaagagataaggcgatntattctgtggttcggtcaagcctcaaatgttcgcctactct

SEQ ID NO: 74883 - DNA, 444 bp, Zea mays
tatctatgctatacttgttgcatccaggaagttgcgctcctattttcaggcacacagagtcgtggtggtgacctcctgttggggacttgttctcaaatgctatgagttaagaacaaggcaacacagagaatgttaaacgataaagtccttcgtcctttgaagcattatttcccttaggatataatgatcttcggacgaaggtcatgaaggatgaaccttcatgatcacagtatcccttaatgaaagacgaagcatatgaaacataaaagataacatgaataatcatataacattatccatttaactttattatatcatcatagagaaatagaaacaatatcgaattataaatgtaccttcggcttgaaaggagatgaaaatacaagtgtgacgcaaaagcaaatgccaagtcaacgtgaacaagtacggggtactgttcaccta

SEQ ID NO: 74884 - DNA, 436 bp, Zea mays
  unsure (1)..(436): unsure at all n locations
agctttgtaggaggaggagatgatatgtagtcttggggtgcttgagagagtccattcaattnttatcaactcaagctatcaatcttcaatgatctatattcgtgattgacccaaggttatttttcaaattgctatgtcttaaactcatatcatctcgaggaagatattatatgttgtaggaaatgaagaaatatcatatgcgaaaaatcaaggcctacaacatggaggaaaaccaaaggatggtaatactcatcttttaagtacaagtattttagaatatcatttcttatgtgtcttgtgtagtcacatagaaaanatgaagcacttcaaacgcctctaaatttatattaccattctttgaagaatttcctatcatatggtagattgcatactcatcatttccatcctatggcaatctacatgctttanattgtcg

SEQ ID NO: 74885 - DNA, 427 bp, Zea mays
  unsure (1)..(427): unsure at all n locations
tggtccattaattacataaataaaatacaagggtgtttattaccttgtttgggggccatgcaacgggcataaaaagagcatcccccatactctctacacctaagtatgggcgtggcaaaatactttccctttttagcacgcgagtcacaaaaacttgtgtgaactcccttccaagaggaacatctcccaccttagtggttgggtcggttgagataatatttgctattgcaacaggaacttcagatctcatcatagaatataatatcacttctttaccaacctaataaaatatgtgaagtaagattacaaagtttaaataatgaaacataaatatgaagtgatagatgagaaaattacaggattatcatctgcattntgagatgatccatgatttctttgaggtaccattgttgcaatgtctcgcatg

SEQ ID NO: 74886 - DNA, 308 bp, Zea mays
  unsure (1)..(308): unsure at all n locations
agcttncactgggagaagaggatacgctaatatcatatgataaggcacaaaaagactgacccagcggcgaacatttgtaactacaagagctatattctctatgtccctgggcccacatgttggggatcaacacctttgtgcatgccccacttcaggtataaaaggggaggcatgctaccatacaaggggagagacaatcttggacccaacttatggtcgcaagttcatacaagctctcatgcaatacattacacagaggagtatggtgatacgctccgacgacccgaaccactctgaaaccttatgtg

SEQ ID NO: 74887 - DNA, 405 bp, Zea mays
gaccttaaaactcagcttctggcgagagacatcttaggactagccgatgtttatttttcaaacgacgaggacacgttcttggacaactcagaatcgagttggttctcatattacgcttctgaacattctaaacattggcgagccagttgagtaactccataaggaccgattatgcccatacagcatacataagcatgggcaagagtatgtattgacttgtgattggggaagatatattctcttatctttggtggaccttttgcgtgtcttaccgaggactccagacaccattactagatgttccctacagggtggggataagcggcgactgagaattataaacattaatacccactacgggccggcgtttcacgaactaacaaatatcaagtcccgttgagaggg

SEQ ID NO: 74888 - DNA, 441 bp, Zea mays
gcttcaagtgattcaaagttccatgttgaatcattcctatgttcaacttttccatttcttggcataatgtaatgtcagaagtcttcatcgtaagacaatgacaggaagccttgcgacttagtgcatctgccactacattggccttgcctgggtgatagtgaatttccaattcataatccttaatcagctcgagccatctcctttgcctcatattcaactctgactgggtaaagatgtacttcaaacttttatgatctatatagatatgacaaatatttcccagcagataatgacgccatatttttagggcatgaaccacaacagctaattctaggtcatgagttggataatgttcctcatgccagcgcaactgtcttgaggcatatgctataactcgaccttcttgaatcaagacacaacctaagccaccgcctgatgcgg

SEQ ID NO: 74889 - DNA, 433 bp, Zea mays
tcggaaagccaacacttttcgaccgagtgctgacaaccgttttctcaacccgatctcggaggcatcctaaactctcttcggcaacaccaccgaagagcaatgctcctggttgatagccgtatgatattgtgtaatccctcagttcttccttttcagccttagacagcttttggccaagtatgttttgaaaattaaaatccttttcctctgaagtctcttcggcaacctccttctctttcctaggcactggggctaaggtctcttcaacagctgtagcagcttctttcgtagccatgttcaagatcatcttatcaatatcagaaaaagtgccttctagatttgtatcttcggccgtctcagcttcggtagttacagcttcggcgggggcagcctcggttgctgcggtatcatcggcagccggtgtttttgatgc

SEQ ID NO: 74890 - DNA, 436 bp, Zea mays
agcttcgcacctccgaactaactcggctgcatcgtttttcgctgttggccaatagaatcccgacctgaagaccttctcgactagtgtcttggacgctgcgtgtattccacattgtccagcatgaacctcatccagaagttgcttcccagtagatgagagaatgcatttcatgaagatgcctgatgcgccccttctgtatagtgtctccccaatgagtgtgtagtgagctgactgtctagcgatgcgctcggctgcatttctatcgtctggctcctcttcattctttatatatctgatgatcggccttctccagtcatcagagcctgactctggttgattcacgatattacactcttctacctgatccattgagatgctcggctgtggtatttcttgtacaaagactccaggtgggacctgagttcgactagatcct

SEQ ID NO: 74891 - DNA, 444 bp, Zea mays
  unsure (1)..(444): unsure at all n locations
tgagttattntattacagaccagaactaaaagtgagtgcagagtagtaatattatacaaaccaagggaggcacagactcctcctgataagtttaagcaaaagatcctatgtggaggaccaagtcctcccgcacttcagtcttgtttttcctcatttggtaccaccttggagcaaaagcaacaaaaaattgtcgcttcctcacctaaaaacaacaaagggataaaccctgagtatggaattactcagcaagtcttacccgactaaggaaaagactctcaagggtatgctggataaataggagtcaaggagaggctttagcaaaaatcaacttatacttttgcagaagtagcttactaaagtgagtccttactttcaatcttttaacgccatattaagtattaatagactctatntgcatctagtctaatttcaacatctcatcaa

SEQ ID NO: 74892 - DNA, 434 bp, Zea mays
  unsure (1)..(434): unsure at all n locations
agcttttaaagaaaagcgctgtagattcacatgctcttctgagagatttggtgaccgccacaaaacgtggttaatttgattgcgcctcccaattaattatcgcatgtccgttcgttctaagggtgtacgtaattactgtttcttccgctctaaattgtttttttaaactttntaaagatacctttgtatttgaaaaatctaaaataactctgtagcttagccggccataataatatcattaataatgtaaggacggcgctccatctcctatagtatatattgtctgacaaccatgcacaacatatgcatgctagtctcacccgctccaatcctaatagaacggtgaaaaaaagagaaggaatatttgatttcgcgtcagtggttacactttgtcaccgttgtcgacttttacagtgccactatgcttcgtgccg

SEQ ID NO: 74893 - DNA, 425 bp, Zea mays
tttattgtctcttattggctctattgtcaaaagttggggattagtgttgattatgggaaatagggggagtttttgaaatctttgatcaatctcttttggaatgactctctttatgcttcaacatgtgggtttgacttagagatagagatttgagtttgatttgcaaaaacaaaccaagtggtggcaaaggatgatccatatatgtcaaaattgaatcaaaaccaatttgagtttttatttgaagtgattttgcacttgttctagttgctttatgttgtgttggcataaatcaccaaaaagggggagattgaaagggaaatgtgcccttgggccatttctaagtattttggtgattgagtgcaaacacaagtgcttaaatgtgaaaatatgcccatggatgaacaaagtgcaaatcacaagttaag

SEQ ID NO: 74894 - DNA, 438 bp, Zea mays
agcttcagcagaatgacagcgaaggttcttcattctcatataggcagaaatgtgctaacttatgttgatgatatcattgtaaaaagcacgaagcaagataatcacattgctgatctgcaggagaccttcgctaattttagacaggctggtttaaagttgaatccagaaaaatgtgtctttggagtgaagaaagggaaatttcttggctgtctagtttcaacaaaagggattgaagctaatccaaataaaatcgaagctatccttcgaatggaaccaccaagtacaaagaagagggctcaaatattgacaggaagactggcatctctcaacagatttatatctagatcagcagagagaaatttaccattttttgaagtgctgaagtcagccgaagtttttcaatggggaccagttcagcagagagccttcgaagagctg

SEQ ID NO: 74895 - DNA, 128 bp, Zea mays
acaacataaacacaacgatctagcgaagtccaagacgacttatatgctatatttgccgcgacgcatgcctcagctgctaggacacaaaacccgccacgtctttggaggcagtggccgatgaaatctgg

SEQ ID NO: 74896 - DNA, 422 bp, Zea mays
agcttatcagcattcaaagactctgtttgcatataatcttactatgagtggatccttaaaaagtccatttttattatcaggttaagtaattacctgcatctagagttttttctatcctagatcaaagacttggcctacactagccgtcttgtatcatcccttcagttcactggtttgctacgtgtaagtcagtgaccaagtcttcatgtccgagaagtaacgacgatccgaatcgattaatacccagctgggaatctccaaccacatgacatatgtagcacttaacccttgcatatgtcaactcgccaccgcatttctcaagaccagaatgggttcacgccaatggagagcacatatacaccaccgtccagcctcttgccactgagggtacacgctactcttgccatctctccactcccatt

SEQ ID NO: 74897 - DNA, 451 bp, Zea mays
  unsure (1)..(451): unsure at all n locations
nttccgagtgacatgcgtgcttcattggagcacgagcacaccggctaccctgacgtcgacgtcaccaagccctagttcatgcctgtgtgcatgaacggcaagcctccgtccaccatccgtccaaccaaggtcgccgtcgagttcatcttcgtcggtcgtgcctcctcgccgtgctcgcctcgacgccggtaagccaccgaccgagccgctcgccctcttcctttctgtctctgttctgggaaaggagacaatgacagcgagcgagaatagggaaaaacctgaggggttttcagcaaaccttcatagactcaagggaatagtgtccgaggacctaaaagtaggatccgcgtttggttaaaactcgaggggctaacatgcaaaatgggtttccttttctcttttctttctttcgggttaaaccatagaaagccatggaaaattcattacgtcg

SEQ ID NO: 74898 - DNA, 435 bp, Zea mays
  unsure (1)..(435): unsure at all n locations
agcttcaccccctctgctgaaagtagggccttgcgttgctcgaacgagataagctgcttgtgtcaactcgcacaccatctaaactctgggcacgcgacattattcactagttggttaggaccctcactccaaacaccgacagttgacacgccaggtaggggtctgtcgcgtgaaacacttctagttcccgccaagactctagatggcaggctttcatcatccactcaggcttgagacaatgatcaggtttgggagcctagagttcatgtcactcgacattgagtatgcaatgatactcctcccgcctgtcccacttgagcgcccaagcacccgtcgccgcccttctcgtcgcatgaggcagagacggngcaaccgtgaccgtgccactcatggcacctcgtgccctagcggagccttcgaggtggctgatggcat

SEQ ID NO: 74899 - DNA, 436 bp, Zea mays
  unsure (1)..(436): unsure at all n locations
ntgtcagggaatctaaatttattgtttgcatcattatattaacaggattttgattgtagcataagccaaactagtggagttgaaatttcatgagtgtttgaagtgaaaatgcttgaaatgccatcgtatctgcaattctttgtagggttgaaaacgggatggatataggcggatacagtgtcatcctgtatcctaccctaatgtatttctctcggatacatgaccagatacgggtagttaaaattcgggacgggtacaggatgagaccgagtaataatttgggtgggtaagaaacgagtatcagatattactcgggtagataatgggtatttgtcggatatttcgtttcgataatattagttgctcaaccgtccgacaaagaaataaaataagatatacataatcatgtacatgatagctcatatatagaaaaaca

SEQ ID NO: 74900 - DNA, 424 bp, Zea mays
  unsure (1)..(424): unsure at all n locations
agcttgaagccatggtaagtagcataggctaattatattcgaattgactcaagcctagctacgggtgcataggtttcaccgaaatccaaaccttcaacttgggagtatcctttggccacaagccgagctttgttccttgtcaccacaccatgttcatcttgtttgttgcggaagacccatttggttcctacaacattntgattaggacgtggaactaaatgccatacctcgttcctagtgaagatgttgagctcctcttgcatcgccaccacccaatccgaatcttggagtgcttcctctaccctgtgtggctcaatagaggaaacaaaagagtaatgctcacaaaaatgtgcaacacgagatctagtagttacccccttattaatgtcgccgaggatggtgtcgacggggtgatctcgttgga

SEQ ID NO: 74901 - DNA, 441 bp, Zea mays
ggagcccgtgtggaggagcttagcacggtcgttgataacttgcatgtgtactgcaatacattgcatgaggaagttcatgaattgtatttgtgactgcaccccgacgtacctgccgacccggtcagaatgggagctggaccttctagcacaacaggtgaagcatttggtggggaacaggatcttttcaagccccctccttaaatgaacctggctgatgaatggacccctacacccgacaacgaagctgctaaggataataaatactactagtagtatagtttagaaataatgttaatgtaaaataagtaatgtagtcatgttgtactttgagtttgtaacattatatcttaagtaatgtaaaatgatggtatgcatcagcatgtgatattttccaaatatttctttgcttcagatgccatctcgaactcgtgcacatgacgg

SEQ ID NO: 74902 - DNA, 423 bp, Zea mays
  unsure (1)..(423): unsure at all n locations
ccatcacttcatttttctctttaagaggaatgntgntttcacctccaatcctcactatagacacatcgtgaaaatacctacccttcatggcctcaacatgtcccttcttcacagttgatttcctgaaaacaacatgacttggcctccatggtcgctcttcggcatcatctacgtcgctatcaacatcaaaatcctcactgtcctccaaatcttcagatagcccagccaagatctcatcagttatctttttagtatttgtcttctccatggcttcgtaaaatccagctagtgcagggtcttcgcttctcttgtcttcggccatctcaacttcgattaaaggaaaaagctaaagctcgaaaatagttgcacttacattggccgtaaactaagaataagctagcacaaacttgatagcacgaaaaa

SEQ ID NO: 74903 - DNA, 409 bp, Zea mays
tgtattgcaaattcatttttggcagatgaatgcatggtgttttgttctatgtacatcgatggtttctcgactaaacataacaaaccatcaaggaatgatgatacaatagatgagtttgcttccagcttgtttggacatgcttcttctttgtttcctcctactgggaaagctttaggaaaatcatcaaatttcattttatctgaggttgagaaattgcaagtgcatagatatgtactttttaattgtgaagctacgattccttacctcaagtaagatactatacttaatgtttgatttattccatatttttattgtaattttgtgttaaatactaagtaaggagcatgcaagtcatttgaaaaggaaaagacgccaacgtcgcctaactccaaaagcaattgaacaacta

SEQ ID NO: 74904 - DNA, 432 bp, Zea mays
agcttcgggagcagaagcttcgattttttcttattcaatttgttctgtcgccttttctttagatgcggcaggcattgtcgcgataggcactgaaggcctaacttcagtttcagcttgaatttgcgtagcttcggtttcagcttgaacttgtgcagcttccgcttgcctagtttaagtttcggcctgtgatttaattttaattggaacaaatttctttactggagcatgactcaaaactttcatcgtttccagcacaacatccaacacgtttgccatccttctcctcttaggagtggcagaagaagtcttttgtatctttggcatatctgcctctatcggaaggctcagaatctttggcgcttttgttatattgtcaatctttggctcttcagccttttcagccttatcttcggctgactcagctatatgcat

SEQ ID NO: 74905 - DNA, 426 bp, Zea mays
  unsure (1)..(426): unsure at all n locations
gctttaagcccagattatgtgccttgtattatctcacccacccncagctggctgtaaataaaaagggtactgtgataattgacgagaaaaaagtagctcattaaccagcggcaacccttcctattaatggaaaaaaccaactttgccatcgattggtaaacttagatgtaatcctctattcataatttcatatgaactataaattccaaagtacaagagaagtgagtaaaggaaaatacctggtgatcagagatcttgacgggcacgaggaagaagtcattatccacctccatagtatccttccccccagccaccacctctttccgcatctttgacagacggngatcatcagcatcctgaacctcagtttccagtaccccatccttgaagagcttgacacanatctcactcatctggaaggcctcg

SEQ ID NO: 74906 - DNA, 398 bp, Zea mays
tcttcacgcgtcagaggagaaagtgcatgacgaaacctctgtgaccgtgttgcatgtggttacatgtcttatggcaatgaaggcaaagtataacttctcgaataattgctataacgatataatcaatatgattattgatctcatcccatcgaaccataagatgccaaaagacttataccagtctaaaaagattgtggccggtcttggcatgaagtataagaaaattgatgtgtgcaaagataattgcatgttgttctggaaggaatatgaagcggccacccattgtcagtgaaagggaattaggcttacacctatttcctaaatgattatggtggttgaattgcccaacacaatatattggactaactcagttgctctagtctataagttatacatgt

SEQ ID NO: 74907 - DNA, 417 bp, Zea mays
  unsure (1)..(417): unsure at all n locations
agcttcgggactattttaagcatacaatattattgtcccttcttcacaaccattgaaggatattatgagaaatagagaagctactggaagggttggaaaatgggctgcggaactcaatgagttttgcattgattatgtgcacatatcttcgattcagtcccaggcgttagcacactttattgctgactggacgccaggggctcaggaagaagaaaaacgaagtaagttgccgaagcttggacagtattntgcaatggttcttacggaaccttcggggcaggagcagtcgctgtgttggttgcaccctccaaaattaagacttgctacgcagcaagacttgattttagctgcacaaataacattgctgagtacgaagctttgcttttgggtcttcggaagttaaaggcaatgggaatt

SEQ ID NO: 74908 - DNA, 435 bp, Zea mays
  unsure (1)..(435): unsure at all n locations
tagaanaatctggaatgaatcggtggtaataaccattctttctcaaggaaattcggacttgatgtatagaggttgggggtttccactccaaaatatccttgactttgctgggatctaccgcaatccccttagcagataatacatgtcccataaattgaatctcctctagccagaatacgcacttactgaacttagcatataattgatgttcccttaagcgcgtcaatacgatccgcaagtgctgagcatgctcctcttcattcttggagtatatcaagatatcatcaatgaataccaccacaaacttgtccaactcgggcataaataccgactttatcagatatgtgaagtgggcaggagcattcgtcagtccgaaagacataactagatattcaaataatccataccgcatggtgaatgcggcctttggtatat

SEQ ID NO: 74909 - DNA, 405 bp, Zea mays
agctttgagtggagccgcgctggttgatgatgtaataaagaaaaggtggggagtgggtgccttaaatagcccaaaaacgatgcggcaccacaaaccacacgagaaagaaagagagagagggggccgaatatatatatttatttttttttaaaatgttgcatctggggaacagattgagcacaatccggtggcagacaggacaggatgaaatttctgcatgcacggcataacacagcggacatgattgccgggtttttttcatcttgtgcctggtcaaagggccttttctctctcttttttctgtttgaagatggccgtcatgtacgcgcgtgttaacatctatcctatattattatactatattattaagaaactaatacgatatctagtgctaccatgtcctct

SEQ ID NO: 74910 - DNA, 402 bp, Zea mays
tgagctaccaacatcatcttctattcacccgggtttatgtctacagcttaaccattcatccgacttactcctgtctcaaggatctgcctaccctcgccgacttggatcaagaaccggtggtgcctcgaacaattcttcaacgtcggcttgtgcgcaaaggcaacactgttgtcccacaagtattgatcaagaggacttcgcttccagaggatgcagcaacatgggaggactactatgtcgtcaccaagcagtttcccgaagcggatgcttggggacaagcaacttcttctggtgcggggtgatgtcacgcccagtgtgtccaagagagagatggggagccggatacacacatagacttatatactcgtgttgtaataagtgtgggatctctatgtcagtgtg

SEQ ID NO: 74911 - DNA, 387 bp, Zea mays
agctcatagattgagaaactaagcgaatgtgagaaacaacgtatcctaacggtgggtgtgagttcatatttatatgcccactgcgctgcagaatggagggccccgcctgtcattgattgttgctcttccagcaaagggaatgtgttttttccgaccttctgcttatagacttcatccatatcgcagtttgaatgtcgtatcttaataaattaatactgcgaggggctactgtagggggcctttgtcatcccaggtgctcaaatacatgatttaacaagtgataccaagtgtaacacgggaacatgtacctctagactcataataaacatcgacactatgagaaaggcatggtccatacgaaagatgatgcatctccgaactacatgc

SEQ ID NO: 74912 - DNA, 441 bp, Zea mays
ttcctgcttcacagcttcggcactgtgtcaaccttcgtatcttttgagcttctccctttctgatacaagtccgaagatacctgttcacacattatactccagaaacattgttaaatcatgtttttgaggaccttctgaagccgaaggcccccaacatcggctaatcgataaatagtaacaatgaatagtaacaacgatgaatagtaacaatggtgaatagtgttgttgaatagtaacgatgaatagtgatggtgaatagtcgtatgaacgaacgatgaataggaactatgaacgaacgatgaacgatgaataggaactatgaacgaacgaacgaacgatcgaatgatcggacgaacgaacgatcggaatttcggcagcataacggtaggacaaagattatctggaagaacgatgaatagggactatgaacgaacgatgaac

SEQ ID NO: 74913 - DNA, 434 bp, Zea mays
  unsure (1)..(434): unsure at all n locations
agcttttatgccatgtggaaatctttntatgatttatgcaagagaatagtggttttacccttgcgaatctttcaccacgtatgaaccctgacatcagaaatgtgatattgagagcattcttgattttttagatggtaggaagagcgcgtcgtggacagaatgaacgcattcctccgccaccgcctcctactctgcaagagctgatggctcagcagaatgagatcttgcaacagttggctcaacgtcagccgccacctcagcattatggtggtggtgatcatcagcgtcacccggcggcagccacttatcaggagttcctcggtacctagccaccgttgttcaccagggcagaggatccacttgatgcggatgtatggcttaggttagtggaatccacattcccactactcaatgtagtttggtcagatgtgact

SEQ ID NO: 74914 - DNA, 441 bp, Zea mays
  unsure (1)..(441): unsure at all n locations
ttatcanatggacgtgaaaagtgctttcctcaatggccctatttaagaagaggtgtatgttgagcaacctcccggctttgaagatagtgattatcctaaccatgtgtataagttatctaaggcgctttatgggctcaagcaagctccaagagcatggtatgaatgcctaagagacttccttatcactaatagcttcaaagtcggaaaggccaatcctactctctaaacaattgcaaaagacttgtttatatgctaaatttatgttgatgacattatatttgggtttaccaacaagtcatcttgtgaagagtttagtaggatcatgatacagaaattcgagatgtctatgatgggggagttgaagtacattctcggatttcaaatcaagtaactccaagagggcaccttcatcagccaaactaagtacattcaagacatact

SEQ ID NO: 74915 - DNA, 429 bp, Zea mays
  unsure (1)..(429): unsure at all n locations
agcttcanctccatcgatgttatggattgcttttgagtcagtccaattaccttcggcccttcttgcagcttcctgacttccatggatagcgatgggtccctgatctgaaggtatcttcatacaaagataagcaggatgaaggattgcttcgaaggcattaagagtaccacgaccaataattgcattgtaagggtattccatgtcgacaatgtcaaacacaacttgctcagttctagtgttgttgatgaacccgaaggttactgacatggtgatcttgcctaatgctacaatctgtcttcctccgaagccacagagaggatgtgtagcatcatgaatcttatcttctggctcttgcatttgtctgaaggccttatcaaatatgatgtcagctgcactgcctgtgtcaaccaagacattgtggaccagaaa

SEQ ID NO: 74916 - DNA, 429 bp, Zea mays
tccatattggttctttcctgcaatggaatgggcaacaaatctatgggagcaataggtttgaacccatatacaatttcgaaggggcataaattagttgtagaatgtactgcccttgatatgttttgtccttcctctttggtgaacctaagtaatatcaacatacacgacttaggtagcataaaattctcattagtgtttaaatgaaattcataaagtagcgtgtgcacctcttgctatagcttcttagctcggctacgtgtaattggtccatcaaagacttgggttggtgatgatgttggttgtacttgagttgatgtagtatgacttgggggttgtaacatgttgcttaatggcgtggtcatatcagtttggtttgcatcctatgccttgtcattgtgtatgtataactattaaatgtgttaatcattg

SEQ ID NO: 74917 - DNA, 419 bp, Zea mays
agcttaaagccatggtaagtagcataggccaataatatgcgaattgactcaagcctagctacgggtgcataggtttctccgaaatccaaaccttcgacttgggagtaacccttggccacaagtcgagctttgttccttgtcaccacaccatgctcatcttccttgttgcggaagacccatttggttcctacaacattttggttaggacgtggaactaaatgccatacctcattcctagtgaagttgttgagctcctcttgcatcgccaccacccaatccgaatcttggagcgcttcctctaccctgtgtggctcaatagaggaaacaaaagagtaatgctcacaaaaatgtgcaacacgagatctagtagttacccccttatgaatgtcgccgaggatggtgtcgacggcgtgatctcg

SEQ ID NO: 74918 - DNA, 423 bp, Zea mays
tgccaagccctcggacccggccggacttcaccggaggcccgagatcgacctcaccggacttcggtcttccgccgccgcgcgtggaccgagctatccagtgagtctccgcccaattccttgcgctcatagcttctctggcatcccgtggacctccatgacccatttgattgaactatctcgctgtgaccaggccggtctcctcgccgccgacgagcatccccgcctgcgcgcgtggaccgaccgactccggccatctccgacggcgttccgcacaccgttgtgatccccgcgacctccccttcgtcctcgaccacttcaccagagcaatctcgccgccggtaagcccctccgcccttttctccgccgcggttactgtttaaggtagaagaaggacctcgggttatgaatggtagaacccgaggg

SEQ ID NO: 74919 - DNA, 432 bp, Zea mays
  unsure (1)..(432): unsure at all n locations
agcttggaggcgtcgattgggtgtctacttggtgtatactcctncttcttttcttccgtcgccttgaatgcgacgggttgagcttcggatgtggtgggttcgtcaagctcgttgatctttcttgagccttcgatcatgcattcaaaacttacaaaatgcccgataacttcctcgggggtcattatagtgtatctaggattaccacgaattaattgaacttgagtagggttaaggaaaataagtgatcttagaataaccttaaccacctcgtggtcgtcccactttatgctcccgaggttgcgcacttggttcaccaagggtttgagccggctgtacatgtgttgtggctcctcccctttgcgaagccggaaccgaccgagctccccctcgatcgtttcccgctgggtgatctttgtgagctcatctccctcg

SEQ ID NO: 74920 - DNA, 428 bp, Zea mays
  unsure (1)..(428): unsure at all n locations
ngaggctggattatgtgctatgacgaaggaggatcttgctgatagtcttgcgtacaatagcctgaaggtatgggaattggatgtttacaaattttataattcgtaactcattcttttattcttataccaaccttttttacatatagggtttaattttaagcaacgcattgagagcacaaaagagtgccgaagatgagagctatgaaattgcattcaacaacctacgatcagaagttattaaactgagaaatgaagctctggaaaaggataaaattctgcttacattggtggacaagggaaaaaaggacaaagctacctcaaaggcccaggccgaagcccaaagacgtgaaattaaagatcttcagaaacagctagcttgagctaaagaagagcgtatacttgaagaaacaaaacgcgagcttagtgat

SEQ ID NO: 74921 - DNA, 437 bp, Zea mays
agcttggtctattaggaattattaaaatagttaaatagccctttgtccacttcttgctcaatgtaatcttttttctctatctctgagttgtatctctttatttgatcttctacaatatttcttatgctcctgtgatcaagcacttagcaagccacttactccaaaaggttgtgatgatcatcaaactccaaaaccaatatataaatggcttaaagcccataaattcaataaattagggtctaaatctttttagcgaccaatagtcagctgacaagttgtctctatagcaacccaccataagttgttacatttatagatttttagcgaccaacgaatcgttgctagaaacgtatttagcgaccaaccaatagtcttcaacttttagcgaccaacagttgtgctaaataagggttggtaaaactcaacagtggtgtact

SEQ ID NO: 74922 - DNA, 439 bp, Zea mays
  unsure (1)..(439): unsure at all n locations
tcaggccgncatactttagcttcgtcatacttcagcttctttatacttcagcttcgtcatcctgcacatattaaagaacagaatgagaaaggtgcaaatttcaaggagaaggtaaaagtaacaaatataagtttctcactggcttaaggtggcttcgagcttcgtcaccagccatttttcgcccaccatttacccaaatttgggtcatgaatctatttccgatgcttcgggataggcttgggatatcaaccaaatctgctgctgacaagctgaagtttggcctattcacaatttttccgtgcgtacagccagccttcagaaaagcggtagatgtgcctcgagaagctactagggcgcagaagtcagcatgcccagcaataacttcgtcaagagcatcaacctcgccttcaatatattccaaggtgctgggcaggttttc

SEQ ID NO: 74923 - DNA, 444 bp, Zea mays
ttaagcactgagctgcagctttagggaaaccatttgggactttaaatttcatttggagaaagacaggatttgtatcgcatgtcacgcagcgaagcaagttggtgttcatcatccacacaagaatatcatgacgaccgacataccactcaagctcctacacaaggacctattcggcccgatagcttacataagcatcggcgggagtaagtactgtctagttattgtggatgactattctcgcttcacttgggtattctttttgcaggagaaatctcatacccaagagaccctaaagggattcttgagacgggctcaaaacgagttcgccttaatgatcaagacaataagaagcgacaacgggacagaagtcaagaactctcaaatcgaaggcttccttgaggaggagggcatcaagcatgagttctcttctccctacacgccaca

SEQ ID NO: 74924 - DNA, 441 bp, Zea mays
tctaaagggagaacacattgtgtgactaacaaatgttcattttgagaaagacagagttttgtagcacatgtcaagcaagaaagcaagttagaacccatcatccacacaagaacatcatgacgaccgacaggccgcttgagctactccacatggacttatttgaaccgatcgctaacataagcatcggcgggagtaagtattgtcttggaattgtggatgactattctcgcttcacttgggtattctttttacagggaaaatcttagacccaagagaccttaaagggattcttgagacgcgctcaaaatgagttcggattgagaataaaaaagataagaagcgacaacgggacgaagttcaagaactctcaaattgaaggctttcttgaggaggagggcatcaagcatgagttctcttctccctacacacctgaacaaaatg

SEQ ID NO: 74925 - DNA, 383 bp, Zea mays
tgaacggttctttgtataacttaataaactacacttcccaaccttaccaaagcaagcctacttccaggcttagcaataaagcctaaccctaatccgccagttccccttttgagctaatgaaccatcatttccaactaaggctcactggtagacaccccaatcaagacagatcgaagggatgtgttttcctcctcgaatctagtcttgtcgtgtctacaggactcaagcgcggactgcaaacccttgcacagtgcacactacgcagatacaagtacacttattgagctagccttctcaagcaaggaaatactagcattcttctctgctacctcagtctgtaaggcaggacaaggagtacacacacctaataagctagacctata

SEQ ID NO: 74926 - DNA, 420 bp, Zea mays
ctataggtgatagcttcggcattgcttttgagaggatccgctgaaggtgcttctttctttaggatcttcggctacgaagcatacccccaacaggctccttcggctgggtggctgacgtttattgaagagaggtgtaatgaaatgtgtggaaattaccttaatagagagcacgaagatatgcaatctgtctttgggaaccgagggaaacttcggcttaacagagttatggatgctctagggtttgaatacctagattatgaagatctttcggccaatgtcggagctggagagaaaaggaagagagctactaagagtgaggttgacaaagatccaccctcgggtctggcaaagaagaaggctaaaatgtatatttagaaagatatagttgtgaagaagaccttggctccaaaaaaggccata

SEQ ID NO: 74927 - DNA, 433 bp, Zea mays
  unsure (1)..(433): unsure at all n locations
agcttcctcaaatacgggcttcggtttctactccacaggatgggtgnggaagtgttgaacaagtatgacatatttatttatcaactaacccacggaataaacggaggcctcgttcctttattgaagaataatgaggttggggtcttcatctatgcagtgcgaagccaaggcatggagcccaatgcagaatgcttctgccagatcccaatggggctcaatccccaggtacccctcatagacggcggtgaagatggccacctgagcaatcgagttagggttgaagttgtgacctccatcccgtagaaatgcgcaagagcccgcatgaagcgactcgccggaactccaaacccccgttcatggaacanagtgaagctcaccacatagcccgcggcagagccaacatctactcgtcgcccggcgcataccactcgag

SEQ ID NO: 74928 - DNA, 423 bp, Zea mays
  unsure (1)..(423): unsure at all n locations
tcttcagagcaaggcttcggttccctctatatgatataatttgagaggttttgaagaactntgaaatataccttcatcaactgacaccaaatgtaattgttagacttactgtctacatctgggtcctccgaagccaggggatgagtcctaatgccgaaactttctgtcgagtgcacgagctgcattaccagacgaagaccaggacagatggccttcatgagaattttggttgctacaatttcgcgtattgaaaggatacgaaggcaccggttcttagctaccgtactaagtggccaactggttggaagagtgaatggctttatatgaaggcagacgaggaaaagagggaaaagctgatgactatggtcatgagtccactgatattgagcttttgaatgacaaagcccttgtgacatatgcagc

SEQ ID NO: 74929 - DNA, 417 bp, Zea mays
  unsure (1)..(417): unsure at all n locations
agctttctcttagtgtcgcttttcatcctcatactgatggtcagncggagcgaacgatacaaaccttggaagatatgttgcgcgcttgtgttctgtcttggaagggtagctgggaagatcatcttgcattggcagagtttgcttataacaacagctacccggctagcatcaagatggcaccatttgaggttttgtatggcaggcggtgtgtctcccctctgtgctgggagaccttgggagagagatacctggttagtcatgattgggtaaagcagacttctgaaaaggttcgggaaattcgtcagaatattttggctgctcagagccgttagaagagttatgctggtgtgaggaggcggngattggaatttgcagtgggtgacgaagtccttctcatggtatcacccactaaaggag

SEQ ID NO: 74930 - DNA, 422 bp, Zea mays
tcgtcctatccaccaccccttttagcttcaacattctctatccgccagtgtcaggaacactttattagcaaggaactcctacactaagtcttgtgtgctaatttgctcgatcatcgtgctgaagctaacttgggctatctgtgtgggcgagcccagactcatgttgcaaattagtcatgtcaagtcaaagtttaagctcattgggctcatcacaatctttttaaatttatccttgcccttaatatcagccttcatgtaaaaccactcactagtccagccagttggccactttgtgcgatatcctaacaatggagctctcgcatcttttctgtacgcaaagttgtaacacccaaaatccttatgaagatcgtctggagatctttcctttgtttggtagtgaagctcatgaatctagcaaaaac

SEQ ID NO: 74931 - DNA, 453 bp, Zea mays
ttaagtcacctgctgcatgcaagctgggcaacaacaactgaatgaacatgcttctttcgactcaaggcatctgcaaccaaatttgccttgcccgggtgatagtgaatctccaaatcatattccttaataagctccaaccaacggcgttgcctaaggttgagatccttctgagtgaatatatacttcaaactcttatgatccgtgtacacttggcacttggttcccatgatataatatctccaaatcttaagcgcatgcactacggctgccagttctaagtcatgagtggggtagtttaactcttgtttcctcaactgagtagacattcacatgtccttcttgcatgagcacacatcctaagccttggccacatgcatcacaatagttatcaaatcccttttgtagatctggcataaccaacactggtggtgacatcaatctcttctttaattg

SEQ ID NO: 74932 - DNA, 437 bp, Zea mays
tcataacccctagtgggacttactgctaccttctgatgccttgagggctcaaaaatgctggaggaagcttcaacagaatgactgtcaaggttctcagctctcatattggcatgaatgttctgacgtatgtcgatgacatcatagtgaaaagcatgaagcaagaacatcatgttgccgatttacaagaaacatttgctaatttcagaagagctgatctcaagctacatgttgggggtatgcttcgtagccgaagatcctaaagaaagagaacaccttcgaaggatcctctcaggagcaagcgccgaagctactatctatagagcttcggcataatgacaaatctcaagacgaagggccgaaccgacttaaagatggattgacttaaagacccatgatgttttgtgtcattattgtagtcgattgtaagggcataaatg

SEQ ID NO: 74933 - DNA, 416 bp, Zea mays
agcttgaagccatggtaaagagcatatgccaataatatatgaattgactcaagcctagctacgggtgcatatgtttcaccgaaatccaaaccttcgacttgggagtatcccttggccacaagacgggctttgttccttgtcaccacaccatgctcatcttgcttgttgctgaagacccacttggttcctacaacattttgattaggacatggaaccaaatgccatacctcgttcctagtgaagttgttgagctcctcttgcatcgccaccacccaatctgaatctttaagtgcttactctaccctgtgtggctcaatagaggaaacaaaggagtaatgctcacaaaaatgtgcaatacgagatctagtggttacccccttatgaatgtcgccgaggatggtgtcgacggggtgatc

SEQ ID NO: 74934 - DNA, 420 bp, Zea mays
tgcttcgacgccgggtcctctatcaacagaagctgtttcttgccgtatatcaacacgcagctcatgtcttcgaaaactgcacggatggccaatcaatccatggttatcacccgctcccctgaataataaagccagacagagcactcacttgggttcatggtgagggggaaccccaactctttggtgaagaagtcctgcctggtgaccttgcacatgttgacgcacatacccacgcagccgctgctcttcaggtacccgcacttctcgatgcgcaccccgcttgcctgtcggacgccttctacctccacctacaccacctttcatgggccgacgaaccaacggaagaagggcacggtcaccgcctcgttgaactcacatgcccaccgcgtctgcgggaacaaacccctgaactgctcccgc

SEQ ID NO: 74935 - DNA, 418 bp, Zea mays
agcttgtgaaggttcttcatccccacatgtgctaagcggcgatgccacagccagcccatgctagtcttagctattaagcatgcatctagaccggcctcttcttttgcaaaatcaactaaataaagtttgccgtctaatacacccttaaaagctaatgaaccatcgcttcttctaaagacagacacatctacatttgtaaatagacagttatatcccatatgacataattgactaacagatagcaaattatatccaagactctctactaaaaatacattagagatagaatgctcattagaaattgcaattttacctaacccttttaccttgccttgattcccatcaccgaatataattgaatcttgggaatccttattcttgacgtaggaggtgaacatcttcttctcccccgtcatat

SEQ ID NO: 74936 - DNA, 440 bp, Zea mays
  unsure (1)..(440): unsure at all n locations
ggccaatacttatcaaagcagcagcatttaccaacacagcaactgcagaccatacccgtaacatggccatttgcgtgctggggactggacatgattggacccttcaagaaagctcagggaggatacactcacgtgctggttgccatcgacaaattcactaaatggatagagtacaaacctattgcttctctgacttcagccaaggcagtagaattcatacaagatataatattcagatttggaataccaaatagcatcataaccgatctaggatccaatttcactagctctgaattctttgatttctgcgaacaacggtgcattcagatcaagtacgcgtcagtagcacatccaagagctaacggacaggtagaaagggctaatggaatgatattggaagcactcagaaagaaagtcttcgacaagaatgaanagttcac

SEQ ID NO: 74937 - DNA, 439 bp, Zea mays
  unsure (1)..(439): unsure at all n locations
agcttaggtccaatggactctgaactagcttcttcttcttttcatcaatcttaacataaaaccattcagttttccaaccggttggccatttggtacggtagctaaccaccggtgtcttcatgtctttgcggtaggcaaagttatagcagctgaaattctcgtgtagtccatcttccctggccttcgtctgatagtgaagttcgtgcacccgacagaaggctttggcatgcggctccactccttgacttcggagagcccagataaaaacgctgagcttaacgataacgttaggggtcagctgatgaagataaatttcgaaattctccaagacatccgcaatcattccatgcagaggaaacctcaatcctgctgtgaaaaaacttctataaactatcacctcatcatcttctagctntggaatagtntcttccacaccgaa

SEQ ID NO: 74938 - DNA, 440 bp, Zea mays
tcaccaactacgatgacgcatgcgaccactattcccacatgccatctgtcaacccctgatgggacgtacaatacgacaagagtgcaggatggctctcggacgtgaactctgcctcgctgaaggcgacctcggcctcgggacaaacttcgcctcgcctgagcccggcctcgtttacctgctccccgcgaatactggagcgggctcggtcgtgacctcgggcggacttctgcctcgcccgagcccgactctagcctcaatatccacaacggaaaggcgcccaacgtcaccatatactgcagagctgacatattacttagggactttttgccatactcagtactgtgtcaaccactacggcatgggcaacccccttgtcaggggggctcgggtacgtgaccaagcgctcagcccttgcctcggctctcagcagagatcaagcg

SEQ ID NO: 74939 - DNA, 410 bp, Zea mays
  unsure (1)..(410): unsure at all n locations
agcttggcattcaaggaagaattcatagcacggtcttcgtctatgaatgtagttacttgatcaagatctgcttgattctgcgcacacctttcctcagcatcagaacaccgccgactcaatgctgaaaaaatcaaaagtaatccgtgacataagcagaaaagcaacaagcaaaaaaggagttatcaacccactaaccggcattcgaagctttcagatcatctatttgcctttgaagaagaagagggctccactaggatagagatgaaatctgattaggaacaagaatgccacatgacttcagctgagccgatactgagtctaggatactctataaatatganagtcaacagggaaaacatccaatgataagggtagatgattaggggtgcacgtacctaaaggttggaaag

SEQ ID NO: 74940 - DNA, 426 bp, Zea mays
tctacgtatatatattttgtattaattacaagatccaactctttttatctatggttctagatttatcttggtcttgcagtcgggattgccataagactggtgtccacgctgaggtgagcggtacgggtgctaagtcccgacgggagcgggggaaccaccatccaggtgacgacgttccgcgcgctcagcccgcagcagggcgatctcagcacgagccctactcagctcgtctaatgcatggtccagctccgtgtttagcacggcggctaggttgactgtgctgctcaacctacgattgccctcaccgacaggtgagacaatcacgcctcctgtgctgccggatggacggtggtggtaatacttcaggtcaagaccgtcagctgctccaccgaaaaccgagcagtaatgcgaaagcgcacgccgtgc

SEQ ID NO: 74941 - DNA, 430 bp, Zea mays
  unsure (1)..(430): unsure at all n locations
agcttcggcgnctctggttatttcttcttcctgagcccctggcgtccaatcagcgatgaagtctgccaacgcctgggactgaattgaggatctgtgcacatagtcaatggtgaattcattaagttctgcagcccatttcccaatccttcctgtagcttctctgttcctcataatgtccttcagaggttgtgatgaaggaacaattatgcgatatgcttgaaagtaatgccgaagctttctggaagccattaacacaacatatagcaccttctccaattctgtataatttttctttgacaggcttaaaacttcgaagacaaagtacactggagcttgctttttgacttggccatctagcttctcctgtactagtgccgcactcactgcagaatgcgaagctgcaacatataagagcaatggagcccctagc

SEQ ID NO: 74942 - DNA, 435 bp, Zea mays
  unsure (1)..(435): unsure at all n locations
nggaaaaatctggaataaattggcggtaataaccagccagtccaaagaaacttcggacttgatgtacagtggttggtggtttccactccaaaatatccttgactttgctgggatcaaccgcaatccctttggcagacaatacgtgtcctaaaaattggatctcgtccaactagaatgcacatttactgaacttagcatataattggtgctcccttaggcacgttaatacgatccgcaaatgccgagcatgctcctcttcattcttggaatatatcaaaatatcatcaataaacaccaccacgaatttatccaactcgggcatgaataccgagttcataagatatgtgaagtgggcaggagcatttgttagtccaaaagacataaccagatattcaaataatccataccgcgtagtgaatgcggtcttgggtatat

SEQ ID NO: 74943 - DNA, 428 bp, Zea mays
agcttctccaccatgtcgctgctagccaagttgttgcttctacctccatcaatgatcaaacgacatgaacgcttcttaatgacacactttgtttgaaacaacgtatgtcgctgattctgctctgccttctccatttgtgcactaagcacacgctgtacaatgaggctctcataatgctctgcatcatctgcaccaatctgttcttcgggtggttccttattgcctacatcatcagccgcaagcaaagcaagtgtatcttcatcctaatcactagcagaggaatacccaccatcgtctgttaccaccaaaacacgctgattaggacaataacgctgcacgtgtccatagcccttgcatcgataacacagaacatctcttggtctacctgcggaagctactgaagaggcactacctgcgggtttctgggc

SEQ ID NO: 74944 - DNA, 451 bp, Zea mays
  unsure (1)..(451): unsure at all n locations
tgtattgcaccccatgtccnccgatgctattttgaaggatgatattgctagagcttgcaaagagaaaaataaatctgttcataataaaaatctaggtgctgcaaaggagttggtacaacataagagtgacaattctaaatctactcaagtgaggaagacagaaatacaactgaaaagtgcttgttttcttgcttccaaatctgatttgcttgaattaaatgatgttgcttcaatctgctatgtatttatttgcaaggatgctttgttctcacttcacaacataccatctactttgccttctactgtcactaatcttttgcaggaatatgctgatgtatttccaaacgaagtgccacctggcctgccaccgataagaggaattgagcatcagattgacctaatctcaggggcttccttgccaaaccgagcgccatacaggacaaacccggaa

SEQ ID NO: 74945 - DNA, 433 bp, Zea mays
  unsure (1)..(433): unsure at all n locations
agcttcgtactcagcaatgttatttgtgctactgatatcaagncttgttgcataacaagttttaactntggaaggtgcgaccaacacaacagctgctcctgctccgaaggttccccaagatccatcgcaaaatactgcccaaacttcggcatctttactcgtttcttcttcctgagcccctggcgtccagtcagcaatgaagtctgccaacgcttgggattgaatcgaagatctatgcacataatcaatacaaaattcattgagttccgcagcccattttccaacccttccagtagcttctctatttctcataatatccttcacacagtgtgaagaaggaacaactatattgtatgcttgaaaatagtgccgaagcttcctggaggccatcataacagcatacaacaccttctccaattcttgataatctttc

SEQ ID NO: 74946 - DNA, 440 bp, Zea mays
gcttgctcattaaaggtaacatatctaccattataatttgtcttattctggatatctaatcaagtgataaactatactcaagttgaattaggtgtttcttccgaatatttttctcacatgatgataacctaaaagatattattagttaatcacccaaaacttgcgaaaactatatctcctaaaccgtaactccgaatttagtggttctcgagcccacgatctcatagcgacgcgtaaatcattattatgcagattgtgcttatgtttggtgtgatgttaattttgcctataccatgtttgtttgtatggtaatgattagtagtgaggttaagaattttgaagaccaagctggtacctgggaatcttgagtctcaagcaagttgtgccgttgatcactcctttttacctaataatgttcgttgctaatcactgagacatgc

SEQ ID NO: 74947 - DNA, 194 bp, Zea mays
agcttgtccaccttctgtggtggtatatgctttttggtaacaacctgatgcagaaaactcgatctggcactaaaataagagatctttgtgcctagccatgaaatatttgcatcctgttggaagccaaaaagggccacgcggacggtctagccctgaggccggacggtccgcggtccggactgttctgggtggtg

SEQ ID NO: 74948 - DNA, 435 bp, Zea mays
  unsure (1)..(435): unsure at all n locations
tgccctgatcctaaacatataatcacaaagataagattgtgagatagggattggagccttgtctccatttgtagagacaacattcttcaacttatcctttgtgttactcaagtttacctttctttgagttgtttcatccttggaggagtggatcctccctaaggcattttacaaggtgtaccttctatgaacttaggggatctccaccccttatgctcaatgctagggttcaccttataaatgttgtacccaagcccctttttcccattgttgttccttaagggtttgtacttaggctcaacttttctcaatccatcattgctagagcatcttttcaacacttgtttgacctcagtctttgaaccatttttcctagcatggntagttaagcaacatgtagcatgatattttaaacaatgtttacatgtgctaatg

SEQ ID NO: 74949 - DNA, 433 bp, Zea mays
agcttgggatatctaacaaatctgaagctgttatgctgaagtttggtctgttcacagagtttccatgtgtgcagccagccttcaaaaaagcagcagctgtgccccgagaagctaccagggcgcataagtcagcgtgcccaccaataacttcggcaagggcatcaacttcgccttcaatatgttctaatgttcttggcaagttttcagctgaaggtgtaaatttcgaagagctagctccgacagagtgaaacacgtccttcagccgctgcacacatcggatgccgaagcttaagcatttttcctgaagttctgtaaatgatttctgcagatttgagtatttatccacttcagtcttcaggcttgcttcaaaatatttcttttcttgctcgaatttttctgattgacggagcaattcattctttaatttgtcatt

SEQ ID NO: 74950 - DNA, 415 bp, Zea mays
  unsure (1)..(415): unsure at all n locations
tcatgatctttgattntcttttctaggccctcgattattatctcattctttntatcctcaagattttgctgcatccttagtgctttgcttagtagcatactctatacaaaatagccttcatcagaattttttgcttcatcacaaaaattaaaaagatgaggaaaaaagctttaccttaaagttggaatagaataagctaccgacgatatgctgtcgccggtaactgctaatgtcagcttcaagcttcagaaaaccaacactcctcgacagagtgctgataatcttcgcccaagtgtggtctcgattgcatcctaaggcttcttcgttgattccaccaaaggccatggctcctggttggtagccacaggatatagcatacttctgcagcttctccttctcgaccttggataattct

SEQ ID NO: 74951 - DNA, 424 bp, Zea mays
agcttttctttaaccccgaaacgcgatactttcttcattggcgaaacctttaggtagacatagtctccctcaagaaaatataagggcattcgccgcttgtctgcataacttttctgacgagcttgagctttcttcaaattatgaattattttctgaaccttttcttcggtctctttcaccatatcaggcctgaagaagtacctttcaccgggttcagaccaatttagtggagtacgacatcgtcgtccatataaagcttcaaagggtgccatattgatgctttcttgatagctattattatatgagaactccgctaacggcaaacattcatcccatttttgtgggaattccagaacacatgcccgtagcatatcttctagtatttgattgaccctctcagactgtccactggtttgagggtgat

SEQ ID NO: 74952 - DNA, 415 bp, Zea mays
tctccaacctctgactgtaaccaaccatattgattacgtgtggcccaactgttgcgccttctgctagcttgcattccagaaaggctttggacacattgaaccttttagtcctagcctgagtctggaacatatccttgagcgccacgatcatatcgtgcacctcatggtttgtctcaaactgcatctgcagctcaggctccatgcaagcaagcattaggcaactcacttcaagattagtatccattgctttcttgtaagcggttttagctgcagcagttgcattttcaccaggatcctctggtagtggggtgtctagaacgtcttccttttttcagccttgagaacaattctcaggttacggatccaatccgtatagtttggtccatttaacttatccttctcaagaattgatcgc

SEQ ID NO: 74953 - DNA, 348 bp, Zea mays
agcttgaaggactgcttcggcaggagagctttcttacgtgaagacttgttcggtccacggagtcgctttatccgaccgcgagttacttatcgcagaaggtgatgagtgaggtatccgtatcccggaggcgtaggagtccctcggctcggtcagccttggctgcttacgtgtactccgtcgtttccaggatccgctttccgaagtagtcaagaagcacgaaagaaatcctgctgaaaagagatcctttttcgaggaaaatttcaacgcagagggggttcccccccttttagcccccgagggagggtcgggcttttgtcacgcgacgccgacccttccttgatgactaaa

SEQ ID NO: 74954 - DNA, 452 bp, Zea mays
ctcagcttctcatgtagcacccttcggatctcccctccctcccttctatgtctctttcaccagctggatccaaccgtccattccacactcccctggcccctcaccctcgctggtgtctaggcatgggcgtcgcctatgagacgaccaagagtggcgtcggcgtcgcctccatgggcgtcatgcgcctcaagcttgtcatgaagtccatcgtcctcatcgtcatgggcagagtcctcggcatctatgacctcatcatcgccgccatcatctctgccgggatcaaccccaaggccaagcccaagccctacttcttagacggctacacacacctctccttcgaactcgcatgcagccttgctggcctcgctgccggcatggccatcagcatcgtcagagacaccagagtcaggtattgtactactctgattgcagtgtgtatgcttgaacatata

SEQ ID NO: 74955 - DNA, 399 bp, Zea mays
  unsure (1)..(399): unsure at all n locations
gcttctaagcactagagttgattttgggagcttggattggattgaatgctttgaatgtgtcttggagtggttggctttgctcttgcaatggatatggagttcataaaacttggatgccaatgaatgaggtggttggggtgtatttataacctgcaaccacttcctagccgttggctgtttttgctggcgatgggcacacctgacagtccggtggtgcacccgacagtcactgttcactgtccggtgtgtgccnnnnnagtacacccattgtggtttggagcggacgaccagtggaaccctttgtcctgtagttgtaccagacagtccggtgccacaccggacatgtccggtgtgctttgacttctgcgctctgacttctgctgcgcactgttcacaact

SEQ ID NO: 74956 - DNA, 357 bp, Zea mays
tcgtcagatgcggccctagaggacttagcagcttgataggtaaggattcagtcatcacctttaaaatttcttctacttcggtagtagaaggcgttgaaggagcttcctcttctatctcagccatcttcggctctggagttgcagtttttctcttcttcgaagtcgccaccttcggctcaggactggattctctctttttcagagctttttcttcctctttcaccatcctagcagcctgtctgctcagaacactgacaaccctttttctctttgtcccttcagcacccttgtttagtcgttcataatcagggtattcaaagtttaaagcatccattacccaattcaaccttctttttg

SEQ ID NO: 74957 - DNA, 409 bp, Zea mays
agcttctagaggaggaacaatatatttctatatacttatttctatccacaaaatacttactttcttctctttgctaagaactacaattccttttggattttaaattccactttggactttaatattttttttgccacatttattattttattttgacaccatgtgcacacaaaataaaatacccgcatgatgcataaattattggagtgtattttattaattacttattggtgtaagggaggtgcccgcatgaaatgataagtatggatgacacctatctgcaaaggaatataatgtctcttttttatactcttatgacaaagaggggattacaaatcctacccaccttaaaaataatctcgtccttctgatttaagaagatctatgtgaagagtgaggaaaatctatg

SEQ ID NO: 74958 - DNA, 413 bp, Zea mays
ttaccttgattcccaaaagccagcatatacttgagagtcttttttcttacacgggtaagacttgcgaaagtacacttttgtgcttagggttttcgaacccatgttgttgtaagtactaaatttgtgctgttattgatggcgctaagtgctggtgggctcggccttcttatatgttaaaccagctcttcaatacttcttattgaggattgtcattgagctagcatatatttcaaacttataaataatttataacatttcgaagcatatttctttgaatcacttttgtaatcactcggataaatataaatgaaatatagtgtaacttgtaactttttgtaataaagaaattccggtgcaaatgttggtgtgtgacttgtgttaactaaacttgcgatcctagtagaagtggctta

SEQ ID NO: 74959 - DNA, 440 bp, Zea mays
agcttgctacaggccttcttctttttctccacagcaggaaccttactggaacactaccccacttaaaaagaatgagggtagaactcttgaatcttggggatttgaactccttgaagtacctcataacaagggtgttacgaggccttcttctgctattgctgcttgaccaggctacagagagatgactgtcacagggttgattctaggagaaccttcttcttatcttctcttcactatcttcttttctcttctcactgcctctttctttctctttgctcttcccactggaggattctatcaaagagtattaccatcatacagaggaggaaaccaaagactatgaaccatgtacaacagtcttcaacccaagaaaatcaccaagcattgtgatcttaggggcgagggagtggaaaatggagtttcttgcgatttggcagaag

SEQ ID NO: 74960 - DNA, 421 bp, Zea mays
gacctgcacgcatgcaagcttcatacctcgctgcattattggaggccttatttttcagccggagggcatatctgatgtgctcgcctccaggtgcggcgaaaagaattcctgcccctgctccctgcaacttcagcgagccatcaaaatacattcgccacacttctgaagtctctgggttatctgggacttgctgatcaatccactctgatacgaaatccaccagtgcttgagttatgatggccgtgcgaggacggaactctatgtcatgagatcccaattcacaagcccatttggctatccagccaatggcctccttgttgtgaagaatatcctcacttggacaactggcgactactattacattgtgtcattaaagtatgacgtactcgcgggcagctcatagactgatataatagctctg

SEQ ID NO: 74961 - DNA, 427 bp, Zea mays
  unsure (1)..(427): unsure at all n locations
tcataccatctcttnctcctacaaagcttgtcaagcacattttggtacccatcgctagatgggtccgtcaaggttagtaagcagagatctaggaacccaatagtcctttgtgttagcacttggtaaacttattacctttctaacacaaggtgcaattttggggtgcctagatatatatgaatcaaatgactagctatgagtggaggagctaccaatgggacaatcattgcattgatgtcccttttcccggcatatgtagcataggcgttttccaagttttgaagatttcttctttccttgtttgtcgctcgctacatggatagtaaaaactgtcttttataacccaatgccctcttgttttaaatggggacaagatttagtaaagtgttccttctttgaacatttaaaacagaggttatcatccttg

SEQ ID NO: 74962 - DNA, 429 bp, Zea mays
  unsure (1)..(429): unsure at all n locations
agctttactgtttgcaaaaccgggtcaaacatatctccatacaacgacatagacatagttaacatccaaacattttgaaccatgggtgttggttataaactctcattcatatccacctagccaataaaaacacatatttttatgtgttatattctagccaataaaaacacatattntctgccaacaatctatcgtggtacacgcgaggacaagacaaactcctgctcttggctgtattggcgtgagccgtgctggctatcaggcatcggaatagcatgactaatcatatttgntctctttgctggatgtgcccttggagcaacatcttgctgacaccttaacatttgtagcctcatcttcacatccttcatggtaggcctgtcctcccttgttaggctgaagcactcctctgccagttgagccatgcct

SEQ ID NO: 74963 - DNA, 387 bp, Zea mays
tgccgtctagtacacccttaaaagctagtgaaccatcacatcttctaaagacagacacatctacatttgtaaacaaacagttatatcccatattgcataattgactaacagatagcaaattatatccaagactctccactagaaacacattaaagatagaatgctcattggagattgcaattttacctaacccttttaccttgccttgattcccatcaccgaatattattgaatcttgggaatctttgtttttgacgtaggaggtgaacatcttcttctcccccgtcatatggtttgtgcatccgctgtcgataattcagcttgaacccccggatgcataaacctgcaagggcaaattatgcttgggtcttatgtaccccactcatg

SEQ ID NO: 74964 - DNA, 428 bp, Zea mays
agcttgcatcatggaacaaatcttacacgatgatcttgcccaaattcgcgaagatatgcgccctatcggcgttagaacaggagcagaagaaaccatgcgtccatgccacgtggtcgatcgcggctgacatgcccggtgcacgccagcccgcgcacccgcgccgagccgtgcgcgcccgctccggtccacgcccgcccgtgcaccgtacccgcgcctttaaaagccacccccggacgcgcaacacttcactccacgcttgccctcactgtcccgacccagttcttagctccggcgagctctgcgccgcccgcccgagccacccgagcgccggccatcgtggccagccattcctagagacacataacctcacccgagcctctggacaggttccccgtggagccgtgaagcttcttcaagcaaggatcgag

SEQ ID NO: 74965 - DNA, 423 bp, Zea mays
  unsure (1)..(423): unsure at all n locations
tctnagggaaagcacattntaggattaaccaatgttcattttgagaaagacagggtttgtagcgcatgccaagcaggaaagcaagttggtgcccatcatccacataagaacatcatgacgactgacaggccactggagctcctacacatggacctatttggcccgatcgcttaaataagcatcggcgggagtaagtactgtctagttattgtggatgattattctcgcttcacttgggtgttctttttgcaggaaaaatctcacacccaagaaaccttaaagggattcttgagacgggctcaaaatgagttcggcttgaggatcaagaaaattagaagcgataatgggacggagttcaagaactctcaaatcgaaggctttcttgaggaggagggcatcaagcatgagttctcttctcctaca

SEQ ID NO: 74966 - DNA, 434 bp, Zea mays
  unsure (1)..(434): unsure at all n locations
agctttccatgatttcactactccccagtattagttttatgatatacctcaacacaaggacggagccagcaaaagttttatgagggactgaactaaaccactacaatatagtcccttctacattacctcaacacaaggacggagccaacaaaatttttaggagggactgaactaaaccactacaatataggagtcccttctacattatattctacattataccgcgcacgcttaatattttagtggagactccagtgaggcttcatgggctcggcagcggtagagggtgttgagtttgtgatctaaattctgcatatggagcccnccgcggtatatattagtgaccctaattagggtttgctgtgcatcgtcttttttactcctcttgtaagccatcgtctatgaacaacgttctgtaaacactccacatatag

SEQ ID NO: 74967 - DNA, 436 bp, Zea mays
tgtgaatggcttgtcgaagcgacaaaagctgcaggttggttgtccacatattctggtatgtagggagaatggcacgaagcagtatgtaagacttgcttcggcttattctaccgggcttctgctttggcgatctctttttgcttttgaatggtgatctgacatgttcttgtcgtgtggtccttgtcttcaccacaaaataagcaatagatttttctaggttgatccccatatctacctctgaagcccctgccgcctctgccccttggagccggtggcctgaagaagctctgctgctgtcctgaagactgtgaactgtgctgtggcatctgaaactggcctcctttgtcatcgttctgactggagctgtggattgatctgatatgcctggggaggactcttcctccgaagcccctagtcatcttaaaaaacctataag

SEQ ID NO: 74968 - DNA, 434 bp, Zea mays
  unsure (1)..(434): unsure at all n locations
agcttgcattgcatatttaaattccttgtattgcatctaagacttgtctaacctagttgagataaccgccaacaaagcgagtgaaaaagcttaactcgggtcaaacctgacaagtcttagttttaagcttttagcacttaaattcttactttttatgcaattattggttcttgaaatgtgcatgaggtactgcacttatggggagtattcaaaactcaaatcactcatgaaaaccccgagtgcaaaccaaaatgcaaatttcaccatttgcctattttctctaaaaattatctagcctatggcgaaatattttgataaatatatgagggtgccaatacctgtcccaacaagtgttattttgtgtgattaataagtgggatgtggtttggttaggagttagatagaaaaattcanaattttccacactcccctct

SEQ ID NO: 74969 - DNA, 437 bp, Zea mays
  unsure (1)..(437): unsure at all n locations
tgctgcagtactccgtanaacgccatatagtatgaccatatccagataatatttaccacacagcagattaattcctcatggcttggatctgaagcagctgcagtactccgtatagcaatgtcaagcagagactgccgtataaaatggacaaagaaagcagaaacaaaaccaaagaagcagcagctttttcataatcagagttgaccaaaaaaatctgcttttgtcatggcacaaacacacagaaaacgcatatgagacaaacctgaagtttttcagcggatatttcttctggtttctttgtaagctcctctcgagcaatatccataaaatggaccaaaaagtcaccctgtaaactagataaaacagataagataagtagctcaaggaaaatcaatatggatggtcaaaatttaatcacgaaacatggcattcattat

SEQ ID NO: 74970 - DNA, 429 bp, Zea mays
cagctttcaagagagtttagcatgagtacatctattgtcccaaatgactcaactctatctagcctagtaccccaagggtgcaaaagctaagctagctgcgaggagtccgactatccaacttctaagcctatcctgaacacctagtgagcgaacgaagtaacactcgactcgggggaaggtggtcttcccgagccacagtgtccacactggaggcaggctcaactcctccctcgatgtcgacgtcttcgttggcctcctggtcctggatctcctggtgatgcatgtccaggtgctcgttagcctcagcgagctgctgctgagtgttaaggagctgatcctctataacctcgatggtgttctccctggtacccaccagctcctccaactcctgaatatcagtggataactgctccacctgcaagtccttct

SEQ ID NO: 74971 - DNA, 400 bp, Zea mays
cacttatgtaagggatacataatacaattttttttgatgacctactgaattttatcctaatattgtgtggtttaccaaccacttaatctccgttgaggcaagtctaaggttgccatcaattctgtaacacctcgtccactctcgggccggtggtacttactcctgacagacctataagatcatagatcatcctcatatacacaagtctttttgtgcacactttgtgctcactcattgcgcacgcgagaagactatccggtcaatcacccatcccaaaattgctctagaccaaacacgattaaaccaaatgatcttttgagataggctttcgaaaaagaacatacaccttgttggtatgaatattctatcaattctattaagccttgtgcatggataccac

SEQ ID NO: 74972 - DNA, 326 bp, Zea mays
tggaggcgtcgattggaagcctacttgatgtagactctttcttcacttcttccgtcactttgaatgcgacgggttgcacctcgggtgtggaggtggcgccttgctccaagttgacaatgtgtttggagtctttgatcataagttcaaagctcacagacttgccaatcacttccttgagagacattagtttatatctaggatccccacatattaattgaacttgagtaggattacgaaatacgatggatctaagaataaccttgaccatatcatggtcatcccatttggggcttccgtggttgcgcactatggtcaccatggtcttg

SEQ ID NO: 74973 - DNA, 415 bp, Zea mays
  unsure (1)..(415): unsure at all n locations
tagcttgagttntgagagccctatatagcatatgacccttgactctctcaaataaggaccttgccacccagatttgtctaggtctactcttgtttggtggacctaagaatgtaaccttaacctttccatttgctacctttcttataacataatgagcattgaaagcaaatggtcttgagtgcctacgccagggagctggcggtttggcttttcagttgtgggcaaagtgaccttcatttccacactcatagcatttgataggcttgtgagtctactctggcttgtattgagtggtagctttcttttgcacaaaagcattgtatccaatatcactctttgttgttttcataacactgttcatacacacctcattttggaggaattgacctctgttgaactttcgcacacttgctgc

SEQ ID NO: 74974 - DNA, 438 bp, Zea mays
tactcagcttctgagggagaacacgtgagaggtatgactgacgttcttttttaaaacaagagaccttgcgcagcctgtgcagcaggtaaacaagggggacgagcacatcacaggaagaacgtgacgaccgctttgagacccctggagctgctgcatatggacctcttccgacctgtcgcctatctgagcataggagggagtaagtgtggtctatttattggagatgatttttcccgcttcacttgggtgttctttttgcaggaaaagtccgaaacccaagggaccctcggacgctttctcacgagagctcataatgagtttgagctcaacgtgaagaagataagcgcgacagcggatctgagttcaagaatcttcaagtggaggaatttctttgagaagaaaggatctagcaagagctctcctctttctacacacaac

SEQ ID NO: 74975 - DNA, 434 bp, Zea mays
agcttctaaagggagaacacgtgataggcctaaccaatgttcatttcgaaaaagatagaccttgtgcagcttgtcaagcaggtaaacaagtgggaggagcgcatcacagcaagaatgtgatgaccacatcaagacccctggagctgctgcatatggacctcttcggacccgtcgcctatctaagcataggaggaagtaagtatggtttagttattgttgatgacttttcccacttcacttgggtgttctttttgaaggataagtctgaaacccaagggaccctcaagcgcttcctcaggagagctcaaaatgagtttgagctcaaggtgaagaagataaggagcgacaatgggtccgaattcaataaccttcaagtggaggagtttcttgaggaggaggggatcaagcacgagttctccgctccctacacacca

SEQ ID NO: 74976 - DNA, 440 bp, Zea mays
  unsure (1)..(440): unsure at all n locations
tctatagggagaacacattntaggattaacaaatgttcattttgagaaagacaggatttgtagcgcatgccaagcagggaagcaagttggcactcatcatccacacaagaacataatgacgactgacaggccactggagctcctacacatggatctattcggcccgatcgcttacataagcatcggcgggagtaagtactgtctagttattgtggatgattattctcgcttcacttgggtattctttttacaggaaaaatctcaaacccaagagaccttatagggattcttgagacgggctcaaaatgagttcggcttaaggatcaagaaaataagaagcgacaacgggacggagttcaagaactctcanattgaaggcttccttgaggaggagggcatcaagcatgagttctcttctccctacacgccacaacaaaatg

SEQ ID NO: 74977 - DNA, 430 bp, Zea mays
  unsure (1)..(430): unsure at all n locations
agcttgccgtctaatacacccttattggttattgaaccatcacttcttctaaagacagacacatctacatttgtaaaaagacaattatatcccatattgcatagttgactaacagatagcaaattgtaaccaagagactcaactaaaaacacattaaagatagagtgctcattagaaattgcaattttacctaacccttttaccttgccttgattcccatctccgaatataattgaatcttgggaatccttattcttgacgtaggaggtgaacatcttcttctcccccgtcatatggtttgtgcatccgctgtcgataatccagcttgaacccccggatgcataaacctgcaaggcaanattaggcttgggtcttagttacccaactcacgttgggtcctacaaggttagtgcatatatccttagggacc

SEQ ID NO: 74978 - DNA, 433 bp, Zea mays
tggcgatggtgtgctcagtgccaggcagggttcggtttatatggatacgaggagagcggcccacgggccacggcgtactctgtggggcaaaaatccaggcgaacttcaaacgatttgttacagcaagcgcgaaagattccgccaatatcgtgttctgttgggatgaactcatggcgaggatgaaaggctgaacacgtgggtccacgcgtcggtgtaagcaagagcacgacggctggtgcgaccggtctgtggggtccacccgccagtggatccaatagcgggcgtgagcggtagtggctatcagatgggactcacgcgcaacaacgatggcgcccagacgtgcgtgcgagtggtaatggccgaggggcccattcgtcagtgacatcatataatggaagatgggggccgacgtgggtcaattcggcccaccacc

SEQ ID NO: 74979 - DNA, 413 bp, Zea mays
tgagaaaatctttccacctgccttctatgatgtcatggtgcacttgagtgtccatcttcccgatgaggcaatgcttagaggacctgttcagtatggatggatgtacccaatagaaaggcgactaggcactttgaaaaattttgtaaggaacagggctaggccggaaggatcaattgctgaggcatatatggcaagtgataccttaacattttgttctatgtacatgaaggatgttgacactagatttaaccaggatgatgatagtggtacagagatgccattgcctaatgacatgtctgttttaagcatggtgctactcttggtggagctactaagactgaatacatcgatgatgctatcatgaataaagtagattggtatgtgttacataatgctgatgaagtcaggaatat

SEQ ID NO: 74980 - DNA, 435 bp, Zea mays
agcttgagctgctgccatgcaaccagaatgcggaggataagatcctacgtgatcatccatggaagtgtgagagggagaaccaactcggacaccctcgagggctgggtcatagctcgcgctgcccatccgagccggatcatccccggcgacaccctcgggggctgggtaagcgctagcgccatccttgagggccgagctctctgtaacggtcacctctaaggctgaaggaccttcacgcacttccatgggagcagaacaatccagaccagcctcctgacccttaagaccgcgctctaaggtcgatgaggcacgagacgctgcttgagataactccaatccggcatcaggcacatcagcgcaaacgtccatcattccaccatctgccggctctgacaatagatcttctgggaccatgtcttcaagagtctgatcaat

SEQ ID NO: 74981 - DNA, 433 bp, Zea mays
  unsure (1)..(433): unsure at all n locations
tnnctatggtgccttggcagggcctgactgcctgtcagtctcactctgtcaagtggcaccgcagtcngagtggtgcaggcggcgctgtccttctgtcaggtccgtcagtggagcggtgaagtgacggcggtcacttcggctctgccggctgggggcgcgcgtcaagataaaggtgtcaagccacctttgcattaaatgctcctgcgatttggtcggttggtgcggcgatttggtcagggttgcttcttagcgaaggcagggcctcgggcgagccggaaatatgttcaccgttggaggggggcctcgggcgagacggaaatcctctggggtcggctgcccttgtccgaggctaggctcgggcgaggcatgatcgagtcgctcgaatggactgatccctgacttagtcgcactcatcaggcctttgcagctttat

SEQ ID NO: 74982 - DNA, 435 bp, Zea mays
  unsure (1)..(435): unsure at all n locations
gcttcagcatctttatttgcttcttcttcctgatcccctggcgtccagtcagcgatgaagtctgctaacgccttggactgaattgaggatctatgcacataatcaatgctgaattcgttgagttccgcagcccactttccgatccttccagtagcttctctgtttctcatgatatccttcagaggctgtgatgaaggaacaattatatggaatgcttgaaaataatgtcgaagcttcctggaggccattaagacagcatacaacaccttctccaattctgtataatttttctttgataagcttaggacttcgaagacaaaatatactggggcttgctntttgatttgtccttccaatttctcctgcacaagtgccgcacttactgcagagtgtgaagctgccacatacaatagcaacggagcccctagcatgggt

SEQ ID NO: 74983 - DNA, 437 bp, Zea mays
tgtctggtggaatcaaacgaagctccagtttgaagcctgcttcttcagagaaaaaaaaacttcggaagaaaaaagtgttaaatttgcacacattcgtaatcaaatggccagagtgcgttctaccaccagggttgagcgtgaggggggcgaaactgaagcttcggagactgttcccatctccaaagccatgcaacgatctgggctggtgacttccgaaaagatccctagtgatgatgcagaacaagcagaacaagcagaacaagcaatcgctgaagcagaggaagaagatattgaggaaactgatcccgaagatgattaccgcattgccatgccaagcaagcccagccacttggacttcgggaaatctactgtttcaaaggctgatctttccaagatggtaaagtcgggcttttttaatgaaaatcagaagaagctat

SEQ ID NO: 74984 - DNA, 448 bp, Zea mays
  unsure (1)..(448): unsure at all n locations
gacctgcggcatgcaagcttcgngaaaacattcttcgaagctataaaatagttttatgttgcctctctgacgaagctatacctcttctcaatttatcttgtgctttagcacgattttctctttttccaaaacattcttcgaaaatcaatactgtgtccccttcttgttctgcatgcaatatgatgtatgatgcttatgttatgcaaaatgatgaaatgatgttatgctatgcaaaatgatatttatgccgaagaacacacatctttgcaatagggcacacaatctttttatctcagcgctgacttttcgctgtaagcctcccttaagagcttcttcgccttttactttcagcggaatcagcgtntatttctcgctgtaagtctcccttaggagcttctttctcttttactttcagcggaatcagctgttatttttcgctgtaagtctc

SEQ ID NO: 74985 - DNA, 372 bp, Zea mays
tcgtgaactatcctccgaagcttatcttcacttcgattcgtcttcttgttctcttttccaaaacatgctccaaagattaacattgtatccccttcttgttccagatgcagtatgctgtatgatgcttatgttatgcaaaaatgatgtgatgatgttatgttatgcaaaatgatttttgtgccgaagatacacacatccctgcaatagagcacacaatctttttgtatcagcgttgacttttcgctgtaagcctcccttaggagcttcttcgccttttactttcagcggaatcagcgtttatttttcgctgtaagccttccttatgagcttcttcgccttttactttcagcggaatcaacgtttatttttcgc
